United States Patent Application Publication US 2005/0228172 A9 - sequence listing, part 155

SEQ ID NO: 705520 - DNA, 2093 bp, Homo sapiens
  misc_feature 618, 619, 620, 621, 622, 623, 624, 625, 626, 627, 628, 629,630, 631, 632, 633, 634, 635, 636, 637, 638, 639, 640, 641,642, 643, 644, 645, 646, 647, 648, 649, 650, 651, 652, 653,654, 655, 656, 657, 658, 659, 660, 661, 662, 663, 664: n = A,T,C or G
  misc_feature 665, 666, 667, 668, 669, 670, 671, 672, 673, 674, 675, 676,677, 678, 679, 680, 681, 682, 683, 684, 685, 686, 687, 688,689, 690, 691, 692, 693, 694, 695, 696, 697, 698, 699, 700,701, 702, 703, 704, 705, 706, 707, 708, 709, 710, 711: n = A,T,C or G
  misc_feature 712, 713, 714, 715, 716, 717: n = A,T,C or G
gggaaggttagaatgtaaaaatacaaacccatggttctttcacaagctcgacagtgcaacatgccatttatgttagctttatgtcctctcaaaatggctttgattaataagaaggtaatttgaggctgaggtctttgcctttgaactaaggaggtaaccaaaaaccattgttagatttttactttagcacaggaaagaagaacagaaagaaactgtagatccttggatgaaaacaatgggaaggcagaagtctggagatccatatgacaagtcatattaatgatctacaatctgagacgtgtcccagaagcatacagagacctatgaaagacataactcatttacagtacgattacatggcaaaggtgaataaaaagctgccctttttatgagcatgtcttggcaaataatccaatctcagatgccaaagactggaatgcatcaactctgtgcattgacatttcctagagcaacagattgtccccaagcccattccattgcaggtcactcccagcatgcatcatcattccatgatatgcatcacccaggtatcctcatgtgagaggattcatgctcaatatttctatttgcagctcaatatttccatttcaaaattannnnnnnnnnnnnnnnnnnnnnnnnnnnnnnnnnnnnnnnnnnnnnnnnnnnnnnnnnnnnnnnnnnnnnnnnnnnnnnnnnnnnnnnnnnnnnnnnnnnaaaaaaacaaacaaccccatcaaaaagtgggcgaaggacaggaacagacacttctcaaaagaagacatttatgcagccaaaaaaacacatgaaaaaatgctcaccatcactggccagagaaatgcaaatcaaaaccaccatgagataccatctcacaccagttagaacggcgatcattaaaaagtcaggaaacaacaggtgctggagaggatgtggagaaacaggaacgcttttacactgttggtgggactgtgaactgctgctgctctttctacacctttaaagaggcactcagcaagcacctttagaaaccatctaactctatggctttaggcaacgggatctcaaaatcccgcgacccgagacgaatgagaatagttttggtatatgaaatcaagaaaaaagcagatttatattttatgtaatcataaggtaatatcaaaaatgacagtaggataaggtaaccacaaataaggccattttgaataaatatttggaacggcagagggaaagtttattaagtcctgttgtcatattaaataaaagccacgcccatgtgctttatgcaaaatgattctatgttttatcaaagtgaaattctgaacatcaagcctcagaattagtcaaagtggctacaaaacatttgaacagacaaggaactctgacaaagatgaatggtgcaaggaggagctgcttccaaatttagcagaaaaaaaattacagtcaccttaatgaagaaagagggttatgtgcagaaaacttggtaaggctgcacactcacagcttccttgaacattctgctggctggaaacatgtttgtcttagtcctagattccacatcataattgaagtttttatggcactaaaacttctaataagtacattttacaataatgygtgttacaaactgagcatacatgtcctcctagaagtcatatgttgcagtcctaaccccgccaacacgattgtatttggagtaaggaagtaattaaagttccgtgagttaataagggtggggtccggatcagatacgaattgtgtaagatacacgacagcatttcctctctttctgtcccgttctgcaggtgcacaaagaagtcacatgagcacacattgagaagagcaagcatttgaactccaaagagagagacctcaccagacaaacactcctagcgccttgatcttgaacttccaatcgctagggctgtgagaaaataaatttctgttgttgaagccacccaatccacagtactttcttacagcaacataagaaggctaagactgcatactgtatgctgccactgcacctacatacttcatagaatgctacacagagatactcactagttatgtggccacaaaagcaataataatcc

SEQ ID NO: 705521 - DNA, 648 bp, Homo sapiens
gaatggcacacatcacagatttccagttgtccttagcatccctccttacccactgccttcttcgcagtaacagtcactaactcctctttggcttttggggcgaggggatcttcccctttagtgggagggtaagaagacacgagaaggaaaataaatgcacagaaaactcccctaggggaacactatttcaacttgcgaattgttcaagaagcagttgagccaccagtgaaggcagatgaatatcacagttggttgcggacaggggcactcaggagcctcccttaaggcagtatggcagatgcctgctgtagagacactgtctccatcctgtctggatccctgggggccttccgcaccagccaaacctacaaatgccagaatctgcatctcttttgcctgaggacttttggggagggggtgctggagcctgctctgccctgcagggaaggctgaaagtgacagtgacagagaattaagaaccccacctccctagaatgtaaataccgcagctccctcaccctgcaggtgagatcactgtgaggcatgttctgttctgtctcctagagattcccartgagattaagctcctattgcctacagaggtaacttgctggataatgtgccgtctattttctgccttcccttccg

SEQ ID NO: 705522 - DNA, 661 bp, Homo sapiens
taatcccagctactcgggaggctgaggcaggaaacttgcttgaaactggaaggcagaggttgcagtgagccgagatcatgccactgcactccagcctgggtgacagagtgagactctgtctcaaaaaaaataaaaaataaaaaagaatatgtcagtttatagagaagactgaaaataggaataagaatgatgcttgggtgcaaaaagtcatatctaattcattgctaagtctccacatttttatgcaacatcggagcaaaaagaggaggacatktatactagaggcaaccaacctgggactcaagtatccccaggccctagttggactggccagtgactgaagggaccaacataagattgaaccacagcatttagaaagctgtgtgatagatagggcttctgaaactttagcatgcataaaagccaccaggaaggcttgtgaaaacacagattgtgggctcccacccctagaaatctggttcagtaggacaggggtagggccaaagtgtcagcatgtttaacaagtttccaggtaacgctgatgctgcagaatgcagtggaaatttgaagaggactttgtaacttcaccattgtttgcagtattctgaaaggcacatatttctttagtaatcaaaaaataaaagagttgaaaaatgcgtct

SEQ ID NO: 705523 - DNA, 677 bp, Homo sapiens
atgagacacttgaaaccctgtcaagtgataactgtgtcactgtgatttgtggcatgccaagccacattgcraagtagtgatagcaccctacagtgtctctatcacaactactcaatctgccattggagcacaaaagtagacatggacaatatgcaaatgaatacatgtggctgtgttccaaaaaaacattatttatggacactgaaatttgaaattcatgtcattttcatgcatcgtgaaatattatttttcttttcatttgtttcaactattagaatatgtaaaaaaaaaaaaaacatttttagcttgaaggacctgttaaaaacagatggcagtccagatttgactgcaggccataatttggtgaatggaagattgtttcaagataaagcctagaaaacagccactgggccaggcatggtggctcacgcctgtaatcccagcacttagggaggctgaggcgggcggatcacctgaggtcaggagtttgagaccagcctggccaacatggtgaaaccccaactccactaaaaatgcaaaaaattagccgggcatgatggcatgtgcctgtaatcccagctactcaggaggctgaggcagcagaataagcttgaacccagggggaggagatggcagtgagccgggatcaagacactgcactccagcctgggctgtaa

SEQ ID NO: 705524 - DNA, 677 bp, Homo sapiens
atgagacacttgaaaccctgtcaagtgataactgtgtcactgtgatttgtggcatgccaagccacattgcaaagtagtgatagcaccctacagtgtctctatcacaactactcaatctgccattggagcacaaaagtagacatggacaatatgcaaatgaatacatgtggctgtgttccaaaaaaacattatttatggacactgaaatttgaaattcatgtcattttcatgcatcgtgaaatattatttttcttttcatttgtttcaactattagaatatgtaaaaaaaaaaaaaacatttttagcttgaaggacctgttaaaaacagatggcagtccagatttgactgcaggccrtaatttggtgaatggaagattgtttcaagataaagcctagaaaacagccactgggccaggcatggtggctcacgcctgtaatcccagcacttagggaggctgaggcgggcggatcacctgaggtcaggagtttgagaccagcctggccaacatggtgaaaccccaactccactaaaaatgcaaaaaattagccgggcatgatggcatgtgcctgtaatcccagctactcaggaggctgaggcagcagaataagcttgaacccagggggaggagatggcagtgagccgggatcaagacactgcactccagcctgggctgtaa

SEQ ID NO: 705525 - DNA, 1092 bp, Homo sapiens
aagctgcagtcaactatgatcacacactgcgctccaacctgcatgacagatcaagaccttggctctaaaaaataaaaagcaaaaacaatataaagctgcagaacagtgtaatatgcttcacaaagaagggtgggaagaccatgaaaatacgcccagttgatttttattgaagatgcaaaagcaattcagtggaagaaggtttgatagccttttcaacaaatgggactgaagcaactgtacatccacaggcaaaaaaatgagcctcaactaaaacctcacaccttatacaaaattaactcaaaatggatcacagacttaagtgtaaaactataaagcttttagaaaaaatataaggaggaaaatttttggatctagggttaggccaaagagttcttagacttgacaccagaaacatgatccattgaagcaaaaatttgattaattggacctcatcaaaatcaaaaaattttgctctgcaaaggatctgttaagaggatgaaaaaacaagctatggaccaagagaaaagatttgcaaatcacatatcttataaaggctagtgtctagagtatataaagggctctcaaaactcaacagtaaaaaaaaaaaaaatgggcaaaagacatgaatagacatttcactgaagaggatatacagatggcaaataagcacatgaaaacatgtttaacatcattagctattagggaagtgtaagttaacaccaccatgatatactacttttcagaatggttaaaattcacaaattgtgacaaaaatgtttaacagatgggagagagagctttaggtaagaggatcctctccaccatccatggtggggataggatgattgatagatagatagatagatagatagatagatagatagatagatagatattttttttgagacagagtcttgctctgtygcccaggctggagtgcagtggcgtgatcttggctcactgcaagctccgccttccaggttcacgccattctcctgcctcagcctcctgagtagctgggactacaggcacccgccaccaagcccggctaattttttgtattttttttttagtagagatggggtttcaccg

SEQ ID NO: 705526 - DNA, 1092 bp, Homo sapiens
aagctgcagtcaactatgatcacacactgcgctccaacctgcatgacagatcaagaccttggctctaaaaaataaaaagcaaaaacaatataaagctgcagaacagtgtaatatgcttcacaaagaagggtgggaagaccatgaaaatacgcccagttgatttttattgaagatgcaaaagcaattcagtggaagaaggtttgatagccttttcaacaaatgggactgaagcaactgtacatccacaggcaaaaaaatgagcctcaactaaaacctcacaccttatacaaaattaactcaaaatggatcacagacttaagtgtaaaactataaagcttttagaaaaaatataaggaggaaaatttttggatctagggttaggccaaagagttcttagacttgacaccagaaacatgatccattgaagcaaaaatttgattaattggacctcatcaaaatcaaaaaattttgctctgcaaaggatctgttaagaggatgaaaaaacaagctatggaccaagagaaaagatttgcaaatcacatatcttataaaggctagtgtctagagtatataaagggctctcaaaactcaacagtaaaaaaaaaaaaaatgggcaaaagacatgaatagacatttcactgaagaggatatacagatggcaaataagcacatgaaaacatgtttaacatcattagctattagggaagtgtaagttaacaccaccatgatatactacttttcagaatggttaaaattcacaaattgtgacaaaaatgtttaacagatgggagagagagctttaggtaagaggatcctctccaccatccatggtggggataggatgattgatagatagatagatagatagatagatagatagatagatagatagatattttttttgagacagagtcttgctctgtcgcccaggctggagtgcagtggcgtgatcttggctcactgcaagctccgccttccaggttcacgccattctcctgcctcagcctccygagtagctgggactacaggcacccgccaccaagcccggctaattttttgtattttttttttagtagagatggggtttcaccg

SEQ ID NO: 705527 - DNA, 1223 bp, Homo sapiens
ctggtctcaaactcctggactcaagctgtcctcccacctcagcctcccgaatgctgggattacaggcatgggccacctcaccctgccagaagtggcatttttgaggagccaagtgaaggacaatatttcaggcagagggaatagtatgggcagaagccctgaggtaggaaggagcagctgggctccagagaggggatgtggcttgcctgagaccacagagaaaactagtgcttcctttcattgtcccctcataagctgagaactacagaggggagaagtgggcacaggggccacaggccagcttccctcaggcctatttggataacgttatgaactgccaaggtggtctgagaatgaggtggtgggtcaggtcccttcagccccattctgagagaaggaaggggacagaacccaggcactccagtgcctctcagggacttggaggataatccttggccacatggggctttccagcagggggaacagcaggaaaaggcctagaggtgggaagctgcttggtatttctgagaagcagtggtgggcagtgccagaccatgcagcgcctcatcatccccaaggttaggagtttatcctgagagccatgagaaactgtgaagagttttagatggggacagatgggtccagtcattttactatgttggctctggctgccatgtaggagaggagcatgtggcagaatggggctgggtccccagctagctggggaccagagccagcaaagacccttccagcctgcagaccagctgtcctgggggagggtgtgggaggtggtccaggcagccaggtggcagcagcacctgacaagtgtcatctccctccgggcaggtgggcagggtggccctgcactgggctgcaggtgcagggcacgagcaggctgtgcgtctgcttctggagcacgaggctgctgtggacgaggaggatgcggtaggggccctcacagaggcacgtctgtgtgtacgtgtctgtctgtctgtctgtctcagggtggtggggggcactggagatctctctgggtctatgagccagttgccgagattgctgctaatatgcagacattcrggtgcagagtggtggggagtcagaggcttcaggcgcagggacactgcactgattctgttttactcctgtacagcaatgaagagctctccactttcaagggtctttcagttctcagagagccttttcagtccctcatgatacca

SEQ ID NO: 705528 - DNA, 1223 bp, Homo sapiens
ctggtctcaaactcctggactcaagctgtcctcccacctcagcctcccgaatgctgggattacaggcatgggccacctcaccctgccagaagtggcatttttgaggagccaagtgaaggacaatatttcaggcagagggaatagtatgggcagaagccctgaggtaggaaggagcagctgggctccagagaggggatgtggcttgcctgagaccacagagaaaactagtgcttcctttcattgtcccctcataagctgagaactacagaggggagaagtgggcacaggggccacaggccagcttccctcaggcctatttggataacgttatgaactgccaaggtggtctgagaatgaggtggtgggtcaggtcccttcagccccattctgagagaaggaaggggacagaacccaggcactccagtgcctctcagggacttggaggataatccttggccacatggggctttccagcagggggaacagcaggaaaaggcctagaggtgggaagctgcttggtatttctgagaagcagtggtgggcagtgccagaccatgcagcgcctcatcatccccaaggttaggagtttatcctgagagccatgagaaactgtgaagagttttagatggggacagatgggtccagtcattttactatgttggctctggctgccatgtaggagaggagcatgtggcagaatggggctgggtccccagctagctggggaccagagccagcaaagacccttccagcctgcagaccagctgtcctgggggagggtgtgggaggtggtccaggcagccaggtggcagcagcacctgacaagtgtcatctccctccgggcaggtgggcagggtggccctgcactgggctgcaggtgcagggcacgagcaggctgtgcgtctgcttctggagcacgaggctgctgtggacgaggaggatgcggtaggggccctcacagaggcacgtctgtgtgtacgtgtctgtctgtctgtctgtctcagggtggtggggggcactggagatctctctgggtctatgagccagttgccgagattgctgctaatatgcagacattcaggtgcagagtggtggggagtcagaggcttcaggcgcagggacactgcactgattctgttttmctcctgtacagcaatgaagagctctccactttcaagggtctttcagttctcagagagccttttcagtccctcatgatacca

SEQ ID NO: 705529 - DNA, 602 bp, Homo sapiens
aaaaaacattcacatttctaggttttcaagcaaggggaagtaaatacaacaaaatggttacaaaagtgttgagaggttgaaggagccaaaaagggaacaatgctattccccagggaacagtacctgtgagaagctgttatcacccctagggctgcaggagcaaagggaacttggtattatctagagtccataagtgctggggggtagctggggcgagggagagcctgctgctgaaactgcctgtgtaatattgtcatcaccacttttcaggaagccaggagcctatatttttgcagaagcagaagttgctgatgctgttggatttgctgccacagctgccatgaatatggtgctattgtgttagctggcagtctcctgcagttgcttgttgctgccacagccagaamcacaggctcattttgaatttcctgcaattcagagaagaggaataatgggcaggaatggaactgagagccaacagacaaagaaatggcacaatgagggaaatttccctagcagatttaaagacattctacaaaactatagtaaaaaaaatagcatagtattcattcgaaaacaaattgtcttagtgtgtttgggct

SEQ ID NO: 705530 - DNA, 600 bp, Homo sapiens
accagcatcaggatggctactgtaggacacaaaagagaaaaatcacatcaaaaatagaataaacctttccctgttacaacttctccaagtctcagaagcctctgaggtcctgcccgcaggccctcggctgctcggccggatctacttcagcgcctcctgacaaggctgagcttgggttcagaatgccaacttgagaggcttcttatctttcctgcaaactgagaactttgattkttttatcttgctcaaatcctagccaaggggcttggggaatgtgccctacgaaccgtgaagtctcacaggagggattttatttaaccctacatattgtggcctgctttccaaactgactctggcacgtcacataacaaataaggaagggaatcaaaatattttaaccccgaatatattttcttgccattatcttgaaattaccctgcaacaaggttgtctcttgtgggaataatccattttctgtagagaatcccctttcccccactttttcgttctttgcagacccaggaaacaatcatctaagagccaggcacccttttaagcccaacaagaaacattttacaacctactccctctgaagtctca

SEQ ID NO: 705531 - DNA, 642 bp, Homo sapiens
ttcatcatgcagtagctccaaaaacccttttaattagtaatttttaatggcggtttcattgcatrgacatgattgattattaataaatgattggccactggtgattaattcagcctccagtcctcccttctccagaggtcgagagggagggttgaaagttctaaccctctaatcacatggttgattcccttggcaaccagcccttattctgtgattatttaaaggctttccaaaaatcacctcagtaatataaagtcaggcatggttacaagatttgttgtaagacatgcaaatgcttcatgaaccaaggacaaaatacgaaatattacaacacaagatgctcctattgctcttatcacttagaaaattacaagggttttaggagctctgtgccaggacatggacagaaagaccaaaatatacagtttacccttgaacaacatgcgggttaggagtgctaacccctgcacagtcaaaaatccacatataaacttttgactacccaaaaactttactaacagccctgctattgactggaagccttaccgataacataaacagccaattaatacttattttgtacattataagtactatatactatattcttacaataaagtaatctagagaaaagaaaatatt

SEQ ID NO: 705532 - DNA, 885 bp, Homo sapiens
tggcagaagccattaaggccttagcacagtttaaaactgccctgtaacatggmttttatttgggccttacatttttttcccttttctcttttttaaagccattgctcatagggatttaattacagtagggactatttttaacattctttagtttctttttcacctgatttcaaccttcaagaaaagtgaaaatcaccagtttcctgggaaaccattaaccctttctagatagccattgtggtaaaatccagtagggcctcattctgaaatcctcgagtacatgcttattatttgaaattaaagttttatgtagagaaatggataactcctaggctgactgtgagaatatatttaatcaagaattagtgggggatctgttatgtgtagggctttgctttaatgccaaaccaagtaaggaagaaataaattagaataaagcatttcttagattgtttcacatttatgtttaaaaatcttacttttcaaaaatagtaaacatactctagagcaaaagaatttgtgttataaatagtagaggaaatagccacatacatgtttgttttgtaggtaatttgcacagagactgtttaatactccagtcaaatgtttccgatagatataactgtaccatattttacattattgaattagccttctaaatagagttttaaacatttaaaggcatattatataatacttaagagtctttgtcctttggtattgagtgtatatagcactgcatgtccttttgtcaatttggccaaaacatttggagaagtgaagtagctgaaataataagcatttggcttattaggttcacgttagccagaaacacttcctgtgtcagtattaggctttctaatagcaagttgggattatattaga

SEQ ID NO: 705533 - DNA, 885 bp, Homo sapiens
tggcagaagccattaaggccttagcacagtttaaaactgccctgtaacatggattttatttgggccttacatttttttcccttttctcttttttaaagccattgctcatagggatttaattacagtagggactatttttaacattctttagtttctttttcacctgatttcaaccttcaagaaaagtgaaaatcaccagtttcctgggaaaccattaaccctttctagatagccattgtggtaaaatccagtagggcctcattctgaaatcctcgagtacatgcttattatttgaaattaaagttttatgtagagaaatggataactcctaggctgactrtgagaatatatttaatcaagaattagtgggggatctgttatgtgtagggctttgctttaatgccaaaccaagtaaggaagaaataaattagaataaagcatttcttagattgtttcacatttatgtttaaaaatcttacttttcaaaaatagtaaacatactctagagcaaaagaatttgtgttataaatagtagaggaaatagccacatacatgtttgttttgtaggtaatttgcacagagactgtttaatactccagtcaaatgtttccgatagatataactgtaccatattttacattattgaattagccttctaaatagagttttaaacatttaaaggcatattatataatacttaagagtctttgtcctttggtattgagtgtatatagcactgcatgtccttttgtcaatttggccaaaacatttggagaagtgaagtagctgaaataataagcatttggcttattaggttcacgttagccagaaacacttcctgtgtcagtattaggctttctaatagcaagttgggattatattaga

SEQ ID NO: 705534 - DNA, 885 bp, Homo sapiens
tggcagaagccattaaggccttagcacagtttaaaactgccctgtaacatggattttatttgggccttacatttttttcccttttctcttttttaaagccattgctcatagggatttaattacagtagggactatttttaacattctttagtttctttttcacctgatttcaaccttcaagaaaagtgaaaatcaccagtttcctgggaaaccattaaccctttctagatagccattgtggtaaaatccagtagggcctcattctgaaatcctcgagtacatgcttattatttgaaattaaagttttatgtagagaaatggataactcctaggctgactgtgagaatatatttaatcaagaattagtgggggatctgttatgtgtagggctttgctttaatgccaaaccaagtaaggaagaaataaattagaataaagcatttcttagattgtttcacatttatgtttaaaaatcttacttttcaaaaatagtaaacrtactctagagcaaaagaatttgtgttataaatagtagaggaaatagccacatacatgtttgttttgtaggtaatttgcacagagactgtttaatactccagtcaaatgtttccgatagatataactgtaccatattttacattattgaattagccttctaaatagagttttaaacatttaaaggcatattatataatacttaagagtctttgtcctttggtattgagtgtatatagcactgcatgtccttttgtcaatttggccaaaacatttggagaagtgaagtagctgaaataataagcatttggcttattaggttcacgttagccagaaacacttcctgtgtcagtattaggctttctaatagcaagttgggattatattaga

SEQ ID NO: 705535 - DNA, 588 bp, Homo sapiens
agtacatagctttaatcacaatagcatctatgattaccctggcccaccaatttaggaaccactgctatacaaacaaaatgactagcagtacagctctggctcttgctcagatcagtttcctaaatttggatacatttctaacagcctgctggccatttatattgttttggtcgactgttcttaagcttaacttttctaaaataaattatctgtctttctcttctctctatacctttcttttctattataatacatacccaagaaataccttgatattagcccagtgagacctatttgtatttctgacctccaggctaaaatataataaatttctgttgttttaagtcactaagtttatggtaatttgcctacatcagcaacaggaaactamtacaaaggaggaaacacgttctcgaagatacagtaatatatatacaggagaaaaagataactttttccatttttaattacaatagtattaaaacaaaatcctgacctccgccccaccaaccaccaaattgaggaagttcttacaatgccttaagatttgtacagtataacaggaacttatttatccattgaggcata

SEQ ID NO: 705536 - DNA, 588 bp, Homo sapiens
agtacatagctttaatcacaatagcatctatgattaccctggcccaccaatttaggaaccactgctatacaaacaaaatgactagcagtacagctctggctcttgctcagatcagtttcctaaatttggatacatttctaacagcctgctggccatttatattgttttggtcgactgttcttaagcttaacttttctaaaataaattatctgtctttctcttctctctatacctttcttttctattataatacatacccaagaaataccttgatattagcccagtgagacctatttgtatttctgacctccaggctaaaatataataaatttctgttgttttaagtcactaagtttatggtaatttgcctacatcagcaacaggaaactactacaaaggaggaaacacgttctcgaagatayagtaatatatatacaggagaaaaagataactttttccatttttaattacaatagtattaaaacaaaatcctgacctccgccccaccaaccaccaaattgaggaagttcttacaatgccttaagatttgtacagtataacaggaacttatttatccattgaggcata

SEQ ID NO: 705537 - DNA, 1894 bp, Homo sapiens
tgcacagtttaaaaaccacaggagtggagcccagaaagcatccaaatgcatacaaacatttagtaggtgataacaacaaggaacatcaaatctgtagaaaacagaaggtttactcaaggaatagtgaagtaaaagtctatccatcggaaaaaaaaattaaaacttgaatctctacattacactaaaattaagactgtaattattaaaagaaatatgtttatagttgtgtggtaataccacttaaaacttccactaaagtcagaaattataacagaagactgctatattcaactgcataaaaatgtaaaatctctgtattgctaaaaacaccaagatattagaagacaaatgacaaactaggaaaaaacatgttatcatatatggcaaagattagtatcataatataaaattacatcttatacagcaatctggcaagttaaaaatattatacctttagacccagaaatgtaacatctaaatatttattctaaagaaactgagacatgcactcatgagcgtatgaacaaaactgtgtatcaacattgtttattatggtaaaataaaaacctttgaaactgcctaaggacccaccactaagaaactgactaaaagtaaattttcagccactactatgatgtgtattttcacaggctgatacagtaaataaaaagacttccaaatagtataaaatagtacaacttcagttttatagaaataaaaacattttaaaatgtatcaaatrtgccttaaaagataatctggaaaaatttacaacataatgtcataatggctatctcttagtagcagaagtagagattatctttattttcttcttttataatcacatggacaaagaaaactatctaaaataaagtgatctgagctctaataataaacatttaatagtaaatacctaatttttaccattagtttttactattagtaaggcagttacactatagtaaggcagctctatctacctaatctattttgaatatttggttaaagacattatctttaattctgacataaccctagaaagggttattatccccaaattacagatagggaaactaaagcttcaagagggtaagtgattcgcacaagatcacatcactgagtaaggatttaaacccctgctgttctagttctgctgtgactggaaaggaaaacagccactcatatcacactctcagcttcacttatataaaaataagaatatttgaagtaaatattctccatcaattatatttttcattttctacaattttctatgtctaaatataagctcatagcacttactgaaaaaagcagattccatcatcatgcccctgacacctacaaggaaacaaatcacaaaatctgtaatatatttcacaaaataaacatgctgaccttgtctacatatcccttcacattattccctatacctctcaagacatggtctggctctgtgtccccacccaaatctcatcttgaattgtaatccccacatgtcaagggaggaaccaggtgggaggtgactggatgatgggggtggtttcccccaagctgttcttgtgatagtgagttctcacgagatctgatggttatatatgtgtttgacagttcccccttaacacgctcttgtctccctcctgtcgccttgtgaggaaggcgcctacttccccttcgccttctgtcatgactgtaagtttcccgtggcctcctagccatgctttctgttaagcctgtggaaccgtgagtcactaaatccctttcttttataattacccagtctcaagtagtattctttatagcagtgtgagaacggactaacatacctcattacaccccaaaatgttcggcaatccagtatctaatggaaatacactagaacttacaagaagctttt

SEQ ID NO: 705538 - DNA, 1894 bp, Homo sapiens
tgcacagtttaaaaaccacaggagtggagcccagaaagcatccaaatgcatacaaacatttagtaggtgataacaacaaggaacatcaaatctgtagaaaacagaaggtttactcaaggaatagtgaagtaaaagtctatccatcggaaaaaaaaattaaaacttgaatctctacattacactaaaattaagactgtaattattaaaagaaatatgtttatagttgtgtggtaataccacttaaaacttccactaaagtcagaaattataacagaagactgctatattcaactgcataaaaatgtaaaatctctgtattgctaaaaacaccaagatattagaagacaaatgacaaactaggaaaaaacatgttatcatatatggcaaagattagtatcataatataaaattacatcttatacagcaatctggcaagttaaaaatattatacctttagacccagaaatgtaacatctaaatatttattctaaagaaactgagacatgcactcatgagcgtatgaacaaaactgtgtatcaacattgtttattatggtaaaataaaaacctttgaaactgcctaaggacccaccactaagaaactgactaaaagtaaattttcagccactactatgatgtgtattttcacaggctgatacagtaaataaaaagacttccaaatagtataaaatagtacaacttcagttttatagaaataaaaacattttaaaatgtatcaaatatgccttaaaagataatctggaaaaatttacaacataatgtcataatggctatctcttagyagcagaagtagagattatctttattttcttcttttataatcacatggacaaagaaaactatctaaaataaagtgatctgagctctaataataaacatttaatagtaaatacctaatttttaccattagtttttactattagtaaggcagttacactatagtaaggcagctctatctacctaatctattttgaatatttggttaaagacattatctttaattctgacataaccctagaaagggttattatccccaaattacagatagggaaactaaagcttcaagagggtaagtgattcgcacaagatcacatcactgagtaaggatttaaacccctgctgttctagttctgctgtgactggaaaggaaaacagccactcatatcacactctcagcttcacttatataaaaataagaatatttgaagtaaatattctccatcaattatatttttcattttctacaattttctatgtctaaatataagctcatagcacttactgaaaaaagcagattccatcatcatgcccctgacacctacaaggaaacaaatcacaaaatctgtaatatatttcacaaaataaacatgctgaccttgtctacatatcccttcacattattccctatacctctcaagacatggtctggctctgtgtccccacccaaatctcatcttgaattgtaatccccacatgtcaagggaggaaccaggtgggaggtgactggatgatgggggtggtttcccccaagctgttcttgtgatagtgagttctcacgagatctgatggttatatatgtgtttgacagttcccccttaacacgctcttgtctccctcctgtcgccttgtgaggaaggcgcctacttccccttcgccttctgtcatgactgtaagtttcccgtggcctcctagccatgctttctgttaagcctgtggaaccgtgagtcactaaatccctttcttttataattacccagtctcaagtagtattctttatagcagtgtgagaacggactaacatacctcattacaccccaaaatgttcggcaatccagtatctaatggaaatacactagaacttacaagaagctttt

SEQ ID NO: 705539 - DNA, 973 bp, Homo sapiens
  misc_feature 464, 465, 466, 467, 468, 469, 470, 471, 472, 473, 474, 475,476, 477, 478, 479, 480, 481, 482, 483, 484, 485, 486, 487,488, 489, 490, 491, 492, 493, 494, 495, 496, 497, 498, 499,500, 501, 502, 503, 504, 505, 506, 507, 508, 509, 510: n = A,T,C or G
  misc_feature 511, 512, 513, 514, 515, 516, 517, 518, 519, 520, 521, 522,523, 524, 525, 526, 527, 528, 529, 530, 531, 532, 533, 534,535, 536, 537, 538, 539, 540, 541, 542, 543, 544, 545, 546,547, 548, 549, 550, 551, 552, 553, 554, 555, 556, 557: n = A,T,C or G
  misc_feature 558, 559, 560, 561, 562, 563: n = A,T,C or G
ggtcgagtaaaagcaatttgagattgttgaaagtctatatagcagctgataataatgctagctaatgttttttaatgttcaaaaataacaaggcagactaagtactgtagtctactctacctagaagtttgtaagctactccttataaatcattttttaaaacattaaacccaatctgtttgatcctagtgaaagaggtatactgttatggtacatgagcataaacttaaaagtaattcaaaactttaaatcatataaattccagcagccatggatactatttttctctctctttaaagcactggttcttcaaacctggctaaaggttagaatcaactgaggaattgtcaaaaaatacactgatgccagagtatggcgtcaaaccaaaatatatcagaatctctgtggaatgaggcacagaacatcatgttttttttttttaagtttcttatttttttttttcnnnnnnnnnnnnnnnnnnnnnnnnnnnnnnnnnnnnnnnnnnnnnnnnnnnnnnnnnnnnnnnnnnnnnnnnnnnnnnnnnnnnnnnnnnnnnnnnnnnnatatttagaatcagcttgtcaaatctgatgaagaatccttttgtggtttatatttgaattgcgctgaatgtgtgtgttagtttaggggataatttatcatcttattcgtgaatatgatatatacctctgtttagctcttcttctgtatctttacataaaactttgtattttctttgtgaaaagataatacataytttataggattatttctttgtaccatttttgttgttctattataaatggaatccttttaaaattttaattgtgaccagctttgaagaagcatctcttatgactttttcagctgataaattttcctgaagattatagcaaaagtaccaaattttgagggtattaaaaagcagaaattaattggggtgtatcttatcacatctgtttttagtaagtgt

SEQ ID NO: 705540 - DNA, 973 bp, Homo sapiens
  misc_feature 464, 465, 466, 467, 468, 469, 470, 471, 472, 473, 474, 475,476, 477, 478, 479, 480, 481, 482, 483, 484, 485, 486, 487,488, 489, 490, 491, 492, 493, 494, 495, 496, 497, 498, 499,500, 501, 502, 503, 504, 505, 506, 507, 508, 509, 510: n = A,T,C or G
  misc_feature 511, 512, 513, 514, 515, 516, 517, 518, 519, 520, 521, 522,523, 524, 525, 526, 527, 528, 529, 530, 531, 532, 533, 534,535, 536, 537, 538, 539, 540, 541, 542, 543, 544, 545, 546,547, 548, 549, 550, 551, 552, 553, 554, 555, 556, 557: n = A,T,C or G
  misc_feature 558, 559, 560, 561, 562, 563: n = A,T,C or G
ggtcgagtaaaagcaatttgagattgttgaaagtctatatagcagctgataataatgctagctaatgttttttaatgttcaaaaataacaaggcagactaagtactgtagtctactctacctagaagtttgtaagctactccttataaatcattttttaaaacattaaacccaatctgtttgatcctagtgaaagaggtatactgttatggtacatgagcataaacttaaaagtaattcaaaactttaaatcatataaattccagcagccatggatactatttttctctctctttaaagcactggttcttcaaacctggctaaaggttagaatcaactgaggaattgtcaaaaaatacactgatgccagagtatggcgtcaaaccaaaatatatcagaatctctgtggaatgaggcacagaacatcatgttttttttttttaagtttcttatttttttttttcnnnnnnnnnnnnnnnnnnnnnnnnnnnnnnnnnnnnnnnnnnnnnnnnnnnnnnnnnnnnnnnnnnnnnnnnnnnnnnnnnnnnnnnnnnnnnnnnnnnnatatttagaatcagcttgtcaaatctgatgaagaatccttttgtggtttatatttgaattgcgctgaatgtgtgtgttagtttaggggataatttatcatcttattcgtgaatatgatatatacctctgtttagctcttcttctgtatctttacataaaactttgtattttctttgtgaaaagataatacatattttataggattatttctttgtaccatttttgttkttctattataaatggaatccttttaaaattttaattgtgaccagctttgaagaagcatctcttatgactttttcagctgataaattttcctgaagattatagcaaaagtaccaaattttgagggtattaaaaagcagaaattaattggggtgtatcttatcacatctgtttttagtaagtgt

SEQ ID NO: 705541 - DNA, 667 bp, Homo sapiens
tcctattttaaagatctgtgtgtgtgtgtgtgtgtgtgtctgtgtgtgtaaaaatttttggaggaatgcactaaaaaattttttttatgatagttaacttttaaaactgggtctgaaaggtctaagatggaaggaagagttttacttcatgtgcttttatactatttgaaaattttgctatctgcatgtattactatttattttcagggttatagtgtttattaagtatgtaacagtaggagttggctcaaaattatctggaaaaataagaagtaaacaagattgccaaaatgttgatgataagtgaagctagataatagamccatggtgattcataacattattctctccttttatgtatattagaatttttcaccataaaattttaaaaattaaacattgatatattctagctataatttaggtctgaaatgggctttgcaattcgaaacacttgtaaatgtatcaggacactaaagattcctatttttttattgctatataattcacctaccacaaaatcatcctttaaaaaagtatgtaatttggtggtttttattatattcacaagattgtgcagccatcagcagtatcaaattccatatcacttcccaaaaaacccacactgattatcagtcattgcccctccttccctattcccagcccc

SEQ ID NO: 705542 - DNA, 653 bp, Homo sapiens
tcttttcaaggacgtctgtacagtgaaacccttgaaagacacagtgtttcccctttggagacaggcttgtttagtgtccagtataacaaagacagtatctccttcctcagcaagtaaggcaggctactgaagtgcactaaaagtcattacaaaagacttgacttccctaagttcagggttccaatgctgggatgcaaacccaccgagtggacaacatattcctgagcatcattcccatgggatttggaggagcaagggaaaccaacacaaacatgaagytcatgctactattgtactgtgaataataataaagtcctttgtctgacccagcagccatgtcttcagcaggattcacaaaactagtacgttaacttgctagcttaatctttatagttcatcaaggcagttgtctagtccttttggcaaggttgttcctctgttgtagaaaaggatccatcaacttaccccagttgaatgcaattaaacattcaaaagacatagttattttgtcgagcatttacactcaccaagttagcttttagtgatgatctcataaagacctattttaggtagagaatgtgttaatcaggctactgcaagtaactacagtcctcatgatggttgaaataaaattttatgttctgattttcaca

SEQ ID NO: 705543 - DNA, 653 bp, Homo sapiens
tcttttcaaggacgtctgtacagtgaaacccttgaaagacacagtgtttcccctttggagacaggcttgtttagtgtccagtataacaaagacagtatctccttcctcagcaagtaaggcaggctactgaagtgcactaaaagtcattacaaaagacttgacttccctaagttcagggttccaatgctgggatgcaaacccaccgagtggacaacatattcctgagcatcattcccatgggatttggaggagcaagggaaaccaacacaaacatgaagctcatgctactattgtrctgtgaataataataaagtcctttgtctgacccagcagccatgtcttcagcaggattcacaaaactagtacgttaacttgctagcttaatctttatagttcatcaaggcagttgtctagtccttttggcaaggttgttcctctgttgtagaaaaggatccatcaacttaccccagttgaatgcaattaaacattcaaaagacatagttattttgtcgagcatttacactcaccaagttagcttttagtgatgatctcataaagacctattttaggtagagaatgtgttaatcaggctactgcaagtaactacagtcctcatgatggttgaaataaaattttatgttctgattttcaca

SEQ ID NO: 705544 - DNA, 664 bp, Homo sapiens
tttatactaaagacttgctaagacaagaaatgacagacaagcatgtttaaataatcccgtcactacttctattttgacaacctagataatcttgagaactttttcactatcacatattaaagagttattcaaagatatgtggccattattggtaattatgagcgagtcctcctcatattgctgtgtttattcagaaaattcttatgcttagagtctacttwaagatcacagtgacagggagacaggattcatttttaaatggtcagactacatttttagaaaaagtttttccctttagagtagaagtttaagcacccttggatacccttggtttagaaccaaaattctacatgtaggaccagttaacaattttgtttcttcccacagactggaaggtgtactggggggaactgccaacaggaagtgtcaggtatcttgcagcaccagagtcggaaatgataatgaaagctgctaacatttgtgtattactttagaatctacagagcacctttatgtgcattatctcatgtgattctcaaagcagttgtgagatttatgaaactacatatatatttattctcactttgaaataattttagacctacaggagtaagaaaaaatatacaaagaatgcacatatccttcaggcagcttcctaaaatgt

SEQ ID NO: 705545 - DNA, 664 bp, Homo sapiens
tttatactaaagacttgctaagacaagaaatgacagacaagcatgtttaaataatcccgtcactacttctattttgacaacctagataatcttgagaactttttcactatcacatattaaagagttattcaaagatatgtggccattattggtaattatgagcgagtcctcctcatattgctgtgtttattcagaaaattcttatgcttagagtctactttaagatcacagtgacagggagacaggattcatttttaaatggtcagactacatttttagaaaaagtttttccctttagagtagaagtttaagcacccttggatacccttggtttagaaccaraattctacatgtaggaccagttaacaattttgtttcttcccacagactggaaggtgtactggggggaactgccaacaggaagtgtcaggtatcttgcagcaccagagtcggaaatgataatgaaagctgctaacatttgtgtattactttagaatctacagagcacctttatgtgcattatctcatgtgattctcaaagcagttgtgagatttatgaaactacatatatatttattctcactttgaaataattttagacctacaggagtaagaaaaaatatacaaagaatgcacatatccttcaggcagcttcctaaaatgt

SEQ ID NO: 705546 - DNA, 630 bp, Homo sapiens
ttgctgcaacctttgcctcccaggttcaatcaattcccgtacctcagcctcccaagtagctgggactacaggtgcgcaccatcatgcccagctaatttttgtattttcagtagcgacggggtttcaccatgttcgtcaggctggtcttgaactcctgacctcgtgatccacccaccccggcctcccaaagtgctgggattacaggcgtgagccagtgcaccccgccgctggtggtrttattaaccctctttacagttggagaaaactaagctgaagttaaaagtcttattcacaatacccaggtaaggtgatccagttgggatgtaaacttggaccttcttattgtggagtctgggttctttccacttactctcctgtggtactgtagtattcctttcttaacatttgcttttccattaattttgtcatttgtcttgccggacaaggacaggacacaatttaattaaaatagattcaagaaaattatttattaataatagatacagttatttcaatgcaaaaaatagtcattgcagtgccagaaatatttatcatatgcttgctatgtgtaaggcagtgtgccaaacattgctggtatgtgagtatttgcatatgtactaggagacattg

SEQ ID NO: 705547 - DNA, 1305 bp, Homo sapiens
ctaaagttctgcttggcaatacgtatgatggtactattacaatagcttgtataagttatgcctttttcaaattcttaccttgccctttatcagcacagttctccaatcctaggatcagatgtatggctgatataaatcagcagaaaacaaaattctatattcctgttccctgcaatcaatgagtggacagactgtaaactctgcaaggatagaagttgctattattttgcaattgtttcattccttactttactcactgatattttctgcagagctgtgctggccattggcctttgaccttccaggatttggtcaaaaaaattttttttccaggatgctttcagatgtcaaagcatttgtgaacattttacttctgaatccatgttggtattaaagtaaagaagtaatcccaaatattaatctactgtctgattttttttattatagtgctcttaaactattgtggagttatttttgcttctctattctaaaactgggaaaattgattttgagtcatgacatcaaatttttcctcatctccttatccattaatttgttaatgggttatttggtggttttaaaacatgtccataaattctttgacacaactcctttcaaagctggagtctaattccctgccacttcaatgtccaccagaggtagcgactcacttttaacacaccaaatgtggcaagaagtcatgatctgtgacctctaaagatagcccataaaaaatatcaccacttccatttgctctcttttatgttgtccacttttgggggaagccagctgccatgttgtgaggatacttaaatagccttcagagacacctgcatggggaggaactgagaccttctgtcaacagcctgcatgtggaagatacaccgtgtaaatgcctcctccaactccactcaagccttcaaatggctgcagccctggctgatttcttgactgtaacctcatgcaattccccagccagaaccacccagctaagccactctgaattcctgcagaatccatgagagacaatatatgattattgttgttttaaggcactaagttctagaggactttgtgaagtggtactaatccagttgtcttgtcmagacaaggtgttgcctttattcatacaacaaatatttattgagcatctagtcaagcagtctgttaggtgctgcttgtaccaaaatcaacagacaaaacatagtacctgcctttaaagagcttataaccttgtgatggatacaaatttaaataaatgattatctaattattaaattacaataagtgtgccaggtaataggg

SEQ ID NO: 705548 - DNA, 649 bp, Homo sapiens
ggaaaggcaattggagctttattcagcagtgaattgaaattaataatatatattttattctctctatatagtagaatcaaatcaggacattcaaggagaaattcctgcccagggtttgaccaacgtgctggcaatggccctcctatgctgatctcttataagtcctgtttcctccaagttagctgggtttaggctcttaaatttctagtaggggtttgagaattcttagttatcttttggtctttgagtgactgkcaacagcagaaaaaaagagacaattgtagtcatgctgtggggagagggctgatattttggtgatgaaagaggtttaagtttcacagaactttaaaaaacttccaattattttaataattatcatcaataaactttcctcatggtaccatcacttgtatttgtccatgtgaagaagataaacttgaaaactcatttaaaccactccttaaggctgaataaagggaatctagcacaggctttctcctccaaaacagaaaaagaatatctcagctgctatgcaagattgagaaaactcagaacctgagctctgtagatcactctgaagctataagaataaggtgtatatacacaatggaatattattccaccacaaaaagcatgaaatcctatcatt

SEQ ID NO: 705549 - DNA, 1039 bp, Homo sapiens
ttcgatccaattatttttcaaagtccaagtaaatgtggattttcataatcagagaatacttaytaaagacaagacatatgaagctctacacagagactcaatgggtaagatgtcagtgacagatggatgctgttcactacagagtctgtggaagccaggtgaggttactctgcatttaaaatgtaaatgaaattctctctagctttctatcccacatcctgtggaagttcccttcccacaattcctgaaaattcccaggagcttatattctcatggtcactgttggcttctgttgactcactcacttcttgccttttgggctgttcccttctctctgctcacccttctgtcctcccagctccagggaactccatcctgtttccttactttcctactgaactcttcaaacaataatttctgaaacaatggggaatgcactatgcaacttaaaattgagtattagacattctttaaaatctcctggttgccctgccacagaaaacttctcaatgaccatctttctgagtaggcttcaccctcctacaatgggtctgttgtctggttctcttgccacttcctctctcctctcctctctatctctccccacaccactcttcatttctgaaataggaaagtatagccatctgtgtttgctgtattcttccaacccctgccctcaaatcatatttaaagattgtttcctaaagactttccttcctaagaggaactctagtgccaatggtaaatacacacacacgcacacacacacacacacagatttatacatatataggatagatggtatgcaggtaggtagatgatagatagatagatagatagatagatagatagatagatagataataaatagttttggggttgtgtgtgtttttaactcactatatctccatggagggtgttggctccaaatcctaaaaggtcctaatttccaacttttcatctcttgcttatgataccgtgtatgttgtgtgtagaggacatggaaactaaccttgaattatggtaacagaaaaacagg

SEQ ID NO: 705550 - DNA, 1039 bp, Homo sapiens
ttcgatccaattatttttcaaagtccaagtaaatgtggattttcataatcagagaatacttattaaagacaagacatatgaagctctacacagagactcaatgggtaagatgtcagtgacagatggatgctgttcactacagagtctgtggaagccaggtgaggttactctgcatttaaaatgtaaatgaaattctctctagctttctatcccacatcctgtggaagttcccttcccacrattcctgaaaattcccaggagcttatattctcatggtcactgttggcttctgttgactcactcacttcttgccttttgggctgttcccttctctctgctcacccttctgtcctcccagctccagggaactccatcctgtttccttactttcctactgaactcttcaaacaataatttctgaaacaatggggaatgcactatgcaacttaaaattgagtattagacattctttaaaatctcctggttgccctgccacagaaaacttctcaatgaccatctttctgagtaggcttcaccctcctacaatgggtctgttgtctggttctcttgccacttcctctctcctctcctctctatctctccccacaccactcttcatttctgaaataggaaagtatagccatctgtgtttgctgtattcttccaacccctgccctcaaatcatatttaaagattgtttcctaaagactttccttcctaagaggaactctagtgccaatggtaaatacacacacacgcacacacacacacacacagatttatacatatataggatagatggtatgcaggtaggtagatgatagatagatagatagatagatagatagatagatagatagataataaatagttttggggttgtgtgtgtttttaactcactatatctccatggagggtgttggctccaaatcctaaaaggtcctaatttccaacttttcatctcttgcttatgataccgtgtatgttgtgtgtagaggacatggaaactaaccttgaattatggtaacagaaaaacagg

SEQ ID NO: 705551 - DNA, 1039 bp, Homo sapiens
ttcgatccaattatttttcaaagtccaagtaaatgtggattttcataatcagagaatacttattaaagacaagacatatgaagctctacacagagactcaatgggtaagatgtcagtgacagatggatgctgttcactacagagtctgtggaagccaggtgaggttactctgcatttaaaatgtaaatgaaattctctctagctttctatcccacatcctgtggaagttcccttcccacaattcctgaaaattcccaggagcttatattctcatggtcactgttggcttctgttgactcactcacttcttgccttttgggctgttcccttctctctgctcacccttctgtcctcccagctccagggaactccatcctgtttccttactttcctactgaactcttcaaacaataatttctgaaacaatggggaatgcactatgcaacttaaaattgagtattagacattctttaaaatctcctggttgccctgmcacagaaaacttctcaatgaccatctttctgagtaggcttcaccctcctacaatgggtctgttgtctggttctcttgccacttcctctctcctctcctctctatctctccccacaccactcttcatttctgaaataggaaagtatagccatctgtgtttgctgtattcttccaacccctgccctcaaatcatatttaaagattgtttcctaaagactttccttcctaagaggaactctagtgccaatggtaaatacacacacacgcacacacacacacacacagatttatacatatataggatagatggtatgcaggtaggtagatgatagatagatagatagatagatagatagatagatagatagataataaatagttttggggttgtgtgtgtttttaactcactatatctccatggagggtgttggctccaaatcctaaaaggtcctaatttccaacttttcatctcttgcttatgataccgtgtatgttgtgtgtagaggacatggaaactaaccttgaattatggtaacagaaaaacagg

SEQ ID NO: 705552 - DNA, 1039 bp, Homo sapiens
ttcgatccaattatttttcaaagtccaagtaaatgtggattttcataatcagagaatacttattaaagacaagacatatgaagctctacacagagactcaatgggtaagatgtcagtgacagatggatgctgttcactacagagtctgtggaagccaggtgaggttactctgcatttaaaatgtaaatgaaattctctctagctttctatcccacatcctgtggaagttcccttcccacaattcctgaaaattcccaggagcttatattctcatggtcactgttggcttctgttgactcactcacttcttgccttttgggctgttcccttctctctgctcacccttctgtcctcccagctccagggaactccatcctgtttccttactttcctactgaactcttcaaacaataatttctgaaacaatggggaatgcactatgcaacttaaaattgagtattagacattctttaaaatctcctggttgccctgccacagaaaacttctcaatgaccatctttctgagtaggcttcaccctcctacaatgggtctgttgtctggttctcttgccacttcctctctcctctcctctctatctctccccacaccactcttcatttctgaaataggaaagtatagccatctgtgtttgctgtattcttccaacccctgccctcaaatcatatttaaagattgtttcctaaagactttccttcctaagaggaactctagtgccaatggtaaatacacacacacgcacacacacacacacacagatttatacatatataggatagatggtatgcaggtaggtagatgatagatagatagatagatagatagatagatagatagatagataataaatagttttggggttgtgtgtgtttttaactcactatatctccatggagggtgttggctccaaatcctaaaaggtcctaatttccaacttttcatctcttgcttatgataccgtgtrtgttgtgtgtagaggacatggaaactaaccttgaattatggtaacagaaaaacagg

SEQ ID NO: 705553 - DNA, 1172 bp, Homo sapiens
tggtcaggaggtcattccagtcccccagaggggctctgttgcagcacagggccttgatggacagcagatgctactggttctcacccttgggccaattctgcctgcttctagagcttctctgaggtctgttcacccagaggacggcacccagcatgctcaggagcaggggcagctccaagaggaccaggagcaggaagcggacattgctgaacagggagctgtggggacacggtgacrggcagtgagtcacctccccaggggagcccaggtgccctccaccatcccctgacccttgtgtcccaatcctgtgaaacagtgccatcataaggacccctggagagattcttcgtgtcacaatatcacgccctctaactcacagtcgcggtttagactctgtgactctcgaggatctgtgacacaggaagggcaggaccatgagaggacgtgaggtcacgccagggatccaggcagggtctgtgtccaggacgcagctgtctacctctgtgctccccatggaggtgttacccagctggggtcccggaattcacaaagggttatttgtttggtgtcaactctcctgtacacagcgtttccaggagggcagggaccatttgtttcattcacagtgagtacctgctgcctacccggagtctccaataatctgccctacaacttcagtggttgttgaaggaattaatgaatggacagctcagctctcagctcctcagaggactgggcttatcaaacaggatgaaactctggccagggctgcgagagaggcaggggagaggaccagggccaccggaccccagagcatctgcccccttccctggcctggccaggtcccaaggctcctcgcaggacatttgcctcactcctccctccacctggacccttcttcctccagaccccagagtgcccagcccccaacccttgaggtctctgtgctcatgtcctctaattctcaaaccctcttctgatcatcgtcagtgaaatagcaactccaacacctgcacacgctctccccaaacccaagagtcaaacatctcatcccagcattcattaccctttgctgtatttgtacatcagcctctgtgctgacttgctcaatgcgtgaatccaccgagtagaactcaacttccaccagggcaggacagtggctgtgtggttcc

SEQ ID NO: 705554 - DNA, 1172 bp, Homo sapiens
tggtcaggaggtcattccagtcccccagaggggctctgttgcagcacagggccttgatggacagcagatgctactggttctcacccttgggccaattctgcctgcttctagagcttctctgaggtctgttcacccagaggacggcacccagcatgctcaggagcaggggcagctccaagaggaccaggagcaggaagcggacattgctgaacagggagctgtggggacacggtgacaggcagtgagtcacctccccagggragcccaggtgccctccaccatcccctgacccttgtgtcccaatcctgtgaaacagtgccatcataaggacccctggagagattcttcgtgtcacaatatcacgccctctaactcacagtcgcggtttagactctgtgactctcgaggatctgtgacacaggaagggcaggaccatgagaggacgtgaggtcacgccagggatccaggcagggtctgtgtccaggacgcagctgtctacctctgtgctccccatggaggtgttacccagctggggtcccggaattcacaaagggttatttgtttggtgtcaactctcctgtacacagcgtttccaggagggcagggaccatttgtttcattcacagtgagtacctgctgcctacccggagtctccaataatctgccctacaacttcagtggttgttgaaggaattaatgaatggacagctcagctctcagctcctcagaggactgggcttatcaaacaggatgaaactctggccagggctgcgagagaggcaggggagaggaccagggccaccggaccccagagcatctgcccccttccctggcctggccaggtcccaaggctcctcgcaggacatttgcctcactcctccctccacctggacccttcttcctccagaccccagagtgcccagcccccaacccttgaggtctctgtgctcatgtcctctaattctcaaaccctcttctgatcatcgtcagtgaaatagcaactccaacacctgcacacgctctccccaaacccaagagtcaaacatctcatcccagcattcattaccctttgctgtatttgtacatcagcctctgtgctgacttgctcaatgcgtgaatccaccgagtagaactcaacttccaccagggcaggacagtggctgtgtggttcc

SEQ ID NO: 705555 - DNA, 1172 bp, Homo sapiens
tggtcaggaggtcattccagtcccccagaggggctctgttgcagcacagggccttgatggacagcagatgctactggttctcacccttgggccaattctgcctgcttctagagcttctctgaggtctgttcacccagaggacggcacccagcatgctcaggagcaggggcagctccaagaggaccaggagcaggaagcggacattgctgaacagggagctgtggggacacggtgacaggcagtgagtcacctccccaggggrgcccaggtgccctccaccatcccctgacccttgtgtcccaatcctgtgaaacagtgccatcataaggacccctggagagattcttcgtgtcacaatatcacgccctctaactcacagtcgcggtttagactctgtgactctcgaggatctgtgacacaggaagggcaggaccatgagaggacgtgaggtcacgccagggatccaggcagggtctgtgtccaggacgcagctgtctacctctgtgctccccatggaggtgttacccagctggggtcccggaattcacaaagggttatttgtttggtgtcaactctcctgtacacagcgtttccaggagggcagggaccatttgtttcattcacagtgagtacctgctgcctacccggagtctccaataatctgccctacaacttcagtggttgttgaaggaattaatgaatggacagctcagctctcagctcctcagaggactgggcttatcaaacaggatgaaactctggccagggctgcgagagaggcaggggagaggaccagggccaccggaccccagagcatctgcccccttccctggcctggccaggtcccaaggctcctcgcaggacatttgcctcactcctccctccacctggacccttcttcctccagaccccagagtgcccagcccccaacccttgaggtctctgtgctcatgtcctctaattctcaaaccctcttctgatcatcgtcagtgaaatagcaactccaacacctgcacacgctctccccaaacccaagagtcaaacatctcatcccagcattcattaccctttgctgtatttgtacatcagcctctgtgctgacttgctcaatgcgtgaatccaccgagtagaactcaacttccaccagggcaggacagtggctgtgtggttcc

SEQ ID NO: 705556 - DNA, 726 bp, Homo sapiens
atgttttaagccactacatcttggtgtggtttgttatgcagcattattgtgacaaaagctaactgagacagcttctgaatctgttggttaaaaatatttacattaaagttctsaaatacaaaatctatttagtaaattagtcaacagtaccactcagtcaaaagatagttattgaacacttagaatgtgccaatcacagtgctacatagtggagatggatggtaaacaaaatagacatggggaaacttgaaaaggtaattgaaatacaatctgacctgttctgataaggacaagcaagcaccaattacgggatgatttagaagggagactagaactagtcttgacaagtcaaggaagttttgtcagagatgaagcatgagtagggattatttacattactgtaggaagaatcaataacatcctcaaaaactcagaaataaaaagatacagtaattcagtgaactacaagaaataatgcatgacagggagtgagtcgagtacataaaagcaaggatgtgtatagtagaaaatagtttgagggggcagagcaggtaggaagtgtgtctggggcttctggcagccatcccacaccctaaatgtaaagaaacataaagctcagatgatgtcattggttgctaggattcagctatgcatgaaaccaaagataagactctgggtaacacctacatttactacattcacaaagaggcagtgtattcattagca

SEQ ID NO: 705557 - DNA, 609 bp, Homo sapiens
aaatagtacagcattatccctgcaaacatgtattcttccttagtcattctgcagttctcaatctagtcaatgtcagagtatttaatatgacccatttttcatagagaatagtagtcccatttacactgctgagattgatagcatggtatgctatcaatcccaaaagctctgatgcgggctgtggacctctaccaaaagattcctttctgcgctatcaatctcaccacttcccactgtctctaagccctaaatcagactgcttgatatctctgcagttttgtactcctgcatcagcagtctgcctaagcacagccatcactcactagcactgttaactgcacttgctacaaacactgaaccactttcctcatcctaaggccaagtgtgaaattcctgctacattacatcacttatgaatctctctacmagaagaaagaacccattttgtctcctggattttgaataatgggaaatttaataggattattattttattatttattttggtaatgagactcttgaacataacaggtagcccaacaatgaagcaagtctatctcaaaaagtaaagttaaaaaagattcatcagtaaatatgtactttgttctc

SEQ ID NO: 705558 - DNA, 937 bp, Homo sapiens
gtggcgggcgcctgtagtcccagctacttgggaggctgaggcaggagaatggcgtgaacccgggaggcggagcttgcagtgagccgagatcccgccactgcactccagcctgggcgacagagcgagactccrtctcaaaaaaaaaaaaaaaaaaaaaaaaaaagaattggacaccctgtctctaaaaaaaaaaaaaaaattaaaaattaactgggcacagtggctcatccttatagtcccagctactcaggaggctgaggagggaggatcgcttgagcctgggaggtagaggctgcagtgaaacgtgatcatgccactgcattccagcctgagctgcagagcaagaccccatctctacaggaaaaaaaaatgttaataaatagtagctttcttattaatgtaaggagttttcaaccaaaaggcttcagtatttgaaatcaacacaattgccagacattgaaaaattatatcccataatagttagcatctagtatgagacaggtagaaggaatctctgactagtgaactaaaaggaaataactattcctgataacttaaaaactgctctgttccccagtgtaatggttatcaaacttgtattccttccatgtcaggacttgtattccttccatgtcaggactgagtatttttttaacaatctgagaagcatcagactcctatattactgggccgattgtttaaggtatttaattacaactcatatcattatcagatgcacatacataaaatcttcaccatattctacctaaaaatgtctagccttttgcattttatggtagaaggtaaatctgaagaggcatagcataaacagattcatgctaacaggaattattcttgcatttaccccaatgactaatatttgtgtaatggggtatagttcaattatacatatcctttttttgtaaactatacccca

SEQ ID NO: 705559 - DNA, 937 bp, Homo sapiens
gtggcgggcgcctgtagtcccagctacttgggaggctgaggcaggagaatggcgtgaacccgggaggcggagcttgcagtgagccgagatcccgccactgcactccagcctgggcgacagagcgagactccatctcaaaaaaaaaaaaaaaaaaaaaaaaaaagaattggacaccctgtctctaaaaaaaaaaaaaaawttaaaaattaactgggcacagtggctcatccttatagtcccagctactcaggaggctgaggagggaggatcgcttgagcctgggaggtagaggctgcagtgaaacgtgatcatgccactgcattccagcctgagctgcagagcaagaccccatctctacaggaaaaaaaaatgttaataaatagtagctttcttattaatgtaaggagttttcaaccaaaaggcttcagtatttgaaatcaacacaattgccagacattgaaaaattatatcccataatagttagcatctagtatgagacaggtagaaggaatctctgactagtgaactaaaaggaaataactattcctgataacttaaaaactgctctgttccccagtgtaatggttatcaaacttgtattccttccatgtcaggacttgtattccttccatgtcaggactgagtatttttttaacaatctgagaagcatcagactcctatattactgggccgattgtttaaggtatttaattacaactcatatcattatcagatgcacatacataaaatcttcaccatattctacctaaaaatgtctagccttttgcattttatggtagaaggtaaatctgaagaggcatagcataaacagattcatgctaacaggaattattcttgcatttaccccaatgactaatatttgtgtaatggggtatagttcaattatacatatcctttttttgtaaactatacccca

SEQ ID NO: 705560 - DNA, 937 bp, Homo sapiens
gtggcgggcgcctgtagtcccagctacttgggaggctgaggcaggagaatggcgtgaacccgggaggcggagcttgcagtgagccgagatcccgccactgcactccagcctgggcgacagagcgagactccatctcaaaaaaaaaaaaaaaaaaaaaaaaaaagaattggacaccctgtctctaaaaaaaaaaaaaaaattaaaaattaactgggcacagtggctcatccttatagtcccagctactcaggaggctgaggagggaggatcgcttgagcctgggaggtagaggctgcagtgaaacgtgatcatgccactgcattccagcctgagctgcagagcaagaccccatctctacaggaaaaaaaaatgttaataaatagtagctttcttattaatgtaaggagttttcaaccaaaaggcttcagtatttgaaatcaacacaattgccagacattgaaaaattatatcccataatagttagcatctagtatgagacaggtagaaggaatctctgactagtgaactaaaaggaaataactattcctgataacttaaaaactgctctgttccccagtgtaatggttatcaaacttgtattccttccatgtcaggacttgtattccttccatgtcaggactgagtatttttttaacaatctgagaagcatcagactcctatattactgggccgattgtttaaggtatttaattacaactcatatcattatcagatgcacatacataaaatcttcaccatattctacctaaaaatgtctagccttttgcattttatggtagaaggtaaatctgaagaggcatagcataaacagattcatgctaacaggaattattcttgcatttaccccaatgactaatatttgtgtaatggggtatagttcaattatrcatatcctttttttgtaaactatacccca

SEQ ID NO: 705561 - DNA, 1173 bp, Homo sapiens
atttagaaagaaaaactactgggactgggacatatttctgaaagaaaataatttgtaattttttttttttttgaratggggtctggctctattgcccaggctggagtgcagtggcgcgatctcggctcactgcaagctccacctcccgggttcacgccattctcctgcctcagcctcctgggtagctgggactgcaggcacccaccaccgcgcctggctaattttttgtatttttagtagagacggggtttcaccatattagccaggatggtctcaatctcctgacctcgtcccatgttggcctcccaaagtgctgggtttacaggcatgagctactgtgcccagccaataatttgtaattcttaatgttgtcaaaaaaatcctcatgctttcttttttctttttttttctgttttatgggaggtggtaaatgaagaagagaaaggcaaattgggaagagagtgggggaagagtcacatagttgaaaaattcttaaattcaatccatttgaaatagaaagctctgctaaaaaaggttaggagttaagtcaaataacgcttcatatttgcttagtatttaaatgctgagggatattattgttatgcaattgtaatataatcaggttacagggtcatttttctttcattcaaatcttgaagtgattatttgggcttctgtaattgcatggatagatagttgccacttttctttgttggctagatgatatgacaaagttcagcttaagcttttgatatttgcaaaaatatgacatttggcttgcgtatttcttttttgtaaaacatggaaagtgctaggcagaaaatggacagtttgaagatattttgaaatctttactgcagatagtatatcacaacaataatttatttatgctttattcatttattattgttaaacaaggcgtgatatgaccttagtttgtcttcctgaacttttgagccaaatttctaaagcttggcatgacaagtatacttaaaataaacatcacttacatgtgcaaatcagttaattgcttacacagctacctaccaattagtcacttattaatgcaattagctagatgtacagctaatttggggtaaagaaaaaaatgtctcagttcagaatgacagtctaaaatctaacttagtggttagattaagttagggtaagaaa

SEQ ID NO: 705562 - DNA, 1173 bp, Homo sapiens
atttagaaagaaaaactactgggactgggacatatttctgaaagaaaataatttgtaattttttttttttttgagatggggtctsgctctattgcccaggctggagtgcagtggcgcgatctcggctcactgcaagctccacctcccgggttcacgccattctcctgcctcagcctcctgggtagctgggactgcaggcacccaccaccgcgcctggctaattttttgtatttttagtagagacggggtttcaccatattagccaggatggtctcaatctcctgacctcgtcccatgttggcctcccaaagtgctgggtttacaggcatgagctactgtgcccagccaataatttgtaattcttaatgttgtcaaaaaaatcctcatgctttcttttttctttttttttctgttttatgggaggtggtaaatgaagaagagaaaggcaaattgggaagagagtgggggaagagtcacatagttgaaaaattcttaaattcaatccatttgaaatagaaagctctgctaaaaaaggttaggagttaagtcaaataacgcttcatatttgcttagtatttaaatgctgagggatattattgttatgcaattgtaatataatcaggttacagggtcatttttctttcattcaaatcttgaagtgattatttgggcttctgtaattgcatggatagatagttgccacttttctttgttggctagatgatatgacaaagttcagcttaagcttttgatatttgcaaaaatatgacatttggcttgcgtatttcttttttgtaaaacatggaaagtgctaggcagaaaatggacagtttgaagatattttgaaatctttactgcagatagtatatcacaacaataatttatttatgctttattcatttattattgttaaacaaggcgtgatatgaccttagtttgtcttcctgaacttttgagccaaatttctaaagcttggcatgacaagtatacttaaaataaacatcacttacatgtgcaaatcagttaattgcttacacagctacctaccaattagtcacttattaatgcaattagctagatgtacagctaatttggggtaaagaaaaaaatgtctcagttcagaatgacagtctaaaatctaacttagtggttagattaagttagggtaagaaa

SEQ ID NO: 705563 - DNA, 1173 bp, Homo sapiens
atttagaaagaaaaactactgggactgggacatatttctgaaagaaaataatttgtaattttttttttttttgagatggggtctggctctattgcccaggctggagtgcagtggcgcgatctcggctcactgcaagctccacctcccgggttcacgccattctcctgcctcagcctcctgggtagctgggactrcaggcacccaccaccgcgcctggctaattttttgtatttttagtagagacggggtttcaccatattagccaggatggtctcaatctcctgacctcgtcccatgttggcctcccaaagtgctgggtttacaggcatgagctactgtgcccagccaataatttgtaattcttaatgttgtcaaaaaaatcctcatgctttcttttttctttttttttctgttttatgggaggtggtaaatgaagaagagaaaggcaaattgggaagagagtgggggaagagtcacatagttgaaaaattcttaaattcaatccatttgaaatagaaagctctgctaaaaaaggttaggagttaagtcaaataacgcttcatatttgcttagtatttaaatgctgagggatattattgttatgcaattgtaatataatcaggttacagggtcatttttctttcattcaaatcttgaagtgattatttgggcttctgtaattgcatggatagatagttgccacttttctttgttggctagatgatatgacaaagttcagcttaagcttttgatatttgcaaaaatatgacatttggcttgcgtatttcttttttgtaaaacatggaaagtgctaggcagaaaatggacagtttgaagatattttgaaatctttactgcagatagtatatcacaacaataatttatttatgctttattcatttattattgttaaacaaggcgtgatatgaccttagtttgtcttcctgaacttttgagccaaatttctaaagcttggcatgacaagtatacttaaaataaacatcacttacatgtgcaaatcagttaattgcttacacagctacctaccaattagtcacttattaatgcaattagctagatgtacagctaatttggggtaaagaaaaaaatgtctcagttcagaatgacagtctaaaatctaacttagtggttagattaagttagggtaagaaa

SEQ ID NO: 705564 - DNA, 1157 bp, Homo sapiens
agcctggacaggagagtgagaccctgtctcaacagaaagaaagagagaaagaagacgaagatgaggaaggaaagaaggaaggaaggagggagggaaggagggagggagggaggcaggcagggaaggaaggaaggaaggaaatttttgtggtaggctgtactgattttgttattttcaatttagatactgctttaaaactagataaatcctcactgtttgctgcctactacccagttttcatgtcagcctctgtgccactgtctaatttcaacaccaatgtgaaatgtaagagctctctacccatgtttgtctcttgcatataatagatggctgtggcatcaattcttcttctatcacatgattcttacatgttctgcctagattgatgataagtgacccttctggtatggcaattctcttgccatgtttaaaactctttttatccagtgtggtggagacagtataacccctgctcaacaactttatttgatacctaaaatcagttatatttgtttgagatacattcttcttggaaaaaataacagctgaaatttcaaagttgtgaacaaaatctgacagtattaagaatacgatgctattcaagtctggattcataacttctaaggagtagtagcaagcrtagatggaatattcattttgagatacctttcttaaaataagtcccctctgtctagaatgtaaatatgtttcactgccagctttaaagggtttggcagtatactttttttctttttttaacttagagttttggatggacttatgtaagataaaaatagtcactttatcttcctacaaaatatgtcataagcattgaaatatgaagattcactttgagtgcatggaaccactgcacttaaaaggtgttggcaaagataacaatgtccttaagtacatcattgcttaatacattgtgataagatttaaagaaacaatatttcaacttgttttgtcttgttttgttctattcttttatgagacaaacttatttgtatgatatgagatgatttatcgtaataattatgttttatattgttaaatactctctattggggttcatatatataaaaactgaattgaaatggattttattgtttaacaatacaagtcagctagcacctagtcatggtggataatct

SEQ ID NO: 705565 - DNA, 2071 bp, Homo sapiens
taatcattacaagccataatgttaaaagtaccacatcctcctcaggccgagtcatagttcttgatgctattgacattctgggatgaatcacggtgtgtcgtgtcctgtgcattgcaggatgtttggcaacatccctggcctgtacttactggatgccagcaacacctctgccctgctagttgtggcaacgaaaaacgtctctagacattgcccattgtctcctggtggtgggtgggggggtgggggggtcgccaaaatcttcccaattgaggatgactacactaaagtaaggtgtgtgtctgtgtgtgtttatgccatttctagacccaacataagagaatgtggtgacaattctgagtactatgaacttttctcattggtaacctacactgcctattagcaactcaacacttacaactccttatccttctattatattcactaatcagcagatcttactcctgacaataaaacttttggtcaaatacacattttccccaaaatgttacaacttgctggtaaaccaaaaatgcactttccacagaagattttcttacatgatttgcaatgctcaacacaatccactcctgaactgcttgtcacttatcccaaagggtataatgtcaatttaaaaagaaaaagaattgttacctgaagagctggttgtttgtcattcctcttgggagattttaatccactaacttgctgctgctgttgctgctgaagaaggagctgtcttgccacctgaagtgcctggaaggaaaaacaagaaaatcctttgcgttactacacaggttcaggggactcttcataaaaaaggattccaggaagtgcgctttgggactgggtcctgactttcctatttcctggcaaatgaaacagcaaatgaaacttcccaccagtcttagttggaaaactttccagaatttgtttacgttccctttgactcggccagtttcatccacrgttccacaggcatctaagcagacattttattcctactaaagatctgacatgaaatttaagaccatgagtgattgagactctgaacaaagatgacagagagaccaggagggacccaagcaaagacgaaaacttgggagacactacagggcccttttcagggtcaccttcaccctccccaaattcttcttggggaaatgtagcgactcaagttgaaagtaatactttcaccccatctgagtccaaataaagaaaaagaactaagtggtggaccacaaaaaaaaatatactatggattaggctacgtagaaaggaagattaaacagatgagacatacctaggatgaccttgatagaaatcagagaggaaaatttggcaaatctgatctctagtcatcttaaagaggcacattatgtatctgtgaacaaaactggttacgtttattataaatgaccctttcaagcttacaatatgggatggtttctccttaaaggtagacattggggaggtagtatgaattggagatattgcaggaagaaaacagaagagtcctctaaaatgtttaacatatgactgacaaatctttttaaaagttcaagcaggctgggcgttgtggctcacgcctgtaatcccagcaccttgggagaccgaggtcaggagttcgagaacagcctggccaacatggtgaaaccctgtctctactaaaaatacaaaaattagctgggtgtggtggcagatgcctataatcccagcttcttgggaggctgaggcaggagaatcgcttgcacctgggaggcagaggttagggtaagtcgagatcgcaccactgtgcttcagcctgggtaacagaataagcttccatctggggggggggtggggtgggatgaaataaaataaaataaaataaaataaaataaaataaaataaaataaaataaaaggtcaagtaaaaaaagaaaaaaacaatgtcatcaataaaccgccatgaagacattcactgccaaagaattaagaacaggaatactggctagccacacacctttccaaagatggcagtaggaccagcaacagaaaactgaagtttgaggatatcatgctagaaagtcata

SEQ ID NO: 705566 - DNA, 1392 bp, Homo sapiens
atatawataatataaatatattatatatatttaatataaataatataaatatattatatatatttaatataaataatataaatatatatttaatataaataatataaatatatatttaatataaataatataaatatatatttaatataaataatataaatatattatatatttaatataaatatatttatataaatttatttatatttatgtatatataattattttctcagaaataaatcacaagtagcataaatattttaggttatactaattgtgccatgtgttagaggtcctaatgacaggatctgaggtattttaaatatttcaaacaagaatttcctactaatgttcatggaaaaaggttacagaagaatcacagatatcatagtcagccacagttttaactgctataatccaaagaggagtatatgattatgaaaaagatattaaaaaaattagaaaatgcaaatggattaaaccccagtatctatcataattaaatgtattatttcataggaaaaagacaacataatacaatcggcagtagtagggagtgatttttattttcttctctataatacttgtactttctatgtttttaagcaatgtgtattaatgtctgacataagtagagggaaaaaaatctattaaaatcaactttggctagatttccagaaagctacctcttcttacagagattttatttgtgattctgctataaatcattccagatgactatgtcttttggttcatgcaataacaaagagatctttatttttaacattcagctgtgcattcctgacttgtccagttaatattctattgggactggctctctagagtcttctttttgaagccttaggtagattctttggttaactcaaagggtataaatagactgccataaatttgaaaatcctctttatggaatgaatgactacctctttaattaaatttaaaataatttatattctgggcatgattttttcaaaacattattagtttatttaaattttcttgttgttttattaacttcattagtctcatcataaacagcatctccaaatgtaacatatgctagaaaattttgtgtcttgaaagcatagctatgaagtaatctcaggcagggtcagaaaaagtagttgggctatcatttacttgcttcagccatccttactcattcaaattattagtctgctcaaggcaaagtagtaaaggaatcaaatgtgatcgttagtggtcctccactctttcacccaatagcatccttttgtcttgagagcctcaggattcccctaatcaggcaaccacctttcagctttactccttagacaatatctcaaaagctgtatcatataatacttcctccagctactgacaaaattccct

SEQ ID NO: 705567 - DNA, 1392 bp, Homo sapiens
atataawtaatataaatatattatatatatttaatataaataatataaatatattatatatatttaatataaataatataaatatatatttaatataaataatataaatatatatttaatataaataatataaatatatatttaatataaataatataaatatattatatatttaatataaatatatttatataaatttatttatatttatgtatatataattattttctcagaaataaatcacaagtagcataaatattttaggttatactaattgtgccatgtgttagaggtcctaatgacaggatctgaggtattttaaatatttcaaacaagaatttcctactaatgttcatggaaaaaggttacagaagaatcacagatatcatagtcagccacagttttaactgctataatccaaagaggagtatatgattatgaaaaagatattaaaaaaattagaaaatgcaaatggattaaaccccagtatctatcataattaaatgtattatttcataggaaaaagacaacataatacaatcggcagtagtagggagtgatttttattttcttctctataatacttgtactttctatgtttttaagcaatgtgtattaatgtctgacataagtagagggaaaaaaatctattaaaatcaactttggctagatttccagaaagctacctcttcttacagagattttatttgtgattctgctataaatcattccagatgactatgtcttttggttcatgcaataacaaagagatctttatttttaacattcagctgtgcattcctgacttgtccagttaatattctattgggactggctctctagagtcttctttttgaagccttaggtagattctttggttaactcaaagggtataaatagactgccataaatttgaaaatcctctttatggaatgaatgactacctctttaattaaatttaaaataatttatattctgggcatgattttttcaaaacattattagtttatttaaattttcttgttgttttattaacttcattagtctcatcataaacagcatctccaaatgtaacatatgctagaaaattttgtgtcttgaaagcatagctatgaagtaatctcaggcagggtcagaaaaagtagttgggctatcatttacttgcttcagccatccttactcattcaaattattagtctgctcaaggcaaagtagtaaaggaatcaaatgtgatcgttagtggtcctccactctttcacccaatagcatccttttgtcttgagagcctcaggattcccctaatcaggcaaccacctttcagctttactccttagacaatatctcaaaagctgtatcatataatacttcctccagctactgacaaaattccct

SEQ ID NO: 705568 - DNA, 1392 bp, Homo sapiens
atataaataatataaatatattatatatatttaatataaataatataaatatattatatatatttaatataaataatataaatatatatttaatataaataatataaatatatatttaatataaataatataaatatatatttaatataaataatataaatatattatatatttaatataaatatatttatataaatttatttatatttatgtatatataattattttctcagaaataaatcacaagtagcataaatattttaggttatactaattgtgccatgtgttagaggtcctaatgacaggatctgaggtattttaaatatttcaaacaagaatttcctactaatgttcatggaaaaaggttacagaagaatcacagatatcatagtcagccacagttttaactgctataatccaaagaggagtatatgattatgaaaaagatattaaaaaaattagaaaatgcaaatggattaaaccccagtatctatcataattaaatgtattatttcataggaaaaagacaacataatacaatcggcagtagtagggagtgatttttattttcttctctataatacttgtactttctatgtttttaagcaatgtgtattaatgtctgacataagtagagggaaaaaaatctattaaaatcaactttggctagatttccagaaagctacctcttcttacagagattttatttgtgattctgctataaatcattccagatgactatgtcttttggttcatgcaataacaaagagatctttatttttaacattcagctgtgcattcctgacttgtccagttaatattctattgggactggctctctagagtcttctttttgaagccttaggtagattctttggttaactcaaagggtataaatagactgccataaatttgaaaatcctctttatggaatgaatgactacctctttaattaaatttaaaataatttatattctgggcatgattttttcaaaacattattagtttatttaaattttcttgttgttttattaacttcattagtctcatcataaacagcatctccaaatgtaacatatgctagaaaattttgtgtcttgaaagcatagctatgaagtaatctcaggcagggtcagaaaaagtagttgggctatcatttacttgcttcagccatccttactcattcaaattattagtctgctcaaggcaaagtagtaaaggaatcaaatgtgatcrttagtggtcctccactctttcacccaatagcatccttttgtcttgagagcctcaggattcccctaatcaggcaaccacctttcagctttactccttagacaatatctcaaaagctgtatcatataatacttcctccagctactgacaaaattccct

SEQ ID NO: 705569 - DNA, 1283 bp, Homo sapiens
ctttccattaatttcttcatgctttgcagggagaacaaggcaaatcaaagatctatagtagtttgcttttcacagattgcttgttatacccggtaagttgcactggctattggggaattaactgtacatgagtagagatcacagcaggttcagactgggtcatgtcaagtagtcatggtaaatgagaacaaatgaaaaggctcctgagcacagaccttttcaccaggttttaccgtgttaatatgtttacttatgaggaactggacacatggatgtataaacatgcacactgctgctttataggcacccaaattccactacctctcaatatcagcatcattgcaagaaaagcaagtgttagcacagagatgcagttaaggaatcacagaacaagagctgaaaagtttatcaagaagttatcagaataagcccaaaataatataaaattatagtaacaaaattattaaaggaattaaaatgttacactagaactaattcacttagtacaaaaaaagcaatgaaggagacatagaggaacaaaaaggatattttttttttcaaaaaagttaaatgacagacataaataaaattacatcaataatagtattaaatgttgttggactgaataacccaaaagtcaaggattgtcagactggattaaaaaacatccaaatacatgatgtctaaagtaaatacacttaagattaatagatacaaatagattgacagtaaaaaaatggaaaagatatataatgcaaatagaagccacaaaaaagcaggagaggctatgctaatgtcagacaagatagactttaaaattttaaacaattattgctagagataaaaaggaacattttataatgataaaatagtcaatccattaggcagctataacaattttaaatatatacagacatatttcaattgattaaattttgcagatattgctttttttcttttcttttttttttttaayacaaattgaagacctgtggcaaccctgcaaagaacaggtctatcagtaccattttcccaacagtatgtgctcattttttatctctatcatattttggtaattctcacaatatttcaagtcttttctttattattatgtctgttatggtgatttatgatcagtgatcattgttactattgcaattgtctaggggctccacaaacagtgctcatataagatgttgaaagtaattgataaatcgtattctgactgcgacaccagccagccattctctgtctctcttcctctcctcaggcatccctattca

SEQ ID NO: 705570 - DNA, 1050 bp, Homo sapiens
ttttttttttttgagacagagtctcgctctgtcaccaggctggagtgcagtggtgcgatctcggctcaagtgattctcccaggttcaagtgattctcctgcctcagcctcctaagtagatgggaccacaggcacccaccaccacacccagctaattttttgtatttttagtagagacgaggtttcaccatcttagccaggatagcgtcaatctcctgacctcgtgatctgcccgccttggcctcccaaagtgctgggattacaggtgtgagccagcgcgctggacctgaagatgctttttataggcattggcctttggaaaccactggtccttcagcagcaggacattgtcaagtcagatggtcccctgtggcatacagtgttccccccttcatgaggacccgaggaaccaagttccctccatcatcaatagaagaaaacattgtgacccctgagaaactcttatttttatcttgtagaaaccaagtaasttagactatttttttcttttctttggttacagggatcccagagccaaatatgcagcccctcacatttgttaggactgtgtagaatgagtgatgtgggccaatctttgccttgccttattctgattttctacttttattttgccttcctcatgattccctctaatttccatttttatcctgttttgggcatatcagaagaaaggaggaagacaaaatctacacaatatttaaaaattgaaaaataccatattttggactaccactccaacagagcaatcaccagtgagttcaagctcagaatcttcctaattttctgtatgcccacaatctagtggaaaaggatgtttgccttttgttgaataaaaagcaaaatctcagggtggccatagaagaatcctcaagaaagcaaatgctagcagaggggcaaggggtggcatttctgagtttatgctcagattacagccaacctagacagagaaattacaaccaaggctcagaggaatgcgaaattctggtctccactgggcatctggtcttgttcattcgcagagtacgattcc

SEQ ID NO: 705571 - DNA, 626 bp, Homo sapiens
gcaggataaagcatgtgattttcaagaaacatacattttctcatttctgtataaatgtagaacattttggttatgttcacaaatattttatagacttataagactggatagtattttggcaggtcttctaatttatcctgcctgttccaagaaagattattcaagtatcagcttaaaaacatatatatgtaattttgcaagctattatatatatatcattttaaaataaattatgcaagttttatcctttttgaatatttgaacaccacatatttctgagtttttgaaagacagtaacaattcatgaaaccaagcaggttctaargaatgggtcaaaaaacttttcttcagaggccaaatcacaaaataggatctacatacaaatactcatcatttcaacgatctattgctgcttaacaaaataaggggctaaaaaaccaatcatcatttcatttcatttggctaaaatgcatgagtgtaaaattcagatggcgctcctttgggcaatgcttctgctttatgtggcttcaactggggtcatttactctgttgcattcagctggtagctgggctgtgctggaagcttcaagaggattcatgcaggtgactaatgagaaatctccccg

SEQ ID NO: 705572 - DNA, 643 bp, Homo sapiens
tgtaacaaaaataacccaaagaccagttgacattctcccaagaaagagaatgtgaccatttgaagactggaaagttgacttcactcagatgcctagaaaagctggaaattataaattcctgttagtatttgtagctaacttttccagatgggttgaagcttatccaaccagatccagaaaaaaagccactgaagtggccaaagctctgttaaagaaaataatccctcattttgggcccccctgctctatacagagtgataatgaatcttcttttgtttctgagattatataaaaagtaagtgaaacattacagattgattggaagctaacactcattatgaagaccacaatcagcagggaaaacagaaaagatgaatcacatgcaaaaaaagaccttggcaaaactctgccaagaaacacatttaaagtgggatacctcagatcagagtagcaccctgaaatgggcttaggttgagtccttttgaagttgtatatgggatatctttccaaacttccccrccaggaatcccacccttagatttaagaaatgagtaaaaaattaaacaatatatacaacatttaggacaagtattaacaattatacatcactttgctctttccaggcaggatacatttgcctgga

SEQ ID NO: 705573 - DNA, 2089 bp, Homo sapiens
tgagaattggctggccctatgagaactggccggccccatgtttagccatccccatacagcctattatggtgtcacactttcctacttataactacctgacagcttctgtgaatacaattttgcctgtatgtaatcagacagcatatgaaaagaaggtaatgctaatctaacacggctaagaaaaattgctttactaattagtagaagattttcccataaaatggaatgttcccctgaggagtacgtatttgtttgcaggcaaaaagggctagtcttaggcatttcattgtttatggaatgacatccaagtaggtcaacgcttgttaggttccctcataattccattaaccttacatcctgcaaatgatacaaaactctggactagctcattaaagcttttcactggagttgttcatgatttatctgggggaaccacagacaaggatgaatatttctttagattctctttacttccatggtagtggttcaacaacatgtattaagaaacctttccaaagcccttattgtaatagctaatgagactaccagcttgcttccagaatagcaaaaatcaccttagcaagagtaattctagataatataatagctttggattctattttagctgagcaaggaggcatttgtgtagcaattaattcctagttttgctcttatatcaacacttcctcacaagtagaaaccagcattgaccagattagacaacaagccacaaagcttcagcaaatcttatatcattatgccctctgcttcaggaagcagaggagtgattttctagcctgttttcctgggtaccttctggaatcgaatctctactaacaggaataataaaattagggttawctatactaattatccttgaaatctaccactggttcaaactagtcatgatctgtattcagaaaacataaacaaatttcaaaaaccacttataaacaattgcccttaatccctccactcctcaaaagggggactcaaagttatgtgctccattatgccaagctttttcattccaaagtcttcaatcaatacctcattcagcaggaagcagccagactagagttgacatccctttctccatagaaacggaataaaaaattaatagtggggaatttgtaaccaaagcagtcacttcattttggaaccaaatagccattctgtcttttacaatgcctaactgtgtgcttgcttagaaattccaggaacttacctcaagatgaaaccaaagttgtgaaaagaccccttggaaaaaatgctgagcagttaatcttcaatcctatgcagtttagatgacaccagccagacactggactgcccattactcaagataatcattggaacaagacatgctgaactgtgtgtatctaactcctacacatagattcccaagcttcttgcgctttaaaataccttctgccaggctgagaaacttgagatggtctttgtgacattagtctgccatcctcttgggttgtcagtgcttatcatgcttttcgtctcaccaacctttttctatccagtctggcttttgagcagtgagcagcccaacctgagttttgctgcattgttaaagttaccatttataatagtattataattatgatatcgataggacccagatgatcttatcatctcagatgatggtttaatatgttatatttatataatatataaattatatatatacatatacatacaaacatatgtattcacatataatcagtaatattgagagccaagtatctataaaaaacttctccctaaaaattatttcttaaatgtattgcataaaatatatttgaagataaaaacttcatggaagcctcatgaagaaaacaaatggtagagaaatatcaagtaaaatcttcatgaaagtggaaatccaaaaacttaagcatagtactagagggcttttgccctagggacatttgctaaatcgtgggaactgatatgtgatttttatagattcgcgaaaaacaagacacaataaagcaattgcccaggtctgctcaagattgaaatataagaggccttacctaccctcctgccctcaaatacagcctggaaccca

SEQ ID NO: 705574 - DNA, 1960 bp, Homo sapiens
attaatttgtatttctattcagatatagtacaaatagaacaaattagtctaagattccagattaatacattacctaaatcttactactacaaatacacaaatgactcagcttccctcatatttagttcttatttctgatggacaaccatacataaagaagtcatcagaaaaacccttgccaatgactccagtaatcacagtgactcaatccaaatgattctctgccttctctgaaagcatacaaaggatagagctgcagttaaacacttcatagtgcatcttccatgtcttcaggtcagctaatgatatctcaacagttcactggccacccctcagttctcctcctctttcaggtagtcaacatgtatccccagaaattttccaaattctgaggaagtgggtcccaccaagaattattttagggtgtggtctcttataaaagatggctctgatgggaatttccatcctaaggatrtatatatccaaacacattacaatctaacctttttggttactattgtaaatgcttagctatcataacaatcagaatatgctacttgaagcacgggtttatttaattattattacaatgaagccttttgcctagcaccttaataaatcgaactgcattaggaagtccccagtaatgggaagtgtgtccagtgacttccaattctggtctggaaattatttaagcattaaagtaagttgcatattttttcatcagcctaaatctgaataatttattgagtaaccttaagggataatttcagatcctttgaggaaaatgtcaacttaatcccggaaactgaaacaggattgctatctacagtggattttaaaatggacttatagaccgtgtactgtggctcacgcctgtaatcccatcgctttgggaggctgtggcgggtggatcacttgaggtcaggagttccagaccagcctggccaacatggcgaaaccccatctctactaaaaacacaaatattacccgggcgtggtggcatgtgcctgtaatctcagccactcagaggctaaggcagtagaacctgggaggcagaggtggcagtgagccaagatggcaccactgcactccagcctgggcaacagactccatctcattaaaaaaaaaaaaaaaaaaaaggacttgtaattctttgataccccgcccattcagaggcaaagcgcctttgatcctaggctctatgactgcttgactaatacaatacaatacaagtgacactgtgccagtttctggctccgaaccttaagaaaatggcaactcccacaacctgtagctcttggaatagtggttcttcacacccagctgtgaggaagccaagcagcacaggagagaggctatgtgaacagattccagctaacaaacccagctgaggcccctgccaacagccagcatcaacacccagacatatgggcaaatgagacttcagatgatttcaatccccttccagccatcacagctggccacacgtgagctctgtccaaactgcagaccgtgaacagcataaataattgttatttaatccagtaaattggggtggcttgttctacagcaatagaacactacccgagattcctggtggctacagaaatctttccaggtatatttcctacttgtggatactggatttctccgaatgagaaaagctctgccctgtggctcagtatacaagctgggagatgtaaatttctttttagaatatttaagttcagacttggttaatgaaagtttttttgtgaattaacacacttacaataaaatgataccaaagtaatctaaagtgcttttctggagcattgggcaggtctgaggggaatctcggggatttctaatggtctgtgtctgtcttatttcacttagaataatgttcttcaggcccatccatccatgttgtaacaaatggcaggatattctcctcttcaaggctgaatggtattc

SEQ ID NO: 705575 - DNA, 1268 bp, Homo sapiens
catgtccagtagaactttttacaatactgcaactatctgtgttctctgagaaggtagctactagtcacatgtggctactgagcatttgaagtgtggattagtgcagttgaagaactgaattttaaattttatttagttttagttagctaaaattaaatataaatagccacatatggctagcagctaccgtattggacaatccacctctagatcattcattttacagctaagaaacggaatccacaaatgttaaatttctcattgttgacatgtgactagataggggaaaaactggaactaaagtgatgattgtaaaagcagaaaggaaacactgaaaactaaatgtacaagaatttaaaagacttagtaataaaattaatttaggtatcaagttaataataataatactattaaaagttaatgataattccatagctgcaagccaaagagattgaggagataggatggctttaataatagacaagacagaaatttgagggaaaggaagcagttgataaattcagtttttgacatatttgataaaagaagaaatgttttagattaagagaccaaggagacataaaaaactcaatgcatagtctttgattgaattttgctttaaataaatccattgaaaagacatttctggtacaactgaggaaatttgagtattgactgagtattagatgataataaagaattattcattttgttaggtgtgataatgttattgtgattacatagaaaatatacttattttttggaaacataggcatttgaatgtgaaatgccatgatgtgatgtctataatgctctttaaactgtttttttaaaaaggtaatggcaatatggcaaaatcttaacattgattaaatctatgagctgggtataagagtacgcatgctattctctattttctattttttaatttaataaaaaggtctatggtcactttataaattcaggagtatttcacttaattttcttaatagccgatatttgtataggattttataggttttggactttgtcttatagtcccccttcctacaattctacaagagcactattatccctgttttatagatgaagagactgagactcggagatgttaagtatttgcttaaatacttaataattaacagggctagacctagaattaagattttctggcttccattctaattcttattccattatatcacaggagctactttattttatacatagtataaatttttatctgagaaacttgaaatttwaaaaaa

SEQ ID NO: 705576 - DNA, 1883 bp, Homo sapiens
aaaatattaaattaacataataggtaaaaataattgatgtattaattatacatttataggcatagacattcaaatgcaaaaaataaataaataaatattttattttaaatcttaaatcttaaaatctatactccctatcacattaaaaaatatgatgagtggtttgatcatttattttattataaaataaaaatagatacattaaagtgagaaaaacttaccagatttagacttaaaatatctgtattcaaatgttcttttccctaatttcttacttttaacgtttcagaggcttagttatgtgactaagaaaatatggataacgaaaactatctcataagtttaaaaatgtaattgaagtaacacatgaatcagtttatgaacaaaggcgaattgtgacaaaatagaaagaaaagaatcatttgtatcactgacacatgagacttggatttctagtaagcaaaagaaaaagctatcaggcataggaaataatgtccttgaatcaaaacgaattataattattgattttttaaaattgattatcttcaatattctgacttgaagagtaaggcgttggtctgaatagcattagatataatgagagtactaagcacacacacacaaaatatactcttttcatatttgaggagtttccattgtattattattattttttttttgttgtttgcattcatgggtgtatttaggcaaatttccctgattcttcatagcatcgctagcaaatgaaccctttccctacctggtcccgcggtagcaactacgatgatcttatgtgggataatagactcagagaaaacatctctaggtgaaaataaataataaataaaagatcatcattcacttggctataacaataaaaatgctagtcctaaagtatacagtaataaggaaatacacagattcactgatattcttattagtcctgctctggtgtattactttcttatggctgaggtaacaaagtaccacaatctgggtggctaataaaaacctagtgtttttttttctcacagttctggaggctacaagtctggaaatcaagatgttagtaggatcatgctctctgagacactgggaagaattctttcttgccttttcccagttactgtgggttgtcatcaatccttgtgggttgtcatccttgacattctttggtttgtagctgtatcatctctgcctccatcaccagttacagagttctccctatgtgtctctgtccttttcttaaaaggacactagtcatatcctaatgatgtcatcttaacttgattacatctgcaaagactctgtttccagagatcacattctgaggtactacgggttagaaatcaaaataccgtttgcagggacaaaatgcaactcataatatttgcatccttgaaaaatgtatatgtatttatattaattatacattttgtttatattaaatatatgtaatatgtattatataagtatatataatatatatttatatatgtatatataatacatatctatatatatgtaaatatatattatatatttacatgtacaaaccaatgggtacattatgagttgtactgtgtccctgcaaaagatatgtatatataaaaaacaagccaacatgtgtattacacacacacatacacacccattggtttgtataaatatataatatatatttayatgtaaatatataatatatatttatatgtaaatatataatatatatttaatatatttatatgtaaatatataatatatatttaatatatttatatgtaaatatataatatatatttaatatatttatatgtaaatatataatatatatttaatatatttatatgtaaatatataatatatatttaatatatttatat

SEQ ID NO: 705577 - DNA, 1175 bp, Homo sapiens
aattcccacttaagtgaagaactacctttgtataataaatataatgtcacagtaatttctcaaatggaaatgttttagtttactgtttgctaaccgttgctggagtcatggtgtctgctcaggggacagaaaggattaatttaatgtgattactgactagtggtcttctaatctgatttaattccaaatatgagtatgtctgatgtttctcctttctaggaatatttcaagacatgatctcatttcattgtttgtgctgcattggtttgttgaatatgtttttgttttttcagtgtatagtgattcaatggcggcaatcacttttgagaacctgaaataagaaaggatgccagatttatatgaaaaagggacttttcagataccaagggcagtacaaataaatgcacatgaatagtagtcctagtggaaaataagacagcttgaacacgagatttttattataagtattacaaattgaaatgtaatttagctactccattttaattaatggaagatgattattaaacacaaatttgaacttttagaaccctcaagtcatcattctagataatcaaatttttcagaaaagcatatagctttaaatcataattttataaaaactaattttaggtggaaatttttctaataatttcctgccttgtgaatcagagcatattgaatttaactttttaatgagtactcagggttattgttatgagcataaagtataggactgcattactaccactgagggtagcaatacactagtatcagaggaatccaggctttcctactttctgattttccattgttattctattttagaaatatctggaaaaaaaagtactaataatggccttgtgtacttttttaatgtttactgaaaagagtcttcaggcaacatctmtatgttcatcttaaattccgaaaccgtaatagcaacataaaactcatcagggttgatgtaacacaaatgtcagtagatgctgcttcacaactgtattctaattatatggactaacgtgatcatgtgctctgaactgcaaacaattttgcattaataacaactcacaattcaattcaggaagcatttctgaacacctttatattcttaatgaaggattaaatggaaacctaaaacagttaattctctcaaagagattttaatcttagga

SEQ ID NO: 705578 - DNA, 1486 bp, Homo sapiens
  misc_feature 923, 938, 959, 963, 966, 1253: n = A,T,C or G
aacaaaaaycataatctttgggatagaaactcttggagatagcaggattatatttaattatgtgtgtgtgtatacatacatatacatacacacgattacatatatttaattatgtgtgtatacacacatatatatacacacacgcataattaaatatatatataatcatcctactatctccaagatacacatacacaccacacacacacacacacacacacacacacacacacacacacacacacacatattaatagcagaactggccagaggataaagagaaaaaagcaagtaaggggaatgtaatataagaatactgaatttctaagatgcaggcaagtgatgcctataaaaccattgacgttgttcagtgaagggagacgtttggtgaatttaactcacatttgcacaagttttgctgtttacaaaatgatttcaaaattacaacttcatgtcaaggtgcctgtgaggaaggcagggcagggcttatcccaagttgaataagggagtcgggggcagggcagttcttattatcccttttgcaaatgaggaaactggggctctggggtgtgttccagttcatgaagtcaattaatgacggaactttttttttttttttggaggcagtctcactctgtcccctaggttgaagtgccatggtatgatctctgctcactgcaacctccaccttctgggttcaaatgattctcgtgcctcagcctcccaagtagctggaattacaggtgtgtgccaccacacctggattatttttgtatttttagtagagacgggttttcgccattttggccaggctggtcttaaactcctgacctcaagtgatccacctgcctcggcctcccaaggtgctgggattacaggcatgatccaccatgcctggccagaacatcttttcttttcccttnatctgatcttcctgncatggaaatagaacatgatgncagntgntttttacagaatcatgggggcaaagggagcttatatgtttaattctttatgaaacaatcaaggattattaacaaaaccttctccttgggcctggcatggggcaggcctccagaggaaactcagatagccaaagtcacggtttatgaattcaagaaagagaagtcagctgctctcttcagggggccataaatgaaaattggcctttatgcttcctgggacttggtcatcagatccaagaggtcagaaggttactagacacagatcagggttgagagctggcaccagcncaggtcataagtacacacagtaccctcttccaatatttaacaggacacagtggcctctgagttaactgcctatgtcttatcaatgcatgtgtagtgccagtgttgcctgtggttttatagtttgactctttggaacttacacagatccaggaaaattatttcaaacattacataagggatttggatatgtctctttatgtcaatttccagttggatattcagtttgttatatc

SEQ ID NO: 705579 - DNA, 1486 bp, Homo sapiens
  misc_feature 923, 938, 959, 963, 966, 1253: n = A,T,C or G
aacaaaaatcataatctttgggatagaaactcttggagatagcaggattatatttaattatgtgtgtgtgtatacatacatatacatacacacgattacatatatttaattatgtgtgtatacacacatatatatacacacacgcataattaaatatatatataatcatcctactatctccaagatacacatacacaccacacacacacacacacacacacacacacacacacacacacacacacacatattaatagcagaactggccagaggataaagagaaaaaagcargtaaggggaatgtaatataagaatactgaatttctaagatgcaggcaagtgatgcctataaaaccattgacgttgttcagtgaagggagacgtttggtgaatttaactcacatttgcacaagttttgctgtttacaaaatgatttcaaaattacaacttcatgtcaaggtgcctgtgaggaaggcagggcagggcttatcccaagttgaataagggagtcgggggcagggcagttcttattatcccttttgcaaatgaggaaactggggctctggggtgtgttccagttcatgaagtcaattaatgacggaactttttttttttttttggaggcagtctcactctgtcccctaggttgaagtgccatggtatgatctctgctcactgcaacctccaccttctgggttcaaatgattctcgtgcctcagcctcccaagtagctggaattacaggtgtgtgccaccacacctggattatttttgtatttttagtagagacgggttttcgccattttggccaggctggtcttaaactcctgacctcaagtgatccacctgcctcggcctcccaaggtgctgggattacaggcatgatccaccatgcctggccagaacatcttttcttttcccttnatctgatcttcctgncatggaaatagaacatgatgncagntgntttttacagaatcatgggggcaaagggagcttatatgtttaattctttatgaaacaatcaaggattattaacaaaaccttctccttgggcctggcatggggcaggcctccagaggaaactcagatagccaaagtcacggtttatgaattcaagaaagagaagtcagctgctctcttcagggggccataaatgaaaattggcctttatgcttcctgggacttggtcatcagatccaagaggtcagaaggttactagacacagatcagggttgagagctggcaccagcncaggtcataagtacacacagtaccctcttccaatatttaacaggacacagtggcctctgagttaactgcctatgtcttatcaatgcatgtgtagtgccagtgttgcctgtggttttatagtttgactctttggaacttacacagatccaggaaaattatttcaaacattacataagggatttggatatgtctctttatgtcaatttccagttggatattcagtttgttatatc

SEQ ID NO: 705580 - DNA, 1108 bp, Homo sapiens
cccttggcatttgggctgtgaccagctggggaagggaggctgcagctgtagtatgtaggatgactattagattaggtttgttttcagagacttgctttcatttctatctagtaaaccctacaagccagaaacttggatgccatccttgacaactcattctccctcactcataactcaaagaagtgtcaagatctgaaaactttatttcccaaagaactcatcagcttacctaccgcccccgagacttatggccactgccctaattcaggccttcctcacctaacccctgatggaaaaatcacctccttaactgccactctgcctttactctttccctgttcaatcttgtaaaaagcaaatttccagccaggcttggtagctcatgcctataatcccagcaatttgggagaccgaggcaggaggattgcttgaggccaggagttcgagatcagcctgtgcaatgtagtgagaccctgtctctacaaaaaaatttaaaaattagctaagcatggtggcacacacctgtagttccagctacttgggaggctgaggtgggaggattgcttgagcccaggaggcagagggtgcagtgagccatgattgcacccctgcactccaacctgggcgacagagcaagactttgtcaccctctcccccaaaaaagcaaatttccttctaacattaccaagtcattcccagcaaataagtttgtttagttcagcaaacaagacccctctaatcacctccaagccctctctagcagcagatcctaaggatctagagcttttgacattcccactccaacctgattggtgctcccattcaaaccatggtcctttctcatatcatgcctttgtttatactggcccaccagaagtgccatccatccacccactgacaacttaaccctttagaactcagctctggatatcacctccttctaaaggcctttcctgtcttccttcccaggactcaacgcaccctttcagcaagattaggtagccctcctatgggattccatcatagccctygcagacctctccgctgttgcactgagtgtattgtattgtgagtgctggtttgtctgcggctctttcagtcctttcct

SEQ ID NO: 705581 - DNA, 1108 bp, Homo sapiens
cccttggcatttgggctgtgaccagctggggaagggaggctgcagctgtagtatgtaggatgactattagattaggtttgttttcagagacttgctttcatttctatctagtaaaccctacaagccagaaacttggatgccatccttgacaactcattctccctcactcataactcaaagaagtgtcaagatctgaaaactttatttcccaaagaactcatcagcttacctaccgcccccgagacttatggccactgccctaattcaggccttcctcacctaacccctgatggaaaaatcacctccttaactgccactctgcctttactctttccctgttcaatcttgtaaaaagcaaatttccagccaggcttggtagctcatgcctataatcccagcaatttgggagaccgaggcaggaggattgcttgaggccaggagttcgagatcagcctgtgcaatgtagtgagaccctgtctctacaaaaaaatttaaaaattagctaagcatggtggcacacacctgtagttccagctacttgggaggctgaggtgggaggattgcttgagcccaggaggcagagggtgcagtgagccatgattgcacccctgcactccaacctgggcgacagagcaagactttgtcaccctctcccccaaaaaagcaaatttccttctaacattaccaagtcattcccagcaaataagtttgtttagttcagcaaacaagacccctctaatcacctccaagccctctctagcagcagatcctaaggatctagagcttttgacattcccactccaacctgattggtgctcccattcaaaccatggtcctttctcatatcatgcctttgtttatactggcccaccagaagtgccatccatccacccactgacaacttaaccctttagaactcagctctggatatcacctccttctaaaggcctttcctgtcttccttcccaggactcaacgcaccctttcagcaagattaggtagccctcctatgggattccatcatagccctcgcagacctctccgctgttgcactgagygtattgtattgtgagtgctggtttgtctgcggctctttcagtcctttcct

SEQ ID NO: 705582 - DNA, 1307 bp, Homo sapiens
gtacagtctcttattcatgcaaaagcatttaagagcacctgttttaaagattagagcttaattcttgcactagatgttttcaacttcttgtttaaatatgggaaygttactgtttcttgtctttcttacctgtctacaggcttttttatccgtttctgtgcccatttcagattgataacactctcaataccagctagccttctcatattccctctgctgttgtttcttcccctaccttctcttactcttgctttgttcagtcctctcatgtttctccattcttcatacttagaattctctttaacttctcatctggatgaatgccttttaatttttatgtagattcaaaccccatttattagtagttttcttctaagtagacaacctcttctttacccagaacttctctttgtaaccgtttcatccatattaggctgtgtattttaaacaaacaaataaaaataagttgatatttatcttccttcttagtcaaaatgcttcttggaggttggggactctttctttgacgtgttctgtagagtatatttcagtttgtctttttagtaaagatggcaacatctcattggattaggaaaaattgaaaaccatatgttccatgtaaagaaatcatttattgtttcgatatttgtgccactcaaacactgaatgctttatttctgcaaaagcatattgattcgttttctgcagtgaatcttatatttttcaaccttcttaaacaatatattctgaacttgatttagtctttacatgatgatttcctgataatcattattgtattagtttcctagggctgccataatagaatatcataaattgggttgtttaaacaacagagatttattggatcacagttctggaagcaagaagtctgagatcaagctattagaagggatggttccttatgagggttgtgggagggaatctgtttcatgcctcttgcttagtttctggagtttatggcaatcgttggaattccttgacctgtaaggcatctccctgatttctgccttcatctttaatatagcattctcccagtgtatgtgtgcccatgtccaaatttcccctttctctacaggcataagtcatacttgagtagagaaccaccttactccattacgactgcatcttaattagggaccctatttccaaatatggtcattttctgagatacttggggttagaaatttaacatatgaattttgggagggcacaattaaacccataataattatgaacactattttttgtgcagagctttaccacaatgatttctgcaggactcaata

SEQ ID NO: 705583 - DNA, 1307 bp, Homo sapiens
gtacagtctcttattcatgcaaaagcatttaagagcacctgttttaaagattagagcttaattcttgcactagatgttttcaacttcttgtttaaatatgggaacgttactgtttcttgtctttcttacctgtctacaggcttttttatccrtttctgtgcccatttcagattgataacactctcaataccagctagccttctcatattccctctgctgttgtttcttcccctaccttctcttactcttgctttgttcagtcctctcatgtttctccattcttcatacttagaattctctttaacttctcatctggatgaatgccttttaatttttatgtagattcaaaccccatttattagtagttttcttctaagtagacaacctcttctttacccagaacttctctttgtaaccgtttcatccatattaggctgtgtattttaaacaaacaaataaaaataagttgatatttatcttccttcttagtcaaaatgcttcttggaggttggggactctttctttgacgtgttctgtagagtatatttcagtttgtctttttagtaaagatggcaacatctcattggattaggaaaaattgaaaaccatatgttccatgtaaagaaatcatttattgtttcgatatttgtgccactcaaacactgaatgctttatttctgcaaaagcatattgattcgttttctgcagtgaatcttatatttttcaaccttcttaaacaatatattctgaacttgatttagtctttacatgatgatttcctgataatcattattgtattagtttcctagggctgccataatagaatatcataaattgggttgtttaaacaacagagatttattggatcacagttctggaagcaagaagtctgagatcaagctattagaagggatggttccttatgagggttgtgggagggaatctgtttcatgcctcttgcttagtttctggagtttatggcaatcgttggaattccttgacctgtaaggcatctccctgatttctgccttcatctttaatatagcattctcccagtgtatgtgtgcccatgtccaaatttcccctttctctacaggcataagtcatacttgagtagagaaccaccttactccattacgactgcatcttaattagggaccctatttccaaatatggtcattttctgagatacttggggttagaaatttaacatatgaattttgggagggcacaattaaacccataataattatgaacactattttttgtgcagagctttaccacaatgatttctgcaggactcaata

SEQ ID NO: 705584 - DNA, 1307 bp, Homo sapiens
gtacagtctcttattcatgcaaaagcatttaagagcacctgttttaaagattagagcttaattcttgcactagatgttttcaacttcttgtttaaatatgggaacgttactgtttcttgtctttcttacctgtctacaggcttttttatccgtttctgtgcccatttcagattgataacactctcaataccagctagccttctcatattccctctgctgttgtttctkcccctaccttctcttactcttgctttgttcagtcctctcatgtttctccattcttcatacttagaattctctttaacttctcatctggatgaatgccttttaatttttatgtagattcaaaccccatttattagtagttttcttctaagtagacaacctcttctttacccagaacttctctttgtaaccgtttcatccatattaggctgtgtattttaaacaaacaaataaaaataagttgatatttatcttccttcttagtcaaaatgcttcttggaggttggggactctttctttgacgtgttctgtagagtatatttcagtttgtctttttagtaaagatggcaacatctcattggattaggaaaaattgaaaaccatatgttccatgtaaagaaatcatttattgtttcgatatttgtgccactcaaacactgaatgctttatttctgcaaaagcatattgattcgttttctgcagtgaatcttatatttttcaaccttcttaaacaatatattctgaacttgatttagtctttacatgatgatttcctgataatcattattgtattagtttcctagggctgccataatagaatatcataaattgggttgtttaaacaacagagatttattggatcacagttctggaagcaagaagtctgagatcaagctattagaagggatggttccttatgagggttgtgggagggaatctgtttcatgcctcttgcttagtttctggagtttatggcaatcgttggaattccttgacctgtaaggcatctccctgatttctgccttcatctttaatatagcattctcccagtgtatgtgtgcccatgtccaaatttcccctttctctacaggcataagtcatacttgagtagagaaccaccttactccattacgactgcatcttaattagggaccctatttccaaatatggtcattttctgagatacttggggttagaaatttaacatatgaattttgggagggcacaattaaacccataataattatgaacactattttttgtgcagagctttaccacaatgatttctgcaggactcaata

SEQ ID NO: 705585 - DNA, 1307 bp, Homo sapiens
gtacagtctcttattcatgcaaaagcatttaagagcacctgttttaaagattagagcttaattcttgcactagatgttttcaacttcttgtttaaatatgggaacgttactgtttcttgtctttcttacctgtctacaggcttttttatccgtttctgtgcccatttcagattgataacactctcaataccagctagccttctcatattccctctgctgttgtttcttcccctaccttctcttactcttgctttgttcagtcctctcatgtttctccattcttcatacttagaattctctttaacttctcatctggatgaatgccttttaatttttatgtagattcaaaccccatttattagtagttttcttctaagtagacaacctcttctttacccagaacttctctttgtaaccgtttcatccatattaggctgtgtattttaaacaaacaaataaaaataagttgatatttatcttccttcttagtcaaaatgcttcttggaggttggggactctttctttgacgtgttctgtagagtatatttcagtttgtctttttagtaaagatggcaacatctcattggattaggaaaaattgaaaaccatatgttccatgtaaagaaatcatttattgtttcgatatttgtgccactcaaacactgaatgctttatttctgcaaaagcatattgattcgttttctgcagtgaatcttatatttttcaaccttcttaaacaatatattctgaacttgatttagtctttacatgatgatttcctgataatcattattgtattagtttcctagggctgccataatagaatatcataaattgggttgtttaaacaacagagatttattggatcacagttctggaagcaagaagtctgagatcaagctattagaagggatggttccttatgagggttgtgggagggaatctgtttcatgcctcttgcttagtttctggagtttatggcaatcgttggaattccttgacctgtaaggcatctccctgatttctgccttcatctttaatatagcattctcccagtgtatgtgtgcccatgtccaaatttcccctttctctacaggcataagtcatacttgagtagagaaccaccttactccattacractgcatcttaattagggaccctatttccaaatatggtcattttctgagatacttggggttagaaatttaacatatgaattttgggagggcacaattaaacccataataattatgaacactattttttgtgcagagctttaccacaatgatttctgcaggactcaata

SEQ ID NO: 705586 - DNA, 595 bp, Homo sapiens
accttgcactaatgtgaaattggatgtaaacatatgacatttagtgttataaatatatagaaagtattctgccacgctgtaaagtgaatgaaagcgaattatattacctcattttatattttaaaaactaaatttttctaaatcccattgtatcagtttttcaaagctaaaagtaaggatgatttaattctagtgtgtgatgtgatttttttaatttaaaaaatactattatttatagatggtgttgtttgaagaaagaaatgattcaaaaaatagtataatattttaagcctaatatttattatatacttggagctcttaatgcctggactgttacttaatttggaattawaagtacatatttaaaaaataagcaacatgcttacagttacttaaaccagggagtgttgttcagactctcttggtcttcctgtgctgcttcaaacagcagtggctgcatgtgacaagatgtacaatatgatgtgaaatggggcacgctaaacccataatacagtacatttcaatggccattttgtgttgttaaatatgtttatttagcccttcttcaccatctacctcaccagcaattcagtca

SEQ ID NO: 705587 - DNA, 2059 bp, Homo sapiens
  misc_feature 473: n = A,T,C or G
gtaagacaggagagactagttcagaggtctttcaggaataaatttaaatacatagaaatatgagtgtgcaaatgaaggttaattccatgtataaaatatagacattaagaaacagagatactcttacaagtacagctaggttatgtgagcaacattaccagaatatatatatccattgcagatgaattgcatattctgtgataacctggaaaatgcgctttcatcgacaacaaactgtttttgaaatgaaagtaagtgactggaaaaatagtgcttttggcttttaataactatgaaaaacattgatttaaaacaaaggcataatcataatttaaactaaattaactaattaataattgcaagatgttttaacaatataacatctacatgatactagtaataggaataataataaaaatggaaaatctggtaatcacacagaaattaatcagatgactctcatgttttagaanatcagaattttaaaatataaataaataaaacatatgttgccttctaatctattccttgagccaagtaatattgtattggttaggatttttctcttactatatcctattttattaaaaaatgtaatttgtcttggtatagggaatagagctcataagaaagtttagaaaatatattttttaaaggtttaattcccactggatcacattctgtcctcagatttcaagaggcagcctccttaaagtttcctgtgactatttgagggcaaaatttggtccattatttagaaatagcaaagggggcatttaaagcatatgttcagagacttaaccatctgcctgctttattatgaataccacagagttatgagaaattggaaggactcaaaaattgaaccagagttctatgcaagattttaaaaatacagcactctgatttttaaaaaaatgttttgcaaccacctacttttgctaagtatatcttattagtcctctatgtaagaatagtattattccacctttttgacgtatggtaagtgaatggcaaagtatagttgagtgacatgaacctatagaaagttaagcataatcctttctctctgatttaacccactaaatatgaatacctgtggagttttagacttgtcatcagtgaaactcacagtgacttagagaaacactataaaatggtgactgctggaacaaaaatgaagtccagctgctagtttctgggctgtctacaaatgagttgcaagagacatgcggaggccagactaaagagcccttctgtaatccaactgtgatgtaatgaaagtatgaatcagctattggttgcccatgctgaggggaaaagcaacaaaatatttttttaaagtgaaaattgacattattcccaggtggtactgtattcctttggtatctggaaggatatgagattcagaaattaataaaagaacaaaaatcatatttaagtcccaagcatagtaatatttcacctagagtggtcgtataaggacatatcaatatgaatataattgttaaaatgtctaatactcaattagagttcttccacattacytgagttttactagaatcagactgagactggctggatcattctcagaggaaaatatgcaaagtagactaaacttagcctgaatacaagtttttggtgttgagatgactatcactctttgttgcttaatgaaaagtatttacttaaaagaaaataatactggaagcaaaggactgaaatatttggtttgaagactctaagtaaaaaatgtatgtgtatgtatcatgtatacttctatatttgtttacataaaaatgttttcagaaatatacactttattaggctgattaagccaaaacttttttgtgtgtgtaatcgaaagactgaacacaaaaattttaaaacagaactgaaagatgtcagtcagaactgaattaatgacctggggctgaaaatacctatgtcaaatttcatatggattttttcatggtggtattttaattttatatctccctaaatggaagtgctgcagtcaagtgaatctatagcccaaagaataatgaaatatgtcaat

SEQ ID NO: 705588 - DNA, 606 bp, Homo sapiens
ttagacattttgatgtttgaaggtgtggaaacagactgatacacacacacactcaattgtcaggaatgactccagcagtcactgtgagagctcgctccctttgaacagatgagtgtgtacttgkagcaggaagggcgcccgggcagccctccccactgttgatctgtcctgtttcctgaccattccctcgtgtgaatgccgttatgttcaacacaggtctttttctgattatggttctttttcaatacacttagtcctaataaattcccacttccaacagaaaagcattattcataccatgtattcgtgtgccatcttgagattttagaaacgtcaggtgagcatatcatgtgctttgggaaagtctatacaggttgagtatctcttatctgtaatgcttggaagcagaagtgttttggattttgggtttgtttttttttttttcggattttggaatatttgcattattcttactggttgagcatcctaagtgtaaaaattcaaaatcagaaatgccccaatgagcattgcctttgagtgtcaccgtgaaaaagttttggatttggaggcattttggattttggtttttgggtttgggatattgtc

SEQ ID NO: 705589 - DNA, 865 bp, Homo sapiens
gaatcaaggactctaaaatatggttaaaggaacccacagttaagtagaaaacacaatgatgttagttactggtaataatgtaaaaagtgctgcagttgatgaataaatatattttataaatttagagagaaaaatgattacatttgatctggaaagcgaaagataccaagaaatttttgagctagattgtgaagtttagtgggtttcattacataagaaagtcagcagagggaagaatgtgaacaaaagattaagtgtgagcgtccatgttgtgtttggggagggcaaatgtgccagtgggtttggggatggargtatattggatgagcactgttgtggaagagcgacctgtcttccattctcctccctccctgttataatcttgtacatccctcaagactgagctcaaattccattgttttcttgatatcatttctgattgttcctaaccacgaggatctctcccattcaatcacatactgtctcacattgttctctaagtgctgtattagcaaacgctttgagatggcaaattatcttttcttctgtatgcacatctagaacattgctgggcacataatgttagataaatgcttattgattaattgaagatggcatttttcttctgtgttacttaaagtctaagttaaagtgattaagctgaaaatgcatacacaactagtaactccaaagcaacactgaggtacatgcctgataatgatgcttagaaatgaaaatacagggaatgattagtaaaatttctgatatttagaagcatcaacttgatgtcagtaggcaaatgaacacttggaagtgagaaaagcacaagaaaatgaacagatgtgactggacactgggtagaagg

SEQ ID NO: 705590 - DNA, 865 bp, Homo sapiens
gaatcaaggactctaaaatatggttaaaggaacccacagttaagtagaaaacacaatgatgttagttactggtaataatgtaaaaagtgctgcagttgatgaataaatatattttataaatttagagagaaaaatgattacatttgatctggaaagcgaaagataccaagaaatttttgagctagattgtgaagtttagtgggtttcattacataagaaagtcagcagagggaagaatgtgaacaaaagattaagtgtgagcgtccatgttgtgtttggggagggcaaatgtgccagtgggtttggggatggaagtatattggatgagcactgttgtggaagagcgacctgtcttccattctcctccctccctgttataatcttgtacatccctcaagactgagctcaaattccattgttttcttgatawcatttctgattgttcctaaccacgaggatctctcccattcaatcacatactgtctcacattgttctctaagtgctgtattagcaaacgctttgagatggcaaattatcttttcttctgtatgcacatctagaacattgctgggcacataatgttagataaatgcttattgattaattgaagatggcatttttcttctgtgttacttaaagtctaagttaaagtgattaagctgaaaatgcatacacaactagtaactccaaagcaacactgaggtacatgcctgataatgatgcttagaaatgaaaatacagggaatgattagtaaaatttctgatatttagaagcatcaacttgatgtcagtaggcaaatgaacacttggaagtgagaaaagcacaagaaaatgaacagatgtgactggacactgggtagaagg

SEQ ID NO: 705591 - DNA, 1524 bp, Homo sapiens
  misc_feature 1368: n = A,T,C or G
ggaagccaggcatgatgacatgatcaatatctgggcctgagatgtaagcaccagtgttgtgttgaactccaggaaacctctaagagaaagctgccctgctggggacggagcttctccggcagtcctgcggctccctctcctccacactgtgactcatccatgacagccagcgacggtcagggcacggaggtcatgcccaagcacacacgagtgaaccacagaaggctgtcctggatgctaagcagtcactaattctgccctggcctgctgaccttctatgtggagaagaagtgcacttctggtctctttcatattcttgatacagtgaggagtatgtcctactgctgtttacctccacatactggtgcagcctcgtatgtttattgcagcactagtcacaatagcaaagtcatggaatcaacctaagtgcccatcaacggacgaccggataaagaaaatgtggtacatatataccatgaaatactacttggccataaaaaaagaatgcaatcatgtcttctgcagccagacggatggaatgggaggtcactatcctaagtgagtcagaaggtcaagtgtcacacattctcccttggaagtgggagctgaacggtgagtacacatggacacacggagtggactaacagactgtgggctccaaaaagcgggaggggtggggatgagcaattacctgctgagtacaacacacacgacttgggtgacrggtacatgaaaagcccagactccaccacctcccagtacatccacacaaagctgcacctgcatccccctagatctgtttttaaaaaaacaaaaccagtgcagggccaggtatgcagccagcctgctcactccagagcgagtccaggctcttaccttctgcatgctgagtcgcagttccgatgttcttatgcttcttccatcagcaaatctcaatttgtcaagattcgtgacagattcttccccagcatttggtttaattggagggactttatctcctaaaacaacaacaaaaagagctagaatttaacttttgaaaaccgttttaaaaaaacaaatggatttagtactacacacaaaaatgtagcatagccgctcaaggagcctggaaacggtgtaagtctcctgagctaacacactgccaacccaccctacatctgaggccatctgttgagttgttgtcctattttaaagaacagacataaaaggcaaaactgttggcacacagtagatatccattaagtgatcttagagtgaataaactagaaatcatctctaaaattaaaaaattaaaatgtaggccaggtgcagtggctcacgcctgtaatcccagcactttaggaggctgaggtaggtgaagcacttgangtcaggagttcaagagcagcctggccaacgtggcaaagcctcatttctactaaaacacaaaaattatctggcatgagaactgcttttacccccaaaggtggaggttgcagtgagccgagaacccccattgcactccagccttagcgacagaacgag

SEQ ID NO: 705592 - DNA, 1524 bp, Homo sapiens
  misc_feature 1368: n = A,T,C or G
ggaagccaggcatgatgacatgatcaatatctgggcctgagatgtaagcaccagtgttgtgttgaactccaggaaacctctaagagaaagctgccctgctggggacggagcttctccggcagtcctgcggctccctctcctccacactgtgactcatccatgacagccagcgacggtcagggcacggaggtcatgcccaagcacacacgagtgaaccacagaaggctgtcctggatgctaagcagtcactaattctgccctggcctgctgaccttctatgtggagaagaagtgcacttctggtctctttcatattcttgatacagtgaggagtatgtcctactgctgtttacctccacatactggtgcagcctcgtatgtttattgcagcactagtcacaatagcaaagtcatggaatcaacctaagtgcccatcaacggacgaccggataaagaaaatgtggtacatatataccatgaaatactacttggccataaaaaaagaatgcaatcatgtcttctgcagccagacggatggaatgggaggtcactatcctaagtgagtcagaaggtcaagtgtcacacattctcccttggaagtgggagctgaacggtgagtacacatggacacacggagtggactaacagactgtgggctccaaaaagcgggaggggtggggatgagcaattacctgctgagtacaacacacacgacttgggtgacaggtacatgaaaagcccagactccaccacctcccagtacatccacacaaagctgcacctgcatccccctagatctgtttttaaaaaaacaaaaccagtgcagggccaggtatgcagccagcctgctcactccagagcgagtccaggctcttaccttctgcatgctgagtcgcagttccgatgttcttatgcttcttccatcagcaaatctcaatttgtcaasattcgtgacagattcttccccagcatttggtttaattggagggactttatctcctaaaacaacaacaaaaagagctagaatttaacttttgaaaaccgttttaaaaaaacaaatggatttagtactacacacaaaaatgtagcatagccgctcaaggagcctggaaacggtgtaagtctcctgagctaacacactgccaacccaccctacatctgaggccatctgttgagttgttgtcctattttaaagaacagacataaaaggcaaaactgttggcacacagtagatatccattaagtgatcttagagtgaataaactagaaatcatctctaaaattaaaaaattaaaatgtaggccaggtgcagtggctcacgcctgtaatcccagcactttaggaggctgaggtaggtgaagcacttgangtcaggagttcaagagcagcctggccaacgtggcaaagcctcatttctactaaaacacaaaaattatctggcatgagaactgcttttacccccaaaggtggaggttgcagtgagccgagaacccccattgcactccagccttagcgacagaacgag

SEQ ID NO: 705593 - DNA, 1524 bp, Homo sapiens
  misc_feature 1368: n = A,T,C or G
ggaagccaggcatgatgacatgatcaatatctgggcctgagatgtaagcaccagtgttgtgttgaactccaggaaacctctaagagaaagctgccctgctggggacggagcttctccggcagtcctgcggctccctctcctccacactgtgactcatccatgacagccagcgacggtcagggcacggaggtcatgcccaagcacacacgagtgaaccacagaaggctgtcctggatgctaagcagtcactaattctgccctggcctgctgaccttctatgtggagaagaagtgcacttctggtctctttcatattcttgatacagtgaggagtatgtcctactgctgtttacctccacatactggtgcagcctcgtatgtttattgcagcactagtcacaatagcaaagtcatggaatcaacctaagtgcccatcaacggacgaccggataaagaaaatgtggtacatatataccatgaaatactacttggccataaaaaaagaatgcaatcatgtcttctgcagccagacggatggaatgggaggtcactatcctaagtgagtcagaaggtcaagtgtcacacattctcccttggaagtgggagctgaacggtgagtacacatggacacacggagtggactaacagactgtgggctccaaaaagcgggaggggtggggatgagcaattacctgctgagtacaacacacacgacttgggtgacaggtacatgaaaagcccagactccaccacctcccagtacatccacacaaagctgcacctgcatccccctagatctgtttttaaaaaaacaaaaccagtgcagggccaggtatgcagccagcctgctcactccagagcgagtccaggctcttaccttctgcatgctgagtcgcagttccgatgttcttatgcttcttccatcagcaaatctcaatttgtcaagattcgtgacagattcttccccagcatttggtttaattggagggactttatctcctaaaacaacaacaaaaagagctagaatttaacttttgaaaaccgttttaaaaaaacaaatggatttagtackacacacaaaaatgtagcatagccgctcaaggagcctggaaacggtgtaagtctcctgagctaacacactgccaacccaccctacatctgaggccatctgttgagttgttgtcctattttaaagaacagacataaaaggcaaaactgttggcacacagtagatatccattaagtgatcttagagtgaataaactagaaatcatctctaaaattaaaaaattaaaatgtaggccaggtgcagtggctcacgcctgtaatcccagcactttaggaggctgaggtaggtgaagcacttgangtcaggagttcaagagcagcctggccaacgtggcaaagcctcatttctactaaaacacaaaaattatctggcatgagaactgcttttacccccaaaggtggaggttgcagtgagccgagaacccccattgcactccagccttagcgacagaacgag

SEQ ID NO: 705594 - DNA, 578 bp, Homo sapiens
actcttgtgtttccaagatgtcttgaaaaaagttttaaaggttttttttttttataaaattatatrtattttttcttcaataggtaacacatgcaggagataggaggtatgaaatgcaggagtcaaacaggccctgtcccgcctaccgcctctcctcgggaccaggctgtgggtctcttgacggtctgctcaaatgcttctaggcttgctggtgtctcttttccttttgtttataacgctttaaaaattgatcatccattaaaattgacttttttctttcggtggacagttctacagtttcttttttcttttttttttttgagacagtgtctcctccctctgttgcccaggctggagtgcagtggtgtgatctcggctcacagcaacctccgccttctaggctccaacaatcctcccacctcagcctcccaagtagctgggactacccaagtgtgagccaccatgcccagctaatttttgtatttctggtagagacggggtttcaccaccttgcccaagctggtctcgaactcctgagctcaagcaatcggcctgccttggcctcccaaagtggtggg

SEQ ID NO: 705595 - DNA, 578 bp, Homo sapiens
actcttgtgtttccaagatgtcttgaaaaaagttttaaaggttttttttttttataaaattatatgtattttttcttcaataggtaacacatgcaggagataggaggtatgaaatgcaggagtcmaacaggccctgtcccgcctaccgcctctcctcgggaccaggctgtgggtctcttgacggtctgctcaaatgcttctaggcttgctggtgtctcttttccttttgtttataacgctttaaaaattgatcatccattaaaattgacttttttctttcggtggacagttctacagtttcttttttcttttttttttttgagacagtgtctcctccctctgttgcccaggctggagtgcagtggtgtgatctcggctcacagcaacctccgccttctaggctccaacaatcctcccacctcagcctcccaagtagctgggactacccaagtgtgagccaccatgcccagctaatttttgtatttctggtagagacggggtttcaccaccttgcccaagctggtctcgaactcctgagctcaagcaatcggcctgccttggcctcccaaagtggtggg

SEQ ID NO: 705596 - DNA, 578 bp, Homo sapiens
actcttgtgtttccaagatgtcttgaaaaaagttttaaaggttttttttttttataaaattatatgtattttttcttcaataggtaacacatgcaggagataggaggtatgaaatgcaggagtcaaacaggccctgtcccgcctaccgcctctcctcgggaccaggctgtgggtctcttgacggtctgctcaaatgcttctaggcttgctggtgtctcttttccttttgtttataacgctttaaaaattgatcatccattaaaattgacttttttctttcggtggacagttctacagtttcttttttcttttttttttttgagacagtgtctcctccctctgttgcccaggctggagtgcagtggtgygatctcggctcacagcaacctccgccttctaggctccaacaatcctcccacctcagcctcccaagtagctgggactacccaagtgtgagccaccatgcccagctaatttttgtatttctggtagagacggggtttcaccaccttgcccaagctggtctcgaactcctgagctcaagcaatcggcctgccttggcctcccaaagtggtggg

SEQ ID NO: 705597 - DNA, 578 bp, Homo sapiens
actcttgtgtttccaagatgtcttgaaaaaagttttaaaggttttttttttttataaaattatatgtattttttcttcaataggtaacacatgcaggagataggaggtatgaaatgcaggagtcaaacaggccctgtcccgcctaccgcctctcctcgggaccaggctgtgggtctcttgacggtctgctcaaatgcttctaggcttgctggtgtctcttttccttttgtttataacgctttaaaaattgatcatccattaaaattgacttttttctttcggtggacagttctacagtttcttttttcttttttttttttgagacagtgtctcctccctctgttgcccaggctggagtgcagtggtgtgatctcggctcacagcaacctccgccttctaggctccaacaatcctcccacctcagcctcccaagtagctgggactacccaagtgtgagccaccatgcccagctaatttttgtatttytggtagagacggggtttcaccaccttgcccaagctggtctcgaactcctgagctcaagcaatcggcctgccttggcctcccaaagtggtggg

SEQ ID NO: 705598 - DNA, 467 bp, Homo sapiens
taataataataaaaaaaaaaaaaagaaaaaaaaaaaggaagcaagggtatttcagaaagagaaagtaggtggggcaggtaatcaatccaataaacatttagtgcacatctactatctgccatcttagtatcaggtgctgaggattcaacaattgccttttgaccttttcaaaaaggagaaagacatatagaccaggtattccacactaagtactcaatacaataattcaagggttttgtgataaatatatatttggtctctgctcctgattcctgacacwttgctcttaaaacccttggaaaaaaaaaaaataagagctatctatgacaaatccatagccaacatcatactgaatgggcagaaagctggaaacattccccttgagaaatggtacaagacaaggggtgcccactctccccactcctattcaacataggactgggagtcttagcaagacagtcaggcta

SEQ ID NO: 705599 - DNA, 621 bp, Homo sapiens
atttcacatgctctgacacagtgcacttaactgcatagagggaaggcagtctgagattcagggagctaaataattcagttgcagggctagagaaacaaaaataatcagtcaacaytttttctttttttcttttttttttttctggagacagggtctcactgtgtcacccaggctagagtataatctcagctcactgcagcctcgacctcccagacgggtgatcctcccacttcagcctccagagtagctgggactacaggaacgcaccactatgactggctagttttgtactcttttcttcttcttctttttgaagagatggtttcaccacattgcgcaggctggtcttgaacttctggactcaagcaatcctccgaattagcctcccaaagtgctgggattataggcatgagccactgtgcccagcaagtcaacatattttggaatcactgggctagctgtatcatgtaatgcatagaagaataggaaacaaactattggaaacagagacagtgggattcagagctgtagtggagtagactacacacagacataaaccaggagtcgtgaacgtgagcacccacgaagctgtacaggtaatataaagagggaagcaggctg

SEQ ID NO: 705600 - DNA, 246 bp, Homo sapiens
tggtaaaatagtatatacatgtttgcaatttcataaaaaataaaaatatatcctattattttattctaaagtacatctttttaatttttaattcatctgttactasttgtacattaaaattacattgcacattttaacagtgtatacattcttagctccctttgactccaccataaaaagccgttattgtctcttcctaaatttaggcaataaaacctctctcatgcctgtgaaaatcttcacatg

SEQ ID NO: 705601 - DNA, 586 bp, Homo sapiens
acatgctgaaaccctgtctctattaaaaatacaaaaattagccaggtgtggcggtgagcacctgtaatcccatctactctggaggctgaggcaggaraatcacttgaactggagaggtggaggttgcagtgagctgagattacaccactgcactccagcctgggcaacaagagcaaaactccatcttaaataaataaataaataaataatcaatatcacattggaaaaagtatggggaaatcacctatctatctctctaggaagatgtcaattactatagcatttttgaaggtaatctggaaatactacattttaaaatggaacatatactttaaccaagcaatcttaaaagtctaaagaaaaaatgaattcatatgtaagggtgtacatgcaaggatatttatttcagcactgcttattaaagaaaaacaatttaaatatttattgatagagcaatgcattcaaattattaactattttagatctattaaaaatgaattcacatcataagaaaacaacagatctgaatctaggaaagctttaattttttaattaaaaccaaaataaatacagatgcaaaaatctt

SEQ ID NO: 705602 - DNA, 663 bp, Homo sapiens
taagaactgttgctgcaaacaccaagatggggcaatgcgcccaatctaggcactgcccatagcgtcgggcatttttacttagagagaagaaagatggggagaaatgctctcctacactaagaatatttacttggaaaggggaaataaactggttagaaggttgggtgggtcattaaaagtttacagtctaaatgaattcttgatggctctgcccataacttgtttgagctttgactgtaatatcttcttgaaacaagacactcggatggcaataagcacrcatgagttttaatgttggtgatttaccaatgattaaagaaacattctgcacagtcagccctccatatccctaggttccatatctgtggatcaaccaactgcagatagaaaataatgggggaaaaaaaggatgcttgcatctatactgaacatgttctgctttttttgttcttattattccctaaagcataacaactatttacgtagcaatggcattatattaggtatcataagtaaactagagatgatttaaagtatacaggaggatgtgcgtaggttatatgcaaatactatgccattttatataagggactggagcttccatggatttgtgggggtgggcaaggggggagggtgttgccctgaaaccaatcacccatagat

SEQ ID NO: 705603 - DNA, 663 bp, Homo sapiens
taagaactgttgctgcaaacaccaagatggggcaatgcgcccaatctaggcactgcccatagcgtcgggcatttttacttagagagaagaaagatggggagaaatgctctcctacactaagaatatttacttggaaaggggaaataaactggttagaaggttgggtgggtcattaaaagtttacagtctaaatgaattcttgatggctctgcccataacttgtttgagctttgactgtaatatcttcttgaaacaagacactcggatggcaataagcacgcatgagttttaatgttgrtgatttaccaatgattaaagaaacattctgcacagtcagccctccatatccctaggttccatatctgtggatcaaccaactgcagatagaaaataatgggggaaaaaaaggatgcttgcatctatactgaacatgttctgctttttttgttcttattattccctaaagcataacaactatttacgtagcaatggcattatattaggtatcataagtaaactagagatgatttaaagtatacaggaggatgtgcgtaggttatatgcaaatactatgccattttatataagggactggagcttccatggatttgtgggggtgggcaaggggggagggtgttgccctgaaaccaatcacccatagat

SEQ ID NO: 705604 - DNA, 532 bp, Homo sapiens
tcaaacaaattaccttccccgatgtgaatgggtctcatccaatcagttgaaggccttagactgacatcccccaaggaggagaaaatctgccagcagactgccttcagactcaactgaaacatcacctcctccctgggtctttagcctgcagcctacttgctctctcttgtctgtctctctctctccccctgtgtgtatgtgtatacacatacacacacacacacacacacacacacacagtcatgcattgcttaacaacagggatacttctaaagaaatgcatcattaggcaattttatcattgtgtgaacagcatcgagtgtacttatacaaacctagattgtatagcctrcatggtgtatcagacatctaggcaatgtggtatagcctattgctcctagctacaaacctgtatagcatgttactacactgaatactgtaggcaattgtaatgcaacagtaagaatttatgtatctaaacatagaaaaggtacagtaaaaataccctataaaagatttaaaatgtttgctt

SEQ ID NO: 705605 - DNA, 655 bp, Homo sapiens
gattactgagattagttttgaagagtaagtaggggctggctttgcggagtgggtatttcagaagaggaaatggcaggtaggcagtaaagaaggaagtgcactgttaaaaatcaaatacgtcaatatttacatacacttcatgtgccacataacgatgtttcagtcaacaattggcagcatatacaactgtggtcccataaaattataatagtctatttttactgtatcttttctatgtttagatatgtttaaatacatgaatacttaccattgtgttacaaatgcctgtagtattcagcatagtattcagtacagtaacatgctgtacagatttgtaccctaggagcaatagagtataccatatagcctatgtgtgaagcaggctataccatcaaggtctgtgtaagtatactctatgatgtttgcacaacgatgacgytgcctaaggacacatttctcagaatgtctccctattgttgagcaatgcatgagtgtacatatgtatgatctatggacatatcttaagcaatgttaaaattattacacatttccttcactcttgctcagtaaataattgagtaaatgcctgaaattgaaacagtctttaactggctgtaatagttgacatgaccactgtgcaagtaaagggctactc

SEQ ID NO: 705606 - DNA, 655 bp, Homo sapiens
gattactgagattagttttgaagagtaagtaggggctggctttgcggagtgggtatttcagaagaggaaatggcaggtaggcagtaaagaaggaagtgcactgttaaaaatcaaatacgtcaatatttacatacacttcatgtgccacataacgatgtttcagtcaacaattggcagcatatacaactgtggtcccataaaattataatagtctatttttactgtatcttttctatgtttagatatgtttaaatacatgaatacttaccattgtgttacaaatgcctgtagtattcagcatagtattcagtacagtaacatgctgtacagatttgtaccctaggagcaatagagtataccatatagcctatgtgtgaagcaggctataccatcaaggtctgtgtaagtatactctatgatgtttgcacaacgatgacgctgcctaaggacacatttctcagaatgtctccctattgttgagcaatgcatgagtgtacatatgtatgatctatggacatatcttaagcaatrttaaaattattacacatttccttcactcttgctcagtaaataattgagtaaatgcctgaaattgaaacagtctttaactggctgtaatagttgacatgaccactgtgcaagtaaagggctactc

SEQ ID NO: 705607 - DNA, 2037 bp, Homo sapiens
ctctccctatccctcatgaaacctaacttaactccttgccttttgataactccaattctttccaatatatcctttcttttcctaagctattttgagctgattattgcttcttgcaatccccaacatattgaagggtcagaatagatttattctatttttttaatataagctcagacaaagcaaggtggagaatgcagcaactatttgaggaatatctgttgtctatgtgtgtcagagagggagttccttcccaaagatttattctctacctctttcttaacaagttttgttggaggtctcaatatgccaactgaaaattacattttcctgcttcttttgcaaacaggggcagccaggtgacacaattgtagccaaggtatgttctacaccggtcccagagtccccaatgggattaagagccagttgccaacattttagatcaagtactcactattgctttacttccattccctgtctcatgtctctactcccttaccagtgtttcctgggactacctcccaaataaggtacttgaatccttacctcagagtctgtttttggggaatccaaactaaaacaggagttaacttccaccagatcactcttgacccataaggaatggaagtggaaagcttactgtgtacctttttgtccctaaggcagagaattctgacatgcattgctcaaggctgctcaggaggccctgtgagtttcagcacacagggaacaactactccatcataggctcttgtattggttttgtctcattccctattacatcacgctggttcttcattcctatttcctgggatcatttcctaacaaattaccctcatcggtgcttttaacttaggttttgctctcagggaaattcaaagtaaggtgatgtatataactagatcacttggcaatctcgaaaatttcatttgaaggagagatgaagatgaaaccacctttgcaagaattacaacagtgagataaatctaacctaactgaccccatcttgcttctaacctccaagttgcccttgctcattcctgagtgtaggccaaaccaacaattggaggaatttagtttatagtttaactttaaaacaaagaacaaactccttcctaaaactaatgataggccacaagattagaattatgggaggggcctgaattctgctaaaatataggtgtcattaaatgataaccagctatagttccctagcccrctttcctataattccttgctgcttgggagtcatacggccagaggtcgcaaggtctgtaactttcctgccattaccaaattgttcctatagataacataacctaagattggtcttttgagatgtttttcagactttcacattctggcaaccaactgactccacctggacccatgactcatgactcaaccagtcctgtggcccccagccagacacagattcagcacatgaggtccattcaccccatgattgcatctccagccaatcagcagcacccattccctagccccctgcccaccaaattattcataaaaaccctagcctttgagtgcttgaggaggtactacttaaagataaccgttaaagtattaccagactatcttgctaattatagaataaataaatgtctcaatgcgcttttctgatagctaaaccttgatgaaactatttctttgtatcacataacattgcacaatctttgtgacttttagtctgcttcccaaataaaagtataccattattaaaacataactatttttatgggatatactgctaacaaattagcaccaattttgacaaatgtcattttgcttcctatcagagacaaataaaaaaggtcattcgttttatatttttattttgatgtttaaaatgatctataaatgcataaaattcataaacatatggaaatgcatagaatgcatgtaaaacataaagaactggcaaagtctggaaaatacagggtcttataaatttctagaagttgccttgaaaaactcactgccaccaatgttgtgtgatgtgttgaacaataaatgtaaaaa

SEQ ID NO: 705608 - DNA, 2037 bp, Homo sapiens
ctctccctatccctcatgaaacctaacttaactccttgccttttgataactccaattctttccaatatatcctttcttttcctaagctattttgagctgattattgcttcttgcaatccccaacatattgaagggtcagaatagatttattctatttttttaatataagctcagacaaagcaaggtggagaatgcagcaactatttgaggaatatctgttgtctatgtgtgtcagagagggagttccttcccaaagatttattctctacctctttcttaacaagttttgttggaggtctcaatatgccaactgaaaattacattttcctgcttcttttgcaaacaggggcagccaggtgacacaattgtagccaaggtatgttctacaccggtcccagagtccccaatgggattaagagccagttgccaacattttagatcaagtactcactattgctttacttccattccctgtctcatgtctctactcccttaccagtgtttcctgggactacctcccaaataaggtacttgaatccttacctcagagtctgtttttggggaatccaaactaaaacaggagttaacttccaccagatcactcttgacccataaggaatggaagtggaaagcttactgtgtacctttttgtccctaaggcagagaattctgacatgcattgctcaaggctgctcaggaggccctgtgagtttcagcacacagggaacaactactccatcataggctcttgtattggttttgtctcattccctattacatcacgctggttcttcattcctatttcctgggatcatttcctaacaaattaccctcatcggtgcttttaacttaggttttgctctcagggaaattcaaagtaaggtgatgtatataactagatcacttggcaatctcgaaaatttcatttgaaggagagatgaagatgaaaccacctttgcaagaattacaacagtgagataaatctaacctaactgaccccatcttgcttctaacctccaagttgcccttgctcattcctgagtgtaggccaaaccaacaattggaggaatttagtttatagtttaactttaaaacaaagaacaaactccttcctaaaactaatgataggccacaagattagaattatgggaggggcctgaattctgctaaaatataggtgtcattaaatgataaccagctatagttccctagcccgctttcctataattccttgctgcttgggagtcatacrgccagaggtcgcaaggtctgtaactttcctgccattaccaaattgttcctatagataacataacctaagattggtcttttgagatgtttttcagactttcacattctggcaaccaactgactccacctggacccatgactcatgactcaaccagtcctgtggcccccagccagacacagattcagcacatgaggtccattcaccccatgattgcatctccagccaatcagcagcacccattccctagccccctgcccaccaaattattcataaaaaccctagcctttgagtgcttgaggaggtactacttaaagataaccgttaaagtattaccagactatcttgctaattatagaataaataaatgtctcaatgcgcttttctgatagctaaaccttgatgaaactatttctttgtatcacataacattgcacaatctttgtgacttttagtctgcttcccaaataaaagtataccattattaaaacataactatttttatgggatatactgctaacaaattagcaccaattttgacaaatgtcattttgcttcctatcagagacaaataaaaaaggtcattcgttttatatttttattttgatgtttaaaatgatctataaatgcataaaattcataaacatatggaaatgcatagaatgcatgtaaaacataaagaactggcaaagtctggaaaatacagggtcttataaatttctagaagttgccttgaaaaactcactgccaccaatgttgtgtgatgtgttgaacaataaatgtaaaaa

SEQ ID NO: 705609 - DNA, 1089 bp, Homo sapiens
tgcatatatcttggagcacataggcaaaaagggatgtctagaagaaaattcaacaacatgtcaaacagtagctacttaagggttgagtgttttttaaatgtatacattattctttgttgttagaattatttattatgactcatttcattgccggatttatttcatttttgcacattagaatttgtcatattgctaatggaggggaatttagatcatcacagatttctaggttctaaaagggaccatcctgtattaccctctcctttaaagatgaagaaagtgaggctcagaaggcagaatttccttttttaaagttttagatgaattaactacaaggatgggtatgtcttaggtctcctaattcctactcaaggttctctcctctatgttttgctgagttcaatagggtattaaatttaaaataatacatagaagactatgtttaatatggatattgaaagcactttttacataatgacataacctgtttgatgacaatacttctaagtattcatatatgtacttattatatatacacatatgtacagaaatatacatacacacacaactttaaatccagattgcattctctgcagcagtggtccccaaccgttttggcaccagggactggtttcatggaagacgatttttccatggacggggtgttggcagggagatggatggttttgagatgagactgttccacctcagatcatcaggccttagagtcttataaaaagcatgcaacctagatccctcacttgcacagttcacaatagggtgaatgctgctgctgatctgaygggaggcagagctcaagtggtaatgctcatagtggtctttggcccgggggttggggacccctgctctacattatctacttttatagataaaagctggctaaaactttatctaaattccacatctagaatttccatggagaagttgatctggttattcccttaccaccgttacccccattatcagccagtggttgtcaggggaacagataaaatttcccaaactgacaattgagattcacaaaatatattacatctcatttgtttttatattgagatattaaaggga

SEQ ID NO: 705610 - DNA, 1089 bp, Homo sapiens
tgcatatatcttggagcacataggcaaaaagggatgtctagaagaaaattcaacaacatgtcaaacagtagctacttaagggttgagtgttttttaaatgtatacattattctttgttgttagaattatttattatgactcatttcattgccggatttatttcatttttgcacattagaatttgtcatattgctaatggaggggaatttagatcatcacagatttctaggttctaaaagggaccatcctgtattaccctctcctttaaagatgaagaaagtgaggctcagaaggcagaatttccttttttaaagttttagatgaattaactacaaggatgggtatgtcttaggtctcctaattcctactcaaggttctctcctctatgttttgctgagttcaatagggtattaaatttaaaataatacatagaagactatgtttaatatggatattgaaagcactttttacataatgacataacctgtttgatgacaatacttctaagtattcatatatgtacttattatatatacacatatgtacagaaatatacatacacacacaactttaaatccagattgcattctctgcagcagtggtccccaaccgttttggcaccagggactggtttcatggaagacgatttttccatggacggggtgttggcagggagatggatggttttgagatgagactgttccacctcagatcatcaggccttagagtcttataaaaagcatgcaacctagatccctcacttgcacagttcacaatagggtgaatgctgctgctgatctgatgggaggcagagctcaagtggtaatgctcatagtggtctttggcccgggggttggggacccctgctctacattatctacttttatagataaaagctggctaaaactttatctaaattccacatctagaatttccatggagaagttgatctggttattcccttaccaccrttacccccattatcagccagtggttgtcaggggaacagataaaatttcccaaactgacaattgagattcacaaaatatattacatctcatttgtttttatattgagatattaaaggga

SEQ ID NO: 705611 - DNA, 780 bp, Homo sapiens
gaatacagcaatacttaaccatatgtatggccatactggttaagtatggctgtattcaccgttcttgcatattatgaataataaaagtaactgattgggtagtcggggcatacacccagttctacttggatgcatttctatttagctcaccatttgaaatcttagtagcacacagaaaacttataacctaatgattttcatgttcatacatgacaagagataaactcaatcatagcctcagagtgaaagatcttagatagcgatacacagcttccacctcccccaagtactttagagaaaaaaatatatatatatgcttggatcatttagtctacctccactaataatatatgatcaacagtgaattcagaaaggggaagggaagtctgttgaagggtgagcttaggcaaggttgactctaaaatctgctaaggaatctggtcacatttgtcataacccaaatgtctaaaatgacagaaaatacagtgcggtagttaagaggatggtttttaagataagttgaatgaatatgaatcccaaagctawtgtgagatccttgaacagagtaatcaactttaaaatgggcatatagttgtacaagttattagagatattgtgaatattaagtagaataatatatatatagcgttgcccttggcatgaagaaaatacagacatgtatggttctgtaatatgaattaggccatctgttactgtaataggggaatgtccttcatgtaatgcagaagacattggttcatatgtgatgtttttctccta

SEQ ID NO: 705612 - DNA, 780 bp, Homo sapiens
gaatacagcaatacttaaccatatgtatggccatactggttaagtatggctgtattcaccgttcttgcatattatgaataataaaagtaactgattgggtagtcggggcatacacccagttctacttggatgcatttctatttagctcaccatttgaaatcttagtagcacacagaaaacttataacctaatgattttcatgttcatacatgacaagagataaactcaatcatagcctcagagtgaaagatcttagatagcgatacacagcttccacctcccccaagtactttagagaaaaaaatatatatatatgcttggatcatttagtctacctccactaataatatatgatcaacagtgaattcagaaaggggaagggaagtctgttgaagggtgagcttaggcaaggttgactctaaaatctgctaaggaatctggtcacatttgtcataacccaaatgtctaaaatgacagaaaatacagtgcggtagttaagaggatggtttttaagataagttgaatgaatatgaatcccaaagctaatgtgagatccttgaacagagtaatcaactttaaaatgggcatatagtwgtacaagttattagagatattgtgaatattaagtagaataatatatatatagcgttgcccttggcatgaagaaaatacagacatgtatggttctgtaatatgaattaggccatctgttactgtaataggggaatgtccttcatgtaatgcagaagacattggttcatatgtgatgtttttctccta

SEQ ID NO: 705613 - DNA, 2718 bp, Homo sapiens
tgcagagagaaataaacagaaaagaatataagacacaatggcacaggaaatacatgtcaaaatgcatataactggatatcttcaaggaagagagtgaagaatgatgtagaagtattacttgaatagatgatggctaagatttttctcaaatttacagaatcaacagttataagcaggtaaaataaaaagactttaagccacaatagacttatggttcacttgtcaacataaataatggaagctacaatgcaatggaatggcatctttaaattgctgaaaatgtagctgtcaacccaaaattttatactaagcaaacatagtgttttgtaaaagagggcaaattaataacatttctaggcaaataactaagagaatttgtcactaggaaagctgcattaaaataaaatactaaagggagcatttcagacaatagaaagtgaccccaggtagcatcacagaaatatagaaagtacataatggacaacagaaatacaaaaatatgggcaaaagtaagtattaagattttttaaaacccaagcatgataatgtcatatgtattttcaggtatatataaaattaaaatgcctgactacagtaactcaaaaggtgagaattcataaataaaatagaagcattaaggtcttagcattgtttgcaaagtatgttataaactagtactaattttttattagactgtgataagtcaaggatgatactggtattctttgtatattcactaaatgtatagtaaaaaatataaataacaaattaggctaaaatggaaagttgattatttctatagatggcaagacagaaaagatatgtggtaaaaaatagcaagatggtagatataaattaaaatagatcagtaactgcattaaatgtaaatggaacatataattaaaagaaaaaattgtcatattaattttaaagctatccactctatgtttcttacaagcaaaaacaaaaaaattgaaagtgaaaagatagaaaagatatattatagaaaaactgacctctaaaaatctggtgtaactatactataaaatgtagcctataacaaggaagcattaccagagataaacagggatgctacataatgatagaagattaaatccctcaagaaaatacaataatttaaaatttcatgtacttaaaaagatagcttcataaaatgaacagaaataaaattgaaatagacttatcaacaatcaataggaaatttcagcatctctatcaattgcagaaaaaaggcataaggatatggataaactgaataacaagtaaaattgttagtgtgcaaaatcaaatcaattacctccagttcaaaatgacttctgcctgttaaactccaattcagcttttccaaagttttctcaaatatttccatgtaaatacaagaaaggaagaaataaacaatttccccacatttagatgcatgatgccagcttaggtagtaagagcctaaaaatttatatcasagcttcaatatgttgtctaaatcaacaatttcttaacattgaaacccaacaattggtacaaagatactgtgccttctccatgaggtaggataatcaattcatacagaactggtagtctattcctacttttaccattaataaactactctcagggagtacggccaacctctatattcaacaacgaaggaaaatcatttacatctcaataaaacagaaaaaaatattggaagacaaatttgtaatgctccttctctccttctcccttttgtgtatgtagtttacaaaagttcagctgaagtagcaatgtttgtcctaggggaatatatctttaaggctgaaactcaggaatttgggggtccaacaaagaggacaggggtttgtcaaatagcactacacagatatgtctatttcacttacatttaagtatgcctgcctcacaaatagtaaggttattcccaccaaactgatacacagtacaatcgatcatttttgttacatatttgattaaagataaacttttgaaatatttttacattctaaaaataaatggtagtatagatttttgtgcttctttctttctcccactattatacggttacctttattattgtaattgctctaaatgcttaggctgtattggctgaattaaaattaatattcttcaaaattatttcttctaaatctattggtctgcaaaactgagtttctttgagcaaggatcacattctaattatttatcttcctttactgtttagcacagtgcctggcaatagtaaataagagttgtttgaagaacaactatattatatgttatgacaattgactgcaacataatctattgctctgacattatagatggtttcttagtaaactacttttcaatatacagcaattgagaagacagataattatatagttatagttatgttaatgccatataactctttgaaagaatctggtctacaggcattagcaccataaaataattttggtcagtgtgtggatggtcgatattaaagttagattttaaataattttttattgatagtctgtatctttcatttagaggtcataagaataaatattgatgtcgagacaaaaaatacaaatgctaaagcattgataaataccaaagcaatttgctggcagatattaacattttttaaaaaattaccttagtagtctattgcattattctagacccttttcaaggaaaacatttaatttactgtggaat

SEQ ID NO: 705614 - DNA, 3629 bp, Homo sapiens
gcaacttttattgaagtagcagtgctcagcagcagcagaggtatcgttccttgtggagtaggactaccccataagcagtgtgcccaaagtagctcaggggcggttctgcactcatatttatacccacttttaattacatacaaattaaggggtggattatgcaaaactttttagaaaaagggtggtaacttctgggttgttgccagggaaaggggcagcaacttccagatgttgccatgtcaatggtaaactgctatggcactgacgggtgtgtcttatggaaaggtgctttcgcctctctcccktttcagctagtcttcaatgtggttcagagtctgagcctcacctctggagttgagtcccatctcttaccttgggtgtattcccatttcacagctgagaaaataaattcatagactggagaacaatatttctccctcctcccccaggcatagttactggtatagctagaaatcataagttttaactgaatagtttaaattttcttttttcactacattcagttataacatctagaaacctgcttttcctattaagaaagtcagctaggtcaatgtcatggaattcagtgaggaaaactaatagagtgtgattgtaaaatcccagagaattgctgaacgatgcagtctgcagtgctttcccttcctggcatgcattatagaaataaataaatcagagaggcatcctgtgtttgcggaggggagagagagagaggcagaagtggtgatccattatgcattgtttcccagagtgggacacggatgagccagcagtgccagagccggaacgtaaatattcatgaggatgtgggtggctacccagaataggtcgcactccagggaaagccatcccacatcttcttgtcacaagatgcgctatgcagtcacagagaatataacaccctccgaaggggaaaaccctgggtcctcttagaacagtctttgggagcttctactcaggaatagtagcaaagtctgggagagatggtctgatggaatctgcaaagaaatttcctttgcagaaagctggagagatgatggaattagtgtttcacacgggctttatgcctatgatgctcatcatttgctttgcctctaaatctgctacggctcttgcaaaacagcttcagtaatagagccaatgttcatgacagtttctcaaccataacagtagaaaatacattctgtgattattgtgatcttattattttaaaaaagaaattacgtctctaaaataatgcacttgggtccaaataacaatatttatgatttcatgagaaaaaaacataattattttataggaactcagagaattccaattttctcaaataaggttgagtgagcttaaataaacacatattctaagacatgcgagtaaggaagaagattacaaaataatcctgtaatatactattaatagctgtccaaaggcatattaaatgtcttacatttgtttttacatttgctgtgtacaacaaacagttttaaaatcatttaaatctaaacgaaagaaagagaaagagaaaaggccatagagagaaaaaaagagagggagagagaaataggcagagggaagggaagggagagaagaaaatacaatttttttcaccaaacaatactactattattatgtgtaatgcatgctgatattttctattctattccattttgttctatttgattctatttcctaaaatatgattcatgacaccttaaattgaccacatgacccaccattcagtacctttacatctcagtaaagagatgtgaaaaactctctcatctaaaatgattaaattgctgaatcacatattaaacatatgtgtatatttctttatgtgatatatattcctggaaaagtagcaagtgccaaagtttgcctccactttaaatacctctgtgtaactatggagaattgagattttatttatgcaacttttcggtgtgtggatatcaggaaataaagctatgtgccagaaaagggtatcatgtaataggaaatgcccattagataagaccccaagaagttataagcaaaatatagtggtgactgagaactaagcaatggagctcagtaaagcaaagccagacatattcatcagttactagaacaaagaaatcttccttgaaaagtcagaatcatagacaatgctcaatcagtattccagtctgaatttgggtactaacatagatacataagcctctaaaagatgatttaaagtgttttaggtttttaattgctctctcctcacaagcaaccggcaaatgcaactgtaattcttaacttcaatctatgactcaaatcatttccacagaaaaaattcctaggtaaataaacagctcaagagtcaagaattacaaaatataatacaaagaaacaagccactataggtgaaaacagaaaaacaaacaaataatacacagttgaaataaactcaaaagatcctaaaatactgacttttttttctcacataacgtgggagacagaattagctaactaaaagttatatccaaagagatgggatccagcatgcggccagagagtaaaaaaattgcatagaaatcatgataaattaagagctatggaggttagagtaagggaatctaatgaatataatcagaatttcagaaaaaaagatgaatgaaagaatgggaaagaggcaaagttgaaagaattaatggctgattattttccactgatgaaaaacactgatagatccaagaaccccaagaaagatatataaaatgaaacccacacctaaacacagcaaagtaaaattatacatacataaaaatatatacatacacataatggcaataattggttatataattggttgtataaaattatagttatattgtttaattttgaggaaaagcaggctaaaaccaaaattcttagtaatggcagaatgtaaattggaaaagggtaatcggacttgcagtttccttgggcatttaatatttacaaggactggctttatatttgctaaatctaatagatacatggaaaggactgaaataatttttaagataataagcaggaagtgaaatttctaaaaatagacaaggattcaagcatttcaagcaagaaagaaggtagaaaaagaattaaaagtaagacatgtaagaatagtatgtggaaatttggtataaattaatccagatatatgagaagttattatacatttaaaccggtttgtggtggattaactattgctgcaaattctttattactctccttttgaaaggtagcatttatttcctttcttattaaatctgggctggctctgaggctgcttaattaatagaatacagtggaaatgacactgggaaatttccaagcttagcctttaagaggactgtcagctttcaccttctcctccttggactattcacaattggaatgctcccaggcatagcccagcaactgcatggagaggccccatataggcacagtggttgagaggctcaaaaaactcctgcctgacaatcatgttacaaagccattttggatattacagcccagtggtgtccccaagtgatcgtgtaaaatcaatgccatgtggagcagaagagctgcctagctgagcccagtaaacctaggga

SEQ ID NO: 705615 - DNA, 3629 bp, Homo sapiens
gcaacttttattgaagtagcagtgctcagcagcagcagaggtatcgttccttgtggagtaggactaccccataagcagtgtgcccaaagtagctcaggggcggttctgcactcatatttatacccacttttaattacatacaaattaaggggtggattatgcaaaactttttagaaaaagggtggtaacttctgggttgttgccagggaaaggggcagcaacttccagatgttgccatgtcaatggtaaactgctatggcactgacgggtgtgtcttatggaaaggtgctttcgcctctctcccgtttcagctagtcttcaatgtggttcagagtctgagcctcacctctggagttgagtcccatctcttaccttgggtgtattcccatttyacagctgagaaaataaattcatagactggagaacaatatttctccctcctcccccaggcatagttactggtatagctagaaatcataagttttaactgaatagtttaaattttcttttttcactacattcagttataacatctagaaacctgcttttcctattaagaaagtcagctaggtcaatgtcatggaattcagtgaggaaaactaatagagtgtgattgtaaaatcccagagaattgctgaacgatgcagtctgcagtgctttcccttcctggcatgcattatagaaataaataaatcagagaggcatcctgtgtttgcggaggggagagagagagaggcagaagtggtgatccattatgcattgtttcccagagtgggacacggatgagccagcagtgccagagccggaacgtaaatattcatgaggatgtgggtggctacccagaataggtcgcactccagggaaagccatcccacatcttcttgtcacaagatgcgctatgcagtcacagagaatataacaccctccgaaggggaaaaccctgggtcctcttagaacagtctttgggagcttctactcaggaatagtagcaaagtctgggagagatggtctgatggaatctgcaaagaaatttcctttgcagaaagctggagagatgatggaattagtgtttcacacgggctttatgcctatgatgctcatcatttgctttgcctctaaatctgctacggctcttgcaaaacagcttcagtaatagagccaatgttcatgacagtttctcaaccataacagtagaaaatacattctgtgattattgtgatcttattattttaaaaaagaaattacgtctctaaaataatgcacttgggtccaaataacaatatttatgatttcatgagaaaaaaacataattattttataggaactcagagaattccaattttctcaaataaggttgagtgagcttaaataaacacatattctaagacatgcgagtaaggaagaagattacaaaataatcctgtaatatactattaatagctgtccaaaggcatattaaatgtcttacatttgtttttacatttgctgtgtacaacaaacagttttaaaatcatttaaatctaaacgaaagaaagagaaagagaaaaggccatagagagaaaaaaagagagggagagagaaataggcagagggaagggaagggagagaagaaaatacaatttttttcaccaaacaatactactattattatgtgtaatgcatgctgatattttctattctattccattttgttctatttgattctatttcctaaaatatgattcatgacaccttaaattgaccacatgacccaccattcagtacctttacatctcagtaaagagatgtgaaaaactctctcatctaaaatgattaaattgctgaatcacatattaaacatatgtgtatatttctttatgtgatatatattcctggaaaagtagcaagtgccaaagtttgcctccactttaaatacctctgtgtaactatggagaattgagattttatttatgcaacttttcggtgtgtggatatcaggaaataaagctatgtgccagaaaagggtatcatgtaataggaaatgcccattagataagaccccaagaagttataagcaaaatatagtggtgactgagaactaagcaatggagctcagtaaagcaaagccagacatattcatcagttactagaacaaagaaatcttccttgaaaagtcagaatcatagacaatgctcaatcagtattccagtctgaatttgggtactaacatagatacataagcctctaaaagatgatttaaagtgttttaggtttttaattgctctctcctcacaagcaaccggcaaatgcaactgtaattcttaacttcaatctatgactcaaatcatttccacagaaaaaattcctaggtaaataaacagctcaagagtcaagaattacaaaatataatacaaagaaacaagccactataggtgaaaacagaaaaacaaacaaataatacacagttgaaataaactcaaaagatcctaaaatactgacttttttttctcacataacgtgggagacagaattagctaactaaaagttatatccaaagagatgggatccagcatgcggccagagagtaaaaaaattgcatagaaatcatgataaattaagagctatggaggttagagtaagggaatctaatgaatataatcagaatttcagaaaaaaagatgaatgaaagaatgggaaagaggcaaagttgaaagaattaatggctgattattttccactgatgaaaaacactgatagatccaagaaccccaagaaagatatataaaatgaaacccacacctaaacacagcaaagtaaaattatacatacataaaaatatatacatacacataatggcaataattggttatataattggttgtataaaattatagttatattgtttaattttgaggaaaagcaggctaaaaccaaaattcttagtaatggcagaatgtaaattggaaaagggtaatcggacttgcagtttccttgggcatttaatatttacaaggactggctttatatttgctaaatctaatagatacatggaaaggactgaaataatttttaagataataagcaggaagtgaaatttctaaaaatagacaaggattcaagcatttcaagcaagaaagaaggtagaaaaagaattaaaagtaagacatgtaagaatagtatgtggaaatttggtataaattaatccagatatatgagaagttattatacatttaaaccggtttgtggtggattaactattgctgcaaattctttattactctccttttgaaaggtagcatttatttcctttcttattaaatctgggctggctctgaggctgcttaattaatagaatacagtggaaatgacactgggaaatttccaagcttagcctttaagaggactgtcagctttcaccttctcctccttggactattcacaattggaatgctcccaggcatagcccagcaactgcatggagaggccccatataggcacagtggttgagaggctcaaaaaactcctgcctgacaatcatgttacaaagccattttggatattacagcccagtggtgtccccaagtgatcgtgtaaaatcaatgccatgtggagcagaagagctgcctagctgagcccagtaaacctaggga

SEQ ID NO: 705616 - DNA, 1762 bp, Homo sapiens
tctcctacatttttaggtatgtaaatggcctagggctgtgaatatcagtgaagtagaacttcttacatactctacttattcctcaagagactggactcagtttggaaataaggtcatttttgaaatgtcatttctgaacaaatagcttatagtgaatacttacaattatgattactgcactttttgcccttttagtcatatgttaagaaagaaaattaaaatcttaaaaaattaaagtatttttgatggtagaaatatgaagagtataaaatartataacaatatttatggtagtaaacaatagttacaaaaatagtaaagcagtaccatattgtttccaacatgtttaatgcctctgttggccaggttcatccatacataatctcttaataataatcttgtaagacaataccccaattattggagtaggaattctaataacaaatacatggaatagcttgtcttttgtttcacagttcagatgtgaactgtgacccagtttgacccagatctctctctatgctgataatcatgtttataaagactgtagtacattcattgactatgagccttagtttgtcatctataaaatgttgacagtatctacttcctaaagtatttatactaatgaaataagacaaatgcatataaattactagcgcagggtcttcccatagaaagtgttaaatagatattagttatctttactattattaaaattatgacaattttctaatgttttattttgaaattatcagctacttaggtttcaaagctatctctgtttaacttttgcaccatccttttgaggagcaactcactgtcatttgtttgaaaataaaaatttgcctaaacagagaaaaaatattagagcatttgtgcttcatgttttgtttcctgagaagtttatattttcatgaagtatattgtaagttaatatatttttcttgttttcacattaaatatggattataattagagattactataggcccaatgtttgccataagaatatatgacatttagccacaggaagtaataaccagttcacatgcaaaacagaaactaggaagagatgacactcatcattttaaacaattgtactgtctcagtaggcttttggttgttactgacaaaatctgttccacatggtttctttttccttatttttcccccacttccttaaaatgtaccttctgtttatctacaggtacacttgcaaatttacataattggtctttgcttatataaaacgagtcagagtttataacatagggaaattattgtgtgatttttatatggtcaataaagttctttgattcacaaagattaagatattttggaaactgtgagctccactagtttgtttacataattcaacttatataacactttaattaacactgaaccatcaatcaaaccaaggcatagttatataatcaaaatggaaaaataaaagtacaagtgtttaatagattttctaggaaagttcagggtaccatgaataatgcaaatggcacataattggactcaagttacttaaaacaccagttctgctactaattaactgttctacttaggaaaatcatttaacttcaactttctcatctacgccatgaagtagttgaattaaatgtgcggtatctaaactatgaagaagccctaatatgctctccagaattattcaaataccttccaaaggtgctgagtgatatcaaatatggggatttccaaccattcttgttaaattcatttaatgctg

SEQ ID NO: 705617 - DNA, 1762 bp, Homo sapiens
tctcctacatttttaggtatgtaaatggcctagggctgtgaatatcagtgaagtagaacttcttacatactctacttattcctcaagagactggactcagtttggaaataaggtcatttttgaaatgtcatttctgaacaaatagcttatagtgaatacttacaattatgattactgcactttttgcccttttagtcatatgttaagaaagaaaattaaaatcttaaaaaattaaagtatttttgatggtagaaatatgaagagtataaaatagtataacaatatttatggtagtaaacaatagttacaaaaatagtaaagcagtaccatattgtttccaacatgtttaatgcctctgttggccaggttcatccatacataatctcttaataataatcttgtaagacaataccccaattattggagtaggaattctaataacaaatacatgkaatagcttgtcttttgtttcacagttcagatgtgaactgtgacccagtttgacccagatctctctctatgctgataatcatgtttataaagactgtagtacattcattgactatgagccttagtttgtcatctataaaatgttgacagtatctacttcctaaagtatttatactaatgaaataagacaaatgcatataaattactagcgcagggtcttcccatagaaagtgttaaatagatattagttatctttactattattaaaattatgacaattttctaatgttttattttgaaattatcagctacttaggtttcaaagctatctctgtttaacttttgcaccatccttttgaggagcaactcactgtcatttgtttgaaaataaaaatttgcctaaacagagaaaaaatattagagcatttgtgcttcatgttttgtttcctgagaagtttatattttcatgaagtatattgtaagttaatatatttttcttgttttcacattaaatatggattataattagagattactataggcccaatgtttgccataagaatatatgacatttagccacaggaagtaataaccagttcacatgcaaaacagaaactaggaagagatgacactcatcattttaaacaattgtactgtctcagtaggcttttggttgttactgacaaaatctgttccacatggtttctttttccttatttttcccccacttccttaaaatgtaccttctgtttatctacaggtacacttgcaaatttacataattggtctttgcttatataaaacgagtcagagtttataacatagggaaattattgtgtgatttttatatggtcaataaagttctttgattcacaaagattaagatattttggaaactgtgagctccactagtttgtttacataattcaacttatataacactttaattaacactgaaccatcaatcaaaccaaggcatagttatataatcaaaatggaaaaataaaagtacaagtgtttaatagattttctaggaaagttcagggtaccatgaataatgcaaatggcacataattggactcaagttacttaaaacaccagttctgctactaattaactgttctacttaggaaaatcatttaacttcaactttctcatctacgccatgaagtagttgaattaaatgtgcggtatctaaactatgaagaagccctaatatgctctccagaattattcaaataccttccaaaggtgctgagtgatatcaaatatggggatttccaaccattcttgttaaattcatttaatgctg

SEQ ID NO: 705618 - DNA, 555 bp, Homo sapiens
  misc_feature 531: n = A,T,C or G
cttctctactaaaaatacaaaaattagccgggcgtggtggtgtgtgcctgtagtcccagctactcgggaatctgaggcaggagaatcgcttgaacctgggaggcggaggttgcagtgagccgagatcgcgccactacactccagcctgggcaacagaagaaggctctgtctcaaaaaaaaaaaaaagaataataagtcatagttttattttatttcatattcctgtcttttagtatctattctgtaagartattattgtgcttttcattcttgctacaacttttataattatttttgcatgtgtaaaatttatttttctgaacttttagaagggcctgtggttcaggtaattttcctaatttggtataacccctgtttctatagttttgctgtagttatttgaaaaaaatatatattcagcagcttgtgtgctgagatttactacgtctgttccacatcctttaatgttatctcgattgtcttgtcctttgtctctgttatcctcccgctttttaagttttggccatgcanggagtgtctcctcaatgtgaagtc

SEQ ID NO: 705619 - DNA, 555 bp, Homo sapiens
  misc_feature 531: n = A,T,C or G
cttctctactaaaaatacaaaaattagccgggcgtggtggtgtgtgcctgtagtcccagctactcgggaatctgaggcaggagaatcgcttgaacctgggaggcggaggttgcagtgagccgagatcgcgccactacactccagcctgggcaacagaagaaggctctgtctcaaaaaaaaaaaaaagaataataagtcatagttttattttatttcatattcctgtcttttagtatctattctgtaagagtattattgtgcttttcattcttgctacaacttttataattatttttgcatgtgtaaaatttatttttctgaacttttagaagggcctgtggttcaggtaattttcctaatttggtataaccccygtttctatagttttgctgtagttatttgaaaaaaatatatattcagcagcttgtgtgctgagatttactacgtctgttccacatcctttaatgttatctcgattgtcttgtcctttgtctctgttatcctcccgctttttaagttttggccatgcanggagtgtctcctcaatgtgaagtc

SEQ ID NO: 705620 - DNA, 469 bp, Homo sapiens
tatttctcattctttctctcccttctttctgctcagagactgattccagagaggtcttataaatgttgaagggttcagccatatgtctatcacagggataacttcccaatacctttgttgtaaaacatctgtaatgtctatgagattttgctttggctgtctagtttccatgtctacttactaagagtcctgagacattcaaacaatacaattgctgccatctttctagaatcttcaacatgttgttttttagttacttratattaatgcttctagacatgagagagctacactattgttcattggaaaatctaatttcaaaatagtgtttccatgttttcaaaagagcatatagtatcccagagatgaagcccacttgatcatggtggataagctttttgatgtgctgctggattcggtttgccagtattttattgaggatttttgcatcaatgttcatcaaggatat

SEQ ID NO: 705621 - DNA, 1315 bp, Homo sapiens
attaaaaaacaaagcaagaaaaagtttacagaatacatgaataagcaattttgaaaaaaatggaaaactataataataatgaactcattagtttataaaaagacaaagagaaaattgacagaatatatgaataggcaacctgtagaagagttaaaccaaatgaataataaaaaagatatatttaaatacaatattgaaaggaatgtaaattaaagtaacaatgagttacatttaatatttatcaaactggtaaatattaaaaagatcaatttaaattgcaggggaaacaggaaaaataatatagtcatatattttatatctataaattgggattgataacatgatgcatgtcataggccttatacttaacatacccaaatgagtcagcaaaccttattttactcttgacaacaaaaaacttgataatttttcattgctctgatgagaaacagcattttgtttataactgccatttatttgttgagtaccaaatttcaccaaattaccatattttgactgatgaaaagaaatacatactgttcaaagcaaacactgaccaaagacactatgtcctagggaagtagaataatacacttttgaaattttagatgatattctatttagccaaacaccaaattggacaaattttctttgaaaggtaaattatctttactcatgattcccattcttatatctccattccagagtataatattttttttaaaaggtgtaacaaaggttggagttgtattatttttaagcaagaaaaaaaaccatcaacattactgggccagatggaaaaagagtaatgagaaagcagaatgaaaaagaaaaaaggaagagtgaagttattgggaaaaaaaacattgcccaaaggacttagtagttacctacaacacatatgaagggacagagcagttaaaaaaaaaatccctatccaaagtgtggtggaggcacatggaggctagtaatattaatattcaaatttaactattgctctatttttgaaaasaagaaaaacttcttccaccccagaggataatcaaaggagatttcctggggtttccccttaactctcagacaatattatgaataactcacatacaccaagtattaagatccatttaagtattcagttgtaaaaagacttatgtattactacagctgttatatgacttattttaaagcaaggaaacagatactgtgaataatggaccaaataatttagcacattttataatgctactatttagtttaatgtataacgtcctatctcttcattctctttttcctttggtcacttatttatcactat

SEQ ID NO: 705622 - DNA, 1175 bp, Homo sapiens
attagcataaccattgaacaactgtgaataaataccaagtcatacttactgttaatccttcctaataatcacagagcttaaaattgccttgtacactacatttttattaattacccaaatacctgaagacctctaacccattatccttttttttctgacaaactgacctccactttcttttaaaaccctattcctgcatagattaaaccctccttttccctccatctttcattcatgttgctcttattgacaacactctagatataggtgaccttcaccatagtctcatcaccgaagaattgatgtttaaggttcttaattttttcttttaattatatttttcatggatttgatacatctgattaaaaaaatgaaatcagcatttaacaatagttaggttactatatcttgcttttattaagccaggaaaaaaaaacctgataccatcaataaatagaggaagtgtccgcacaagtatcattttccaaaagaaaaggctaaaaatcttattttaaaaaatggtttttggcggggtgcggtggctcacacctgtaatcccagcatttcaggaggccgaggcagacggatcaagaggtcaggcgatcaagaccatcctggctaacacagtgaaaccccgtctctaacaaaaatacaaaaaataagytgggcgtggtggcaggcacctgtagtcccagctactcaggaggctgaggcaggagaatggcgtgaacccaggaggcggagcttgcagtgagcagagatcacgccactgcactcctgcctgggcaacagagcaagactctgtatcaaaaaaaaaaaaaatggtttttgctttttggtatcaaaatttatctgagctgagacatttaaatgtttatttctaaacaattaatcagcattcaaggtatttctgtaagagccaaggagccaaggacaagataagaaaaatcagtattattattactattcaacattattctagaagttctagccaacaaaataacacaagaaaaaggtaagagtagcataattgtagaaagagaagaattaaagctatcacttacctagaagatgcaagacaaaagtaagtcatgctatactgtttggtctaacagtaaactatgttaaacagttacaacaatgtaaatagtggcttttggtttaaaataaataaa

SEQ ID NO: 705623 - DNA, 628 bp, Homo sapiens
atgtaagataatagccctattcttggagggtagagagcttggtctatgtaatttattttaataaaggggtatgtaacctactttctaatactccaggacaaacatgagagagagcgagagagagagtgagtaagcgtgagaaagagaaatgaaagagagcacagataaggcaatgaggtaaaatgttgaaactaggtgaagctggttgtctttgtcagctgaggctgctataacaaaataccatgaatcaggtggcttataaactacagaaatttatttctcacagttctggaggctcggaagtccaggatcaagccattggcagattcggtgtcyggtgagggcctgcttgctggttcatagacggtgccttctcgctccgccctcacatggtagaaggggcatggaagctctccgaagtttcttttatatgggcatcagtcccattcgtgagaactccactcttatgccctaatcaccacccaaaagtttcacctcctaatatcatccccttgatggttaggatgtaaacatatgaattttggagggatgcaaagattcagtctgtaacattggtgagaagctaagtgaagactctttgttctacttttgtatggattatttgtat

SEQ ID NO: 705624 - DNA, 628 bp, Homo sapiens
atgtaagataatagccctattcttggagggtagagagcttggtctatgtaatttattttaataaaggggtatgtaacctactttctaatactccaggacaaacatgagagagagcgagagagagagtgagtaagcgtgagaaagagaaatgaaagagagcacagataaggcaatgaggtaaaatgttgaaactaggtgaagctggttgtctttgtcagctgaggctgctataacaaaataccatgaatcaggtggcttataaactacagaaatttatttctcacagttctggaggctcggaagtccaggatcaagccattggcagattcggtgtccggtgagggcctgcttgctggttcatagacggtgccttctcgctcygccctcacatggtagaaggggcatggaagctctccgaagtttcttttatatgggcatcagtcccattcgtgagaactccactcttatgccctaatcaccacccaaaagtttcacctcctaatatcatccccttgatggttaggatgtaaacatatgaattttggagggatgcaaagattcagtctgtaacattggtgagaagctaagtgaagactctttgttctacttttgtatggattatttgtat

SEQ ID NO: 705625 - DNA, 648 bp, Homo sapiens
gctccctgacctcatagagctcccagtccaggaggagaggtagatatgatggatggtaggaaggccttgttcatttattccacacatgtttcatggtgccaccaatgtgtcaagcagtgttagacactgaggagcaaagataaaagagacaaggtccttgggaccccatcctggtgagagagacagaggtcagcatgcaccaaggcaggaagcagttgttcaataatcctttgttcattcagtgcatrtttgctgatgaccctcataggccagacctgggctctggggacaccaagacagaaaatacttggccttaaccacttggagcacagtccagtggaataaacagtccagtagagaatttcagccaagcatgatatgagattcaattagggtgaggagtccatagatgccaggaaagtggccaaggcagctttctggagggggtgaggcctggtctgagcctaaaggatgtggtggggtctactccattgggtcctctcccctggcttcctgcagaacatgaaggtcagactcagaggctccaaggacacccctcccaccgagacagtcagccctttagagggtcgggtgggagagggacagagtgaccagggcgcaaaccctgtctcaggtcagggccctggg

SEQ ID NO: 705626 - DNA, 648 bp, Homo sapiens
gctccctgacctcatagagctcccagtccaggaggagaggtagatatgatggatggtaggaaggccttgttcatttattccacacatgtttcatggtgccaccaatgtgtcaagcagtgttagacactgaggagcaaagataaaagagacaaggtccttgggaccccatcctggtgagagagacagaggtcagcatgcaccaaggcaggaagcagttgttcaataatcctttgttcattcagtgcatatttgctgatgaccctcataggccagacctgggctctggggacaccaagacagaaaatacttggccttaaccacttggagcacagtccagtggaakaaacagtccagtagagaatttcagccaagcatgatatgagattcaattagggtgaggagtccatagatgccaggaaagtggccaaggcagctttctggagggggtgaggcctggtctgagcctaaaggatgtggtggggtctactccattgggtcctctcccctggcttcctgcagaacatgaaggtcagactcagaggctccaaggacacccctcccaccgagacagtcagccctttagagggtcgggtgggagagggacagagtgaccagggcgcaaaccctgtctcaggtcagggccctggg

SEQ ID NO: 705627 - DNA, 2069 bp, Homo sapiens
gaccttttaactagcagggccattatttaagttaaggggatctagaatgtccctgaaaaaaagtaaggagctaatatttcctaagattacacattaagcatttaagccagttgcacctgtaaatatattactttattctgtaagtcccacttaacatatcagctctgctgtgaagttttcccttcttctcaamaccaatttaggtgctcctcagtgttctcacaattggcttcgattccttagcgaggcagaaaccaagtctaattatgttttttatgcactggagttaggtgagcatattaagtacacaaaatctttgtggactgagtgaataaaagaatatacattcattcaactgttgttctaacatacagcaagtccttgagggaattgcatttcagtaagctttgggggagaggccacatcctgaggggaaaatgtccagactttggaattggacagaactgatggaatcctgatactattacttattgcctattaaaaattaaaaaagtcatttaacacctttgaatgttaggattttttttattctaaggaatggtgacaaacatggtatcttgcaaaattgttgggacagctggacacgttacccctaaaatgcctgatgatgccttttcacccacaatagatgtgctacaagtaatagctcttttttaatgaatgagaaagacttccagaagcttatgagggagttatatgtaggattcttggccaagtcatagaaagaaataaaagaaataaataatagatggcagtgattgtggcacctacaagaggcataaagttgtaatattgtgtactcactaatttagcacaacattataggcatgtaacaaatttgttggttcatagtttcattaatttttgtcatgtagtatagctctgtcatataatgtgctgtctgtttaaatgttaagaacagactgtaaaagtagagtttaatttaaaatttgctcaatctgtctgtttgtaccttaagagtcattgaaatattttcccctatagaatgtgaatgttgtcattagaattgtatagatttttaaaatagtttgttgagggggatcacacatggtgctagaacattatttgtcattctagtccttccacccactagattatcagtgatatccaatggctgattttagagtagagaataactgaagagaaaacaattacatattgcctaatggaatgtcactgagatagccgtattaaaactatgggtatttttgttttacttttgcaatttcatgggtatttttatcacaggctcaaaaatactgcctgtgcttagttgtgttctctagtggctcactctcaagtgaaattcaaactattaattattaaaatattctaatttttaaaatttttttccagagaattttaaggcaaattctggctttcacagtaatgataggtaaatctaaataagcatgctgagagagaaagggcattagagtgtacaggtggttggagtggttgaaggagacattcagttccagtgattcatctggaaatttcctgttacagtgaacctccaagttaggcctgctgacagcacgggagcaagtatcttgaaaagatcatagtgagaattagagagaggatatggtgtgaaatctgggcaaattatatctacccacaatattacacattcttttttttaaacggtatgagtttactaggtttaagtgtcatgaaagatgaaatatgcaaaaagtaataaattgagcccacttttaagatggtaataagatcatttaatacatgtgtaaaactgctaaatgatttcgcagaaggattgcttcacctctgagtgaatcataaactcataaacaagcattcaacaggagatcaatgctgttttgtagtgcacacactattgcagcatctgctccaatacaaagataaatccagtgcaaaccatgtgttttactttttgggccagcatccttatcctgctgctcttattacacctaaactatagccttcaacaatctcatttctgattaagtagaaatcagttgcaggtacacatactactaatg

SEQ ID NO: 705628 - DNA, 606 bp, Homo sapiens
  misc_feature 98: n = A,T,C or G
catggcaggacctggttgctgggacgataagagcattgagccctgctgggccaggctctctccatcagagaggagtggaacatgatgagccgttgggnggcactgcccaccttcaccctgggacatgagrgctacaggaggggtgtctgaggtgacattcgaggaagggagcccagacaattcaaacaattccctagagtgaccacagtctctgtttgtgtctctcaacctttgacttgtttacttccagcttctcacgtttctgttggtcaattctgtagacagccgtcctttcccaagaacccaggaagttctcccaggggccagctcatgcttagtctcaggagaaagagtttggcagggagagaaaggatagacatgattggtttcttttcttctggggataatagcaaggtcccagatgtcagaggggaggctaggttgagaaattaggtgtctctaacccgtgacagtctgtctagggagggggctcttggcgaagccatgagcaaagagagaagagaaatatgattgagggaaagaaacaaagagatacaaacacaaaattccaatgcaacaaatatctgcgggaaaaggagctctgcc

SEQ ID NO: 705629 - DNA, 606 bp, Homo sapiens
  misc_feature 98: n = A,T,C or G
catggcaggacctggttgctgggacgataagagcattgagccctgctgggccaggctctctccatcagagaggagtggaacatgatgagccgttgggnggcactgcccaccttcaccctgggacatgagagctacaggaggggtgtctgaggtgacattcgaggaagggagcccagacaattcaaacaattccctagagtgaccacagtctctgtttgtgtctctcaacctttgacttgtttacttccagcttctcacgtttctgttggtcaattctgtagacagccgtcctttcccaagaacccaggaagttctcccaggggccagctcatgcttagtctcaggagaaagagtttggcagggagagaaaggatagacatgattggtttcttttcttctggggataatagcaaggtcccagatgtcagaggggaggctrggttgagaaattaggtgtctctaacccgtgacagtctgtctagggagggggctcttggcgaagccatgagcaaagagagaagagaaatatgattgagggaaagaaacaaagagatacaaacacaaaattccaatgcaacaaatatctgcgggaaaaggagctctgcc

SEQ ID NO: 705630 - DNA, 654 bp, Homo sapiens
agatcacttgaggtcaggagttcgagaccagtctggacaacatagtgaaactccatctctacacacacacacacamacacacaaaattagccgggcattgtggcacacgccagtagtcccagctactcgggaggctgaggcacgagaattgcttgaacccaggaggcagaggttgcagtgagatgagattgtgccactgtattccaacctgggcaacagagagagagaaagagagactgtctcaaaaaaataaaaataaaaaagatataagtggtccagcacaatcatatgtcccttttatttcacttactcttctgttctaggctaactcccatttagccacttggctctctcacttccttcaagcctttgcttagggaggcctatacagaccactttattatttaaaatttcacaactctccacctcctgcatttctgttccccttactcttcactacttttccgtaggacttactaccttctcacatactacatttacttgttgtacttatttattttttatcccccactagcatgtaagctccactaggatggggattttgtatgtattgctcacccatttattttcattatttagtagtatgcccaacatatagtagatgctcaatgaatatttagtgaatgaaagaat

SEQ ID NO: 705631 - DNA, 654 bp, Homo sapiens
agatcacttgaggtcaggagttcgagaccagtctggacaacatagtgaaactccatctctacacacacacacacacamacacaaaattagccgggcattgtggcacacgccagtagtcccagctactcgggaggctgaggcacgagaattgcttgaacccaggaggcagaggttgcagtgagatgagattgtgccactgtattccaacctgggcaacagagagagagaaagagagactgtctcaaaaaaataaaaataaaaaagatataagtggtccagcacaatcatatgtcccttttatttcacttactcttctgttctaggctaactcccatttagccacttggctctctcacttccttcaagcctttgcttagggaggcctatacagaccactttattatttaaaatttcacaactctccacctcctgcatttctgttccccttactcttcactacttttccgtaggacttactaccttctcacatactacatttacttgttgtacttatttattttttatcccccactagcatgtaagctccactaggatggggattttgtatgtattgctcacccatttattttcattatttagtagtatgcccaacatatagtagatgctcaatgaatatttagtgaatgaaagaat

SEQ ID NO: 705632 - DNA, 654 bp, Homo sapiens
agatcacttgaggtcaggagttcgagaccagtctggacaacatagtgaaactccatctctacacacacacacacacacamacaaaattagccgggcattgtggcacacgccagtagtcccagctactcgggaggctgaggcacgagaattgcttgaacccaggaggcagaggttgcagtgagatgagattgtgccactgtattccaacctgggcaacagagagagagaaagagagactgtctcaaaaaaataaaaataaaaaagatataagtggtccagcacaatcatatgtcccttttatttcacttactcttctgttctaggctaactcccatttagccacttggctctctcacttccttcaagcctttgcttagggaggcctatacagaccactttattatttaaaatttcacaactctccacctcctgcatttctgttccccttactcttcactacttttccgtaggacttactaccttctcacatactacatttacttgttgtacttatttattttttatcccccactagcatgtaagctccactaggatggggattttgtatgtattgctcacccatttattttcattatttagtagtatgcccaacatatagtagatgctcaatgaatatttagtgaatgaaagaat

SEQ ID NO: 705633 - DNA, 654 bp, Homo sapiens
agatcacttgaggtcaggagttcgagaccagtctggacaacatagtgaaactccatctctacacacacacacacacacacamaaaattagccgggcattgtggcacacgccagtagtcccagctactcgggaggctgaggcacgagaattgcttgaacccaggaggcagaggttgcagtgagatgagattgtgccactgtattccaacctgggcaacagagagagagaaagagagactgtctcaaaaaaataaaaataaaaaagatataagtggtccagcacaatcatatgtcccttttatttcacttactcttctgttctaggctaactcccatttagccacttggctctctcacttccttcaagcctttgcttagggaggcctatacagaccactttattatttaaaatttcacaactctccacctcctgcatttctgttccccttactcttcactacttttccgtaggacttactaccttctcacatactacatttacttgttgtacttatttattttttatcccccactagcatgtaagctccactaggatggggattttgtatgtattgctcacccatttattttcattatttagtagtatgcccaacatatagtagatgctcaatgaatatttagtgaatgaaagaat

SEQ ID NO: 705634 - DNA, 1011 bp, Homo sapiens
agatgctaattattggctgattggtattctgctcctcagatgtcacctaatgattttccagagcttctgctacttggtaaatttatttttctgatgcatggcaaatatgacagcattgaatagatgtggcaagggcatgtcgtgttgtgtgtatgtgtctcaggccatagaagggtaggcttcagtagagagataacttattgttttgtgaaagcatggggtacaaattaagagaatgaatgaaaaccaagaacaaaactcaaaactaacctttccttaataatttgcaatcaattttcattcctagtaatagtgaaaacttataatattcttttattaaagaaattttacggagtatatgtgccagacagtgttctagaagatgtagatttaatatagaacaagacagatgtggtccgtattattgctgaacttatggtcaaatagaaagactttcacctacattttaacaatattgattagctccccaggtaaataacaaaagtaagaattattctggtcacctccctggactctaaatgtatctgagtttcagaaattctgaaaatattctgtaagaaatgcatacatataaattgaaataaaacttctaggaatatatctgagaagtgttaggtttttggggcctttgctgctatgtcttatgagggtttaaattattatgcagattcttaaataattccatgtgtttaaagtattaatttattattatgtggtttaaccagggctgtgttttccaactgcctggttttcaccgatatgcaggaaaaggttttagaaaggggtttaagaatcttctcttagttgaaaattggctatcatttgaaaraatgctgcaataatttgtctgcagtaacagctcactgaacgtagcataaaaatgaaaacgagggctgaatttattcggtgtcttcattcttgtacctgaatgcacagactctttcctaggtatgtaaataattgttaaagacttaaaggtcaataaccaat

SEQ ID NO: 705635 - DNA, 614 bp, Homo sapiens
ttttgtctgcatctctgtacttttactgtagattcctacacatagaattactggatcaaagggcgtaaactttttcagtattatttctaaatttcttacttgacttacattattgcaagtagctttttacaaatttaccaatttatagcttaccaccaggatattctttttctttttttaaaaaaatggtaatttaataggccaaaaaaaaatgtgtctgattgctaacaatgacctcctcactgatctttctggagtcatatcccactccagtcaagcctccatagtgcttccagatttttctctaaaattcgaacttgatcacattgcttgccctgttaaagccaattatttgctccccactgcttgtcacattaagtcctaggtctagagaaggtttcatcagctctttcataacatggcttttgtctacagttccagtctcgttgttaacctctctcctrtattctctcctccagtaatgttaaaccacttacagtttctaaactgccatgttttacaatttttcttttcacatgctgttccctctctcttgactgtctttccccacttggtttgagcactcacaaagtctgttgagagagaaggcagga

SEQ ID NO: 705636 - DNA, 1461 bp, Homo sapiens
tctccaaaaaggtaaaagagaaactgagtatagacaatactgcaaaaatataaattcatttaagggagggtggtttttaggcttccgttcaagaaaaatagtctgacccagttttcaactaggtcaagatgtggtagactgagttaaatcatgaaaggcccaaattaccctagagcagaggaagatttttgtgaagtcacttccttgctgcttcatttgctggagtgaaacttgcctttccagtcgagtgagtatggtaccatgagggggcgagggaaaatgaactcataactttaacaaccctcttcttgcaatttcccatcctcctcccaacttttaccaggctcaccattcctttctgcaatagttggtttttccctgttttaatgagttggaatgacccccttttcatctcttccttccgccttttcttttattcttagcagagtaagagggaaagagacttgcaagttagaacacgtaacagtgttyacttttttcttcttccttattttctctggcatcataactcttacaaagtttttggttctttcgcgtgagtatttaccttagcctgtttaaatgatcaaactattaagattcctcttatgccattctagtttctcttataaaggcttttcccatcacttggttttgttgatctttgaaatttgagcccttttgatttcctgcaaatgtttgctcttttaagaaagagaaataaaaataagccacattttatttttgccccatgaacttctaattttcatgtttctattaaacatttctgatcatttctctttttttctgctaaaacttttttacttttctctcatttatctctcccctttttcatctaagagagatcttaagaacgcagcttccaaagtcttctttgcttatttcttccctttcacactgcaatgcttcccgatacttttatctttttatgtctttaatctcttttctctgtttccctcctgactcattcccttctctctcttcccctttgtatctgtgcctcaattttctcaagttttccttagttttctcttcttttctttacatcttccttggtttttccgttagtttgtatttccttgttctaagggagaaggagggatatcttttttttttttttttttttttttttttgagacggagtctcgctctgttgccaggctggagtgcagtggcgagatcgcggctcacagcaagctccgcctcccgggttcacgccgttctcctgcctcagcctcccgagtagctgggactacaggcgcccgccaccatgcccggctaattttttgtatttttagtagagacggggtttcactgtgttagccaggatgctctcgatctcctgacctcgtgatccgcccgcctcggcctcccaaagtgctgggattacaggcgtgagccaccgcgcccggccggagggatatcttagatattcctttt

SEQ ID NO: 705637 - DNA, 1461 bp, Homo sapiens
tctccaaaaaggtaaaagagaaactgagtatagacaatactgcaaaaatataaattcatttaagggagggtggtttttaggcttccgttcaagaaaaatagtctgacccagttttcaactaggtcaagatgtggtagactgagttaaatcatgaaaggcccaaattaccctagagcagaggaagatttttgtgaagtcacttccttgctgcttcatttgctggagtgaaacttgcctttccagtcgagtgagtatggtaccatgagggggcgagggaaaatgaactcataactttaacaaccctcttcttgcaatttcccatcctcctcccaacttttaccaggctcaccattcctttctgcaatagttggtttttccctgttttaatgagttggaatgacccccttttcatctcttccttccgccttttcttttattcttagcagagtaagagggaaagagacttgcaagttagaacacgtaacagtgttcacttttttcttcttccttattttctctggcatcataactcttacaaagtttttggttctttcgcgtgagtatttaccttagcctgtttaaatgatcaaactattaagattcctcttatgccattctagtttctcttataaaggcttttcccatcacttggttttgttgatctttgaaatttgagcccttttgatttcctgcaaatgtttgctcttttaagaaagagaaataaaaataagccacattttatttttgccccatgaacttctaattttcatgtttctattaaacatttctgatcatttctctttttttctgctaaaacttttttacttttctctcatttatctctcccctttttcatctaagagagatcttaagaacgcagcttccaaagtcttctttgcttatttcttccctttcacactgcaatgcttcccgatacttttatctttttatgtctttaatctcttttctctgtttccctcctgactcattcccttctctctcttcccctttgtatctgtgcctcaattttctcaagttttccttagttttctcttcttttctttacatcttccttggtttttccgttagtttgtatttccttgttctaagggagaaggagggatatcttttttttttttttttttttttttttttgagacggagtctcgctctgtygccaggctggagtgcagtggcgagatcgcggctcacagcaagctccgcctcccgggttcacgccgttctcctgcctcagcctcccgagtagctgggactacaggcgcccgccaccatgcccggctaattttttgtatttttagtagagacggggtttcactgtgttagccaggatgctctcgatctcctgacctcgtgatccgcccgcctcggcctcccaaagtgctgggattacaggcgtgagccaccgcgcccggccggagggatatcttagatattcctttt

SEQ ID NO: 705638 - DNA, 1461 bp, Homo sapiens
tctccaaaaaggtaaaagagaaactgagtatagacaatactgcaaaaatataaattcatttaagggagggtggtttttaggcttccgttcaagaaaaatagtctgacccagttttcaactaggtcaagatgtggtagactgagttaaatcatgaaaggcccaaattaccctagagcagaggaagatttttgtgaagtcacttccttgctgcttcatttgctggagtgaaacttgcctttccagtcgagtgagtatggtaccatgagggggcgagggaaaatgaactcataactttaacaaccctcttcttgcaatttcccatcctcctcccaacttttaccaggctcaccattcctttctgcaatagttggtttttccctgttttaatgagttggaatgacccccttttcatctcttccttccgccttttcttttattcttagcagagtaagagggaaagagacttgcaagttagaacacgtaacagtgttcacttttttcttcttccttattttctctggcatcataactcttacaaagtttttggttctttcgcgtgagtatttaccttagcctgtttaaatgatcaaactattaagattcctcttatgccattctagtttctcttataaaggcttttcccatcacttggttttgttgatctttgaaatttgagcccttttgatttcctgcaaatgtttgctcttttaagaaagagaaataaaaataagccacattttatttttgccccatgaacttctaattttcatgtttctattaaacatttctgatcatttctctttttttctgctaaaacttttttacttttctctcatttatctctcccctttttcatctaagagagatcttaagaacgcagcttccaaagtcttctttgcttatttcttccctttcacactgcaatgcttcccgatacttttatctttttatgtctttaatctcttttctctgtttccctcctgactcattcccttctctctcttcccctttgtatctgtgcctcaattttctcaagttttccttagttttctcttcttttctttacatcttccttggtttttccgttagtttgtatttccttgttctaagggagaaggagggatatcttttttttttttttttttttttttttttgagacggagtctcgctctgttgccaggctggagtgcagtggcgagatcgcggctcacagcaagctccgcctcccgggttcacgccrttctcctgcctcagcctcccgagtagctgggactacaggcgcccgccaccatgcccggctaattttttgtatttttagtagagacggggtttcactgtgttagccaggatgctctcgatctcctgacctcgtgatccgcccgcctcggcctcccaaagtgctgggattacaggcgtgagccaccgcgcccggccggagggatatcttagatattcctttt

SEQ ID NO: 705639 - DNA, 1461 bp, Homo sapiens
tgtctacctatataaaatcataaaagtcttcattattgttttataagtagaaatacatatattttagtatcattaactactctaaaaaatgaacctcaaagtaatgtaagtttattcgtccctcgcttaccagttcagtgaggtaactttttgaattcaatggaaatgatgttacacagttctgattgtggcctgcaaaaggcctgccaatcttcatattctcttggggaaaactagcagcaatataagtattgttagcactagggaaatgtatccgagttacgcagcaccaaagtatgtcagcagcggtgaatccacacgggtttgcagcaacgttaattcttgccatctcagaagaaagaatttgaccaaggggcataaggcagagtgagagactgaggcaagttttaaagtgggagtgaaagtttattaaaaagctttagagcaggaatcaaagggagtaaagtattcttggaacagggccaagcgggcaacctgagagatcaagtgcacggtttgacctttgacatgtggtttataccttggcatgggtgcagggggttgcatctcttctcccctgcctctccccttaggggtggctgtccacatgcactgtggccttctagcacttgggaggggcctcgtgcacagtgcttgctgaagttatgcacgtgttcccttgaggcatttttcccttaccagtcaagttaccagttaccagttaaactccgccattttgtctcttagtgcatatgcttgagcctactcacccatttcctgagatcttatctggaagctgctgatcatccgttcctggtgtttctatctattgggagactacctttccctggcaccagctgtgacccaactattatttcagagaggcagtttaacgaccacctgaccatcacctgatggttgccagacatcccttggagttgtcgggtggggggaggggggctgtctcctgccctgcttctgtctgactacctactgtaacagtattactatcctgagaccaccatactatgaggaagcccaagctggtcacrtgaaaaaagaggtcatgggaaggagcaccgaggtgacaaatatgggagggactcattcttgtatcttccatcccagtccagcccagttgtcagctgaatgctgccaacacagtgaccagctgataccacatggagcagaagaactaatcagctgagccttgctcaaattcctcatccaccaaatcatgagaaaaaataaatggtgttatttaaagccattaagtttgggggtaaaacagtatgttactcagcaattgataaccaaatcacagttatccataaaaaatgaaaaatattgaataaaatgtaaatatttcaaatatctttaaagtaatggaagttattgtttaaatttgagttatattgtcagaggtactcctgttaaatgatacaagagaataagcacata

SEQ ID NO: 705640 - DNA, 1461 bp, Homo sapiens
tgtctacctatataaaatcataaaagtcttcattattgttttataagtagaaatacatatattttagtatcattaactactctaaaaaatgaacctcaaagtaatgtaagtttattcgtccctcgcttaccagttcagtgaggtaactttttgaattcaatggaaatgatgttacacagttctgattgtggcctgcaaaaggcctgccaatcttcatattctcttggggaaaactagcagcaatataagtattgttagcactagggaaatgtatccgagttacgcagcaccaaagtatgtcagcagcggtgaatccacacgggtttgcagcaacgttaattcttgccatctcagaagaaagaatttgaccaaggggcataaggcagagtgagagactgaggcaagttttaaagtgggagtgaaagtttattaaaaagctttagagcaggaatcaaagggagtaaagtattcttggaacagggccaagcgggcaacctgagagatcaagtgcacggtttgacctttgacatgtggtttataccttggcatgggtgcagggggttgcatctcttctcccctgcctctccccttaggggtggctgtccacatgcactgtggccttctagcacttgggaggggcctcgtgcacagtgcttgctgaagttatgcacgtgttcccttgaggcatttttcccttaccagtcaagttaccagttaccagttaaactccgccattttgtctcttagtgcatatgcttgagcctactcacccatttcctgagatcttatctggaagctgctgatcatccgttcctggtgtttctatctattgggagactacctttccctggcaccagctgtgacccaactattatttcagagaggcagtttaacgaccacctgaccatcacctgatggttgccagacatcccttggagttgtcgggtggggggaggggggctgtctcctgccctgcttctgtctgactacctactgtaacagtattactatcctgagaccaccatactatgaggaagcccaagctggtcacgtgaaaaaagaggtcatgggaaggagcaccgaggtgacaaatatgggagggactcattcttgtatcttccatcccagtccagcccagttgtcagctgaatgctgccaacacagtgaccagctgataccacatggagcagaagaactaatcagctgagccttgctcaaattcctcatccaccaaatcatgagaaaaaataaatggtgttatttaaagccattaagtttgggggtaaaacagtatgttactcagcaattgataaccaaatcacagttatccataaaaaatgaaaaatattgaataaaatgtaaatatttcaaatatctttaaartaatggaagttattgtttaaatttgagttatattgtcagaggtactcctgttaaatgatacaagagaataagcacata

SEQ ID NO: 705641 - DNA, 1284 bp, Homo sapiens
ctcaggcttttaaaggtgatgttggaggaaactttgcccctctgccttcattttctgattcaagtaccttttacacatttccacaatcactcgcctctttcaaaattacagatttttgttactttttcattattttgcttttcttgttcatctttgatcaactctccaactgtttgcacattagtgcaggatcaacagaagggattagcttaggaaacacctcaaggtaagatttcaggaaaaattaaagaatgattaagtaggatagtgaacacagattggcatttatttgaaaagagccccatatgccccattaaatacagtgtttgttgttcaaccagcractcagtaaaagatcaaggtgaagggcctctgaattctctttttttcaatgtctttcttttgtttcttttccttccttccttctttctttctttccttccttccttccttccttccttccttccttcctttctttctttttttttttttttttttggcataatctcactctgtcacccaggctgtagtgcagtgccaagatcttacctcactgcaacctctgcctcctgggttcaagcgattcctccctctgcctcccaagtagctgggattacaggtgtccacgaccacacccagctaatttttatatttttagtagagaccgggtttcaacatgttggccaggctggtcttgagctcctgacctcaggtgatccacccaccttggcctcccaaagtgctgggattacaggcttgagccaccacgccgggcccagtgtctttattttcggactatgctttccactataggtccctgttgtgaataattatcttgaaggttgcttctaatcttgtaataccatgtttctgtgatatattactttgagatcctgttttagtatattaataatatctggaatgtgttttgagctattaaaaatatctttaaagagcttagttgtatatcacatactactataagttcactatatattttgtaaagtaaaatgtggatttttaagtcacagtttaatctgtgaatttactttgttatgcagttttgaaagaagtgatttcatttttttctacaaaggtggctttccttagtagactgtccctgccaggctaataaattactgcagataataatttgtaggctgtaggagaggaaagttgggaaataacaaaatgtcagccttgagagtcttgcaacagattgggtttcatgatgtctatgagacttgacacccttaagtcttacatatgagtccatgcacttcc

SEQ ID NO: 705642 - DNA, 1622 bp, Homo sapiens
aaactatctgtgccactgttcattctttgattttaaaaaaatatcaattgactaccttctttgtgccaagcacccgaaataagacttggaccctacatagaccatcatcctctgagccatgccccagccccacmctagacacgtgctcccagaaacatcaaacctctcaagtggcagcaactccaggattaagagagcccctctctcatcagttacggtgtcaagtggactcattataaaactagagagcagcccatataagaaagctccttttgcttacggtctcaggccacaaacctaaaacacaacatttttgttttgtttcttttgtgattttcacccattgagattattttcaccttatctgaacttaggctctcacaggataatcactagtctgactctctcttgaagtaggatgtttgtttgtttgtttgtttgtttacaaagacagagtcttgctattttgtgttgcccgggctggtctcaaactcctagcctgaagtgatcctcctgcctcgatctcccaagatgctgggattacaggtgtgagccaccacacttggccttggccttgaagtggagttttgtatgagatttcttttctttttttttaaagacagagtctcactttgtcacccatgttggagtacagcaccgcgatctcagctcactgcaacctctgcctcctgggttcaagcaattctcctcccttagcctcctgaatagctgggactacaggcatgcaccaccatgcctggctaatttttgtatttttagtagagacggagtttcctcatattggccaggctgctctcgaactcctgacctcaagtgaccctgctgcctcggcctcctaaagtgctgaaattacaagtgtgagcaaccacgcccagctatttgcattagatttactaaagagaatgaactctgggtgttattacatcacaagaggtttcctctgggctaataccaagcttcagtaatagagattaggtctcccttttctgccccatgacaattaatgaggaggaacatatgcagtcagccctatgaagtatttaataagaaaataacaggctcagtaatattcttaaaactcagtaacaagtacttctcaaaaatgtaaaggtcactggttgggcacagagaatcgcttgaactcaggaggcggaggatgcaatgagccgagatcgagccactgcactccagactgggcaacaagagtgaaactctgtctcaaaaaaaaaaaaaaaaggaaagaaaaagaaagaaattaaggtcagcaaaaataagggaagtctgagaaacggtcgcagcttaaggaagcttaaggacacatgatggctaaatgtcatgtaggattctggatggaatcctggaacagaagaaaggaattagggaaaaactaagaaaaactgaataaagtgggccttagctaataattatgtatcatactggttcattaatcctaataaatgtacaccgctaatctgagatgttaacatcaggggaatcggggtgtggaaactctaccttcacggcctttctaaaatcataaactaaaaggtttatttttttaagaccttagaaaaaaaagaaaagagtgataacccttttcc

SEQ ID NO: 705643 - DNA, 1622 bp, Homo sapiens
aaactatctgtgccactgttcattctttgattttaaaaaaatatcaattgactaccttctttgtgccaagcacccgaaataagacttggaccctacatagaccatcatcctctgagccatgccccagccccaccctagacacgtgctcccagaaacatcaaacctctcaagtggcagcaactccaggattaagagagcccctctctcatcagttacggtgtcaagtggactcattataaaactagagagcagcccatataagaaagctccttttgcttacggtctcaggccacaaacctaaaacacaacatttttgttttgtttcttttgtgattttcacccattgagattattttcaccttatctgaacttaggctctcacaggataatcactagtctgactctctcttgaagtaggatgtttgtttgtttgtttgtttgtttacaaagacagagtcttgctattttgtgttgcccgggctggtctcaaactcctagcctgaagtgatcctcctgcctcgatctcccaagatgctgggattacaggtgtgagccaccacacttggccttggccttgaagtggagttttgtatgagatttcttttctttttttttaaagacagagtctcactttgtcacccatgttggagtacagcaccgcgatctcagctcactgcaacctctgcctcctgggttcaagcaattctcctcccttagcctcctgaatagctgggactacaggcatgcaccaccatgcctggctaatttttgtatttttagtagagacggagtttcctcatattggccaggctgctctcgaactcctgacctcaagtgaccctgctgcctcggcctcctaaagtgctgaaattacaagtgtgagcaaccrcgcccagctatttgcattagatttactaaagagaatgaactctgggtgttattacatcacaagaggtttcctctgggctaataccaagcttcagtaatagagattaggtctcccttttctgccccatgacaattaatgaggaggaacatatgcagtcagccctatgaagtatttaataagaaaataacaggctcagtaatattcttaaaactcagtaacaagtacttctcaaaaatgtaaaggtcactggttgggcacagagaatcgcttgaactcaggaggcggaggatgcaatgagccgagatcgagccactgcactccagactgggcaacaagagtgaaactctgtctcaaaaaaaaaaaaaaaaggaaagaaaaagaaagaaattaaggtcagcaaaaataagggaagtctgagaaacggtcgcagcttaaggaagcttaaggacacatgatggctaaatgtcatgtaggattctggatggaatcctggaacagaagaaaggaattagggaaaaactaagaaaaactgaataaagtgggccttagctaataattatgtatcatactggttcattaatcctaataaatgtacaccgctaatctgagatgttaacatcaggggaatcggggtgtggaaactctaccttcacggcctttctaaaatcataaactaaaaggtttatttttttaagaccttagaaaaaaaagaaaagagtgataacccttttcc

SEQ ID NO: 705644 - DNA, 1484 bp, Homo sapiens
gaaaactattaaaattggacttagcaatatggaggtcattgttgatatcgataaaagatgtctcagggaaataatgagaaatgcaatgctatagaagggatatgaaagaggaagtgagaagaccagttggaaacagtacacataaaccacacttgagttttttccacatacttcatactttcttacctcttggtcttcagtcattgtcttctttggctggcttgtcctttstcttatcctaattccacaccgttcttgtgattaattcctatctttaggtcttccctgactctgttaatttgggtaagtgctttcccttttgggttcctgtcacctgaatggttactacgttgtatgagatgtgctatttcttcactaaactcccttgtatgcttagcacttagcaaagtgcttaactgtagtagacctcaataagtgttcattgaattaataattattttgaaggccaggcgcggtggctcacacctgtagtcccagcactttgggaggccaaggtgggtggatcacaaggtcaagagttcaagaccagcctggccaagatggtgaaacaccgtctctactaaaaatacaaaaattagccgggcactgtggcaggcacctgtaatcccgactactcgggaggctgaggtcggagaatcgcttgaacctggggggcagaggttgcagtgagctgagattgtgccactgcactccagcctgggcgacaaagtgagacttggtctcaaaaaaaaaaaattaatttgaggattcttgtatatcgatacattaattataaagtgtcccttaccctatgaaactttattatttttattctttaggtattctttagttaggcttctattcaaatatttggtaagataagcaaaagattaaccaatggaataaatagccatcaagtgtcaatcaaattagagatttggcacactaaatctatttacttaggtgaaagctcttttctagagaaatatttgtagatgattatcctaagttttaaacgtaaatttccaaataagtcttaggttgtagcttcccatggaaagaaaaaacaacatacttatgaaactgaatatgaagctatttaaatttcaggaaagaggatgctaggaaattctgtaaacatttgagagcttaaatgcacctgcattgaaagcttaaacacacggagacataagaactagaaacttaaaccaattacaacaacaaggaagcaaaacttactcaaataaacagaaaaaaatgatttagggtttaaggtgccatagaattttacttccttgaagctaatttacttttaaactttcttacttgttcctacaaattctctctacttctcaacaatccacccctttcaatagacaaaatttcctgtgacttcataaaccacattgttcagttaatttttttctggcctctcaccgtgcaccaattcccgcattttgtcattttataatctgataggcact

SEQ ID NO: 705645 - DNA, 1484 bp, Homo sapiens
gaaaactattaaaattggacttagcaatatggaggtcattgttgatatcgataaaagatgtctcagggaaataatgagaaatgcaatgctatagaagggatatgaaagaggaagtgagaagaccagttggaaacagtacacataaaccacacttgagttttttccacatacttcatactttcttacctcttggtcttcagtcattgtcttctttggctggcttgtcctttgtcttatcctaattccacaccgttcttgtgattaattcctatctttaggtcttccctgactctgttaatttgggtaagtgctttcccttttgggttcctgtcacctgaatggttactacgttgtatgagatgtgctatttcttcactaaactcccttgtatgcttagcacttagcaaagtgcttaactgtagtagacctcaataagtgttcattgaattaataattattttgaaggccaggcgcggtggctcacacctgtagtcccagcactttgggaggccaaggtgggtggatcacaaggtcaagagttcaagaccagcctggccaagatggtgaaacaccgtctctactaaaaatacaaaaattagccgggcactgtggcaggcacctgtaatcccgactactcgggaggctgaggtcggagaatcgcttgaacctggggggcagaggttgcagtgagctgagattgtgccactgcactccagcctgggcgacaaagtgagacttggtctcaaaaaaaaaaaattaatttgaggattcttgtatatcgatacattaattataaagtgtcccttaccctatgaaactttattatttttattctttaggtattctttagttaggcttctattcaaatatttggtaagataagcaaaagattaaccaatggaataaatagccatcaagtgtcaatcaaattagagatttggcacactaaatctatttacttaggtgaaagctcttttctagagaaatatttgtagatgattatcctaagttttaaacgtaaatttccaaataagtcttaggttgtagcttcccatggaaagaaaaaacaacatacttatgaaactgaatatgaagctatttaaatttcaggaaagaggatgctaggaaattctgtaaacatttgagagcttaaatgcacctgcaytgaaagcttaaacacacggagacataagaactagaaacttaaaccaattacaacaacaaggaagcaaaacttactcaaataaacagaaaaaaatgatttagggtttaaggtgccatagaattttacttccttgaagctaatttacttttaaactttcttacttgttcctacaaattctctctacttctcaacaatccacccctttcaatagacaaaatttcctgtgacttcataaaccacattgttcagttaatttttttctggcctctcaccgtgcaccaattcccgcattttgtcattttataatctgataggcact

SEQ ID NO: 705646 - DNA, 1030 bp, Homo sapiens
tgactgttttagaaactgatcagaaaatatgcccttaaatgattctaaaaatccttttttaaattacattttaactctcaacttggagaatatataataatcactggtgttttacagttaccaacgatgaggcagcagttgtggtgattatgaattattgccttaaccaatttattttgctgtatttttctttttatatacgcaatagactaatatgttaaaaaagatctctgtcaaagtaagactaaatggctcttaraataaatgtaaactatttttaaattatgggaaagcaacttgtcacaatttaattgtcagtgattttctcctattggaacataaaatagtgtgtttaataacactttagattcaataaagtacaatatgcattatgcccatacaatgtccatgcaaatctattaagtaaaaaagcaccagtgcgacatttctcattgtgcctactacattgtaaatttcttgccaactggatcatctttatatcccaatatcacccagtgtagtgcatgcaagtgacagatactgaataaatctctgttgaatgaaacatgtaatgagactgattttcttatattcccagaaagagaaatttaaaacaagagttccaaaaatattttaccaagtgtcagcatcattataattattgtagaacttcctgtgataatgaccttgctcaaaatatcatgctaattttaatgtatttatcataaggagcaatggcctcctagaaagagcacagtttaggaagttagaagattttaattttgatcttggcaccaccttcctatgacatcttaggtaagtcatttaaccacatcctgaactataaggataataattaacagctctcacagctattgtacatggtcaaagtcattgtgactgtaagtgaaattataaatgcaaaatcattctgaaagctttagaaaatgctcacaaatataatgcattattataaataaaattgtcttgatttagagagcttgaagtttccaacagagctaatcagaac

SEQ ID NO: 705647 - DNA, 2080 bp, Homo sapiens
ggcataaagtattgctattgaaaattttaaacagtctaatctatttgttacaagtgacttagatagtttgtacaaatacaaaaataattcattaacttttttaaaatactaatcattttagtagaagtttctcagtgttctcagtctactttcccaaatacatgatgtgacttgttaacatatatatatatacacacacacacacacatatacatatgtatacacacttaactttaggaaagtttgtttttaattatagatttttttcatatttctctaacttcattacttggattttctttttattatacatatgttgtttcttcttttcgtatcttctataagaccaaatgtgtcagaagtttccagagggctgatatctgaattgtgcccatcagtaacccaactttgagtgagaaagcaaatttttgtgaacatagtccaagtatagacacgattgacaatagggtaagttgagtgcatattctctatgactcagacaaccagcaggctgtttcctagtaatcttatgtcttcttattttgttaagtggtcaaaataaaaaagtacatgaaaattgcatttgagattatacagagtttccaaagtaaagtttactaaacagtcccaggggaaattatttataattcatttctaagcaaaactttgtttttcttaagtgccatgtttccttctcttgatgacagtcatcataactaggctttccgttatcccccctggctgctagaaatcttagccaaattgtggctcagtcttgcaataataaacataattatgcagagattcttgttgcatgcatgtattctttaacttggtcctagcttctacttcaaagatttttcaagcttgcagaaaagttgttatacaatatttagtttgaatatgtattttttggagggaaagtctggatatttcactagattctggctcctagaaggggtctgtgatgcagaaagaatgtttttatattcattattttacttatgaaacagaagcttctcttctagtttaattttaaaccctcaatgatttatatcaagaagagtggtttactttctgaattttgtttcaaccaaatataattaataatgaactgatgagtttacagtttcaatcactgaaaataaagtcatgcttttataagtctagaccatgtaacacagggaraaaaaacactaagctctttcactacaaatattattaagaacgtgataaaaatttatcaactggattcagttttctttggaaagaaggttagtattacatgtgcttattctaaatagtatcctccttaaaataggttgagacatgaagcacttcaataaagtcacttatttctacataagttaattctatagtctttttattctaaatttctcttcctcctatcattgcattgtgtttccttgagcatggatacatgtcttgcagtcttttggtgaacatttattgcattggtcacggacttattaccatatatcagaaacctctggagaaatgcttccatctacttaaccaaaaatttaggtctacaaatatttcccttgtttcatgatgaagacaaaaaacattgcaagatagcgtccttaatagaagggtgttacatcaaatatatatctggctcttacaatgactatatctaaaatttgttaattttatccccagctatattttaatatggttgcttgtttacagaccataatactctgagacaaactgagatgtagtaacaaaatattatctggaacatggattgataatgtatcaagcttcaacctcatcgaagaagagagttagacattggcaacttggaaatccagtgatcaaacattaatttatagatgtcagttagaatgtgtaggcagtaacctcaaatacgtatgatgaattataacaaacactacaattctattatctatccatctctctacctacctatctatctatctgatatctcagaatgggtggagaaaggcatgcagtacttgttaaatcaatgctgacctaacttggaaggtattaattaagtatctcaactaaatgtgtaatggaatgaatt

SEQ ID NO: 705648 - DNA, 650 bp, Homo sapiens
actccaaatgtcaggctgtgggtctcttctgcaccctttctcctgtccttctccaggacggccttcacacggctgccagattgttccaccccacagacatttctagcagcctgcagaaacaagactgcccactctcagcaccgaatccctgacctgtgccccaggcatgctggcctgcatcttccccctcacattaagagaccatgatccctctccacaccttcatccctccagggtcagctgggcactgaccatttgatctttagcccttggcttgtttcatacaacttaagcataataaatagagaagcagacatacttggcaatatcctgcaagcctatgttgcaaactgaccatacaaaatgatcagcctatgagcagagcatctgtgagccacttaggctgatgggctgcctgagagcagaacctgccctctctatcagcttcatgtggctcccmgcaacctttgactccacaatgcacaaatcaagacttggggcattgataaatccctttctcagcacttctaggcttggcatcaagaatgattgtttgcaacactccctatacaaaatcagactttctccaatgcaggtttcatctcccaaatcagactggggctccctgaggatggggctgtgccttccct

SEQ ID NO: 705649 - DNA, 641 bp, Homo sapiens
cttggtgccatggagtctggtcagtagtcagtttcagtcccttgatatcttgaaagctagtggccattttctgggaaaggagacaaaaagctagagttagcaaaagttagattacttacctctggtttcaggaatgtcctgaagcgtctttatctacataatgaaagcataaggcccctttcatgatctcaactcattagtttttcggaattggccatctaggggctaggcaatgattgaggaggggatatgcagaatacaaaatgcaaaggagtttgatggggcctatatcatctctgtgcccagaataaatgttacgacagaagaaaagaataaacattgaggcaaccactagcagtttctggcacactgtttgaccctgactttgagtgtcttgctccttcagagaaggtgaaatattaattgactgactcatttaatagatatggcagtcaggctgaaatgcaaaggttcaagatcaggatttgtgcagttgccagtaaccagtcactgacctgggtttaaatctaagagcagggactgacttytaacaaggtacttgacttgagttcattaagataatttttgtgttgacaaggatgcaaagatactcatatcttgttctacttgtgaacttagtt

SEQ ID NO: 705650 - DNA, 1374 bp, Homo sapiens
ggatggcattttcccattacacctagatacatatgaaaaaatgtacaaacgactagaatgattacaccatagtgataacaatgattactactgggtactaagataatgtattttataattttttccttttgtttatctctcttttctgttttctacattgaaaatgtattacttgtttttaaattaaaaacatttaatttgaatacctcatatgagtgtggccttacaggcctgggtacccaggaagcctggtctggcctgtataataattaagaaataattaattgtataataattgtgcttgtataataattaagaaatctgctacctcctttcaggtagcagcccttaccagggctctagaatctcctgaatcagtttagtctccctgaagccactaagatctgggcatgtcaaaatgggtggcaccctgcccagtcaaagcacttccactaacaggtccttgggtgggaactagaagacagcatcaggcttttgggctttcaaaaagtatttcttaatgtagagactcctattcctgtagtcccattaacagtagactcttgattaataagcatggctaatgaaaatccacagaatcacagaaccacagaatcctggagctaggagggaattcagcaaacccctaaggtgggagagtactttgccccaaatcctcagttcatcgtcatctgaacactttcatctgccaacagctacactcccaagacacaagaagccgaggatttggcaatgcagtaaaaagacaagcctaattcagggaaaccctacattcagccaaaattttttgctggcagtataaaacccccacttccttctgaatcctgcagtctaaatcaagccaagaagggcaacagggcttttacaagcctggccaaccgattacccacacaatgtcagacagaaacagcccaggactcaaatttccctctgacacctgacctgcccctgactacatacctggtgtcttcagtagtttcactgggccyatggtggacaaacttaacacagagaaagaatgtgcatgacagcctctctattggttgtcctagagagataggaggatctgaggcacttggtggcaactgcttaggcagcaagcctccaaacaagcctttagcaataggaagccatttccacacatccagatcacttgccaagctgatgggtgccttccctcctgtccccacctctccccgacccccgtctcacccacagaaaagtagcacatagaaaatatggcttccagggtgagagatatagggaatcccacagtgcccttgggggacacagtaatgtggctcagacatagaccactgtacagatccagcagcacaggaagggctgcaggcc

SEQ ID NO: 705651 - DNA, 1374 bp, Homo sapiens
ggatggcattttcccattacacctagatacatatgaaaaaatgtacaaacgactagaatgattacaccatagtgataacaatgattactactgggtactaagataatgtattttataattttttccttttgtttatctctcttttctgttttctacattgaaaatgtattacttgtttttaaattaaaaacatttaatttgaatacctcatatgagtgtggccttacaggcctgggtacccaggaagcctggtctggcctgtataataattaagaaataattaattgtataataattgtgcttgtataataattaagaaatctgctacctcctttcaggtagcagcccttaccagggctctagaatctcctgaatcagtttagtctccctgaagccactaagatctgggcatgtcaaaatgggtggcaccctgcccagtcaaagcacttccactaacaggtccttgggtgggaactagaagacagcatcaggcttttgggctttcaaaaagtatttcttaatgtagagactcctattcctgtagtcccattaacagtagactcttgattaataagcatggctaatgaaaatccacagaatcacagaaccacagaatcctggagctaggagggaattcagcaaacccctaaggtgggagagtactttgccccaaatcctcagttcatcgtcatctgaacactttcatctgccaacagctacactcccaagacacaagaagccgaggatttggcaatgcagtaaaaagacaagcctaattcagggaaaccctacattcagccaaaattttttgctggcagtataaaacccccacttccttctgaatcctgcagtctaaatcaagccaagaagggcaacagggcttttacaagcctggccaaccgattacccacacaatgtcagacagaaacagcccaggactcaaatttccctctgacacctgacctgcccctgactacatacctggtgtcttcagtagtttcactgggcccrtggtggacaaacttaacacagagaaagaatgtgcatgacagcctctctattggttgtcctagagagataggaggatctgaggcacttggtggcaactgcttaggcagcaagcctccaaacaagcctttagcaataggaagccatttccacacatccagatcacttgccaagctgatgggtgccttccctcctgtccccacctctccccgacccccgtctcacccacagaaaagtagcacatagaaaatatggcttccagggtgagagatatagggaatcccacagtgcccttgggggacacagtaatgtggctcagacatagaccactgtacagatccagcagcacaggaagggctgcaggcc

SEQ ID NO: 705652 - DNA, 592 bp, Homo sapiens
acctatgtaaaaaacctgcacgttctgcacatgtatcctagaacttaaagtataataaaaaaatgcagctgaatcactgaaaaaaaatggacacatttaggaagtctcagaggcgggaattgaagctactgctgctacttagtctgcaatttctcagataattttggcttttcatttggtgaaagagcactacaaattattgatatkttgagtaagccttctactttttcctttttctctactattcccatacagataggttatcttgctgaggaacatacattcttactttctcctgtttctcttataaagctgtttgggagagacccgctttaaattgctgtgcaatttaaaggttaccatattctgtacaccagtgagtgtctgtagaattccttggggaaaatgcatctcctttggttaccatgcaccttgtgaatgtaaagggttatagcagagagttgcaggctcatactgtactagaaaatcaccccaagctacattgttttggggaatggcagagagtggtaatttcacaccatgttggaaaaacactcctatctggacaaatctatctaacactttcagagct

SEQ ID NO: 705653 - DNA, 1247 bp, Homo sapiens
tcaacttaagtgagcaccgtggtaataataaaatcaacctccagaaggaatctaaaaaaaaccccatcaaactcagccttgtgtcattatctagtaaagattggtattaaaataaaagttgccagacacagatttcctatttatcaaaatgagcgaatcactctatgcagcatttatcaaatactattttcaaaatttaagagcattaccctcatacaaataaataataaatatatgtcaaagatatttgttcaaaaaattctttaattgaggaaccaataagaccctacagctagctcaaaaaataatttgagaaatgtaaatatatataattactcagtaaaaggaattctaagttaaatatgttaataaaacaagttaatttcttacagagtattaaaaccataacattgaaattatgttttctactagacagaaatccacaagttagcatgtgactccatagtgtctgagtgctaatcgcatagtacatagaaaagatgaacacaagtatgttttcttacataattaataatagtgagtctgttaaacagtgtcgttttatgacactggaaaaagaatacaattatcattttgctttatttacaaatggtgtacacacagacacacaaaatcacaagcacacatattcttctgaattgcccatatagtaggtgttatatggggatgacagaaaaccatttttgtagacacatttaaagcatcctattatgaaactctaaataaaattgcaaacactttaagaagccatgaacatcattgtaatttatcataagtataaaaattgccttgtttacactcactgtgtacctaactatagaatacactaataaagtttaaattaaatatagaaagattaatgttgaaattcatttactttatgcaaaagtacatggaagaactgtttcatcaaaacactaacattgaatgtgattattctacattagtgataaatttcagaagtaaatatttagaataataaacaaccttgaataattttcaaaccgtatattagattatgggttaaatagtatgggttgaatttcttacccatatttaaatgtactcaatccaaatattggctaataaatataattgcaagaaaatttgcrgtataagtagttaattatgcttaattgatattctaataaaaatatggaattagccaatatttttgtatttcccttaattaatggattgaatatttttccattttagttggttga

SEQ ID NO: 705654 - DNA, 872 bp, Homo sapiens
cctggagcctgtgtcatgcccattgggggtcaggcagcctcctgatgccagaacacctcaggcagagccctactcatctgagagctgtctgcctggactgttcctgtccctgcatcctccctgggaccacttggaggaccacatccacacccagcctagctgcccacagggagctctcctgcccttgctggccctgcccttcccacaggtgagcagggcggcctgtccaccagcacactcaagcctcttccctgcagtgttttcattttattttagccaaacattttgcctattttctgtttttgtttttgagacagagtcgctgtgttgcccaggctggagtgcagtggcatgatctcggctcaccgcaacctctgcctcccaggttcaagtgatcctcctgcctcagcccccctagtagctgggattacaggcatgtgccaccatgcccggctaattttttttttagtagagatggggttttgccatgatggccaagctggtctcgaactcctgacctcaggtgatccacccacctcggcctcccaaagtggtgggaytacaggcatgttttctgttttaaaacatgatagttgatgtgagactgaaacccctgggttgtggagggaaattggcccggaggagaggaataacctggctaatgtgagagttcctgcttcccctgacaccggcttcatggaatatgcaactcctgtaccccagtccaatgtgttctggcagcagggacacctgggccaaggggctgtctggaccaaaggtggggtgtggggccctggatggcagctctggcccagacatcaatacctcggtgttccccgtccctctgttactgtttcaccagagctgtctca

SEQ ID NO: 705655 - DNA, 611 bp, Homo sapiens
cagtgaaacctgtctctactaaaaaatacaaaaaattagtcaggcttggtggcatgcacctgtagtcccagccactcgggaggctgaggtgggagaatcgcttgaacccgggaggtggaagttgcagtgagccgagatcgcaccattgcactccaacctgggcaacagaatgagactctgtctcataaaaacaaaaaatgaaaatagttcaagtatccatctataggagactagataaacaaactgtggtctattcataaaggggaatcatacaatagaatactgyatatgtgaatatgaacaccctatcatgtgaatatggatatatcatacagaggaattcatacaatggaaaactcgctattcagcaatgagaatgaataaactacatgccaacagcatggataatcacacagatgtaacactgagcaaaagaaaccatctacaaaagaagatgtacagtttattctatttatgtacagaaactggcaaactaatttgtggtgttggaagttaggattgtgattatctaagggactgggtgggatttgatggaaatggggtccactggtggggggcaggggggcttttggggttcgggccacatgggt

SEQ ID NO: 705656 - DNA, 1869 bp, Homo sapiens
agcagagcagcatgcactatagtactagttctcttaggtttccaggtgagtaaaaagctcaaagtcctggagtccagcagcttgggttttagccctaactctgaaatttaatacttgtttgaccttaggaaaatcctacttcctgccagatctgtgatttttaacccagactgcacactagaaacctaggaagctagtaaaatgactagctcctaggctacactttagtagacctaataagttggaatgtctgaagctgaggctctggccttggtatttttaagaaactctttgagtgagccaaatgttctgccaaggttgagaacccctggcttccatctttgaagtaagtgcagctctgcctttccagtcttaggcccaccactctggtcatttagattcccggattactgttcagcagggagttcaaatttctcgtcacatctcctttttgacttttgaaaaagattctcttgagccctcctttgatwttctctttcccagaaatattttgctaatccattcattaaataaattattattgagagcctcatataggctaaacagctgttccaggtgttggaaattcaacagccatggtctgagcaaaacacacatgatgtctgctttcttggagtctacagactggtttgtattaatcaaacgatcatacaaatagatacttcattataatctgtgactgttggcatcaatattatttttttcttatgatgagaaaagcacagagtggggaaaaaacttataacaggggcctggtccctctgggaggccagagcctgcttctgagaaagatgactgagctgagatctaggtatgaattcaacgtgaaaagagagttctagacagaaagaatgcatattcaaatgcctcaaggcaggaataacctcaccaaagtctaggaactgaaagaagattcactagagcacagagagttgggttgggtactccaggtgaggttgtccagacagatccttctcaaattatatagtcttaaaggattttacgctttatccccagggggatgggaagtcagaaggattttaaacagggggatgtacagagtaatttttgttttagaaaaattactctgcttgcatggtgagtaacagatgtggggggtggtaggaaggacattgggagaccagtcaggaggctattacagtttagcaagcaaaagataatgttggctgggcacggtggctcaggcttgtaatcccagcactttgggaggctgaggcggcggatcacgaggtcaggagtttgagaccagcctggccaacatagtgaaaccccatctctcctaaaaatacaaaaaattagccaggcatggtggtgagcacctgtaatcccagctattcgggaggctgagagaggagaatcgcttgaacgtgggagtcagaggttgcagtgagccgagatcacgccattgcactccaggccaggcgacagtatgagactccgtctcaaaataaataaatttaaaaaaatggtggattggcctaggaatgtagtggggagatagagggaagggattggcatcaggagacttattgaaggcaaaatcatccctactgtgtttccatcttttaaaaatcatcttctacctatcacagtccgtgggatctatttgtccacacatcatcatccctcgtaagttctgaacaatccaaagcaccactgctatttgaaaagcaactgattgccaactctatacaactttgttgaggggtcctaaccaactcatggtggaacaagcacagcacattatagacagggaaagagatgaggagaaccagggagcccggtaggtaaaaataacatccactgagcactgatcatgaacacatg

SEQ ID NO: 705657 - DNA, 788 bp, Homo sapiens
tggggagttactgcttaatgggcatggagtttgggaagatgaaaaatttctagagatgggtggtggtgatagctacacaacaatgtgaatatacttactgtcactaagctatacagttaaaaattgtaaaaataatttaaaaataaaataaatagttaattttatgtgtactttagcacaggagaaaaattgaatttttaaaaatcagtagtgatatactatactatgtggcaaaactgatcaaagtactggtggcaggaaaaactggcacaacctctttttaaaatattgtggcaatgtacttcaaatgccttagaaattttcagttttttctaccttttaaaaaatgtattttaggctgggcatggtggctcatacgtctataatcccagcactttgggaagccaaagtgagacaagtgcttgaggccaggcatttgagacaaacctggataacacagtgasactctgtctgtctctacaaactaatgaattaactaattaaaaataaaaatatatttttaaaaatgcaatgcaaatgaagcttaaaaataagaataaaaatgttcttgatggcagttttaggtaccatttataatagcaccaaaaaccatgaaatatttagataaaaatataacagaatatgtataatatgtatatgctaaaaactagaaaatattagtaacagaagtcaaaaacctaaattaaaaaaaaaacttatgtccatgaattggaagactcaatattgtgaagacgtcaattccccttactgatctatagattcaacac

SEQ ID NO: 705658 - DNA, 788 bp, Homo sapiens
tggggagttactgcttaatgggcatggagtttgggaagatgaaaaatttctagagatgggtggtggtgatagctacacaacaatgtgaatatacttactgtcactaagctatacagttaaaaattgtaaaaataatttaaaaataaaataaatagttaattttatgtgtactttagcacaggagaaaaattgaatttttaaaaatcagtagtgatatactatactatgtggcaaaactgatcaaagtactggtggcaggaaaaactggcacaacctctttttaaaatattgtggcaatgtacttcaaatgccttagaaattttcagttttttctaccttttaaaaaatgtattttaggctgggcatggtggctcatacgtctataatcccagcactttgggaagccaaagtgagacaagtgcttgaggccaggcatttgagacaaacctggataacacagtgagactctgtctgtctctacaaactaatgaattaactaattaaaaataaaaatatatttttaaaaatgcaatgcaaatgaagcttaaaaataagaataaaaatgttcttgatggcagttttaggtaccatttataatagcaccaaaaaccatgaaatatttagataaaaatataacagaatatgtayaatatgtatatgctaaaaactagaaaatattagtaacagaagtcaaaaacctaaattaaaaaaaaaacttatgtccatgaattggaagactcaatattgtgaagacgtcaattccccttactgatctatagattcaacac

SEQ ID NO: 705659 - DNA, 1482 bp, Homo sapiens
gatctgctgacctcgtgatccgcccgcctcggcctcccaaagtgctgagattacaggcgtaagtcactgcgcttcactcttcagtgtaggcttctatattggtcatacaatactacccaccccaacccattagtttgtcatagacaggacaaagatcaataaaatgtcaagctccttaagatcaggggctgttttatatgattatatatgcttcagaatctatagcagtagttcttaacctctttggaaaagtaagaggccccttgaaaacttggtgaaagctccagatgctataatgctggttgttttggaaatccatacataatgttgacacacatattacataagcaacaggttacattagctttaagactggaatatagaaatgtagcccaagcaaatggaaaggatgactttccatcctttacaatcagaaatataaaggttatagtaagtgaaataaggcaaacacaggacaaatattatatgattccacttatatgaggtacctagaacaggcaaattcataaaaacagacagtaaaatcaaggttaccaggggctatgaagaggggaatgaagagtgatacagcacccaaaaagccttcatcgtatcagcctggaaagtcttgsgaatttgcagagtcaagaaggctcctaacagaagccaagaagttttactaaggtttgaacagatgccctttattcatatttcttctgagtttgcaagtcatgggtgatgtttaatacaataatacacatctcaataacttaagatacaactttaataatatgcatatactcaacttattttttgagtggacaactgcccttctaggattcaaacccatatgaatattaccaataatgaaccctcaaaaaagtatacccaacaaataatactgtgtagaaaaattcaaattgactaaaattatgtaagtttacatgtaattaatttttactacattggaaacagatttgcttcacagatgaaatataaggaatatcacatgtatgcaaaaattaatggctatgtgctcaaaaatgaaaataagtccaaattacataaataagataaatttgtattctgttacgaataaattagagaaatcttagagggcccacagcccataatgtaaaagctgaaaagaatgccactaccatactaacaatgaacaaaagctggataaattacaaaatcacaacttttcttgaagcagcctgaaatccaaggagggacagcccttacagatgggacatacaaacatatctctctataagaagagtaatgtccattcccaactataaatactatttacttcagtctctctttatatataagatgtctgacattcaatcaaaattaatgaggctgggcatggccactcatgcctgtaatcccagcactttgggacactgaagctggcagattgcttgagcccagaagttcaggactagtcttggaaacatagcaagatcccat

SEQ ID NO: 705660 - DNA, 1348 bp, Homo sapiens
tttctgaattcttctctccctctgtgactttgctcttcctccctcaccgtcaggctgccaggtgtcacttcctgctcacacctatgtgccggttggtaccaacatcacttcctgcttttgattttttcctttaactggatgtgaatgtagaaacttgcaagggtgcaggggagtgcactgattggactctgacagtgtgttattgaattccaagtgccctattctgaaagtatttccgaatacaattgtctccagagctggctagagccagaatcctatttggtttgattttttaaaaatttctggtaggcagaataagctttactggagtaaccccagccttggagggctagggtrtgaagccagcatgtacagtgctcgccgtgtgggtggtaggcattgctgcatgcctgtagacccgggagatggcagtggctgggaggcttgcagtctgatgtcaccccatcacaggccacagtgctggtgggtctataagccaggtcccttccaccaggggcatttccaccaccatcaactctgccaaggatcatgaaaaacataatacaaggtaacgggctagatcaggatttctcagcctcagaactgttgacatttggggctggatactctttgttttcggaggctgtcttgtgcattgcaggtgcattatagatgtttagcaggattcctggcctgtaccctactagaccccactagccaccacttccttacccagtaataataatgtccctagacattaattatcaatgataatcactaatcattattgatcaatattcatgattattaatcagccccagttgagaacttttgggttcaagaatcatggactgggaggccgaggtaccttagagggcaggaccttccctgaacacctttcctaagggagcaccgcacccccatcacctcatctctctccaaccccgtaccttgcttgcttttcttcagaactcttatcatccactggatttctcttattttgtttatttgattgtctgttggctgattttctgctcaggggcctggaccagatctgccttcctcgttgtggcatcctcagcccccagccattgtttggcacagtgtgaggtttagcaaatgtcagcagaatgaatgaatctcaaagttccaccagagattcccaaaaggaatactttaatgagtgtccactccgctctagacactctgatggacatgaccccctcccaccccacattagctcattcagtcttgaaaataaggaagctaaggcacagaaaagtctagtaccaaactgctagcaaatgatagaggcaggatgtgaactcaggcctgccggattccaggg

SEQ ID NO: 705661 - DNA, 1605 bp, Homo sapiens
cagacactggggtctacctgaaaagggaggataggaggaggaagaggagcagaaaaggtaagtattgggcactgtgcttaatacatgcatcttttactacatttaactgcagattttattccggtaattctaacctgttctctacaggtgccctgtcactattgtttctgtggttaaactggtcttctttgggttctgcagcttcaccatgcttctctcarctttctgacaactgtataagctttggtgtttgcctggaatactcttctctttgctctttgtcctaattctctttcaagtatcagttcatagactgccactatccttattttatattcataatgtaccctgtaactttcctctgacatactgaatcgttgattattaggtaaatatatttctttacctcttgcctgtgagctttaaatgtaagaattatgcatgaatttgatcatcatggtattacaataacccaactgcctaacaaatagaagataattggtaaataaagtaatacaaattccatgagtgctcaagtaagatgacaatgtgaaagagttttaatgcatttagtgacatggatataatttgagttttgagtaattaaagttatgttgaagtagaaaggtggagtcaagatctggtgcactgagaagttgattgtgaggatattggaatagtaagtatagaaaatttatttcagaaatttggttttgaagaaaggaacaaataccggggagtgcctacaaggtggagtgaggttgaaaaggattttattgttatttgtcttactagtttatatctgagacagaatatatagatgctgtttacaataacttaataaaataagataaattgaagatatgacatcaagagggatgcaattaaagtacaaggaccctaatgaggtgaaagggtagggagtataggcaaacatgggaatacatcaaatttggggaaatgtacttacacacttgtaatacggctgaaagaagataagggtatcatgacagaataagatggcttgattttttttattccgtgaattaagaaactgggacatctcctttaagaaaggtaaagatatagggagatgttaataggataaatgtttgaaaacgataatgaatttttttatctagtactcactacatagaattagaaaactcagaaatttttaatagcaggattacaatatttagagtctcgttaaggttgatgaccattacttaaatgggcagaaagtatccccagtgggaaaagttctcaaaaaggattcaacatctcagggacaggaccactggataaagaagagagttaggggtttttatcacttttgtatagcaaaaaaaaggaaatggataaaatactttctgaatattgaaaagagactactagaattgaaattaatagacattaattttaagcaggaaggtgtgtagggtaaaagttgtaaaattcacttgcgttaattactatttcattataattaatcttgatacaatataagaaaaatcccttattttcttcttcaaaatgtttttgtgtatccttggaccattattcttaataataattaaggattgccattctaagtttcattca

SEQ ID NO: 705662 - DNA, 918 bp, Homo sapiens
tcttaactaatgcagttctggaacaatgagacccagctggggtacgtggagtccctaggctggaagagaaaaaaatatatattaaaaattaaggcccattgcaagcactgtattactgacagataagaacagactttttaaggcaaaggccttctagttccacagaacagtgacgtagaaagctccttcccctcttagttgcctgggttagaggccaaatgtttgtgccctgagtttgaatcaaggctctcttacctgcttaactgtatcaacctgggtcatcttcagcatctgtaaaacggaccgaggatacctcctaatattgttgggaggataaaataggctcatgcgcataagatgcttcacatggccaccccgggggaagtagtcacaaatgttaggactcagcatgatgaaaaccgaagcctgcagttcaccatcacatcggatttaagaaattcaaagaattctccttctttaaaagaacacagccttgagatgcacacacaagggtaggacttgaattgttgtcttcctgagcyttttttttttctatccttttctgtctcccagtcaccaaccatgttgggtgtgggctccagagatgcttggagtaaatggcactgtccttgtcatctcctgcatgtcttggctcaaatgttaccttttcagtgaaaacttcctgttcagccctattttaaatcacacttcttcccacttgttgggtgctcccaatcccttttcttctttcttctccatggcacttaccaccatctgtcaaagtagatatggtatttaacttcttttgtttactgttagtgtctccccgctagaaagtaaactccttaagggaaaatatttgtgtctatttcgttaactgctatatctccttgataagtatttgttgaactgatgaat

SEQ ID NO: 705663 - DNA, 1072 bp, Homo sapiens
gggataagggctgccctggagggtcaggggagggcagagatggaatcgctcccacactctcctagccagatgctggggacccccagggccaagccactcagtttccatttcctcgtgctccttwatgaagaaggggcaattcccaccacagcgaggtaggagctgacccactttgagccacgttccatccagcactcatgcgctggcgagttccccactttccttcccctcagttgagggcagaatgcttgttctgctatgtaacggtagcaataattataaatggcaattataatgctttatgcaatccccttaccctttattcctaattatgaatgcaattattcatactatgaatactatgactatgaatacaactgttgtagtcattttactgtaagattttataactatactaaactctattcatgcatatataagcttcattatttgtcactcacagcagtttccattttttgacttttttttaaaaaaaagtagagtaaccaacatatctaagtgtagcaactaaaaactaaaaataaaaactaaaatgttcattattctggttttcatcatgtcttatttttcaaaggtctagaatcactcacttttaaaacagaaagtgtatttgaggcagaggatgtgtcagtgaaatgctcttggagcccacagcgactaaaaatgaggctttggtgttaaaattatgatccccagggaaagtgtagctcattcaagtagagtaaaatcaatccaaacgttaagctgtgtgttggacacaacgcagacccatccctttacatatataaagctgtgggttcttcatgaaatggaaacatgaggtgaggggactgtttcttgccattcatgttaaacaaaaaggttttactatcccctgaattttccaatgaagagaaaaccaaggaaaacaaacgcaaatactcattaacacttgcattcggtttccactgctgccgtaacaaattaccacaagcttagaggctaaaacaacacctgtttattatctcagagtgctgaaagttagtgtctttctttgcttcaaatttcacaa

SEQ ID NO: 705664 - DNA, 583 bp, Homo sapiens
ccgggcagccaacccagaaggaaaaatctccaagagtgggaacaggtgagggtagtgttaaggaacagagagcaggccacatgcacttcacgacgccgtcagcaatgacagtgacaacgtgtactgtgctgaccacactccatcgggaacacagggcaacctcccttggtggaaggtgtctacmgggtcacactcccaagcccaaacaggcgaccggggattctctctgctcgattctccgcaactcacctctacaggaagaacttacatggagatattctgtgttctggcagagcgcggtggcacacgcctgtaaccccaacactttgggaggccgagacaggaggatcgcttgagcccaggagtttgagatcagcctgggcaacatggcaaaaccctgcctctacaaaaaaatatatatatatgaaaattgctgtgcatagtggcaggcatctgtggtcccagctacttgggaggctgaggtcagaggatcacttgagcccagaaggttgaggatgcagtgagccatgatcacaccactgcacaccagcctgggcaacagagcaagaccctgtctccaaaa

SEQ ID NO: 705665 - DNA, 583 bp, Homo sapiens
ccgggcagccaacccagaaggaaaaatctccaagagtgggaacaggtgagggtagtgttaaggaacagagagcaggccacatgcacttcacgacgccgtcagcaatgacagtgacaacgtgtactgtgctgaccacactccatcgggaacacagggcaacctcccttggtggaaggtgtctaccgggtcacactcccaagcccaaacaggcgaccggggattctctctgctcgattctccgcaactcacctctacaggaagaacttacatggagatattctgtgttctggcagagcgcggtggcacacgcctgtaaccccaacactttgggaggccgagacaggaggatcgcttgagcccaggagtttgagatcagcctgggcaacatggcaaaaccctgcctctacaaaaawatatatatatatgaaaattgctgtgcatagtggcaggcatctgtggtcccagctacttgggaggctgaggtcagaggatcacttgagcccagaaggttgaggatgcagtgagccatgatcacaccactgcacaccagcctgggcaacagagcaagaccctgtctccaaaa

SEQ ID NO: 705666 - DNA, 656 bp, Homo sapiens
cctgcccggtgtggctctcaggtagatcgctgtaccacacagctcttccttcctgtccttagatcacgccagctgcctagtcagttctgataagaggacctggatgccttggatgctgatacaggaatacactattatggttcttttcaatgggagcctccgatcttggctgcttctagttggtcatcttggccctgctgtgctaaatttttrttcttgtttgtgtatgagtgtctgtgtgcttttctaacgctcagaccatcacaagtagcacatatcacagtcaaataaagtattataattctattctaagtaaggattttgaattcttaggaattaaaaaaattgtaaatgttattactgcaccttataaaagtatacaatctgaaatggagaaatataacaaccacctaagggtagttttctaaatgcagaattatttttgtaacaagatacagataatacagataattttaaatacctgctttaatttaaatttgagaaagaaatagaaatcggtgttttatttaaagctaaatgagtcttttggggatttaaaactttccctgccaccttcctttgttgcaaaacatgtaagtagttgctgtgtgttttattttccagttatccatttcttttcaatttccacagcccca

SEQ ID NO: 705667 - DNA, 656 bp, Homo sapiens
cctgcccggtgtggctctcaggtagatcgctgtaccacacagctcttccttcctgtccttagatcacgccagctgcctagtcagttctgataagaggacctggatgccttggatgctgatacaggaatacactattatggttcttttcaatgggagcctccgatcttggctgcttctagttggtcatcttggccctgctgtgctaaatttttgttcttgtttgtgtatgagtgtctgtgtgcttttctaacgctcagaccatcacaagtagcacatatcacagtcaaataaagtattataattctattctaagtaaggattttgaattcttaggaattaaaaaaattgtaaatgttattactgcaccttataaaagtatacaatctgaaatggagaaatataacaaccacctaagggtagttttctaaatgcagaattatttttgtaacaagatacagataatacagataattttaaatacctgctttaatttaaatttgagaaagaaatagaaatcggtgttttatttaaagctaaatgagtcttttggggatttaaaactttccctgccaccttcctttkttgcaaaacatgtaagtagttgctgtgtgttttattttccagttatccatttcttttcaatttccacagcccca

SEQ ID NO: 705668 - DNA, 290 bp, Homo sapiens
catcagatcttgtgagaactcactcactatcacaagaacagcatggagaaaattgccccatgattcaatcacctcccacctggttcctccctcgacacatggggagtacaattacagaagagatttgggtagggacacggattcaaaccatgtcagtaacagactgtgggaaggcagatggatgaagagaaactagctaggaagcaatgatggtttggatcaaggtggagcaatgtaagtggtgagaacaggtwaaaaaaaaaaaaaaaaagtcaataaatatatttggt

SEQ ID NO: 705669 - DNA, 1020 bp, Homo sapiens
aatcaccttttttggactggtgcaatagcctgtttactgatttcaagcctctagtcatgttaagttctcaatttaatatgagtattataaggaatttttaaagcatgcaaagcacattgacatttctctgcatgtccaacrtatgaaacaagacaaaaaaatagtaggttagataaggaataaaactgtcattatttaaagatagattgatattatgtggaggaaatcccaagaatttacagataaactacataagaattgaaaactaaattcagaaacttcaaaaactgttaaaaacacagaaaaatataaatataaatagtaatttcatgaaatttacacagaaaactgcatttttttttccctaaaatagggatggaaggaacagcttacagtatgttttataccttcaaaatacaaagacatttcaaatatactgcagaccactatagacctattttgagtctatgggaatacaactacaagttctttaacaaaatattaacagaatgatttcagagacacatataaaagaatgcagcatgacagagtggggtttacttcgaatatacaaagatggttttcatttagaaaataatcaatgtgctttgcaaggctaacagaataatgcagaactgtcaggtggtaatttcaaaaattgtggaaaaccacttgataaaactcaacaatcactcaagataaaaactaacaaaggtaacctatagaaatcttacagctaaaaaaattagccaggtgtggtggcgggcgcctgtagccccagctacttgggaacctgaggcaggagaatggtgtgaacctgggaggcagagcttgcagtgagccgagatcgcgccactgcactctggcctgggtgacagagcgagactttgtctcaaacaaacctgcatgttgtgcacatgtaccctagaacttaaagtattttatatatattatatatataatatagttataatacttaaagtattttatatatatataaaagaacaagaaaaagcaaaa

SEQ ID NO: 705670 - DNA, 1020 bp, Homo sapiens
aatcaccttttttggactggtgcaatagcctgtttactgatttcaagcctctagtcatgttaagttctcaatttaatatgagtattataaggaatttttaaagcatgcaaagcacattgacatttctctgcatgtccaacgtatgaaacaagacaaaaaaatagtaggttagataaggaataaaactgtcattatttaaagatagattgatattatgtggaggaaatcccaagaatttacagataaactacataagaattgaaaactaaattcagaaacttcaaaaactgttaaaaacacagaaaaatataaatataaatagtaatttcatgaaatttacacagaaaactgcatttttttttccctaaaatagggayggaaggaacagcttacagtatgttttataccttcaaaatacaaagacatttcaaatatactgcagaccactatagacctattttgagtctatgggaatacaactacaagttctttaacaaaatattaacagaatgatttcagagacacatataaaagaatgcagcatgacagagtggggtttacttcgaatatacaaagatggttttcatttagaaaataatcaatgtgctttgcaaggctaacagaataatgcagaactgtcaggtggtaatttcaaaaattgtggaaaaccacttgataaaactcaacaatcactcaagataaaaactaacaaaggtaacctatagaaatcttacagctaaaaaaattagccaggtgtggtggcgggcgcctgtagccccagctacttgggaacctgaggcaggagaatggtgtgaacctgggaggcagagcttgcagtgagccgagatcgcgccactgcactctggcctgggtgacagagcgagactttgtctcaaacaaacctgcatgttgtgcacatgtaccctagaacttaaagtattttatatatattatatatataatatagttataatacttaaagtattttatatatatataaaagaacaagaaaaagcaaaa

SEQ ID NO: 705671 - DNA, 1786 bp, Homo sapiens
gaattcattcccaggcccaggtgcaactttgcatcagttttctttatcttaccgaatatatttttgcaaaaaaatcctcttctctcataacattcactgcagctctaatttctttttaatgtttggttactttttttttttttatcttgtctgttttacttaacattgtaagcatttccaatgtaattaactattctgaaccatgactttatatggatgtatcaagctatatttagaaattcctggatttatatagtttccactgtttaaattccttttgggagaagtatttcaaacaagactatgataaattttattgtatataaacctaagccatatctctgattaactctttagatttaaaaaatataataactggattttggtaaataaaatgtaattaccctctagaaaaattgttcaaatttttacatttatattatcggtgaatagtcctcatttccacttcatttacctcccatattaactggctagtgtaatcattttatttaactttttaatgacatacaatttacatacaataaaattcacacttttaaagtgtataattcagtgtttttttaacatatattcaaaatattgtacgtatgatttggttaattcattaaatttattgtgtttaagctctcatttcatttttcttgttgtttctcagagattttctatgtagttatttgtatcatttacaattaataaatgcatattttaaaattaattttaattcatatttatctttccagacctattgcattggctagatccatgtttttctcaattattgctaatactatttttctgtataatgtagtttaggggtatttgttttcaagtcaaatgtgtctgggttaaatataccacttcttaaatgtgtagcatggggcaaattgcttatgattgttgagtttcagcttctctatttggtaaaaatgggaagcattaataaatttattgaaggatataaaaaataaaatgcttagcaaagtgcttaatgtgtggtagatattgattcatttttcattgactttctaaagatcaatgctgctcaggaaataaaatcaggtaaagatgatccacaataaaatgcttgtgctaatattaaattatgctcatataaatactgttgtcattgaaagttttttgtagaaatccttgagctagactttttgacacagatagttattttattatgctgccgacctataaccaggmtcccatttatgccagcccagaaacatagctatttgtgtcattataaacctccagagaatctgcattctcccttggataactcacagatgtgcctcccagcgcttatagccataaattcttaatctctaaattaaatatctcctactgtatctttgcacgtttctctttcgttttgtaatctttcataatatgcaactattgaatttgtttttgttagaggaaaagtgttagacaccactaatcatgtctaaattctttagatatacctcatttattacattcaaaatagtgagagtgtcctgaacaattgtgtgtaggtgcaggacttatatagggggcaaaagaggtaccacaaagccttaaaattaatttccccattaggaaaagatgccagcaggtagtcaactgatcaaaagaaatggttttagctttttatgatgcaggcacaatgagctcattattttttatacataactgaatacaaacgttttattgaagagcttaataaaaactttgagaaaacatttgataattttagaatttgcaaacattttgc

SEQ ID NO: 705672 - DNA, 1188 bp, Homo sapiens
tcactgatgtagttccagtctttcctcactgcaactcacctttcagaaatttatattcttcaaatttctttgtaatatcagagaaggatatacacaagtatcataaaaggttgctaaaattatcctcgcatctttctgaatctacttcaacctaaccacttgttgcaacaaatcaatggaggatatgggacccagctacgttgcattcagcctgacagcaaagagactggcaaacctcgaagctgttcttttcactaaattttcgtaaaaatatgttgtgttcacatgtcgtgggtttataataaataaatattccaacagttctcagtcttaattcttaatatagttaattccaatagaaactacccatataaatgaaacctcttaagggcgcgaagaggttcttgatagtggagaattgctgggtcatggagctgccatgattgctgggcattgaggattcatttgaggttatggattatggattaaaactgggctcagtgaggggctaacatgttgttctccagaaacatccatgtgtgcagtgttggtggagtatggaaagcaaatttgtttctctaacagacgttatagtctttctttacaagccgtaaaattaatgccagctgattttattctaaaagaaatttggttggttaaggtgccgaatgacccagaaacctgcagacccaggccaagatggatgagaccaaaaggagacaaggctttcaggagcacaggcaggagactctggcctggaagggacaggagaccccacgaagcccctaccactgcctcaggctgtcgctgctggggcccttgccagagcttccctggacgcagaaaaatgggccttctctttttgcttctgtgataggaaatgctgtctgcctcctacttagaatcatacgcagtggtaggaactccccaatatagaaaattgattctgattgtagttcaaaaaaaaatcctcatatcctgcaagtccctttctctgttatattcacctcttcyccaaaccctctaaatctccctaagactcccttagggagtctaaaaccagcttcctggttaaacaaagtaaaaaacaaaacgaaacaaaaccaaaaacaagaagggagaaaggcaaggaagagtgaaataaacagcggcatataaaaagaaattaatagcctaggttagcattcc

SEQ ID NO: 705673 - DNA, 1023 bp, Homo sapiens
ctccacgttccaggccgggcgtcttcccgcatctgtgtgcttgcagctactgaggactgtcacagcctgggtccctcctggggtcaacactgttgatgggccttggacattaacaagtccgtttccatgcagtgttcatggggcttgaagagggagccaaaaggaggtgcatgcattccagccatcacttgtacctggggaagatgatgatctattttcttattaaatgcattaaaatagcatgtaatacagctgctctgtgaaactcatcragagaaagcatttaaaaaggaaaagaaaagaaaaaagaaagaaaagaaaagaaaagaaaaaaagacaagaaaagaaaagaaaaaagaaaatacaaacttctaagtaaccttcaagaaatgtggctaccaaagagaacccacactcaataaccatccagctccatgcagggacttggccagcactgccaatgggctcacagggacacagggaaagtcagggcgcatccgctggccaggtgcctgcgtcccacggaaagactcacctgaaccagagaataagtggtctcctctttcccctgtccccagcaccccgcaaaaaaaaaaaaaaaaaaaaaaaaaaaaagcaaaaataaaatcctcttgggaagaaaacttcagattccctcagtcataacctagtaatttaatacctatcttgggagaaaagcatccctcttggcttaaataaaagtatccatgcatacacacaagtctagttttgcccattttttcttcttcagtgggtccagtttcccctctcactgcctgtttgttaaagcctattattagatctctctacatcttttctctgataagtaaaaaggatgtaatccttagcacttagctcctattttcaagttttgcttcatctcaatttttcctttcttatcttcccccgagttctctggagcacttttgaagttgataatgccttaactacgctaagatccttggaatcatctgaccgacaccgactactgattattcacct

SEQ ID NO: 705674 - DNA, 1878 bp, Homo sapiens
atttgttgtaggcatatactacattttgtttatcccttcatctactgatgcacgtttgggttgccttcaaatgtcaataatgctattatgaacatgggtgtgtaaatatgtctttgagacctgctttcagttatgctgactgtatacccagaagtggaattgctggattgtatggtagttctatttgtaattttttgaggaaccaccaaattgctattcaagtggctgcaccatgttacttttccaccatcaaagcacaaggattccagtctcttaatatcctcaccaatgattattttctgttttgtttttgttagtcaccatcctaatgggtgtgaagtaatatctcactgtggttctaatttgcatttccctaatgattagtgatatcgagcatctttttaatatgatgctggtgcaaaatgaccttaagtaccaacattccctgatatgacttaagtaccaatattctttaatctgagaagatgaaaagttctttgacacatagtaacatcaagagaaaccctggtatactttagtacggtacagtgctgttaaacatgacattctgctccggtttctcattcaagaacattactttgaaaaaccctaatattagtaaatctttcatcctccattctaactcatagattaaattttcttatctctaaaattctctcaaacagctgtaggcttctattcttcaaaggttttattacaagacaccagaaaaatttatattctctctctctcatgagatgggagcaagagataagcatgccgtcctgaggaaagtgatgttacccagaaactacagtaaggtgtttctcttatcaaggtatctgtggtttctgtaatgtcataggtttgtttattcaacagtatttactgaatacctacttagcattaggcactgaaatccagaagataaaataggacagttcctgacctaaaaaaaaaaaaaaaaamaaaaaaactcacagtctagcagaaagagcagacaagaaggttggcaagtttaacacagaacaaatgacatgtgttgacattgagatcaattcactcaagcaaggtcttatgggaggatggagagaaataatgaggcggaacccagaacataacatgggaggagttgtaaaatatgtggtggaatgaagtagataacaaggacaccttgggaaagatatcagacatgatccaagtttttctatatacttttaagtgcattctgttgctcttgtccttccatttttaattaattgaaaatttaagtccatccacttgtatctgaataagttgcttgaatggatcaatgttgtaaaaatgtaaataccttactagttattgcttgaattttacacaggtacaaacaaatgatgatgcattagctgactggttttacgaccatgatcttatgaggtcattttctatataatttattttgcactaaaatttacactgaaggaagaaaatttatagtttataaaatagtttcatgtcatgttaaaagttacaagatgttcttttattcatatttattttattgccaatatactgatttccttgcgaacttatattctcacatttatttaattgaaaaacattgattggaagtgttgataaggagaggaagaagtctccttaatatttgagttaatggcttgactgttttaaattaggaggaaaggtgaaagtgctccttcaggtatttgtgagttaagaaagtgcatgggtgaaattgttcaggttctggtggcatttgaatggaattaacatcaaataatttcagatttgtcattgtctcatgagatcattgagcatagttctgtcattctgcactgagactcacagaactcatgtaatttgaccaaggaaata

SEQ ID NO: 705675 - DNA, 1385 bp, Homo sapiens
agaatatagctatacttattaccactgaactgtatgcttaagaataataaagacagtaaattttatatgcatattttgtctaaataaaaaaattaaaaaataaaatgtgatctctcatggctcgtacatatttttattgtgtttagtgcaatactgtaaacttgaataacaccagggcacccataaaaagtgccaccactaatgatgctagaagtgctcccaagaagcagagaaaagtcatgatataacagaaaaagttgaattgcttgatatgtattgtcagttgaatatgtgttaatcaattgtttatgttagcaaggattcaactcaatagtaggttattagcaattatgtttctggagattcaaacgttatacttggatttttgactgcctggaggattggcattactaaccaccacccctcttcttacctcctgctgttcaagggtcaactgtatatactttacatagagttttggctccaagagttaatttgtaggttattgtttggaacttgtcattaatttctrgtgcgtgtatagaagtaaatttacatatgaggttaggttttaggtaagcctttaaaagcccacttaatatacgatatcattaatatagtgacgggggcagtcataagaaaggggtcgagtgcaccagggagccctgcaacaattacgtgtggggaaaaggtttgaggggccaacattgttaatggggaagataccagtagaggagggtgtgagcaacggggtgtgtttctagctgtaggattgaccagtagctctgtggccagtagccagttcatagttaggccattggtgagtcttgtgttccaatgtcacactgaactttggagttaggaggatctttgacatctaacacctcaccctgcatatcagtaaacctcaataatttgccaaagtccaccatcaataattgaccaaagttcattgccagtcaatgaactttgccagcagagtaaggttgagaacccatgaatcaggtatcagacccgctggcagtttgtagttgtgccttatgtagaagggctatcggcatccagacctagacacggttcttgagttcctgaaaatgaataaagtgaatgaataaaatgagtaaaatgaatgcaggattgccagttcactgacaatttaccctccctggctgaaaaagttccccatttcttctttagaatattctttataatattgacttagctcttctatacccttactggttaaatcttagtggcattgtcttgatatcataaaatataaaaactgtaaaaaattttttgatgaaagggatgcattatatgcacaattataattcattactttaataaccctccttcagtgatatctccaaggatgagaccta

SEQ ID NO: 705676 - DNA, 1385 bp, Homo sapiens
agaatatagctatacttattaccactgaactgtatgcttaagaataataaagacagtaaattttatatgcatattttgtctaaataaaaaaattaaaaaataaaatgtgatctctcatggctcgtacatatttttattgtgtttagtgcaatactgtaaacttgaataacaccagggcacccataaaaagtgccaccactaatgatgctagaagtgctcccaagaagcagagaaaagtcatgatataacagaaaaagttgaattgcttgatatgtattgtcagttgaatatgtgttaatcaattgtttatgttagcaaggattcaactcaatagtaggttattagcaattatgtttctggagattcaaacgttatacttggatttttgactgcctggaggattggcattactaaccaccacccctcttcttacctcctgctgttcaagggtcaactgtatatactttacatagagttttggctccaagagttaatttgtaggttattgtttggaacttgtcattaatttctagtgcgtgtatagaagtaaatttacatatgaggttaggttttaggtaagcctttaaaagcccacttaatatacgatatcattaatatagtgacgggggcagtcataagaaaggggtygagtgcaccagggagccctgcaacaattacgtgtggggaaaaggtttgaggggccaacattgttaatggggaagataccagtagaggagggtgtgagcaacggggtgtgtttctagctgtaggattgaccagtagctctgtggccagtagccagttcatagttaggccattggtgagtcttgtgttccaatgtcacactgaactttggagttaggaggatctttgacatctaacacctcaccctgcatatcagtaaacctcaataatttgccaaagtccaccatcaataattgaccaaagttcattgccagtcaatgaactttgccagcagagtaaggttgagaacccatgaatcaggtatcagacccgctggcagtttgtagttgtgccttatgtagaagggctatcggcatccagacctagacacggttcttgagttcctgaaaatgaataaagtgaatgaataaaatgagtaaaatgaatgcaggattgccagttcactgacaatttaccctccctggctgaaaaagttccccatttcttctttagaatattctttataatattgacttagctcttctatacccttactggttaaatcttagtggcattgtcttgatatcataaaatataaaaactgtaaaaaattttttgatgaaagggatgcattatatgcacaattataattcattactttaataaccctccttcagtgatatctccaaggatgagaccta

SEQ ID NO: 705677 - DNA, 595 bp, Homo sapiens
ccccaactatattctccttagtaaagataaatataaaatgagaaataggcaaatttaaacagctaaactggcagatttttatattactaatacagaaaatacaaagaaacgaggtattcatacattgttggtaggagtatcaaaatgaactgtccttttgcagaatgacacgcacaatatctaccaaattaaaacacacataccattcaatacagcaattccaccactaggtatctaatctacaaaaatactccatatatgagtaaagataaatgaacagagatgctccccgcaatagtattttttgtttgaaactatggaaacacrctatagggaacatggttataatgatccaaacaataccttactttaaatgtccttacacagaacaatggcctccacctattactaagtggaaaagagcagttatatgttggatgttctaattcaactaactttgtaaaattccataatgctgtatttatggtgtgcatctctcttatctttacaaaactaagagcttatttacaggcattcttcttagtaccaatgttttatctctaatttctcctgtctataacttcccattctaaca

SEQ ID NO: 705678 - DNA, 363 bp, Homo sapiens
  misc_feature 2, 3, 4, 5, 6, 7, 8, 9, 10, 11, 12, 13, 14, 15, 16, 17, 18,19, 20, 21, 22, 23, 24, 25, 26, 27, 28, 29, 30, 31, 32,33, 34, 35, 36, 37, 38, 39, 40, 41, 42, 43, 44, 45, 46,47, 48, 49, 50, 51, 52, 53, 54, 55, 56, 57, 58, 59, 60,61: n = A,T,C or G
  misc_feature 62, 63, 64, 65, 66, 67, 68, 69, 70, 71, 72, 73, 74, 75, 76,77, 78, 79, 80, 81, 82, 83, 84, 85, 86, 87, 88, 89, 90,91, 92, 93, 94, 95, 96, 97, 98, 99, 100, 101: n = A,T,C or G
tnnnnnnnnnnnnnnnnnnnnnnnnnnnnnnnnnnnnnnnnnnnnnnnnnnnnnnnnnnnnnnnnnnnnnnnnnnnnnnnnnnnnnnnnnnnnnnnnnnnntttgtgaaaagcccagcactgcctcgtagaacctcctgtgctctgggtgtgtgggtgctcatcgtgagggcgtttaacctactcctccctcttgacctgcctgtraactagaagttatgtatgggtgcttgatactttgagtttgacagttttcccaggaatactacacacaccacaggtacggtgtttagagaacaaaatctaagggctgatggtatttatggctaccaagctctcattgctcctaggcttgatgtagtca

SEQ ID NO: 705679 - DNA, 1463 bp, Homo sapiens
acctctttgaagtggaaagaactgatgcattaaacattccttaaaccattctaacttagattcagtatccaaaaaggagaaaatcttctgataatgtatgaaaacattctttgggcaatattaaagaaatcttgaagttaactgcttaaaatagagatttcctaaagattggtttgtcatgttagctaacatccttcacaagtcaaatgtagataaatcatatgttgtgtgagttcattgggaaaatggcaaaactccctttgctctcacattgattagattttcttctgttttaaacaaataaaattttacttccaaaaacaatatgaagcagagttaagaataatggtagaatcacttgcaatgaatgctgagagatggtaaggataaaagtataaggcaagataaggcctggcacggtggctcacacctgtaatcccagcactttgggaggctgaggtgggtggattacctgaggtcagaggtttaagaccagcctgaccaacatggtgaaaccccgtctctactaaaagtacaaaaattagccaggcatgatggtgcatgcctgtaatcccagctacctgggaggctgagttaggagaatcacttgaacccaggacacagaggttgcagtgaaccaagatcacgccactgcactccagcctgggcaacaagagcaaaactccatcaaaaaaacaaaaaaaaaaagtataaggcaagatagtcttagataaatttgtggataagtgatcagttaaaaaagagggatttacagtctatctctaaatttttaaggtcagaattatgggtagttgccatatcatttcacttctttttgatatctactatataaatcctaaagtaataaaaatatttaatttgacccattctaacaaaaccttagttattcactgataagtcttctagaccatcagatttgtagactacctccagaccaaaaagtagtttggaaaattcccttaactttaaatctgagaaatccacgatctgcattctggatgtgatctcatcaatccatactaaccgagcaaataaatggagaagaaagtgaacatgaaaagacataaactctatgtgagccagccttgaggagttacagactattctgtgcttctgtttgtccattggcatgtccaggacaataacttttactcttttctcttcaaagagagtctctaaacaccartgggacagtagcttgcaagtagtttgaatcatttcttggaaggctttgtgcccaggaatcacatgttaaacttacaagaaaaaggaaagtagcataataaggtatgtggaaaaagtctcaaactagatgtaggtcctcagtctaattttgaaaatatggcatttgggccgcagctttttcattagtaaaatgcgtggttgaaattaaattggatttcatgtgctatgagatcagatggaaaacagatgaacatttt

SEQ ID NO: 705680 - DNA, 620 bp, Homo sapiens
taactaatttttcattttattagagaaatgtacacatatctgtattctcataatatacccaggtgtattttactagttcatttgccaggtgggtccagtcctttgatcagaatcccagtctatgggtgggatcagacatagactgcatgccccaagtatttaatctggcataaagtgatagttaatagcccagtagatcacatgggctacagttccacccaccttattaactaaactgataacttggcactccacacatcccctaccctgttttacscaggagcaggagagcaatgataagaaaaactcggaagcattttgagtgaatgctgtaaaatcaatatattctgcacctcggtagagagatgttttggcaagtttttccagaagaccacctcagttacctcagttattccaagactaacaagcaagtctctaagtcagttatttctggttgctaccttctgatggtcatttttccttttttcagaaatatgtacaacagctccctgaatgcaactgttatgatgcaaaacaaactgcatgattaggaaattgagcaaattcaggtgcctttctgtaaattactgactgctttctctctaatctcttaatctact

SEQ ID NO: 705681 - DNA, 620 bp, Homo sapiens
taactaatttttcattttattagagaaatgtacacatatctgtattctcataatatacccaggtgtattttactagttcatttgccaggtgggtccagtcctttgatcagaatcccagtctatgggtgggatcagacatagactgcatgccccaagtatttaatctggcataaagtgatagttaatagcccagtagatcacatgggctacagttccacccaccttattaactaaactgataacttggcactccacacatcccctaccctgttttacccaggagcaggagagcaatgataagaaaaactcggaagcattttgagtgaatgctgtaaaatcaatatattctgyacctcggtagagagatgttttggcaagtttttccagaagaccacctcagttacctcagttattccaagactaacaagcaagtctctaagtcagttatttctggttgctaccttctgatggtcatttttccttttttcagaaatatgtacaacagctccctgaatgcaactgttatgatgcaaaacaaactgcatgattaggaaattgagcaaattcaggtgcctttctgtaaattactgactgctttctctctaatctcttaatctact

SEQ ID NO: 705682 - DNA, 1137 bp, Homo sapiens
aaaagtgtctccacactgggcttctgagctccgattaatcccatagcctcaatattattctggccttctgggcatttctgattctagaggggatttctgcataaaagatgggtgttttgtgactgttctgtactccactaagcaagtgcactccatcctacacaaaggggctctcagagtattacatgcataaatgttacaggtgttgagtgcagagtatcggtaaagctatttggattctacatctgtgttgagtaagtggtagaaagaatgcatcagtgatttctaccctccaaggccaccgcaatgtccagaaaacttgcaaaatcattttatctcctgttagttgagtcattttgcagcggctgaggtaccgacatggagatatggcctgaatttgctatgcaggcgcaagcaatagagtgaaaaacagaagacccagattctactcctcagtccccaattgatttgacaaggaagtctgggggaggtggtccaacctgtatgctgcattctctttatcagcatgacagagataaaatatctatcttttgccaacctcactgaggcactctaaagattaacttttacgaacatctcactgtcacaaaaagtgactattgtagcagagatatcagtattatatcacaaataagaatctgctatatcagggatagctttacaggaaaatgtcttatttgcagaatgaggagacatacggcagcatgctcccaaacagcacgtcctctgaagaattaggagaggctgatctttggcttcgtaagaaatatcaagcwtctcgatgttagcaaaattttaaaatgtattttccattatatggttagtagtaaactgggggaatcggccctgaccaagcactcacagatgtattgtatcactaattagaggcctgataataatagaatcctagagctggaaggaaagccagtaagcctttaaagagaccatcctctataaaagccttagcaaacacatccaatttgtgtttgaatatatttggtaaaatagagctaatttattcacctttcaccactcatctacacacacacacgcacacacacagagagagagagagagagagagagagggagagactagctgcttggtagaggagac

SEQ ID NO: 705683 - DNA, 1137 bp, Homo sapiens
aaaagtgtctccacactgggcttctgagctccgattaatcccatagcctcaatattattctggccttctgggcatttctgattctagaggggatttctgcataaaagatgggtgttttgtgactgttctgtactccactaagcaagtgcactccatcctacacaaaggggctctcagagtattacatgcataaatgttacaggtgttgagtgcagagtatcggtaaagctatttggattctacatctgtgttgagtaagtggtagaaagaatgcatcagtgatttctaccctccaaggccaccgcaatgtccagaaaacttgcaaaatcattttatctcctgttagttgagtcattttgcagcggctgaggtaccgacatggagatatggcctgaatttgctatgcaggcgcaagcaatagagtgaaaaacagaagacccagattctactcctcagtccccaattgatttgacaaggaagtctgggggaggtggtccaacctgtatgctgcattctctttatcagcatgacagagataaaatatctatcttttgccaacctcactgaggcactctaaagattaacttttacgaacatctcactgtcacaaaaagtgactattgtagcagagatatcagtattatatcacaaataagaatctgctatatcagggatagctttacaggaaaatgtcttatttgcagaatgaggagacatacggcagcatgctcccaaacagcacgtcctctgaagaattaggagaggctgatctttggcttcgtaagaaatatcaagcttctcgatgttagcaaaattttaaaatgtattttccattatatggttagtagtaaactgggggaatcggccctgaccaagcactcacagatgtattgtatcactaattagaggcctgataataatagaatcctagagctggaaggaaagccagtaagcctttaaagagaccatcctctataaaagccttagcaaacacatccaatttgtgtttgaatatatttggtaaaatagagctaatttattcacctttcaccactcatctacacacacacacgcacacacacasagagagagagagagagagagagagggagagactagctgcttggtagaggagac

SEQ ID NO: 705684 - DNA, 628 bp, Homo sapiens
gtttctactgagctgctccatttgttatctgttaagtgatcaaaataggcaaaggctttcttttgacatttttctttttttcttttttcttttcattttttttttttttttttgagatgggagtcttgctctgttgcccaggctagagtgcagtggcgcaatcccggctcactgcaacctctgctggtagggttcaagtgattcccatgcctcagcctccttagtagctgggattacaggcacgcaccaccacgcctggctaatttttgtatttttagtagagatggggttttsgcatgctggccagctggtcttgaactcctgacctcaagtgatccgcccacctcagtctcccaaagtgctggaattacaggtgtgagacaccacgccctgcctctttggacatttttctcactccaacaatttaaggagaagagaggttcttagttactgacaggaaggtgattgcccattattctgaaactcaaaaataaaagtgcagaaagattgatcagaggatttgctctctctggaaataccggtcttgccatctttcaagcaaatagcggctcactggtaggaatttcaaaacctgtgcttaaactgccaaattcctttcctctgctgt

SEQ ID NO: 705685 - DNA, 628 bp, Homo sapiens
gtttctactgagctgctccatttgttatctgttaagtgatcaaaataggcaaaggctttcttttgacatttttctttttttcttttttcttttcattttttttttttttttttgagatgggagtcttgctctgttgcccaggctagagtgcagtggcgcaatcccggctcactgcaacctctgctggtagggttcaagtgattcccatgcctcagcctccttagtagctgggattacaggcacgcaccaccacgcctggctaatttttgtatttttagtagagatggggttttcscatgctggccagctggtcttgaactcctgacctcaagtgatccgcccacctcagtctcccaaagtgctggaattacaggtgtgagacaccacgccctgcctctttggacatttttctcactccaacaatttaaggagaagagaggttcttagttactgacaggaaggtgattgcccattattctgaaactcaaaaataaaagtgcagaaagattgatcagaggatttgctctctctggaaataccggtcttgccatctttcaagcaaatagcggctcactggtaggaatttcaaaacctgtgcttaaactgccaaattcctttcctctgctgt

SEQ ID NO: 705686 - DNA, 1108 bp, Homo sapiens
tacatagttcccacctcaaaggttctaaattagttggtatggtgagaagcctgggttctggggcttttaaaagcagtcagggctataagccactaggtcttttcacagctaggatggggcctctgccccaagcatatcaggtttttatcagcctgcctctctttcccatctaaccagaggtacccaaattgttctctttgggggaatcaatggtaatcattctgccatgacagagtcaatatttctcagactttaaagtgcatataaatcacctggtcagcttgttaaaatgcaggtttcaattcagtcagtctgggatggggcctcgattctgcatgtctaacaagctcctgggtgatattgattctactggacagaagactgggatatggctagcaaggacttttatctaaagttttccagtatttcaaaatttgaaagagtataattttaatttcatagaaaagcataacagagtaaattccaaatgagtgctggaaatataaaggcaatagagtatgttatgcctatccctgttcaccagatatgctttatttttgtgtaggctagttactaggaagttggcaataaaatacatagttatgcaacaaactaggtttgggcaattggtttttgttagaaaagtaaaaatatatgttctcagagagctccctataaaaagtcttggaaaccactgaagaggaagaagtcacagatacagccacatagagaagaatatagcataactattgaaaattttgtctctggtttcagactccttgggtttaagactgatttctaccttttttttttttttgctgggtaagctgggattaggtaataaacctctctatgcctctatttcctcacttatgaaataaacagaataacctatttccttgagtcgtcgtgaagattaaatgaaataaatgtaaggagctgagaaaggtgtgtctctagaggataatgtgtgatcagtaaaagttagccatgatttcctcacttagcctgggatatatttgcatattggttaggtaataaccctgtgacttttatgaattcactgctggctcacccagtctttgagatagcactctgsccaaacatc

SEQ ID NO: 705687 - DNA, 1318 bp, Homo sapiens
taaaactgggaagaaaaaaatttgcagaacaattactctcttgtaagcaagttaatgaaattaatggaatagatgttacatcatctcaatgagagaaggctgtgttaggaaactcttagtgactcagartaacaagccctgcatgaatactgatgacccttagcaaaaaattctttcaattcagaaaattcagatttttgccaaaacatcccatgaaactgaggtgtgaaggaaaaaacaaatttatcagcaagagtgattttagggagcttcaaatgaaatggaagactaaactgttaaatatcccattttgatcatgatgttatctttctaaaaaacttcatttatttagagcctatataaacatttatttagagcctataatttctgggtattataataagcacttgatttggattatctcatgtaatttggcaacaacctaagaggtaggttttattaggcaccaagtgcccccttttattgatgacaagattaaggcttagagaggttaaggaacttgcctatagttacacagttagcagtggagccaggatctgaacccaggtcatttgatctctgcatactgtccatgaatcacaatctcttgcagcctctattcctcttcccccttttaaaccctgccagagaggtacagatgagtctctgacttaagtcttcttcctactaaagaatactgagccttcttctttccagtttccttgaaatgacaaaagatattcctgtctctagttcacttggtagcactcttttctcctgttggcttccaagaaaagtaagatatttctgatacacatccacagatgccacttttgactagggcaattcagacttgaatgtacctgggcttgaagttgagtcaccccctaaaccccaccccactacagtgtgtgttcagccaatcacaagtctgatctcatcttctccagaaatgcctctgggcatcaggtcctttcttcccactgccatcacctgaatccatttcttagtggcctgcatcgatccagcctgacatttttactcttgtccttctatttagaatccctcaaacgctccatccccatggcttcttgctgatgtttggcagtttctgtggtaccgaatctctggaggcccacctacaggaacctcctttccagccaagctgctttctttcttgcctttttagctcctcattagagtattcaccaaatttccctttccaagatctcaccttccttaaaggctcttttgggtctcaattctcttaggaaatgtttgttcccctcagcccaggtgcacaatcacttctttatct

SEQ ID NO: 705688 - DNA, 1556 bp, Homo sapiens
gccacccagctcagaggacacaaatgcacacaggcatatcaactctagggagaaggagcctaggctgagtgtgtttgctcttttatctccatgattaaacagtgccttgcatttagaataagtgatcagtaaatttttgaagtgaacattgccttgtcatttcaaaaacaaaatgatagatctctgggttgtttacatggctgttgaccaaaacagctgttgagttacaacatcctaaatagtcatttccttcttttgctcaactaggaaagcatatgcacagcagtgtactcctttgcccctgtgggaaatgtatatttacaagaggagaaaaattgccacctggctgggagtgctcatggtgtttgcctctgggaaacaatcagtgcatgggcaaccaatcaatgggaggagtgccgttcttctcgggggaatccgcccgccctgagcatgtgccaagattgctttgtttctatcagggggaatggctgactgcctctgtgacacaacgaatcagccatcatttcgccctggctgtgcagggaccaaggcagtgacgtccccctttatggtggcaggggcagctatggagaggctggtggcatgagggcagaggggcagccacaactgtgagtacacaagaacagctgggctgaatgactgacgaagtgcagatattaggagtggggagcccctggcagctcccatctgggtaaaggatggtggtgaggaaaaatgaggaagcgtttatttagaacaaaatgacggtgggattacagatttcctagtgaacactttgctcatatttatatttgtatttgaatgtatgtgaacaccaaggagatctggaaattaacatccaccattttattctatttaaaaagttaaatgaagccaagatactggcagcacttgaaggctgtcccctcctcctatgccctttgggatagccccaccctagggactgggcaagtgtgggtaccatgaaccttttggcattcatttcatgagtrtcagatccccttctccatctcccaggagcaacacagtggagagaacacgttaacctgattgtgggagggcatccactctggcagtgaaagcttcacttgacattctctaaagctcaacaagagtgttaaagcctatctttaaaagaagtgaatgggcttcctctggaaagatggcctcttagccactggtcccctgttagactgaaatctgtcttgtgtggtcaggagccattaatgcgctgacttgaagcctcgagttttcctctatacacattgatttcacttggagaagccctgtggacccctcctcctcctcagcgttggcagtcatgagcctggggaagcctgtggctcagcccctggtctgacagcaggcaggagagcgggccagctaagagcacacacctggagctgaccgcctgattcctaaacccagttctgccagctcccagctgatttgggcaggtactgaacctccctgtcttgttcctcatacgcaaatagggaactaatagactaatgggtccactcttaggggattaa

SEQ ID NO: 705689 - DNA, 1556 bp, Homo sapiens
gccacccagctcagaggacacaaatgcacacaggcatatcaactctagggagaaggagcctaggctgagtgtgtttgctcttttatctccatgattaaacagtgccttgcatttagaataagtgatcagtaaatttttgaagtgaacattgccttgtcatttcaaaaacaaaatgatagatctctgggttgtttacatggctgttgaccaaaacagctgttgagttacaacatcctaaatagtcatttccttcttttgctcaactaggaaagcatatgcacagcagtgtactcctttgcccctgtgggaaatgtatatttacaagaggagaaaaattgccacctggctgggagtgctcatggtgtttgcctctgggaaacaatcagtgcatgggcaaccaatcaatgggaggagtgccgttcttctcgggggaatccgcccgccctgagcatgtgccaagattgctttgtttctatcagggggaatggctgactgcctctgtgacacaacgaatcagccatcatttcgccctggctgtgcagggaccaaggcagtgacgtccccctttatggtggcaggggcagctatggagaggctggtggcatgagggcagaggggcagccacaactgtgagtacacaagaacagctgggctgaatgactgacgaagtgcagatattaggagtggggagcccctggcagctcccatctgggtaaaggatggtggtgaggaaaaatgaggaagcgtttatttagaacaaaatgacggtgggattacagatttcctagtgaacactttgctcatatttatatttgtatttgaatgtatgtgaacaccaaggagatctggaaattaacatccaccattttattctatttaaaaagttaaatgaagccaagatactggcagcacttgaaggctgtcccctcctcctatgccctttgggatagccccaccctagggactgggcaagtgtgggtaccatgaaccttttggcattcatttcatgagtatcagatccccttctccatctcccaggagcaacacagtggagagaacacgttaacctgattgtgggagggcatccactctggcagtgaaagcttcacttgayattctctaaagctcaacaagagtgttaaagcctatctttaaaagaagtgaatgggcttcctctggaaagatggcctcttagccactggtcccctgttagactgaaatctgtcttgtgtggtcaggagccattaatgcgctgacttgaagcctcgagttttcctctatacacattgatttcacttggagaagccctgtggacccctcctcctcctcagcgttggcagtcatgagcctggggaagcctgtggctcagcccctggtctgacagcaggcaggagagcgggccagctaagagcacacacctggagctgaccgcctgattcctaaacccagttctgccagctcccagctgatttgggcaggtactgaacctccctgtcttgttcctcatacgcaaatagggaactaatagactaatgggtccactcttaggggattaa

SEQ ID NO: 705690 - DNA, 609 bp, Homo sapiens
ctaagataaatgactttgggggacatttacttcatgtacatgacaatgacatgctgacgagattcttacatataatttagttaaattatttaagatgaaatttaaaaacatcccaaattaaaaaagcattaaaatgataataaaggatactattatgaatctagttaaataacaaccaagagaatattatacaaattgaacaaagaagtaatcagtcatggactaatcaattttaagatattgctccaataacttttacatttatttgtgaaaaactacttgaattatacattattatttaattggcttggcaaatggatttgaactcataactaagaggtatatccccaaataatagtttcagatcatttataggtgatgctgtattaacacttcacaattgttatggttcaaaagtttagaaggatgttaatgaaatgtacagttgccatcaaagctggaaatatattttacttcaaaaagatagagcaataataaaatataagytaaaacattaatgtaattgaagacgataaaataacattcgtgggataaaaataacaagaaggaaaaagacctgacaatccattgcaaaaaaaatcggaaaag

SEQ ID NO: 705691 - DNA, 1405 bp, Homo sapiens
tattttaattgcagctataatttagagattatgtaaaatgggaaatttgtactaattatgctgtttatgattagaagggaacataaaactcaataatacacctaaacagagtagaaatagaaaagttaattgacatgctgatgggtgtcggaagcaatttcagagatatgaagtaaaatggaaagaatagcattaaaggcaaagtaccaggtagcattgaatcccatcactaatctattaagttactgaagagcctcttttgagaagacacagaacgttattactggctagatatctaaactttaaaggcgtaaggaaaggtactgaagagaacagcctgtctctggtccaatcttttcaagaaggagttttataatctgaagcatattttgcatttctaatttgggaaactctttaataccaatggcttgattacaattttcatataaaatgtaatatgatatatgartgcaggcatgctgtgacaaagtgtcttacaatgcctgaataataatatttcaggagtaggctgagtcattttatgagacagaaattccacattattattcttataaatataaaataaagaaataaaagcctatggacatcttgattagcatacttcattatttatatattatcataaatgtatattatttttatcaagcttatcataagaacaaattcaaagatcataagattgcaaaagtcagatcataaaaaatccagagtgaacaaatagctatattcaaaggaatggtatcattcctttgtataataataagaataataattcatatgattaatttacatgaaaaatcatagtgagttgaaaaagaacttcctgtctatgtgaaatataaattgtgaagttgctaaagaggaaaggaagaacaaaatctgaatgaaaattacagagttaaatatatgaaaattatgcttaaaaactgaaccagttttgctttatataaaaataaatattgaaaaagatttctctgtgaagatgtcatctatttagaagtcatatgttttaccattttcatatgtcaattaaaatactttaagaaataaaacagaagataaaaactttatcagaacaccccaaacctaggccatcaattaatctgttggaaatactaagtatacatcactaaaaataaattgaaagttgaatctcatgttacatttgacatttgcatgcactgttgcagattatcctttctaaccattgtcttttatttttctcgtttaccttatctggttccaagactctgaatccaatcatttcttgactcaatcaggatgtccaatcttggatatgccactttttagtctttctgattctcctcaaatccctgcttttaaaaaaatcctgacttagattctgttgtccatcattacattg

SEQ ID NO: 705692 - DNA, 1405 bp, Homo sapiens
tattttaattgcagctataatttagagattatgtaaaatgggaaatttgtactaattatgctgtttatgattagaagggaacataaaactcaataatacacctaaacagagtagaaatagaaaagttaattgacatgctgatgggtgtcggaagcaatttcagagatatgaagtaaaatggaaagaatagcattaaaggcaaagtaccaggtagcattgaatcccatcactaatctattaagttactgaagagcctcttttgagaagacacagaacgttattactggctagatatctaaactttaaaggcgtaaggaaaggtactgaagagaacagcctgtctctggtccaatcttttcaagaaggagttttataatctgaagcatattttgcatttctaatttgggaaactctttaataccaatggcttgattacaattttcatataaaatgtaatatgatatatgaatgcaggcatgctgtgacaaagtgtcttacaatgcctgaataataatatttcaggagtaggctgagtcattttatgagacagaaattccacattattattcttataaatataaaataaagaaataaaagcctatggacrtcttgattagcatacttcattatttatatattatcataaatgtatattatttttatcaagcttatcataagaacaaattcaaagatcataagattgcaaaagtcagatcataaaaaatccagagtgaacaaatagctatattcaaaggaatggtatcattcctttgtataataataagaataataattcatatgattaatttacatgaaaaatcatagtgagttgaaaaagaacttcctgtctatgtgaaatataaattgtgaagttgctaaagaggaaaggaagaacaaaatctgaatgaaaattacagagttaaatatatgaaaattatgcttaaaaactgaaccagttttgctttatataaaaataaatattgaaaaagatttctctgtgaagatgtcatctatttagaagtcatatgttttaccattttcatatgtcaattaaaatactttaagaaataaaacagaagataaaaactttatcagaacaccccaaacctaggccatcaattaatctgttggaaatactaagtatacatcactaaaaataaattgaaagttgaatctcatgttacatttgacatttgcatgcactgttgcagattatcctttctaaccattgtcttttatttttctcgtttaccttatctggttccaagactctgaatccaatcatttcttgactcaatcaggatgtccaatcttggatatgccactttttagtctttctgattctcctcaaatccctgcttttaaaaaaatcctgacttagattctgttgtccatcattacattg

SEQ ID NO: 705693 - DNA, 1405 bp, Homo sapiens
tattttaattgcagctataatttagagattatgtaaaatgggaaatttgtactaattatgctgtttatgattagaagggaacataaaactcaataatacacctaaacagagtagaaatagaaaagttaattgacatgctgatgggtgtcggaagcaatttcagagatatgaagtaaaatggaaagaatagcattaaaggcaaagtaccaggtagcattgaatcccatcactaatctattaagttactgaagagcctcttttgagaagacacagaacgttattactggctagatatctaaactttaaaggcgtaaggaaaggtactgaagagaacagcctgtctctggtccaatcttttcaagaaggagttttataatctgaagcatattttgcatttctaatttgggaaactctttaataccaatggcttgattacaattttcatataaaatgtaatatgatatatgaatgcaggcatgctgtgacaaagtgtcttacaatgcctgaataataatatttcaggagtaggctgagtcattttatgagacagaaattccacattattattcttataaatataaaataaagaaataaaagcctatggacatcttgattagcatacttcattatttatatattatcataaatgtatattatttttatcaagcttatcataagaacaaattcaaagatsataagattgcaaaagtcagatcataaaaaatccagagtgaacaaatagctatattcaaaggaatggtatcattcctttgtataataataagaataataattcatatgattaatttacatgaaaaatcatagtgagttgaaaaagaacttcctgtctatgtgaaatataaattgtgaagttgctaaagaggaaaggaagaacaaaatctgaatgaaaattacagagttaaatatatgaaaattatgcttaaaaactgaaccagttttgctttatataaaaataaatattgaaaaagatttctctgtgaagatgtcatctatttagaagtcatatgttttaccattttcatatgtcaattaaaatactttaagaaataaaacagaagataaaaactttatcagaacaccccaaacctaggccatcaattaatctgttggaaatactaagtatacatcactaaaaataaattgaaagttgaatctcatgttacatttgacatttgcatgcactgttgcagattatcctttctaaccattgtcttttatttttctcgtttaccttatctggttccaagactctgaatccaatcatttcttgactcaatcaggatgtccaatcttggatatgccactttttagtctttctgattctcctcaaatccctgcttttaaaaaaatcctgacttagattctgttgtccatcattacattg

SEQ ID NO: 705694 - DNA, 1405 bp, Homo sapiens
tattttaattgcagctataatttagagattatgtaaaatgggaaatttgtactaattatgctgtttatgattagaagggaacataaaactcaataatacacctaaacagagtagaaatagaaaagttaattgacatgctgatgggtgtcggaagcaatttcagagatatgaagtaaaatggaaagaatagcattaaaggcaaagtaccaggtagcattgaatcccatcactaatctattaagttactgaagagcctcttttgagaagacacagaacgttattactggctagatatctaaactttaaaggcgtaaggaaaggtactgaagagaacagcctgtctctggtccaatcttttcaagaaggagttttataatctgaagcatattttgcatttctaatttgggaaactctttaataccaatggcttgattacaattttcatataaaatgtaatatgatatatgaatgcaggcatgctgtgacaaagtgtcttacaatgcctgaataataatatttcaggagtaggctgagtcattttatgagacagaaattccacattattattcttataaatataaaataaagaaataaaagcctatggacatcttgattagcatacttcattatttatatattatcataaatgtatattatttttatcaagcttatcataagaacaaattcaaagatcataagattgcaaaagtcagatcataaaaaatccagagtgaacaaatagctatattcaaaggaatggtatcattcctttgtataataataagaataataattcatatgattaatttacatgaaaaatcatagtgagttgaaaaagaacttcctgtctatgtgaaatataaattgtgaagttgctaaagaggaaaggaagaacaaaatctgaatgaaaattacagagttaaatatatgaaaattatgcttaaaaactgaaccagttttgctttatataaaaataaatattgaaaaagatttctctgtgaagatgtcatctatttagaagtcatatgttttaccattttcatatgtcaattaaaatacyttaagaaataaaacagaagataaaaactttatcagaacaccccaaacctaggccatcaattaatctgttggaaatactaagtatacatcactaaaaataaattgaaagttgaatctcatgttacatttgacatttgcatgcactgttgcagattatcctttctaaccattgtcttttatttttctcgtttaccttatctggttccaagactctgaatccaatcatttcttgactcaatcaggatgtccaatcttggatatgccactttttagtctttctgattctcctcaaatccctgcttttaaaaaaatcctgacttagattctgttgtccatcattacattg

SEQ ID NO: 705695 - DNA, 598 bp, Homo sapiens
tattacaagattattttagtaatcattttaaattattttagtttgttgagtctcttcattgcaagtttttttcattgatttttacaaattttcttttttaaaaaaatcaacatagtaggaaaagttaatgagagtaagataaaaatagagtggaatgacagttgctgcccaaaaagagttaaaaagaactctggcatgatactgtgttctttattctgttgctttcttttcttttctttctttctttttctttctttcttttttttttttttttgagacagagtcacgctctgttgtcccggctggagggcagtggcgtgaccttggcttactgmaacctccacctctcgggttcaagcgattctcctgcctcagcctcctgagtagctgtgattacaggtgcatgccacctaattcttttttgtgtgtttttagtagagatgaggttttgccatgttggcaaggctggtcttgaactcctggcctcaagtgttccaccaagcacggcctcccaaagtgctgggattacaggtgtttgattccattgcttttaaagtcctacctattttgatctatatctttcaatgcactaatattg

SEQ ID NO: 705696 - DNA, 1397 bp, Homo sapiens
cattaagtactttacataagtcaaatcatttaatcctcatgaccctaagaagttattttaagatcttttgagaatgagaaaaaaggatgagtaagggtaggtgatctatgtaaaacaaataaattctagtaactggcaaagctgagatttgaacctaaatcaatctgaccagaagttctgagttattttccatgtgcctcacatagcagaaagggagatggcataagcacatctacaggcctagaggtaacatatactctgacaaaagcataaaagtctatgaaattttacagcaaggaaaggctatttctaacagggagactcagagaaagaagcaacatttaagttgggtactgaataatttctaagacttccacagatggagacagggaagaagaaacatacaagagggcaaccagagcatgtgtcagtgtgtgttgagggcggagaagttggtggaaacacaacacaagccaggaaaaaaaaagaaagaaagaaagaaaggtttgcatcagtttccagagagccttggaaaccatgctaagaaggtggggcacaatttttgtaagcaaatagatgtcacggaaggatttttctggcaaagaataataatatcagcactggcagcatcataaggaggaaatggatgcagagagtccatttaggagaatataacaatacaggcaatcaacaggaactcggactaggacagtggtgagcagaagggagacaaagaagagatccacgagttactggataagagggttgagagaaagagagtcaaagacaactctgaaaacagtgtaactggctgagtaagtgatgattcaataaatagagaaaaagagagtaagaagaggaaggagagatttggtaagaaaatgactcaatcacttctgtaccaaaagcaaactagctgactggtgactaacaccctaatccaactagttcctggtttgtccgtttatggaggactgagtgacagagtaaaagttgatggaaagacgtaaagggcctctttcccaacaagggtaaaatctgctgctttcctgcttctcacgcaaccgagaatcctgagtagcaagcagccagactggctcaaatggaagcatttctcaatgcttgatacgacgttgatataagaagtaggagaatgtaagctgaagacagggagaaaaacatttggagctggcagagaaagaagcaggacactaatgtgaacaaatgtcactgtccactgggatgtgaccacacattaaatcacatttgtttactattttatgtccacaatgaagattcacatgagagaatagatgcatacacagctctcaaaatgaggtckcttatgaagaacaatattaagtaaactaatttttcctgttgtacaatataccacc

SEQ ID NO: 705697 - DNA, 653 bp, Homo sapiens
acggtcctgagccctatatttatgtgcgtttgaagcttagagagatccaggcaatggaaaagtcaacctaagaagcctcgtagaccaagtttgctattattgcacacaaatgatgcaatgcattattgcatactaatgatagaaatgattataaaaatagagagctcttccataaaagagcttcttaagataacaaggtgctgtggtatcaatggagaagagaaaaattggatgtaaggtcacttggtcacctactaactatgcagctttggttgagttggctaacctcagtgaacataagtactattctgaggaagataattcaatagctactttgaagagtagttttgagaattaaattattgacaattggcacttagtctgcttttatccgctgttgcccractttcctgtctttctttattggcacttggttttcaagctatctgcattccagtttgaaaactttgtaaactcaaaatattcaagtttattttaattttttttgggaggggaggttctgagcaaatgtgagaaggcatgccccgtactgtatagatcatatctttgccatttttagatacttagaatcatagagcaagtgtatcatctggtttcaggggagatagaacttctgagcagggagcagggtg

SEQ ID NO: 705698 - DNA, 653 bp, Homo sapiens
acggtcctgagccctatatttatgtgcgtttgaagcttagagagatccaggcaatggaaaagtcaacctaagaagcctcgtagaccaagtttgctattattgcacacaaatgatgcaatgcattattgcatactaatgatagaaatgattataaaaatagagagctcttccataaaagagcttcttaagataacaaggtgctgtggtatcaatggagaagagaaaaattggatgtaaggtcacttggtcacctactaactatgcagctttggttgagttggctaacctcagtgaacataagtactattctgaggaagataattcaatagctactttgaagagtagttttgagaattaaattattgacaattggcacttagtctgcttttatccgctgttgcccaactttcctgtctttctttattggcacttggttttcaagctatctgcattccagtttgaaaactttgtaaactcaaaatattcaagtttattttaattttttttgggaggggaggttctgagcaaatgtgagaaggcatgccccgtactgtatagatcatatctttgccatttttagatacttagaatcatmgagcaagtgtatcatctggtttcaggggagatagaacttctgagcagggagcagggtg

SEQ ID NO: 705699 - DNA, 607 bp, Homo sapiens
tgctgaggataatggggaaggtggcaaggtcagaggtagaagagagatttagttgagatggactgcaagacagtgaccccagggctcaagtctccagtaaatgagggagagtggcaggttgctagatggcagtgaaggaaaggtgtaccgtttactgttgctaaatgacataggcctcagagaaataagtttttacatgggagatggtagagtaatggtctccatgkagcatcaaggaacaatgggatgtgggaaaataagcagtccccctttgagaagatggccgacaactgggaccctcgaaagagccacgttgctgttaagatgaggtggtatattatatcaatatcagcacaattaaatacagtttcttcccaaatactattttgtgcttttttaatttaaattttttatagcagcagattgttattttaaaaaaggaccacattctttttgaaatgtattttagactgtttcacttagacacatgtgaaaatatgtaaaattttgaatagcaaagtcagaatcaagtgaattcaccacttaatattgatcattatactttcttttgatgtataggcatgtaaagttgaagatctgggcaaag

SEQ ID NO: 705700 - DNA, 607 bp, Homo sapiens
tgctgaggataatggggaaggtggcaaggtcagaggtagaagagagatttagttgagatggactgcaagacagtgaccccagggctcaagtctccagtaaatgagggagagtggcaggttgctagatggcagtgaaggaaaggtgtaccgtttactgttgctaaatgacataggcctcagagaaataagtttttacatgggagatggtagagtaatggtctccatggagcatcaaggaacaatgggatgtgggaaaataagcagtccccctttgagaagatggccgacaactgggaccctcgaaagagccacgttgctgttamgatgaggtggtatattatatcaatatcagcacaattaaatacagtttcttcccaaatactattttgtgcttttttaatttaaattttttatagcagcagattgttattttaaaaaaggaccacattctttttgaaatgtattttagactgtttcacttagacacatgtgaaaatatgtaaaattttgaatagcaaagtcagaatcaagtgaattcaccacttaatattgatcattatactttcttttgatgtataggcatgtaaagttgaagatctgggcaaag

SEQ ID NO: 705701 - DNA, 795 bp, Homo sapiens
aaatagcttataaaaaaaatagctgggtatggtggtgcttgcttgtagtcctagcttctcaagaggctgagttgggaggatcacttgagcccaggggttcgaggctgcagtgaactatgattatgccacttcactccagcctaggcaacaaagcaagacattcccccccaaaaaaaggggggggcagaaattaataaattagaatacacaaagaatatgatatagaatttataatacaaaatttctattttattagaatataatagaaaggagctacaaaactcaaagctgtttctttaaaaagactaataagagaggcaaacttttaatattaatgaagaaaaataagaaagaaaaaatatattaggggtgaaaacagaaacacatctttacagagcagagttttaaaaatcagtgagggaattctatgaatcccactaactgggaaagcttccatgagggaacacgctggggcactggattcaatctgttggccccacacactgtctccctgcacatgggcacagcagggccagggccagggaggccacaaacatccacatatggcttcagccaggtgcttccaggtgagttgctggcctgaggcctagcctccaaagcaagctcctaccaaggccaggtttacactgcgagagagggaagctgaggtccacacaggcattacatgtgtggcgctgggcagggtagagrtaagtttgatttgctaccagcacctctctataagattcaagttccagtcatcagcagaggaattaggattcttctccagggaag

SEQ ID NO: 705702 - DNA, 659 bp, Homo sapiens
ttaacacaatcatcacagggtcctgaggtgacatacatcctcctcagcttacgaagatgacgggattaagagattaaagtaaagacaggcataggaaatcacaagggtattgattgaggaagtgataagtgtccaygaaatcttcacaatttatgttcagagactgcagtaaagacaggcgtaagaaattataaaagtattaatttggggaactaataaatctccatgaaatcttcacaatttatgttcttctgccatggcttcagccggtccctccgttcggggtccctgacttcctgcaacagaggtaggtggatcacctgaggtcaggagtttgagaccagcctggccaacatggtgaaacctcattttggggtgtggtggtgcacgcctgtaatcccatctactcggtaggctgaggcaggataatcacttgaaccggggaggcggaggttgcagtgagcccagattgcaacactgtactccagcctgggtgacagagcaagactctgtcaccaaaaaaaaaaaaaaaaaatctcttagtttctgatggttttcctgaccatatatgtgatgccgaagttgcttttttgttgtcacacctattggcatcaagtgctgaacttttcatggagtggcaattttttggtaataaagca

SEQ ID NO: 705703 - DNA, 1745 bp, Homo sapiens
accttggcttggctcttgacgtggacagtgagtaccttactatgaaggtgataagcctccacctggtcttccagataggggtgatattcctgttccaagtggcccttactgacccgagagatgtcattgccrcaggcaggacctatgggcgcatataggttgtaatgaaactgtagtctcagttggaagcctagacatgaaatgggtcagtgagcaaggctctattcctagtctccagccatgcctgtggcaacctgagcccgctctcagcacattggacccaggcagatgcaaaaaattcacagaactatgatttggactcaagggtttgtagatttcctccttcattctaatttcagtgtctaaaattcttgcatccatgaacgagctgggcatttgatgagacagggctgaatactgcagttttcctcctagaaatcatctggggcattttctttgaactgatgggaacaataaggcataactgtttgcacaaacttgggataagtgattttgggataacgatctaccagaatggggatatttcacccttggttctgagatgcaaaccaaagaatatcatgaccagctttcaggcctcctgaagtatatctctcacattgtcctgttctcatgctgaggagcctgagatccctgtgtggggattagacagtggactgttatgggtgtaggtgaattggcttattttgtctgtccctgtctgaatgtattgcaggaattaaaaaggaccaagaagaggaagaagaccaagacccaccatgccccaggtaactgagcaattgtgaacagctacttctgtgttgacatctggagactcctggttcagggaaaacagagcgggctgacattatcgattacatcttttcaagcaagcctgaattattcctactaacattgctgttggttttcattgcagtagatatttaggtttccatttcttcctccccttatcatttactaacctactgtaggtggaccagacttcaaaaactgtattctcatggcgactgcatggaaacttgagcacattttatggaaaattattgagcacagtcttttcatgatcactgtatgctgtgtgtcctgagggcactaactcagagtgtcctgttactccctcatcagtgtgtcacctggacaattcactgagctcgttctctctctctctctctgtgtgtgtgtgtgtgtgtgtgtgcgtgtgtgtgtgtgtgtgtgtgtgtccatctgtctttctctttcattcttttccatttggccctgttctgtcccaacatgaaggcaataatttgttacctcattaatggatctatccttttagtttcttaaccacttccctatgctacccatgaaacctagttggggctctgttgtgtgtgatttcccctggcttattctttactttttcctccttttccaggctcagcagggagctgctggaggtagtagagcctgaagtcttgcaggactcactggatagatgttattcaactccttccagttgtcttgaacagcctgactcctgccagccctatggaagttccttttatgcattggaggaaaaacatgttggcttttctcttgacgtgggaggtgagtacctttctatgaaggtgataagcatccactgagtcttccatataaagatcatattcctgctccaagtggccattactgagctgagagatgtcgttgccgcagtgaggacctataggcacatgtaggtt

SEQ ID NO: 705704 - DNA, 613 bp, Homo sapiens
tatatctctctacatattttaattttagagtaaagtatggtcctttaatgccttcttataaaactattacattttcattatgttgtaaccacgaattttctacaaaacatccctagaagatcaaacctctctttagattgagtgaaagatgtacaaaagtgggggattttcctttggcctacttgaaggtaataattaaagttttgtgtctctgcccattgttctggggttacatggattcaagcttattgacaacccaaccctggtattacattttctatgagatcatatattctatctcgccaacaggagataatccgaatgtcaaatgtgagttgcatttttgtgtttgactaacttccatgtgtattggaaggcaggataaggatagtggagcatttagacagctttacttctaatacatgtaacaggtraagttgcctcctgaatcactatgaatgtcaatgggtgccaaatcatagaagtttctgcagcaagcatctgaatagtcccaattttgtcatatgtagaatgtgcatgctttgttctgacggttgttttcttacagaccttgcatatgtaaggtgcaattctgcaattcctcttagaagca

SEQ ID NO: 705705 - DNA, 1064 bp, Homo sapiens
aggtgatgcagagagtgtggaaacaccactgttttggcctgttggtgcctgtgatcatgtagctgttcctgaatactttgttagttctgagaaatgggcagtaacagaacttgatgatgggcatttcttaatctcagtgtacatgcacagaataccaaaagcagtttaccttcctttattgggcagggacagcaatgtactgtgctaccctgaacacaaaaaaaacctgtataatttagcctttgttatacaatcattgtgtacttctatcatgtttattccttaataaaacatgtctggagaggacagaatcctggatgcaactgaaatcctggatgaaatcagaatcaatcagttattaaaatcgttatgaataaattgagttaaaaagttaagttcaggaggctggaatatgtagctccatttgctcaaaaaacatgctaacagattgccatttaagtgcagcgtttccagatcacatttaggttagcattgtgggcgcacatgtggcgtcttcctttttcctgytactccagccactttgctgttccttggacaacctaggtacattcttgcctctggatcttgctgttctctgcctgcatgctctccctccctccacatgtaggttttgtttagatcaactccttcaggggtctgctcaatgtcatcttatcaacaaggcctcccctgactgcttgatttaaaatgaaactccttcctcaaaaagttaaacatggatacagtgagctttgattgcatcactgtactctggtctaggtgacacagagagattctttctctaaaaaaaaaaaataataaaacaagaaaacaaacaaacaaacaaaaaaaccacatggagttaccctgtgactcaataatacccttgtatgtatacgcccaagaaaaatgaaaacctgtccttacaaaagctcatactgaatgttcatggcagcattattcataacagccaaaaggcaaaaacaacgtaaatgctcatcattagatgaatggataaataaaagttcatacataaaatggaatattattcagccaaaaaagaa

SEQ ID NO: 705706 - DNA, 1024 bp, Homo sapiens
ggcaggcagaaaacaggcagcagtgtgtgcagctccagctaggaagacacagggaatgagagagagggagagagatagttccagctagctgtaggaaaaaggaacaagaaagtactctctcacagaatgaacgagaaagcagacggacacattggggcacactagaggaaaatagggtcttcttgaagtctgtatgtcagttatacagtaagggaatctaaaaaacaaagacccaaaaactttttcatggtaactaataagcgtcctgaaacaagtagcagatactccaccataaatataaaaggaggagcagttgaacttaggagagtacagaagattgaaccacgctagaaacagcagtctcttagacacagtgaggagatctagaactagacattgatattgtctgatattgtataacatttaaagttttataataaataaaacagcatattatctcttcctgtccctttttctctatcttaatctctstctctagatagagatagctaagatagataagttagatagatagatatactaaaaagttgactcatttataattacatgaaattttcattttgaatttggattcagtcattctcgacaagtaattttttatttcagaaatacccaagtaaaaaaatacatctctcctccctctcaatctctcctccctctcacgctatcctctcccttgcccttcctcttctctcctccttcttacttgtctcatttcttcctccatgatttccctctcttctcttccccctcctctcctccttacttgtctcatttcttcctccatgatttccctctcttctcttccctctcctctcctcctatcccttttctttcccctttctccctgtcttttctctttgtccctcccatttctgttcatcctttctccctctccaccacttcctccctcacttttgggtgttggactttgtttcagtaaagattctggtacctaaaagggaaatataaggacccatgctattttatcaagatttatttc

SEQ ID NO: 705707 - DNA, 1024 bp, Homo sapiens
ggcaggcagaaaacaggcagcagtgtgtgcagctccagctaggaagacacagggaatgagagagagggagagagatagttccagctagctgtaggaaaaaggaacaagaaagtactctctcacagaatgaacgagaaagcagacggacacattggggcacactagaggaaaatagggtcttcttgaagtctgtatgtcagttatacagtaagggaatctaaaaaacaaagacccaaaaactttttcatggtaactaataagcgtcctgaaacaagtagcagatactccaccataaatataaaaggaggagcagttgaacttaggagagtacagaagattgaaccacgctagaaacagcagtctcttagacacagtgaggagatctagaactagacattgatattgtctgatattgtataacatttaaagttttataataaataaaacagcatattatctcttcctgtccctttttctctatcttaatctctgtctctagatagagatasctaagatagataagttagatagatagatatactaaaaagttgactcatttataattacatgaaattttcattttgaatttggattcagtcattctcgacaagtaattttttatttcagaaatacccaagtaaaaaaatacatctctcctccctctcaatctctcctccctctcacgctatcctctcccttgcccttcctcttctctcctccttcttacttgtctcatttcttcctccatgatttccctctcttctcttccccctcctctcctccttacttgtctcatttcttcctccatgatttccctctcttctcttccctctcctctcctcctatcccttttctttcccctttctccctgtcttttctctttgtccctcccatttctgttcatcctttctccctctccaccacttcctccctcacttttgggtgttggactttgtttcagtaaagattctggtacctaaaagggaaatataaggacccatgctattttatcaagatttatttc

SEQ ID NO: 705708 - DNA, 1024 bp, Homo sapiens
ggcaggcagaaaacaggcagcagtgtgtgcagctccagctaggaagacacagggaatgagagagagggagagagatagttccagctagctgtaggaaaaaggaacaagaaagtactctctcacagaatgaacgagaaagcagacggacacattggggcacactagaggaaaatagggtcttcttgaagtctgtatgtcagttatacagtaagggaatctaaaaaacaaagacccaaaaactttttcatggtaactaataagcgtcctgaaacaagtagcagatactccaccataaatataaaaggaggagcagttgaacttaggagagtacagaagattgaaccacgctagaaacagcagtctcttagacacagtgaggagatctagaactagacattgatattgtctgatattgtataacatttaaagttttataataaataaaacagcatattatctcttcctgtccctttttctctatcttaatctctgtctctagatagagatagctaagatagataagttagatagatagatatactaaaaagttgactcatttataattacatgaaattttcattttgaatttggattcagtcattctcgacaagtaattttttatttcagaaatacccaagtaaaaaaatacatctctcctccctctcaatctctcctccctctcacrctatcctctcccttgcccttcctcttctctcctccttcttacttgtctcatttcttcctccatgatttccctctcttctcttccccctcctctcctccttacttgtctcatttcttcctccatgatttccctctcttctcttccctctcctctcctcctatcccttttctttcccctttctccctgtcttttctctttgtccctcccatttctgttcatcctttctccctctccaccacttcctccctcacttttgggtgttggactttgtttcagtaaagattctggtacctaaaagggaaatataaggacccatgctattttatcaagatttatttc

SEQ ID NO: 705709 - DNA, 628 bp, Homo sapiens
tgcccacctcggcctcccaaagtgctaggattacaggcatgagccaccgcgcccagccagcattttgtctttctatgaatatttggtgagcatgaaccaaacgtctgtaacccagaaaaatcaagaaaataataatgagaagtagacaatggagaggtcccattttgtcatcttagcaattccataaggaattatttattattattattattattatttgagacagagtctcactcatcacccaggctggagggcagtggcgtgaacttggctcactgcaaactccacctcccaggttcaagcaattctcctgcctcagcctcctgagtagctgggattacaggtgctaatttttgtatttttagtagagayggggtttcaccacgttggtcaggctggtctcaaactcctgacctcaggtgatccacccgcctcggcctcccaaagtgctaggattaaaggggtgaggcactgcacccttcccaccataaggaattattaataaggctatacaagaggctaaacttccaacactcagataagggtcaatcaacatgtccagttcattcgtagcctctctttctagggtggcttgtggctgttaactctgtgtcaccttaacctgtaa

SEQ ID NO: 705710 - DNA, 628 bp, Homo sapiens
tgcccacctcggcctcccaaagtgctaggattacaggcatgagccaccgcgcccagccagcattttgtctttctatgaatatttggtgagcatgaaccaaacgtctgtaacccagaaaaatcaagaaaataataatgagaagtagacaatggagaggtcccattttgtcatcttagcaattccataaggaattatttattattattattattattatttgagacagagtctcactcatcacccaggctggagggcagtggcgtgaacttggctcactgcaaactccacctcccaggttcaagcaattctcctgcctcagcctcctgagtagctgggattacaggtgctaatttttgtatttttagtagagacggggtttcaccacgttggtcaggctggtctcaaactcctgacctcaggtgatccacccgcctcggcctcccaaagtgctaggattaaaggggtraggcactgcacccttcccaccataaggaattattaataaggctatacaagaggctaaacttccaacactcagataagggtcaatcaacatgtccagttcattcgtagcctctctttctagggtggcttgtggctgttaactctgtgtcaccttaacctgtaa

SEQ ID NO: 705711 - DNA, 652 bp, Homo sapiens
agaagcacttgtatgccatcaagaaaatgtaacaaaaagattaaggaatgaacaggaagttcagcctaccagtgagccatctacatttacccttgtagaacacaagatgagagaagtcgtgccattccctaacaatagtgttccataacagtgaatatcacaatgcaattgtagagcatttgctccttgtttcaaaactgtttttaatcaatatatttgtcttctctacatgcactctatcagacatcgttaagatgtatttttgacagcagatttcagaccattaatatttaatttctctgtgatacatggtacatgacttcacttaccaacatagttctatgaagcttttttgtttacatacagatattaatatattttagcagcatgttggtacctttttcatgattagtagattatgggatatctaacactgagaatttcctattggtttccactgagcagaatactatatttacatgaagaaaccatcckttccttacaaagtcactttaaagcctttaaataaacatattattacatatacattttttcaaaataatgtaattctaaaaattgtgatgcactagatacccctgcaaacataacagcaattctgatacattaacactagtttatacaagtgctgtca

SEQ ID NO: 705712 - DNA, 652 bp, Homo sapiens
agaagcacttgtatgccatcaagaaaatgtaacaaaaagattaaggaatgaacaggaagttcagcctaccagtgagccatctacatttacccttgtagaacacaagatgagagaagtcgtgccattccctaacaatagtgttccataacagtgaatatcacaatgcaattgtagagcatttgctccttgtttcaaaactgtttttaatcaatatatttgtcttctctacatgcactctatcagacatcgttaagatgtatttttgacagcagatttcagaccattaatatttaatttctctgtgatacatggtacatgacttcacttaccaacatagttctatgaagcttttttgtttacatacagatattaatatattttagcagcatgttggtacctttttcatgattagtagattatgggatatctaacactgagaatttcctattggtttccactgagcagaatactatatttacatgaagaaaccatcctttccttacaaagtcactttaaagcctttaaataaacatattattacatatacattttttcaaaataatgtaattctaaaaattgtgatgcactagatacccctgcaaacataayagcaattctgatacattaacactagtttatacaagtgctgtca

SEQ ID NO: 705713 - DNA, 551 bp, Homo sapiens
tagagttgttccatgacaattttagtaaaatgagacaaataagaacagttctctttttgtcaagactaattattttctatttaaacaattatttgctattaataattggttaacacatagctattaaattaatgcataatcttttaccaaataagacagattcatattgcaaaagtaaaaggagaccaatctaccaaagtcagtctccctctcttatcaggccattcttgcattgctataaagaaatacccaagactgggttatttatgcagaaaagagttttaattggctcatagttccacaggctttgtaggaagcatggtgctggcatctgcttggcttctagggaggcttcaggaagcttacagtcatggcagaaggggaaggggaagcaggcatatcacatggygaaagcaggggcaacagagaaagactgtgaggatggaggtgccacacattttcaaataacccagtctcgtgagaactcactcactactgcaaagacagcaccaagccatgagggatttgcccccatgatccaaacacctcct

SEQ ID NO: 705714 - DNA, 2303 bp, Homo sapiens
atccaaacaaaataaaaatgaataaatacctttggcagtagatctactgtctaccaatatagcaaactttatagtagatggaatataatgtgtctaatatggaatccaagcagcatttcttgactcctctgtgggataggctaagtgctatttatattactttatttaatctttataataattctatgagattgtattattttgcctatttacaattgaggaaaataatgtcccagagcaagaaagttgttgagctaatagaatgaactcctttagaatagatgtccttgactttcttaactttgaatttcctctgtataacaatatgcataggacatgctggcccctacataaaatgcatattttctgaatgaatgaattgaaataatatgtgttcaagaccaaaagcctagaaatcctagaggtaaggtgttcgctctgatttagggtgagaaggaatgtgggcaaaagagaattgaggaaagagttttattgtaatagttaatctttggtcctggtattcagtaaacatatgcttgcatataaatagggtcttattgcacayatataaaaaaggatatttatttatttataccattcattacacaaaactgtatagttatataatgtcctcaggtatctcaacagcatttttggccctctacatttaggtaatcttgaaaaaatgattttgttttgatttttttcctggtgaaaaaatataattcttacatttttttcttttggggaaaatcataatttatttaagatttttgtcatgtgactattttcatattctgtgcttcttttcctttttttcttataccttgtaacacatgtcttataaatttcttctaatgcatgtttatgagcacaggtagactcaagtttaacagtttaactttcttttagaaatacaattaactcacccttattttattgtgtatttatttaaacattcttttaaatgccaaaatatgcttaaaatctaaaactcaagtatgaggttttcataaatagctgaactcttgagctctgatgtctgtccaaaaaatccatttacttatctttaggttggagcactatattcacttgctcctaaaataatcggtaaaatataagcctctatcattcttattttctcagtgaagcacatcataatttgcccacttcggtctctttaaacttacccaaagaaagaaatctgctgaaaaatgcctttagtcaaactgaaccatgtcttacttttctcatcattttgatcctaccaattttggtacctcatatttgcatttgctccttgattttcactatttctgctcaaatttcatcaccaccaccacaaaacaaattatatcatttaatcacttttagggaaactattggctttttaattttaatttttaaaatatattattattattatccttacctgcagggctcttaaaagcagacagagtattcttatctttagtaattcattttatattgtgaatgtatttccattataattgaaatttattattttcataatctaacagcttttgcagctttgcaaatgttgatagtggctattatcaatgcaaccacaaaataagagataatttgaacgtcatattctattcttccttgcacttaatgcagtaaattctacctacctccaaatgttcattttgttcaaactagctcccctctgagaacttgtccttttgtctaacttaaatggtctcttacttaattgactctcacttactgttttttgaattcctggagatataagcagagaccactgataattgacgtcattattctttacatgtacttttgaaatgttgcgtgctcttctctaaacaagcacttttcaatgcatagtccatgtgacaatagtatcttaaatactgggttgggataaaaaccaaaatattttgcagtcaaaggaagtcagtgactgccagaaaacgtatcctttttttggatgcacattaatctattagtgattctgggtccatttaacacaaagaagcatgtttaacttaaatttcctcagcacttcttaatcgtttttcattatgagcttcatttttcatgtaatatctctgaacaccctgtgaaaaagtgctttgggaattactaaatttgctcctttttagatattttaaccaatttgcctattttccatggtttgtccattttattacttgctttaatttttaataatattcttctcatatttttgaataattatgttatagactatacactacattctagtaggggtcagatgcatatgaaatagaatagaa

SEQ ID NO: 705715 - DNA, 942 bp, Homo sapiens
gaaaagttttgtcttcctttatttccccaaatatacacatagtttactgtggcatgcatattcccattgcagtgctctattcccagagaaatatttttcttgtagggaccctctctctgttatttaggttgacagtcactaaggatttactatttcaacaatactagcactgcatgtcatccagtatacactgggaaaataaagtgccgcaagtgcatatccaggagactttgtggccaccagattatgaggaatgcatgtatttaattatttatttttgggacagagtctgtctctgtcgcccaggctatagtgcagtggcacsatcttggctcactgcattctccacctcccaggttcaagggattctcaggcctcccaagcagcggggactataggtacgtgccatcatgccttgctaatttttggatttttagcagagacagggtttcaccatgttggccaggctggtctcaaacccctaagctcaagtgatctacctgcctcggcctcccaaagtgctgggattacaggtgtgagccaccatgcccggcccatgcattattattaatgttgaagtagataatttaacaaacatcaatgaagtataagatttttcactcataggtgcaaaatatcatgccaattgccttctatgagctgtcataagccacagcctagagattcaattccatttcaagattcaaccaaagccaactcataaacaagaacatgtaaaagacagaaaaacccactaccggcaggctgaaacagatgctgtgacgtggacctggcctgtcatggcgtgtcacagcatggcacaggcctatatcatgttccctagattgctgactaccaactagttacagctgactccaatcaggtcgggatttgaccatctctgcactgaacctgcaattgcaacttttaaaattgaaacgc

SEQ ID NO: 705716 - DNA, 942 bp, Homo sapiens
gaaaagttttgtcttcctttatttccccaaatatacacatagtttactgtggcatgcatattcccattgcagtgctctattcccagagaaatatttttcttgtagggaccctctctctgttatttaggttgacagtcactaaggatttactatttcaacaatactagcactgcatgtcatccagtatacactgggaaaataaagtgccgcaagtgcatatccaggagactttgtggccaccagattatgaggaatgcatgtatttaattatttatttttgggacagagtctgtctctgtcgcccaggctatagtgcagtggcacgatcttggctcactgcattctccacctcccaggttcaagggattctcaggcctcccaagcagcggggactataggtacgtgccatcatgcctygctaatttttggatttttagcagagacagggtttcaccatgttggccaggctggtctcaaacccctaagctcaagtgatctacctgcctcggcctcccaaagtgctgggattacaggtgtgagccaccatgcccggcccatgcattattattaatgttgaagtagataatttaacaaacatcaatgaagtataagatttttcactcataggtgcaaaatatcatgccaattgccttctatgagctgtcataagccacagcctagagattcaattccatttcaagattcaaccaaagccaactcataaacaagaacatgtaaaagacagaaaaacccactaccggcaggctgaaacagatgctgtgacgtggacctggcctgtcatggcgtgtcacagcatggcacaggcctatatcatgttccctagattgctgactaccaactagttacagctgactccaatcaggtcgggatttgaccatctctgcactgaacctgcaattgcaacttttaaaattgaaacgc

SEQ ID NO: 705717 - DNA, 725 bp, Homo sapiens
taaggtattcatcaattgattagtggataaacaaaagttgatatacctaaacaatggaatattactcagccacaaaaaataacgaagtactgatacatactacaatatgggtgaaccttgaaaatgttatgctaagtgaaagaaaccagacggaaaaagacatacgctgggtgaattaatttatatgaaatgtcccaaataggcaaatcaatagagaaaaaaattagattaccagttgccaaagtatggtgagagaggggaaatgggagatacagggttttaaatatcctaggacagtcctttctaacttcagatctataccattatttcttaagaaactttctctaactaaggcacagatcttaagcaaaaaaagtttttttttttctttttttaaattttattattattatactttaagttttagggtacatgtgcacaacgtgcaggtttgttacatatgtatacatgtgccatgttggtgtgctgcacccattaactcatcatttagcattaggtatatcttctaatgctwtccctcccccctactcccaccccacaacagtccccagagtgtgatgttcccctttctgtgtccatgtgttctcattgttcaattcccacctatgagtgagaacacgcggtgtttggttttttgtccttgcgatagtttgctgagaatgatggtctccagtttcatccatgtccctacaaaggacatgaac

SEQ ID NO: 705718 - DNA, 627 bp, Homo sapiens
gcagagatgtcactaaagcccaaggaatctgtctctacatttgtcctggactctaatccagggttctgtcattttgccagccaccataaaatatttgacagtctaggaaaacagcaaatgttcttacatccatcgagaacttgtatttgcctagagatggactttaccaatcaagataggaattagataagaattattttttttaaaaaaaggagcattaaaacaatggtcaaatgagagaaaaakcaaaattcagacagacagatacatacacacaccccaaaccctcaaacctccagggcttcctgcctgtgaaccgaaagggggagtgcgaatttcttggccctgtcggcaggtgctttctcaaaggccccacagtcctccacttcctggggaggtagctgcagaataaaaccagcagagactccttttctcctaaccgtcccggccaccgctgcctcagcctctgcctcccagcctctttctgagggaaaggacaagatgaagtggaaggcgcttttcaccgcggccatcctgcaggcacagttgccgattacaggtagggccgacgtgtcgacggcagggaacttctagaaactctttgtgtatgtgtaggggagtgggtgt

SEQ ID NO: 705719 - DNA, 1039 bp, Homo sapiens
ggtaaaaccccatctctactaaaaatacaaaaattagtcaggcatggtggcatgtgcctgtagtcccagctactcgggaggctgagggaggagaatcgcttgaacccaggaggcacaggttgcagtgagctgagatcgagccactgcaatcccacctggtgacagagcaagcatctgtctcaaaaaaaaaaaaaaagaaaagaaaagaaaagacagtctcagtgctagccaaggaaatgaaagtatgaagtgacaaagagatgtctcctgtttttcacaggtggtcagagcgggcttcagctgtgcagatctgtcggggaagggcactccrggcagaggagcagaggtggaaaggctgtgtggtggacctgtgcccagtgtctctgaactgcaagcaggggtaggtagcatgaatgaggggaagttctaggagactaggaaagagggcgacaagcgggtggggttgttaggtagaacttccttggccagtggcttttactctgaatgagatggggaacagctgcagggttttctcttttgacaaggacacattatgtttttatttaaaatatggtaataacatttcaaagaaaaaattaaagccaactggaacaaggcaaggttcacagttgccttgggcccctgggctaactggagatgccccggcaagccccaggacaggcttcaaatcagccctaaaatccaggctatactgccagcctccattacctgtctgcattcagccaaacatagtcattgtcatctcttcttcccctggtcctcaaaaccaagctcttcctactcttgccccataaaccacccagaaagtggttgtttgtcctgaaagggtgaaacccattcactcttttgctccttcctcatccattaacactaataatccctaagcctccatttctgttatgggctgaattttgccccctgaaattcttatgttgaaatcctaactcccaacacctcagaatgtgaccgtacttgaagaaaaggtcttgaaagaggtcactaagttaaaatgaggtca

SEQ ID NO: 705720 - DNA, 1039 bp, Homo sapiens
ggtaaaaccccatctctactaaaaatacaaaaattagtcaggcatggtggcatgtgcctgtagtcccagctactcgggaggctgagggaggagaatcgcttgaacccaggaggcacaggttgcagtgagctgagatcgagccactgcaatcccacctggtgacagagcaagcatctgtctcaaaaaaaaaaaaaaagaaaagaaaagaaaagacagtctcagtgctagccaaggaaatgaaagtatgaagtgacaaagagatgtctcctgtttttcacaggtggtcagagcgggcttcagctgtgcagatctgtcggggaagggcactccaggcagaggagcagaggtggaaaggctgtgtggtggacctgtgcccagtgtctctgaactgcaagcaggggtaggtagcatgaatgaggggaagttctaggagactaggaaagagggcgacaagcgkgtggggttgttaggtagaacttccttggccagtggcttttactctgaatgagatggggaacagctgcagggttttctcttttgacaaggacacattatgtttttatttaaaatatggtaataacatttcaaagaaaaaattaaagccaactggaacaaggcaaggttcacagttgccttgggcccctgggctaactggagatgccccggcaagccccaggacaggcttcaaatcagccctaaaatccaggctatactgccagcctccattacctgtctgcattcagccaaacatagtcattgtcatctcttcttcccctggtcctcaaaaccaagctcttcctactcttgccccataaaccacccagaaagtggttgtttgtcctgaaagggtgaaacccattcactcttttgctccttcctcatccattaacactaataatccctaagcctccatttctgttatgggctgaattttgccccctgaaattcttatgttgaaatcctaactcccaacacctcagaatgtgaccgtacttgaagaaaaggtcttgaaagaggtcactaagttaaaatgaggtca

SEQ ID NO: 705721 - DNA, 1039 bp, Homo sapiens
ggtaaaaccccatctctactaaaaatacaaaaattagtcaggcatggtggcatgtgcctgtagtcccagctactcgggaggctgagggaggagaatcgcttgaacccaggaggcacaggttgcagtgagctgagatcgagccactgcaatcccacctggtgacagagcaagcatctgtctcaaaaaaaaaaaaaaagaaaagaaaagaaaagacagtctcagtgctagccaaggaaatgaaagtatgaagtgacaaagagatgtctcctgtttttcacaggtggtcagagcgggcttcagctgtgcagatctgtcggggaagggcactccaggcagaggagcagaggtggaaaggctgtgtggtggacctgtgcccagtgtctctgaactgcaagcaggggtaggtagcatgaatgaggggaagttctaggagactaggaaagagggcgacaagcgggtggggttgttaggtagaacttccttggccagtggcttttactctgaatgagatggggaacagctgcagggttttctcttttgacaaggacacattatgtttttatttaaaatatggtaataacatttcaaagaaaaaattaaagccaactggaacaaggcaaggttcacagttgccttgggcccctgggctaactggagatgccccggcaagccccaggacaggcttcaaatcagccctaaaatccaggctatactgccagcctccatwacctgtctgcattcagccaaacatagtcattgtcatctcttcttcccctggtcctcaaaaccaagctcttcctactcttgccccataaaccacccagaaagtggttgtttgtcctgaaagggtgaaacccattcactcttttgctccttcctcatccattaacactaataatccctaagcctccatttctgttatgggctgaattttgccccctgaaattcttatgttgaaatcctaactcccaacacctcagaatgtgaccgtacttgaagaaaaggtcttgaaagaggtcactaagttaaaatgaggtca

SEQ ID NO: 705722 - DNA, 2039 bp, Homo sapiens
ctgttacagtgaggcctaatggaacacttttgctcaggcacatagcttcgtttatatctttgaaatggaaaaactttgacattaacttccagataaaatattaaaatgaattaacatctaaaatgaattttaaaatatattttaaatatatcctagaagaaaaaaatgttttcatgttgattttttttctaagaacatattcaagcctccagtaatttttctgggttcctaagaggaatagcatttttgacagaatttagtcaattatttgtcacctagtaagcatctttatctggcttaaatatgtgatggtccaaatgtattaaaaaatcactgagggtgcacagatgatgtgcagttttctctgcaggatccttctggatccaaattccaagatgattgcaactctccctgtaccagctccaagacctctagatctagccactgattaccaaaatcacagacccttcaataccacccagaccaaaggactgcaaacaaaagaattttatttgaaattgcgacaccattgaatctcccatcaagacacaagtccttgcatctgattagctacataattaacagtgtgacacttgccttctatttccaagccccttattgacagaattagcaccttgaacctttccttaccataattataatatacatacacaaaatcgatggctttaggtctgttgccccattaactataagttccatgaaaatggaaaccttttgttgtttacctgtgtcccagcatttaccaaagaaccccataatacaataggtgttcagtaattatttgttgaataaagtcatagatgactaaatggtcaagtatgagactactgaggaagaaatgattagcttaccctgtacaatctaagacatttctctcagggtgatttttgagctgagtcttgaggggtgttggaaactagctaaatggagttggtaaaggaatgctctcttctttttatttttaacttcctattttaaaaaaactttcaaatttgtaagagttacaacaatagaacagtgttcatctgaaagcccttcacctagaatcaccagttgttactattttaccatatttgctttataccatatgtgtatatgtatgtatgtacacatacaaaatacattttgcttttaccatatgtgtatatgtatgtatgtacacgtacaaattttttttttttgaaatgaggtcttattatgttgcccaggttgatctgcaactcctgagctcaagggatcttcttgccttgcatctaactgtgattataggcgtacaccatggcaccgagccaaaaaaaattgttttttgctaacccctttgaaagttgcagacattataaccatttacttctaaatacttcagcatgtttttcctaaaaacagcattctcttataaaactgcagtgcaaatttcaaattccagaaatttaacattgatacgatatcattttccaatattggcccatatttatatacttcctgcccacaatccagtccatactttgcgtttagctgtcatgtctgttaagtcttcttcaatccagaacaattcctcagcatgtctttgtctttcatgatattggcatttttgaagaatagaggccagctgtttgatagaatgcccatttaacttgaatatgattgttccctcaacggctgaacccaagttatgcatttttgaaaggaatacagcagaaatgatgctgagtccctctcrgtgcattcagaagccgtatcatattgctttgtcccattattgtgatattaagtttgattattttattaaggtagtgtttattagatttgtccactgtaaatatgtctttttgcctcctggtaagtaatactctgtgaggcagtactttaaagactgtgtaaatatcccattcctcaacagacttttaccctgaaacgtaataagtaaaaatcacataaaatttttatcttcttcaaatctttgtacctgaagttctttccttgggctctttgacttcttagcctttaggccttaaacatat

SEQ ID NO: 705723 - DNA, 1223 bp, Homo sapiens
tattgtgctgtttttttgtgactggcgaaaaactcctggggtttggagaagcagacagtggtaatttgtcccctgacctccctgggagccagattgctctgtacttgggaacgtttccttccttagggagatttctgtgtggtggggagcccctcaacatttaatctcaagccttgaccaagcattgctcctgggacttttgaagccttggtctcaaagcaggaagctgttacaggtgatggggatttaattctgggcaaatatttctttgttctggaagaccagaccctgggcctcaatgacccagcatagatagcctttcctggcccacatatgggtgggccttaagaggcccacgtcagcctcttaagagctcaggagtgctctatggtgaggatgcaacaacatgtaccagttaatctttcccctggtgatagcagcttcttttccatagggaggtagagggtgttgtgcctgtaaatcacagagcaacgagtgaggatttggcccagttctagccattgctagatggggcacagagaggaagctgccagcaggatagcaaggcataatattcttcccagcttggcagaggtgtcctttattatatttatttatttatttattttgagacagagtttcgctcttgttgcccaggctggagtgtgacrgcgcaatctcagctcaccgcaatgtccgcctcccaggttcaagcgattctcctgcctcagcctcctgagtagctgggattacaggtatgtgccaccatgcccagctaatttttgtgtttttagtggagacaaggtttatccatgttggtcaggctggccttgaactcctgacctcaggtgatccacccgcctcagcctcccaaagtgctgggattataggcgtgaatcaccgcacctggcctgagccaccgctcctggccagaggtgccctttacagccagactaagaggaccttagacacacccaggggcatgctttcgtctcctcatgaggctatgccaggttgaagaaccccgaccttgggaaatgtattcctgtgaggagagaggccggttaaaccctctgctcagagctaaggcaaggcctgctctgtccttttgttctgtagggaatgcacatctgacaattaccctagctgtgggcagatccttagaaggatgtgagaccagggagaagtggcctgagagtgccttggggctcagaaggtccccc

SEQ ID NO: 705724 - DNA, 1482 bp, Homo sapiens
tgtgtgtgtgtgtgtgtgtgtgtgtgtgtgtgtgattcaaatttttatatgtacttgtatagatagtctagctaccacttggagaaataagtggaacggagcaaaactgaaaacagatagactagtaagaaatttgctgtggtcatatctagattaatggaaggggtcatctctaacaggaagaactggaattattattaaggatgatattaatagttaaactaaaattagagtctctactaaatgtatgttttggtgaagaagcccatcagtaacagccagtactttgtctttcaattaatgtgttagtcaaataccagtcatgccaataccctctataaggaaggagaaggaaataaactttgttgaatcaccatgtaacatgaattgtgtatattcattcatttacttggtacaagaaaactgtgggattgcgattatatcccatatttttacagatgaaggaattgaggtttatgaagtttaaataacatttccagtcatcgaaaaccaggatataacagaagatatttggttcaaaacctgaaaattggtaccgtcatataataggagagaaagkaataatccagaaagtgaaaagaattaaaaatgtgaccaagtatgaataaagaaatttgacaaaaagacttggccacattgaattagcattagttggtataattaagatttagaagttgaaaagggaaagctcaatgtcaaaaccattatctgaatataaattttcaataactgctcaggggttaggaaatcagaggactagcaagccatccaggaaagcaccaccttatgaggcgtccattaaaacacaaaaagagaaagaacagagaccatttacacaaataaaacaggagaagtgggacttggagatggagaaaggaaaccaaaagcaaaaagggagatatgagtgtttaacaaaataagaagatttaatagatgaaggaattaaatttgaactcagaaccaaccaaacataaaagagcaacacaaggtcaatgtgtgatatacaacttttgatggtcatgaataggctcacacgtctaaagatacctcaattaaaatcttccctaccagaatcacttcatagagttatagcatggttaatttgaatgtaaatcatcgtggactgacaggacgtttgcctgcttctattcgctagtgcagtttagtttgacaaactggacgactgcaacacaaacaggccaaaactctgaggtttgggtgcaaagggtagataatgcatatgacacagtagatacgaaaaactgttcttaagagacaatttttgaaatttatattggaaaggtattcatgaagaataacgacctaactgtcctttaagcctatgtcccaagaatcagttcctcagatataatctgcaataattcctagggagtgtgtcagttatttttaacacatgagagtgaagtgtacagggcaagaaatgttctctgcacatttccc

SEQ ID NO: 705725 - DNA, 1482 bp, Homo sapiens
tgtgtgtgtgtgtgtgtgtgtgtgtgtgtgtgtgattcaaatttttatatgtacttgtatagatagtctagctaccacttggagaaataagtggaacggagcaaaactgaaaacagatagactagtaagaaatttgctgtggtcatatctagattaatggaaggggtcatctctaacaggaagaactggaattattattaaggatgatattaatagttaaactaaaattagagtctctactaaatgtatgttttggtgaagaagcccatcagtaacagccagtactttgtctttcaattaatgtgttagtcaaataccagtcatgccaataccctctataaggaaggagaaggaaataaactttgttgaatcaccatgtaacatgaattgtgtatattcattcatttacttggtacaagaaaactgtgggattgcgattatatcccatatttttacagatgaaggaattgaggtttatgaagtttaaataacatttccagtcatcgaaaaccaggatataacagaagatatttggttcaaaacctgaaaattggtaccgtcatataataggagagaaaggaataatccagaaagtgaaaagaattaaaaatgtgaccaagtatgaataaagaaatttgacaaaaagacttggccacattgaattagcattagttggtataattaagatttagaagttgaaaagggaaagctcaatgtcaaaaccattatctgaatataaattttcaataactgctcaggggttaggaaatcagaggactagcaagccatccaggaaagcaccaccttatgaggcgtccattaaaacacaaaaagagaaagaacagagaccatttacacaaataaaacaggagaagtgggacttggagatggagaaaggaaaccaaaagcaaaaagggagatatgagtgtttaacaaaataagaagatttaatagatgaaggaattaaatttgaactcagaaccaaccaaacataaaagagcaacacaaggtcaatgtgtgatatacaacttttgatggtcatgaataggctcacacgtctaaagatacctcaattaaaatcttccctaccagaatcacttcatagagttatagcatggttaatttgaatgtaaatcatcgtggactgacaggacgtttgcctgcttctattcgctagtgcagtttagtttgwcaaactggacgactgcaacacaaacaggccaaaactctgaggtttgggtgcaaagggtagataatgcatatgacacagtagatacgaaaaactgttcttaagagacaatttttgaaatttatattggaaaggtattcatgaagaataacgacctaactgtcctttaagcctatgtcccaagaatcagttcctcagatataatctgcaataattcctagggagtgtgtcagttatttttaacacatgagagtgaagtgtacagggcaagaaatgttctctgcacatttccc

SEQ ID NO: 705726 - DNA, 590 bp, Homo sapiens
tagttcataatttcaaccacttactgtcagcaccttcaattcctaggtcccttgttcccttgaagttcttaccttacaaatcttcaaccttggattacgcatggaatccaagagaacatatatgtcctctcttcttctrtaactaggctgctcagcatggctggacagaatacttagcaccactatcaggccatggtctctgagctcatctgagctgtcgatactcttatcatatcattttacctgattctgctcatacctatttctttctgctacaatgactaattcaaatccacttttttctctctcaatataaaactaggcttccaaatttgctaagaaaaatcaagactattagtgtaatttcctaatcttctattcctatttctaaaagtgattcatattggcacattttcactttcctgtaatctattgagaaaaagtgtgttgtatttaactcaaggaatatattttttatggcagtataattttttatttctatttttctctgtttcagtagctttagggatacaagttgttttcaattacgtgaatgaattgtagagcggaaaagtctgaaattatagtgc

SEQ ID NO: 705727 - DNA, 590 bp, Homo sapiens
tagttcataatttcaaccacttactgtcagcaccttcaattcctaggtcccttgttcccttgaagttcttaccttacaaatcttcaaccttggattacgcatggaatccaagagaacatatatgtcctctcttcttctgtaactaggctgctcagcatggctggacagaatacttagcaccactatcaggccatggtctctgagctcatctgagctgtcgatactcttatcatatcattttacctgattctgctcatacctatttctttctgctacaatgactaattcaaatccacttttttctctctcaatataaaactaggcttccaaatttgctaagaaaaatcaagactattagtgtaatttcctaatcttctattcctatttctaaaagtgattcatattggcacattttcactttcctgtaatctattgagaaaaagtgtgttgtatttaactcaaggaatatattttttatggcagtataattttttatttmtatttttctctgtttcagtagctttagggatacaagttgttttcaattacgtgaatgaattgtagagcggaaaagtctgaaattatagtgc

SEQ ID NO: 705728 - DNA, 806 bp, Homo sapiens
ttgttattattgttgctagagttacatgcaaggtgccaaatcttatctgacattgaatgctgttcagttaacttcctttgaaaattcaattttatccactttatgtatatacttattaaatattttccaaattttactcacaaagggcagtaagcactccatatgagttgaattacatttttattttcaaaatatttgctattaattagtgttataatattctacttagttggcagtacaacctcattgttttacttattttattaatccattcatcatcccggtagcaagacaaacaaacaaatcatactttggttacataagaaggtagaaaagtggatcatacattgcagagaattgtaaagtaataacattggtaaaagaagctaagaaatgttgcaagagtagcttgaaaaggggtcagttattttagggtagattttgtcatgtgaggggagaaatattgaaaaaatggtgtctgtgttcaggtgcttcaatcacaacgtagggagactgcctcctttagaaatgattgtggtgtgtgagtargaggccgatgcagatggaacatggtgatcaagaactaataagcatgggtcacaaaggcagggtaagtcattgaggctgaattcagaagatgaacaacacagacctgtaaccatggaaacacaataggccaaggataattctaaacctctgatcagtttttgtttagtattaaatgccacttagaaaagaaggaaaatgaagtgcaggcaatacccagacttacacttcacaaagctttttaaagccaaacaagcatg

SEQ ID NO: 705729 - DNA, 1388 bp, Homo sapiens
tttgatacatgaatacacttttctgttacatctcatatcttatctgtggctcttgttatgaggaatttggggttgcttttcttactatatttgggaattttctctaataaactactgcttacattttggtattttcctgcacggagatgcatcccacacacaggctgtgccgtccgtcacctagctgtcctctgcctaraaagtactgtctctaggtagggaaattgaaacacactgtctccaggatccctgcccttcctagcactcaagatatctacactaaagtcaccttgacaaacactttctgagcacctatgactaaacccattctggaatggattccaaaatagagaggttcccaaaccagatgtgggagacagagtttctttgcttgaaataagagccttcccagagaagcagaccttgctttatgaatgagtagagaagagtgattattcttatttttcttgacttgatcattggagctggtcacataattaagttggaccttgaaaaataagtaaggaaaggcatgagcagaattataaagtcacttgtaacttagtgctcatattcatgaacatgactttgaacctccatttgaaagaggaagttcccactcttaaggcttttggtgatttccaagaagactgaacgcccattttacccctttctttgggtttcactttccacccaagcttttcatcccctttcttctttttgctcccagtctagaattttctcctcttttccaatagctacagctgctgttctgaaacacgtatttaaaaaatgccattctctacccttgctgaggactcccaagggcaacacacagaagctaacattatcaggaacctgagtattaacaatcccaaatcccaggctacggccaaccccttctctccactgccccccagagcaggataccttccgcagtccctgtctgcaaacttttgataacattgctactcagccaagtcctttgtttgcaggaaaggctgaatggcagcatgaggctttccaaacaacccacttcttggccattcgcagcatatcaaagccaattaagccttagccattgcagacttggtgacacatgtgaaattgtaaggcaccagatctcaagaagaaccttctgagcaaatggtgttcagaaactccttcttacataacaatgcctggcaataagtgggctaaaaatattaacagagtaaacaacaggcaatgaacgtgcaaaagaaaaggcattttggggatgggtttcaaaaacacacgcttcttggaaagcagatgttattttatttttttggtatcataaggaatattttagtagtgcagtaggctgtactataaatactgagaatatcatgcttgattctgggaga

SEQ ID NO: 705730 - DNA, 1388 bp, Homo sapiens
tttgatacatgaatacacttttctgttacatctcatatcttatctgtggctcttgttatgaggaatttggggttgcttttcttactatatttgggaattttctctaataaactactgcttacattttggtattttcctgcacggagatgcatcccacacacaggctgtgccgtccgtcacctagctgtcctctgcctaaaaagtactgtctctaggtagggaaattgaaacacactgtctccaggatccctgmccttcctagcactcaagatatctacactaaagtcaccttgacaaacactttctgagcacctatgactaaacccattctggaatggattccaaaatagagaggttcccaaaccagatgtgggagacagagtttctttgcttgaaataagagccttcccagagaagcagaccttgctttatgaatgagtagagaagagtgattattcttatttttcttgacttgatcattggagctggtcacataattaagttggaccttgaaaaataagtaaggaaaggcatgagcagaattataaagtcacttgtaacttagtgctcatattcatgaacatgactttgaacctccatttgaaagaggaagttcccactcttaaggcttttggtgatttccaagaagactgaacgcccattttacccctttctttgggtttcactttccacccaagcttttcatcccctttcttctttttgctcccagtctagaattttctcctcttttccaatagctacagctgctgttctgaaacacgtatttaaaaaatgccattctctacccttgctgaggactcccaagggcaacacacagaagctaacattatcaggaacctgagtattaacaatcccaaatcccaggctacggccaaccccttctctccactgccccccagagcaggataccttccgcagtccctgtctgcaaacttttgataacattgctactcagccaagtcctttgtttgcaggaaaggctgaatggcagcatgaggctttccaaacaacccacttcttggccattcgcagcatatcaaagccaattaagccttagccattgcagacttggtgacacatgtgaaattgtaaggcaccagatctcaagaagaaccttctgagcaaatggtgttcagaaactccttcttacataacaatgcctggcaataagtgggctaaaaatattaacagagtaaacaacaggcaatgaacgtgcaaaagaaaaggcattttggggatgggtttcaaaaacacacgcttcttggaaagcagatgttattttatttttttggtatcataaggaatattttagtagtgcagtaggctgtactataaatactgagaatatcatgcttgattctgggaga

SEQ ID NO: 705731 - DNA, 1388 bp, Homo sapiens
tttgatacatgaatacacttttctgttacatctcatatcttatctgtggctcttgttatgaggaatttggggttgcttttcttactatatttgggaattttctctaataaactactgcttacattttggtattttcctgcacggagatgcatcccacacacaggctgtgccgtccgtcacctagctgtcctctgcctaaaaagtactgtctctaggtagggaaattgaaacacactgtctccaggatccctgcccttcctagcactcaagatatctacactaaagtcaccttgacaaacactttctgagcacctatgactaaacccattctggaatggattccaaaatagagaggttcccaaaccagatgtgggagacagagtttctttgcttgaaataagagccttcccagagaagcagaccttgctttatgaatgagtagagaagagtgattattcttatttttcttgacytgatcattggagctggtcacataattaagttggaccttgaaaaataagtaaggaaaggcatgagcagaattataaagtcacttgtaacttagtgctcatattcatgaacatgactttgaacctccatttgaaagaggaagttcccactcttaaggcttttggtgatttccaagaagactgaacgcccattttacccctttctttgggtttcactttccacccaagcttttcatcccctttcttctttttgctcccagtctagaattttctcctcttttccaatagctacagctgctgttctgaaacacgtatttaaaaaatgccattctctacccttgctgaggactcccaagggcaacacacagaagctaacattatcaggaacctgagtattaacaatcccaaatcccaggctacggccaaccccttctctccactgccccccagagcaggataccttccgcagtccctgtctgcaaacttttgataacattgctactcagccaagtcctttgtttgcaggaaaggctgaatggcagcatgaggctttccaaacaacccacttcttggccattcgcagcatatcaaagccaattaagccttagccattgcagacttggtgacacatgtgaaattgtaaggcaccagatctcaagaagaaccttctgagcaaatggtgttcagaaactccttcttacataacaatgcctggcaataagtgggctaaaaatattaacagagtaaacaacaggcaatgaacgtgcaaaagaaaaggcattttggggatgggtttcaaaaacacacgcttcttggaaagcagatgttattttatttttttggtatcataaggaatattttagtagtgcagtaggctgtactataaatactgagaatatcatgcttgattctgggaga

SEQ ID NO: 705732 - DNA, 1388 bp, Homo sapiens
tttgatacatgaatacacttttctgttacatctcatatcttatctgtggctcttgttatgaggaatttggggttgcttttcttactatatttgggaattttctctaataaactactgcttacattttggtattttcctgcacggagatgcatcccacacacaggctgtgccgtccgtcacctagctgtcctctgcctaaaaagtactgtctctaggtagggaaattgaaacacactgtctccaggatccctgcccttcctagcactcaagatatctacactaaagtcaccttgacaaacactttctgagcacctatgactaaacccattctggaatggattccaaaatagagaggttcccaaaccagatgtgggagacagagtttctttgcttgaaataagagccttcccagagaagcagaccttgctttatgaatgagtagagaagagtgattattcttatttttcttgacttgatcattggagctggtcacataattaagttggaccttgaaaaataagtaaggaaaggcatgagcagaattataaagtcacttgtaacttagtgctcatattcatgaacatgactttgaacctccatttgaaagaggaagttcccactcttaaggcttttggtgatttccaagaagactgaacgcccattttacccctttctttgggtttcactttccacccaagcttttcatcccctttcttctttttgctcccagtctagaattttctcctcttttccaatagctacagctgctgttctgaaacacgtatttaaaaaatgccattctctacccttgctgaggactcccaagggcaacacacagaagctaacattatcaggaacctgagtattaacaatcccaaatcccaggctacggycaaccccttctctccactgccccccagagcaggataccttccgcagtccctgtctgcaaacttttgataacattgctactcagccaagtcctttgtttgcaggaaaggctgaatggcagcatgaggctttccaaacaacccacttcttggccattcgcagcatatcaaagccaattaagccttagccattgcagacttggtgacacatgtgaaattgtaaggcaccagatctcaagaagaaccttctgagcaaatggtgttcagaaactccttcttacataacaatgcctggcaataagtgggctaaaaatattaacagagtaaacaacaggcaatgaacgtgcaaaagaaaaggcattttggggatgggtttcaaaaacacacgcttcttggaaagcagatgttattttatttttttggtatcataaggaatattttagtagtgcagtaggctgtactataaatactgagaatatcatgcttgattctgggaga

SEQ ID NO: 705733 - DNA, 2044 bp, Homo sapiens
tgatgtccttttgcccagaaaaagtatagcttgactgggtgggttttctaaatagcattcctaagatgatggattagtaatattctctccactagaaacaaatgaaatttgagyagacatgagaataactaccacatcctacattatatgaaccccaaatttattgcatcagtgacatatacgtcagctgtctttggcaacaaaattgagacttttaggagagttttgttattgttgttttaaagtttatgtcaaacatctagaaccatgtctgcttttgtaggagtatgcatggatgttctaacacccaggttttacagaactgaggcagcatgaggaatcttatattcatcccatgtcattgcccaacattctctaggaccttgctgtgcagcagcagaggcaccatctgggatcttgttacaaacacttttctaggccctgcctcagcactactgaatcaggatatgcagtttatgaagattcctagtgatttatatgggctttaaaagttgaaaagcctgctctgggagctccatgcctattccccaaattgctccaatgcacaaattaattctccctcctccaaatatcaaaaaggcattagaagagttaaatgacaacataaatattttttttcaaaataaagtatgggttatcactagaattaacactgtgaaagattccttacatttcagaaaatgagctatcttaattcaatctaatctccagcatgtgaactaaagcaagggaatcccagcagcatcaattacagctcaggaagatataagaaactactctttatctaaggtgttaggaggtgtaggttatctgcaaccttttaaaatattcaccctttaaaatattcactcaggctcaaagggagaccaggagttctgctgtattcagaacacttaagttataaacagatcagagtttgtagggccttcttagctccttaaacagctaggtccataaaacctatcatatctctttggttccctctgttttaggaagagaagcaggtcactgaagtcttgggtacagtagggaggctagacccagggcatacttaccataaataataataacaatggttaataaaatgttcattgatgccattcactttttctaagcatttctgaagtatcatcttacataaagactaaaacaatcttatgtggtagttactattattatcattttcatttgtagctggagataatgagacattgaaagataatgtgaattgtccaaagtctcacaggtaagcaatgaatgtttgaaggcagattataggaactcaaccattgcactattctaccttttaagattggaagtggaaggcagttacattcaaacaaagacagtgcccagagtaagcaagagaaagacagctggaccacatataatcagatactgttatcctactaatataattcaacagagaaataggcccaccaaaagtcagaccatacttttctcattagctggacatcgaagatcctcaacttccctatgaacgagacttatactggatggagaaagagacgtaggttccctttcaagctattttccaagaaggtgaggtatcttccttcatagaaatgtgagggtgagaatataaggtattcctaacacatgcatcttccaattttccaatattatcacacatggcagaagaagacattactgctttgtaatttttatgggataataaaaagattatagaatctgggggcagaattcactgataagctatgaataataatagtaccaattgaataagattccagtaaaaagaacttagaacactatatggcacccaacatatttattgtcatcataatcaacttcatcaaactaaggatgaaagggcatgttgattgtaaatccactttgtaggtcagaaaatcccatgctaatggcactgttaccaacaaatttggtcccatgttgaacgatggcatttctcttcccagatccggtcattgaaaacctgttagattgtggaaattgctcaaatcacattatatgtggttca

SEQ ID NO: 705734 - DNA, 2044 bp, Homo sapiens
tgatgtccttttgcccagaaaaagtatagcttgactgggtgggttttctaaatagcattcctaagatgatggattagtaatattctctccactagaaacaaatgaaatttgagcagacatgagaataactaccacatcctacattatatgaaccccaaatttattgcatcagtgacatatacgtcagctgtctttggcaacaaaattgagacttttaggagagttttgttattgttgttttaaagtttatgtcaaacatctagaaccatgtctgcttttgtaggagtatgcatggatgttctaacacccaggttttacagaactgaggcagcatgaggaatcttatattcatcccatgtcattgcccaacattctctaggaccttgctgtgcagcagcagaggcaccatctgggatcttgttacaaacacttttctaggccctgcctcagcactactgaatcaggatatgcagtttatgaagattcctagtgatttatatgggctttaaaagttgaaaagcctgctctgggagctccatgcctattccccaaattgctccaatgcacaaattaattctccctcctccaaatatcaaaaaggcattagaagagttaaatgacaacataaatattttttttcaaaataaagtatgggttatcactagaattaacactgtgaaagattccttacatttcagaaaatgagctatcttaattcaatctaatctccagcatgtgaactaaagcaagggaatcccagcagcatcaattacagctcaggaagatataagaaactactctttatctaaggtgttaggaggtgtaggttatctgcaaccttttaaaatattcaccctttaaaatattcactcaggctcaaagggagaccaggagttctgctgtattcagaacacttaagttataaacagatcagagtttgtagggccttcttagctccttaaacagctaggtccataaaacctatcatatctctttggttccctctgttttaggaagagaagcaggtcactgaagtcttgggtacagtagggaggctagacccagggcatacttaccataaataataataacaatggttaataaaatgttcattgatgccattcactttttctaagcatttctgaagtatcatcttacataaagactaaaacaatcttatgtggtagttactattattatcattttcatttgtagctggagataatgagacattgaaagataatgtgaattgtccaaagtctcacaggtaagcaatgaatgtttgaaggcagattataggaactcaaccattgcactattctaccttttaagattggaagtggaaggcagttacattcaaacaaagacagtgcccagagtaagcaagagaaagacagctggaccacatataatcagatactgttatcctactaatataattcaacagagaaataggcccaccaaaagtcagaccatacttttctcattagctggacatcgaagatcctcaacttccctatgaacgagacttatactggatggagaaagagacgtaggttccctttcaagctattttccaagaaggtgaggtatcttccttcatagaaatgtgagggtgagaatataaggtattcctaacacatgcatcttccaattttccaatattatcacacatggcagaagaagacattactgctttgtaatttttatgggataataaaaagattatagaatctgggggcagaattcactgataagctatgaataataatagtaccaattgaataagattccagtaaaaagaacttagaacactatatggcacccaacatatttattgtcatcataatcaacttcatcaaactaaggatgaaagggcatgttgattgtaaatccactttgtasgtcagaaaatcccatgctaatggcactgttaccaacaaatttggtcccatgttgaacgatggcatttctcttcccagatccggtcattgaaaacctgttagattgtggaaattgctcaaatcacattatatgtggttca

SEQ ID NO: 705735 - DNA, 886 bp, Homo sapiens
tctcctgtaccccacttttctgactaaaacccagctttaattcctattgtacttaatgtgtctgtgctgtagctgctgttaaacttttttctcttttttttttctatttagccagtttatcatgatgttgctaggtgtggtttgttttcttgctatttatctcctatgccatttgttgaaattttttttttttttgagacagagtcttgctctgtcacctaggctggagtgcagtagcatgatctcggctcactgcaacctctgtctcctgggtcaagtgattctcatgccttagcctccctagtatctgggattgcaggcatatgccaccatacctgcctgatttgttgtatttttattagatgccgggtctcgctgtgtttcccagactggtcttgaactcctgacctcaagtgatctgcctgccttggcctcccaaagtgtttgagattataggcatgagccactgtgctcagcctgttcattgaaattttgattgttttcttttcaaataattattttgcccaagttccctctctctttctctggagccctcattgcccacttgttagtctattaaatattgttccrcatatctcagctacttggttttatctattaatattgggatttggttaatttctattcatcctccttcaagttaacagggtttttttttttcctttcagtatgctgaaagacagtggtgataatttctgacatatttttcattgtaaaatttacaatatttgtttcaattttcatctatgtaaacatattttctatctcttttattaaatcctttagtatattgatcatagtgattttaaatgccttacttgatcaatttaacttctgggccatgtctgcatttttttcttttgca

SEQ ID NO: 705736 - DNA, 886 bp, Homo sapiens
tctcctgtaccccacttttctgactaaaacccagctttaattcctattgtacttaatgtgtctgtgctgtagctgctgttaaacttttttctcttttttttttctatttagccagtttatcatgatgttgctaggtgtggtttgttttcttgctatttatctcctatgccatttgttgaaattttttttttttttgagacagagtcttgctctgtcacctaggctggagtgcagtagcatgatctcggctcactgcaacctctgtctcctgggtcaagtgattctcatgccttagcctccctagtatctgggattgcaggcatatgccaccatacctgcctgatttgttgtatttttattagatgccgggtctcgctgtgtttcccagactggtcttgaactcctgacctcaagtgatctgcctgccttggcctcccaaagtgtttgagattataggcatgagccactgtgctcagcctgttcattgaaattttgattgttttcttttcaaataattattttgcccaagttccctctctctttctctggagccctcattgcccacttgttagtctattaaatattgttccgcatatctcagctmcttggttttatctattaatattgggatttggttaatttctattcatcctccttcaagttaacagggtttttttttttcctttcagtatgctgaaagacagtggtgataatttctgacatatttttcattgtaaaatttacaatatttgtttcaattttcatctatgtaaacatattttctatctcttttattaaatcctttagtatattgatcatagtgattttaaatgccttacttgatcaatttaacttctgggccatgtctgcatttttttcttttgca

SEQ ID NO: 705737 - DNA, 886 bp, Homo sapiens
tctcctgtaccccacttttctgactaaaacccagctttaattcctattgtacttaatgtgtctgtgctgtagctgctgttaaacttttttctcttttttttttctatttagccagtttatcatgatgttgctaggtgtggtttgttttcttgctatttatctcctatgccatttgttgaaattttttttttttttgagacagagtcttgctctgtcacctaggctggagtgcagtagcatgatctcggctcactgcaacctctgtctcctgggtcaagtgattctcatgccttagcctccctagtatctgggattgcaggcatatgccaccatacctgcctgatttgttgtatttttattagatgccgggtctcgctgtgtttcccagactggtcttgaactcctgacctcaagtgatctgcctgccttggcctcccaaagtgtttgagattataggcatgagccactgtgctcagcctgttcattgaaattttgattgttttcttttcaaataattattttgcccaagttccctctctctttctctggagccctcattgcccacttgttagtctattaaatattgttccgcatatctcagctacttggttttatctattaatattgggatttggttaatttctattcatcctccttcaagttaacagggtttttttttttcctttcagtatgctgaaagacagtggtgataatttctgacatatttttcattgtaaaatttacaatatttgtttcaattttcatctatgtaaacatattttctatctcttttattaaatcctttagtatattgatcatagtgattttaaatgccttacttgatcaatttaacttctgggscatgtctgcatttttttcttttgca

SEQ ID NO: 705738 - DNA, 651 bp, Homo sapiens
tataatgtcatccttgcaaacatttttagtctcatctgactcaaactgtaagtgccaacaaagctgagtttcttacacaccctgtgctgctggatgtctcagaaatgctccaccattccaacctggttatttacaatgaccaataaagcctatgctcagatgttaccttttccagcagccttgcccaaaccttctaaccttctcccccaactggtttaggtgcctctgttcccagtagtatgccggcaaacgtttaacaaccagttctggaatagagmatattgatttatgacatctgcccatttccatggtttaaacagctcctcaatggccaatttcaaggtgtcaaagtgaattcagttggttcgcagatttcctgaaaatatcacaattggcttttatgagccagtacaagctcactccagcacactactgcctacactgttctcccataacacctcccacatgtttaatttatttatccgtccttcttttttaaaacaattatttgttgagcatttattgttctgctgtttgtgccatagcaccaagcattcaacagtcagcctgttgactggataaatatatataatctctagcactgagggctcacagtctagatggggaaaaataaaatatagtttgaaaggg

SEQ ID NO: 705739 - DNA, 651 bp, Homo sapiens
tataatgtcatccttgcaaacatttttagtctcatctgactcaaactgtaagtgccaacaaagctgagtttcttacacaccctgtgctgctggatgtctcagaaatgctccaccattccaacctggttatttacaatgaccaataaagcctatgctcagatgttaccttttccagcagccttgcccaaaccttctaaccttctcccccaactggtttaggtgcctctgttcccagtagtatgccggcaaacgtttaacaaccagttctggaatagagaatattgatttatgacatctgcccatttccatggtttaaacagctcctcaatggccaatttcaaggtgtcaaagtgaattcagttggttcgcagatttcctgaaaatatcacaattggcttttatgagccagtacaagctcactccagcacacyactgcctacactgttctcccataacacctcccacatgtttaatttatttatccgtccttcttttttaaaacaattatttgttgagcatttattgttctgctgtttgtgccatagcaccaagcattcaacagtcagcctgttgactggataaatatatataatctctagcactgagggctcacagtctagatggggaaaaataaaatatagtttgaaaggg

SEQ ID NO: 705740 - DNA, 580 bp, Homo sapiens
gtcatctcaacatatacatgttctccttgtgaaataattgctttttattctctggatagaatctttaaaccttcaattcactgttaaaaacaaaacattacataaggatatgcttataaaaataattcacaastagcttttcaattcagaaatatatgtaaaaaatcattaagcatctaatggatttcaaggagaaatgggttagtaatttgttccatatgtctcaatttttcctggacacacggcttcctttaaaataattgtaggcatttaagaaacctggtaaactaaaaagaagaaattatgacactgcctggttaggttttttaaaatctttggacatgagtcaatattttttaaattttatcttaacttaattagacattgtgagttcaccatcttcctgtcagtatagcatccaagctgattatcatagattacaagttcaactatcaactgtgttctgagagtgtaaaaaaataaatgaatatatttatttgggtattcttaaagcaggagtgaggacacagtgaaagtgagacaaggaagagagaacaaaacaaaacaggaaagatagaaa

SEQ ID NO: 705741 - DNA, 580 bp, Homo sapiens
gtcatctcaacatatacatgttctccttgtgaaataattgctttttattctctggatagaatctttaaaccttcaattcactgttaaaaacaaaacattacataaggatatgcttataaaaataattcacaagtagcttttcaattcagaaatatatgtaaaaaatcattaagcatctaatggatttcaaggagaaatgggttagtaatttgttccatatgtctcaatttttcctggacacacggcttcctttaaaataattgtaggcatttaagaaaccwggtaaactaaaaagaagaaattatgacactgcctggttaggttttttaaaatctttggacatgagtcaatattttttaaattttatcttaacttaattagacattgtgagttcaccatcttcctgtcagtatagcatccaagctgattatcatagattacaagttcaactatcaactgtgttctgagagtgtaaaaaaataaatgaatatatttatttgggtattcttaaagcaggagtgaggacacagtgaaagtgagacaaggaagagagaacaaaacaaaacaggaaagatagaaa

SEQ ID NO: 705742 - DNA, 580 bp, Homo sapiens
gtcatctcaacatatacatgttctccttgtgaaataattgctttttattctctggatagaatctttaaaccttcaattcactgttaaaaacaaaacattacataaggatatgcttataaaaataattcacaagtagcttttcaattcagaaatatatgtaaaaaatcattaagcatctaatggatttcaaggagaaatgggttagtaatttgttccatatgtctcaatttttcctggacacacggcttcctttaaaataattgtaggcatttaagaaacctggtaaactaaaaagaagaaattatgacactgcctggttaggttttttaaaatctttggacatgagtcaatattttttaaattttatcttaacttaattagacattgtgagttcaccatcttcctgtcagtatagcatccaagctgattatcatagattacaagttcaactatcaactgtgttctgagagtgtaaaaaaataaatgaatrtatttatttgggtattcttaaagcaggagtgaggacacagtgaaagtgagacaaggaagagagaacaaaacaaaacaggaaagatagaaa

SEQ ID NO: 705743 - DNA, 2314 bp, Homo sapiens
tattatatgattctatttacatgaaaatagaataggaaaagctatagagacagaaaacagatttgtgattgcttaggattgagtaggggatgggcgcataggaggttaacagctaaagaaggtggggtttctttttgaagtgatgaaaatgctacaaaattcattgtgatgatggctccacttatctgtgcatatactgaaagccattgacttgtacacattaatgtgtgcactctacactatgtaaattatatctcaataaatcctttcaaaaacacacagaagagtaaggggttttggagtgttgcagctgggaggcagtttgaaataccgaataggtctcactgagaatgtgaagcttcagtaaagacttgaggaagtygaatgagctgatcaatggatatatggagggctatctttctaagccaagaaattaactagagtcttggtcataaggcggcagcatgttggcatgtccagaggacagtgaggtggccagggccactggtaagatcaagggtgaagatataaaagaattttggtggttaacatggggcagatcatgatgggcttgcagaccattgtaagaactgtggcttttagtgtaaatgaaatgaggagacaaatcattatcccattatcaatattttaataaattggatccatgaaccaaatccaatgagattaaattaattagtaataatatgcaaatttgtatcaaaattacaagaattacttgcacatttcagaacaggagagtcatgattgtttatcagcaataataaacattattaattttaattgtgatcagctaattgagattaattgcaatacatcatgctttataatgtgactgtcaaaaggaaaatatgattgtaatcttatactacatctatcaatgtttttgattcataagactatacagtaagcccctagttttcaaagccaacttatgaggcagtgacatcttatgcaagtttgctgctttctgccacagtggtccttggtcagctggcacaaattgttttacaaacaccgctaggtctaaaaaaagtttggatcacaatgaacacagacacaccttcttcccttcagaaatacctatcaattacttccaatatagaatgaaaaattgacaaagaaaatatgtagattgtaaaaatgccagttagcttgcatctatgtgaaagaaaaatgccatttttattaccttagatcattgttttacacgagttttggtatagcacaacgttgaaccaagggcaaagagagatgaattaattaagtcttaagatatcaagaatttaaaagaaaaggaaggtcatctttgaaggttagtgacatagcattcatcttctgttgtcgccttttccgtaattccccttatgcctgatggacagctttcactcaggttcagagaacagcatgcaaagattagctaccaattaatctttatgaagggagcttaatttctagccagactgagcttacgttttagcaggaagcatttttaggaaatgtttatgttagagtttgcccttcttgacaaggtgagacataaatgtctacttcatagacatgaattaagatgggaagatatttgggggaaacatttactcaaatgctaaataataaaggtacacaaagggcaaattatattagatttctttcccacttgttttctatgtctcatgcaattcaccttgattcccttcagtttctgtttaatgtagaaagtggcgttttcattattttaagcttctagcacaatgaaagaatttctctttttcatgaactggatcataaatgaaaggtaggaatagtgtcctatatcatatttattgttcaacaaaacactgctccacagcttaaattcagtttaaaaaagagaatttattgaacatctaacacatacataaaaggcagtaaagacaaatgagaagagggcgggatattgaagtatacagactttaatgctgagttctgtatcttactaagatactccaccttacagaggctcaatttcctctgatttagggaagcgatgctaatgggtattgcataggtgtaagtataaaaatgttatatttaagataaccctacaagcttggtataaggcagaaaataaatagatgtaacattaataaatagtttattacatttgtatgctacctgcagactacaggaagcaagaaacacagccactgtgcttgattagcgttatattctaatttggaatataaatagaaaagagaaaaatagaaagctatgcataaacacatgcattaaaatgaattttatgtgaactctttca

SEQ ID NO: 705744 - DNA, 689 bp, Homo sapiens
tacaaaaatcagctgggtgtggtagtatgtacctgtaatcccagctattggggaggctgaggcaggagactcrcttgaacttgggaggcggaggttgcagtgagctgagatggtaccactgcactccagcctgggcaacacagcaagattctgtctcaaaagaaaaattctacctgaagagctcttatttcacaaagcacagtaaaaaaaaaaggataaaatatgaaagaagatgcaggaaagttatacatttttataaagggatataggaatttgaaagacattccaacatcagcaaaggaagaatgaagactggaaaacaaaattcagatacaaatattaaaggagccatgattatctagaataaaagtaatggttaaataaataatcatcatatccaaaatgttgatcaatttatagccaatgaacaaaaaggaaatggatctaaatattttatcaaaatcaagatttaatgcaagaaataatggtagaaggatggttaaaataccttccctttcctgagcaattcagtcttaaagccattaggttgtgaacaaggaagatgtcagagccaggaggctgcgaagaggcagctcagcccagggtgtcagaaccaaagtggtatgtaacaggcattcacttgcgggcagccaagtgtggagtgctaggacctaaatggggtgacgaga

SEQ ID NO: 705745 - DNA, 670 bp, Homo sapiens
ttggccctgttatatgcacccgcattgtgagaccacagtcctgattgaaggtttaggtgctgtggctaccctgcccacagctctggattcccagcccttttgattctttggaaaaaggagatttgcacagatcagatgagaaggccatgggcagtatggggtggagagaatgatggcgtgtcagacattyattcagcacattgtgttgtaccaggccctggtgaggttctggacacacgatggggagtgcagcagactcattccttatgtgcaaggagcttacagttcagtacagaagacacacattcatcagaaactcgcccaaatcagtgtgaagctgtaactatgagaagtgtgacagatccatggagttggtagggagagtttgatgcagggaggacaggtcttccatggaaagacagttgaaggaggagttgaatagtaaaaggggaggggctggaagagcttatgatgggggaactggctgtggaatgaggcttgccaggagcagagatcctatgcaagaccttgaaggcaggtctaaggtgtgggggctttatcttaagagccatgggaagccactgagagttttaagcaggggtatgagttgatcacatttatgtttggaaacgaatcttctctggttactatgtggaaagcagattgggga

SEQ ID NO: 705746 - DNA, 1530 bp, Homo sapiens
cccttggggtactctcctatgggccacttcaaagggagttttgcccactcctcatagcctgtattttaagtcaaatcatttgaaataagccctccaaactgggtggaaaayctccctaggcatttttatgtgaagtggaaacagaaaatcttatttttatagaaagactcctctgggatctcactatctagtagagaagactggggcagccctgaggtttgtgttacaagaaaggcttaggagggaaaggcgtctaggccagcttcctgggaaggtcacataaattcctgcttagcattcagcgtaggctgagggcacaccttcaggagacaggagcaaacagactccagctcctcttccatattcttccaaagcagttttggtgagtaccaggacccactgctgttgaaatgcacacccactcacctcacagtgtggcccagaaggaaccagaacccaataggagaggggcagagttataaacaactccactggctacatcacactgtgcttatcgctgcaaatattgactctggaggatcaaacaagtggccaaaaaaaacaataatattttccccagagagaaggtcttgttccagacagccaggatcaagtcggatgggcaggcagtgacagatggcacaatgcaaggtgaaggtctccatgcaagggtgatgctctcacgtggtaggtccccttggaactgctatgcccagggaaggagagaccagactcagggtgccatcaggtggtcttaaagaacacagggcatcccatatcgtggatcagagttctcaaagtcaagagattgctccaagaggcaaatgtccacagcaaagatccgactccaggtttggcaaacattgacctgaatcccttctttgggtcagacatcctcccagaaacctccaagaacgattccacacaatccttacaaaagcctcatgaactaggtgttcttactccattttgcagatgcaaaaactgaggctcctaacagtttgatgacttgcaaaacaggtcacattgtaggttatctggcagagctgggataaggactccccagtaagtgcctctaaagtgtgctgtgcttgttctggttgtttcgagctctgagttcttctgggttacaactcaaatgccccttacacagtgaaagtccagagagcaggattctggacaaagagcaggaactgaggtcattgattggctaagcctcagggttgtttactattttgtaaagatgtggatagaaataattattgattctgcattctggctcttgggcagaaggcacagttttgaaagtatcggcaagatgcccaatgctgcaccctagccatgcagtgtgtgttcctgtgtgtgtgggtgggtgtgtaggtgtgtgtgtgtgtgtctagtgcaattgtggtagaggtttcattgtgaccctctaaaacctcccttctgcccaacccccagacaatgataccttacagcaagagcaagcttgtccaacctgcggcccaggatgactttgaatgcagtcca

SEQ ID NO: 705747 - DNA, 1748 bp, Homo sapiens
aaatctatataagttctctatctgaaacaaacttacggtttacagtatcaagaaacaaatgctgccatatggaacaagtgaaaatgacagaaagaatacaaggaggtcctgtattcatagcacactctgtgatgtacttgtctttttatgattaatttaggcattttcactaatagattcaaagataattgccagataaacagctgtgctatccctataacaggagaggaaatgagtaagggatattaaataaggaaaaatgtttctcaggtgcattaatctggaaaatggagctcattgtaagatgttctgtcttccttggtatttggatttgaaaactggaatawtaaggtttaaggacatgatagggcaccataagaaggaataatctccttatgaaaccaagtgattataacaatatgattatttatgaataaaatatttttgccttttaattattcagtcttttactaaaacccatgttacacataagaggagaagtttaaaataatgtttccagaagtgtaaaatcctgaatcaaaacaacatgttttagaaaatattaggaatacagaacactaaaaatagaatactcatagtgtcctcatgcattttaactcattgctttcattgatcttaattctttttaaaatttgaagtagaaatatttctgattgactaagtataaagtgctgaaaccatcaattacttcaaaatagtttattttataaccttaaatttttcactcaaattcccataaaatacatcctgtttgtaaatctggaagaagcgttctgtaccatcaaatttttaaaagttgatttgatgccaaatgtaactagacaattaaattcagtagttgccgtaacagatgaagtaataacttagatgctttgttaacatctgtataaaactgttttccaactgtagctgtttgcttcacttttcatgagtgtagtgaatcactgtacttttaacaatctttgctcatgtaaactattaactcaggtccttaaagacttagtgtattgatgggaactgcattatactaattttatgactttcagataggctagtgccagagaggtcagctcaagagtaatgaatgccattttaaaataccaagaagcatgattattttcatactgatactgccgtggaaaaacaccaaagaggttgtgagattataccacaaagtacagaaactgttccaggaagtaagtgcataaactcggctgtgcaagtgtacagaaaaacccattaaaacccattaaaaagacccaaactgtagacagaagataaaaaaggattgatcagctgcatccatgaaggcgatagattgtccatttattaattaaaagtatattttatatattgtgatgtgataaatagtttgactgtataggttaattccctcagatctgtgccgagggctattagcattgataaattatgcactatgacatttaacatttctgatagacggtcttaaggagtgctgtacctgcagatctgcatctggtatttacacagcaatttagtctagctatagttatctgtgaagcattttgaatacaagtgggactataccttaaataagcatttgctcttgtggttgggtgattttaattctagaaccagaattaagtctcttgaaccataactgtcttgatcaccacaaaacacagagtacttctaccttacataaacattattgagtcccattggaataatgaatttaaatatcc

SEQ ID NO: 705748 - DNA, 642 bp, Homo sapiens
atatactgctagtgaaaataaatacattcttattatccaatctaatttacaacattgcagtgttcagttcatatttttcagttgaactggttcatataaagaaatttactcatctttttttcaatccctgttttgtatggaattaacaaacataacattcacactaggagtcttgagatttatattttaatattttgcattgctcattttgaacatgtttgtctattctatcagattgaagaataacttttgagataaacgggcaagtctaggtaatcttgaaatccatctaactcgtgaaactacttctcaaactctactgggacacccagcccctattttgaacatccctaattataagtaaatgtattttcttatgctgcaaaataatctgaaacttttatgcaatgaatcttgttctttcacttggagtctcaaaaaataaatttaatccctttttcaaacacatacttttaggagtttaaaaacaacttttgcatcccctataaaygttttattgatcaggctaaatattccccgttttttcgaactttcctgacatagaattctttttaatattttcttcattatccactatacttgccacatcattgttcactacacttgctctattttgttata

SEQ ID NO: 705749 - DNA, 629 bp, Homo sapiens
caaaatccgtgaaaagtctttcatggtaattactccctttttcacatctcacagtaggaggaaaagtccactcccaaagggcacaacaccttccctccactgtctcactcactggggagcgtttgtgggatcacaaagacctttgctccagggtaaagcagctgttctgggtgcttgccaactgaagtgatggtctagcaaaatctgtcaacaagggaaacatgccacatcctcatactcatgtggctgccttctctttccctatttggcataccccttgggacactgccttatacaaaagaccaagacaggtgacatacgtgtcaacatatggcactgccctcctggggtaatgtacatgaaagcatatggtgctgctctcttactcgtcagcaaacacaggaaggactctgtcatagttaccctgtttattttccataaggttctgaattgtcccygaaaggggataatttgcattatttctagatataaggaaatatcacagctacattaaagagcagatggttgtctgattcttgagaaatacatatgtatataatattttgtatctatagtttataaatctttctgcatatttagaactatatgttctaaataaatgtatttct

SEQ ID NO: 705750 - DNA, 946 bp, Homo sapiens
cactatgcttggtccactccttttttaagttgaaaataatttttatttatttatttttcagagagatgggatcttgctatgttgcccaggccggtcttgaactctcggtctcaagtgatcctcctgcctcagcctcccaaaacactgggattacaggcataagccaccaagcctggccctcagctgcgttttatggctaaggaaactgaagatcaggcataaaagtagctaggcaaccgtgagacctagcctcaattgtgggcaactcagtagtaattggcaatgactttgatttcaactcaaccaagagccaggatttgaacccagtgctgtgactccaggactatctttctgtaatgtcatgccatacaatgaaataacaaaagggtttgtggaaagcatgaagccttatgggccccacattggtgcccagttctaggtgatgtcttttagggtcctcttcatcctcttcctcccatctgcagggatggttctgcccccattacccagctgtcaccactggatctctctccatttgccagcccacctgccctgaccttgagtcctaatctcaggcccttgggcttggtggcttgctgcaaggtgcttctcaagctctgccgacagttgagagctctgtcctggcccagatctcatgtttgtgcaccagatccaagttttgtgaccttgagtgagggattctcacatctcatgggccattttttaggaccaccagtttcaattttccattgtgccataacacaccaatacaccaaaacagcaggagttgcagcagagaaagatcattggtcagccaaatgaggagatgggaggaaacctaaaatctgcctcctcaaaaggtttgggatggagttttcagggggtttttaagaggatgggygattggctaaagtgtggggattcctgactggttgagaagcaagag

SEQ ID NO: 705751 - DNA, 1552 bp, Homo sapiens
tttttttttttttttttttagagacaaggtctcactgtcacccagactgtagtgcagtggcacaatcacagttcactgcagcctcgacctctcaggctcaagccatcctcccacctcagcctccctagtagctgggaccacaggtgcatagcccgatgcctagacaattttttatatttttgtaaagacagggtctcgctatgttgcccaggctggtctcaaactcctgggctcaagtcatcctcccgcccctgcctcccaaagtgctaggattacaggcatgagccaccatgcccagccaggagggcttcttttaaaagcgataatagctacttcagagaacaagcccccactacaaattcattttccagattctataagcttcctgttgagtggcaagaacaaatatttcagggagaattctaaggtatagtatcagtcgaatgtctgtcagtttaaaatggggacttacggtcatttaaaagataaactagcatgaggatggcttgagaccgggggagcagaggttgcagtgagccgagatcacgccactgcactccagcctgggagacaragtgagggtccatctcaaaaaataaattaaataaatcaataaaaagtaaaagataaactactatgagcagagtgtctttttttctaccctgctttcagtacttgctaggagtaaggtgatgaagatccctttcttgctcagttaatgtgacagcagtcatgcctgctgacataaccgcggaatgccaaatgacctattcattcatttcattccttgcactagaacatcagagcagagaatccacaaatgcacccacatatccaaagctgatggcattttggcctctttctgcccccattactgtgaaaagatttctccaagggaacctgaaagtaatctttgtgggttgcagcaaacgtacacacccttttggaattttatcaggcaatcttagcacagggcagctcaaacaaagcagggccccacagcgtcagtggccttcacttaagcactagaggaacacaataccagcctgtaaccgtctccttacaggtgggtgttggctcattttaagcagatggtggatttatgattctaatgtgccgtatattgctcaatggacaaatatttgcactggaccagaataaataaaaaaaaattcttcagcttagcttccaaagaatatcagaagttttaggacacctcagcatttgaacattataggaagtgagtgaataagccgcgactcctatctttcctttttcttctgcttcaaacctgccctgaaaaatgaaagaaaatgtttggaaggcacaagcatagtgagttatattcaggaactgctatgtttctcccattgagagaactcttaaaaatgtacagtataagcatattttagctctaacaaaaagattcaagttaaatttccaactggaaccagaaaatggagcctatctactttccttcctctagtaatttctgttgtttctttccatagtatgacaggggtcatttttttcccccaggtgtgaatgtact

SEQ ID NO: 705752 - DNA, 1552 bp, Homo sapiens
tttttttttttttttttttagagacaaggtctcactgtcacccagactgtagtgcagtggcacaatcacagttcactgcagcctcgacctctcaggctcaagccatcctcccacctcagcctccctagtagctgggaccacaggtgcatagcccgatgcctagacaattttttatatttttgtaaagacagggtctcgctatgttgcccaggctggtctcaaactcctgggctcaagtcatcctcccgcccctgcctcccaaagtgctaggattacaggcatgagccaccatgcccagccaggagggcttcttttaaaagcgataatagctacttcagagaacaagcccccactacaaattcattttccagattctataagcttcctgttgagtggcaagaacaaatatttcagggagaattctaaggtatagtatcagtcgaatgtctgtcagtttaaaatggggacttacggtcatttaaaagataaactagcatgaggatggcttgagaccgggggagcagaggttgcagtgagccgagatcacgccactgcactccagcctgggagacaaagtgagggtccatctcaaaaaataaattaaataaatcaataaaaagtaaaagataaactactatgagcagagtgtctttttttctaccctgctttcagtacttgctaggagtaaggtgatgaagatccctttcttgctcagttaatgtgacagcagtcatgcctgctgacataaccgcggaatgccaaatgacctattcattcatttcattccttgcactagaacatcagagcagagaatccacaaatgcacccacatatccaaagctgatggcattttggcctctttctgcccccattactgtgaaaagatttctccaagggaacctgaaagtaatctttgtgggttgcagcaaacgtacacacccttttggaattttatcaggcaatcttagcacagggcagctcaaacaaagcagggccccacagcgtcagtggccttcacttaagcactagaggaacacrataccagcctgtaaccgtctccttacaggtgggtgttggctcattttaagcagatggtggatttatgattctaatgtgccgtatattgctcaatggacaaatatttgcactggaccagaataaataaaaaaaaattcttcagcttagcttccaaagaatatcagaagttttaggacacctcagcatttgaacattataggaagtgagtgaataagccgcgactcctatctttcctttttcttctgcttcaaacctgccctgaaaaatgaaagaaaatgtttggaaggcacaagcatagtgagttatattcaggaactgctatgtttctcccattgagagaactcttaaaaatgtacagtataagcatattttagctctaacaaaaagattcaagttaaatttccaactggaaccagaaaatggagcctatctactttccttcctctagtaatttctgttgtttctttccatagtatgacaggggtcatttttttcccccaggtgtgaatgtact

SEQ ID NO: 705753 - DNA, 1552 bp, Homo sapiens
tttttttttttttttttttagagacaaggtctcactgtcacccagactgtagtgcagtggcacaatcacagttcactgcagcctcgacctctcaggctcaagccatcctcccacctcagcctccctagtagctgggaccacaggtgcatagcccgatgcctagacaattttttatatttttgtaaagacagggtctcgctatgttgcccaggctggtctcaaactcctgggctcaagtcatcctcccgcccctgcctcccaaagtgctaggattacaggcatgagccaccatgcccagccaggagggcttcttttaaaagcgataatagctacttcagagaacaagcccccactacaaattcattttccagattctataagcttcctgttgagtggcaagaacaaatatttcagggagaattctaaggtatagtatcagtcgaatgtctgtcagtttaaaatggggacttacggtcatttaaaagataaactagcatgaggatggcttgagaccgggggagcagaggttgcagtgagccgagatcacgccactgcactccagcctgggagacaaagtgagggtccatctcaaaaaataaattaaataaatcaataaaaagtaaaagataaactactatgagcagagtgtctttttttctaccctgctttcagtacttgctaggagtaaggtgatgaagatccctttcttgctcagttaatgtgacagcagtcatgcctgctgacataaccgcggaatgccaaatgacctattcattcatttcattccttgcactagaacatcagagcagagaatccacaaatgcacccacatatccaaagctgatggcattttggcctctttctgcccccattactgtgaaaagatttctccaagggaacctgaaagtaatctttgtgggttgcagcaaacgtacacacccttttggaattttatcaggcaatcttagcacagggcagctcaaacaaagcagggccccacagcgtcagtggccttcacttaagcactagaggaacacaataccagcctgtaaccgtctccttacaggtgggtgttggctcattttaagcagatggtggatttatgattctaatgtgccgtatattgctcaatggacaaatatttgcactggaccagaataaataaaaaaaaattcttcagcttagcttccaaagaatakcagaagttttaggacacctcagcatttgaacattataggaagtgagtgaataagccgcgactcctatctttcctttttcttctgcttcaaacctgccctgaaaaatgaaagaaaatgtttggaaggcacaagcatagtgagttatattcaggaactgctatgtttctcccattgagagaactcttaaaaatgtacagtataagcatattttagctctaacaaaaagattcaagttaaatttccaactggaaccagaaaatggagcctatctactttccttcctctagtaatttctgttgtttctttccatagtatgacaggggtcatttttttcccccaggtgtgaatgtact

SEQ ID NO: 705754 - DNA, 1552 bp, Homo sapiens
tttttttttttttttttttagagacaaggtctcactgtcacccagactgtagtgcagtggcacaatcacagttcactgcagcctcgacctctcaggctcaagccatcctcccacctcagcctccctagtagctgggaccacaggtgcatagcccgatgcctagacaattttttatatttttgtaaagacagggtctcgctatgttgcccaggctggtctcaaactcctgggctcaagtcatcctcccgcccctgcctcccaaagtgctaggattacaggcatgagccaccatgcccagccaggagggcttcttttaaaagcgataatagctacttcagagaacaagcccccactacaaattcattttccagattctataagcttcctgttgagtggcaagaacaaatatttcagggagaattctaaggtatagtatcagtcgaatgtctgtcagtttaaaatggggacttacggtcatttaaaagataaactagcatgaggatggcttgagaccgggggagcagaggttgcagtgagccgagatcacgccactgcactccagcctgggagacaaagtgagggtccatctcaaaaaataaattaaataaatcaataaaaagtaaaagataaactactatgagcagagtgtctttttttctaccctgctttcagtacttgctaggagtaaggtgatgaagatccctttcttgctcagttaatgtgacagcagtcatgcctgctgacataaccgcggaatgccaaatgacctattcattcatttcattccttgcactagaacatcagagcagagaatccacaaatgcacccacatatccaaagctgatggcattttggcctctttctgcccccattactgtgaaaagatttctccaagggaacctgaaagtaatctttgtgggttgcagcaaacgtacacacccttttggaattttatcaggcaatcttagcacagggcagctcaaacaaagcagggccccacagcgtcagtggccttcacttaagcactagaggaacacaataccagcctgtaaccgtctccttacaggtgggtgttggctcattttaagcagatggtggatttatgattctaatgtgccgtatattgctcaatggacaaatatttgcactggaccagaataaataaaaaaaaattcttcagcttagcttccaaagaatatcagaagttttaggacacctcagcatttraacattataggaagtgagtgaataagccgcgactcctatctttcctttttcttctgcttcaaacctgccctgaaaaatgaaagaaaatgtttggaaggcacaagcatagtgagttatattcaggaactgctatgtttctcccattgagagaactcttaaaaatgtacagtataagcatattttagctctaacaaaaagattcaagttaaatttccaactggaaccagaaaatggagcctatctactttccttcctctagtaatttctgttgtttctttccatagtatgacaggggtcatttttttcccccaggtgtgaatgtact

SEQ ID NO: 705755 - DNA, 1552 bp, Homo sapiens
tttttttttttttttttttagagacaaggtctcactgtcacccagactgtagtgcagtggcacaatcacagttcactgcagcctcgacctctcaggctcaagccatcctcccacctcagcctccctagtagctgggaccacaggtgcatagcccgatgcctagacaattttttatatttttgtaaagacagggtctcgctatgttgcccaggctggtctcaaactcctgggctcaagtcatcctcccgcccctgcctcccaaagtgctaggattacaggcatgagccaccatgcccagccaggagggcttcttttaaaagcgataatagctacttcagagaacaagcccccactacaaattcattttccagattctataagcttcctgttgagtggcaagaacaaatatttcagggagaattctaaggtatagtatcagtcgaatgtctgtcagtttaaaatggggacttacggtcatttaaaagataaactagcatgaggatggcttgagaccgggggagcagaggttgcagtgagccgagatcacgccactgcactccagcctgggagacaaagtgagggtccatctcaaaaaataaattaaataaatcaataaaaagtaaaagataaactactatgagcagagtgtctttttttctaccctgctttcagtacttgctaggagtaaggtgatgaagatccctttcttgctcagttaatgtgacagcagtcatgcctgctgacataaccgcggaatgccaaatgacctattcattcatttcattccttgcactagaacatcagagcagagaatccacaaatgcacccacatatccaaagctgatggcattttggcctctttctgcccccattactgtgaaaagatttctccaagggaacctgaaagtaatctttgtgggttgcagcaaacgtacacacccttttggaattttatcaggcaatcttagcacagggcagctcaaacaaagcagggccccacagcgtcagtggccttcacttaagcactagaggaacacaataccagcctgtaaccgtctccttacaggtgggtgttggctcattttaagcagatggtggatttatgattctaatgtgccgtatattgctcaatggacaaatatttgcactggaccagaataaataaaaaaaaattcttcagcttagcttccaaagaatatcagaagttttaggacacctcagcatttgaacattataggaagtgagtgaataagccgcgactcctatctttcctttttcttctgcttcaaacctgccctgaaaaatgaaagaaaatgtttggaaggcacaagcatartgagttatattcaggaactgctatgtttctcccattgagagaactcttaaaaatgtacagtataagcatattttagctctaacaaaaagattcaagttaaatttccaactggaaccagaaaatggagcctatctactttccttcctctagtaatttctgttgtttctttccatagtatgacaggggtcatttttttcccccaggtgtgaatgtact

SEQ ID NO: 705756 - DNA, 979 bp, Homo sapiens
taaaacctaaattttaaaatagcttcttccttctgtcgctttgggtttagttttcttccagtttcttaaagtagaatgttaggctatttatttagtatctcttttcttttttgtatagcactgctttagttgtataccataagttttggtgtgctgtgttttcttttttattratctcaaagcattttctaatttctcttgtgatttcatctttgacattaattatttaggagtgtattatttaattttcacatatttgtgaatgtgccaaatatccttctgttaatgatttctaatttcattattcatttattcttaatttcaaatgtagataaaaaatgtcacagaatcctaggcttggacaaaatctatagagaatatccaccattacttctaatgccatcctagatgatattggagatatatttcaacagactttggaagagacaaaagaaatcaaatgataaaagtttatcctaggactggacaaaatcatttacacattgtatttatacagcattttacagattatagaaagtacttttacatccacaactgcaagtaaataattttttaaaaatatcttgaatattacttgtaacaaaaaatagacaacaaataaattggcaaaaacaaaatacctgataggtgttgtcaaaactgtcatacatgaatctggtgatcaaagatgtctttccaactgaaatgaaacgaaaaaaagatttgctcagtgaacacattacattgggttctcagaaaatttttctacagagaactgcaattaaagtcaatgggaaatacctgcaatggttctactaagaataattaaaacccatatagccccaagattgtcaaaatgactttctccaaacacagacaaccatctcccaatttaaaagcacaggtaaacagtctatagttaaaagttgaaaacattctgttattatatactgacattcctaattcacaaaaggccaag

SEQ ID NO: 705757 - DNA, 606 bp, Homo sapiens
gtgttgaatacacactcaaagacgagaacaataaacactggagattccaaaagacaggagagagggaggggtgacaaactacctatgaagtattaggatactatgttsaatacttgggtgacagggatattagaagctcagacttcatcatcatgcaatatatccatgtaacaaacctgcacatgtaccccccgaatctaaaatttttgttaatgtttgtagcatattttccctccctttaaaataatcatctgttgaaatgttaaattagtttaaagaatcttttttccagctaagactaaagttattcagtgtgatacaatttcacggagaacataatgtatgttttttcttctatttgcagcccacaactggagttttatataaagaagataattatgtcatcatgacaactgcacataaagaaaaatataaatgcatacttccccttgtgacaagtggggatgaggtaagtttttataaatatattgataatcctgtcaccaaaaatatttatgtaaaacattgtaactacatactttgaagtaaaattgaataacagatttctcaataacgctcttttagcataaaaatagtaatcacttt

SEQ ID NO: 705758 - DNA, 612 bp, Homo sapiens
taatttctctgctgtgcccagtccattgaatgaatttatcactgatgtattttttatctcttaacatttccacttggttctttttgttgttgttgttttttatttacttattttttttttttgagacagagtctcgctctgtcacccaggctggagtgcagtagcgcaatcttggctcattgcaacctccacctcccgggttcaagttattctcctgcctcagcctccccagtagctgggactacaggcatgtcccaccacgcctggctaattttttgtatttttagtagagacggggtttcactatgttagccagaatggtctcgatcttctgccctcacgatccgcccgtctcggcctcccagagtgctgggattacaggcatgagccatcrtgcccagcctccacttggttcttttttatctctactgaaatttcctatctggtcatacatgttttcttcatcatgtttagtataattattataacatttgataatttcaacatctgttccatctttgggttacatttttctttacctttcattttaaatacacttaattattttgccataatgttctatcatttttgttgtataagagctatgtgttc

SEQ ID NO: 705759 - DNA, 753 bp, Homo sapiens
aatgagcattatgatatataaaagcctacctctgtacatagcattcaaatacagactgacccaatttcttactggctattctttatacaataattttccagtttctccagaaaaggcaaaaatgactactgtataattaatattcttttcatatatcaaaaaagagattaggaacatcataatacaaaactacttcattttaggccgggcagggtggctcacggttgtaatcccccagcactctgggaagcggaggtgggtagatcacttgatgtcaggagctggagaccagcctggccaccacggtgaaactctgtctctactaaaaatataaaacttagctgggcttggtggtgcacacctgtaatcctagctatttgggaggctggagcaggagaatcgtttgaatctgggaggcagggaggcaggggttgcagtgagcagagatcgcgtcaccacactccagcctgggagacagagtgagactctgtctcaaaacaaaacaaaacaaaaacactacttcrtacttcattttagtccttgtggagttactgacaaaaataatccacacagatttactcagattaggattcacataccatattcaagtccagtatacaactttgtctcttccaaggacaccatacttggtactctgtataaaaacaagagtgcttgcatttattaataataccaatatgaagtattaaagggaaaagtttcattgctggactgtttaaaccaaaacaaaga

SEQ ID NO: 705760 - DNA, 654 bp, Homo sapiens
aagtagctgagagtacaggaatgtgccaccatgcctggctaattattttgtatttttagtagaggcagggttttgccacgttgcttaggctggactggaactcctggacttgcctaggctggacttgaactcctggactcaagcaatccactcatctcagcctcccaaagtgcttggattactgagccaccatgccaagggatagtgtatccttatattgataggaattatgatgcaggaagaagaaaggaacttgcaagaaaaaattttagtataggtatatgagtgggatactgatggtttgactttttttctttttttgagacggagtctcactctatcgcccaggctggagtgcagtggcgcgatctcggctcactgcaaactccacctcccgtgttcacgccattctcctgtctcagcctcccgagtagctgggactgcaggtgcccgccactgcgcccagctaattttttgtatttttagtagagacggggtttcaccgtgttgccagaatggtctcaatytcctgactttgtgatccgcccgcctcggcctcccaaagtgctgggattacaggcgtgagccaccgtgcccggccgacttttaataggatagaaacatttggaattcagttattataatagaaggaaa

SEQ ID NO: 705761 - DNA, 614 bp, Homo sapiens
tttagccttagaaaaaatctaccacttgcagcaataaacagcatgctggctgtaattactagtaatctattgtacacatgtaatttgctaagagaatagatatcaagtgttctcactacacacaaaaaaagtcactatatgaggtaatgaatatgttaattgatttgattatgttaattatttcacaatgcatacatatttcaaaacattatgttgttaccactaaatgttaatatacataatttttatttgtcattcatacctcaataaatctggggaaaaagtcagcattcttaaataattctctctacagtttaatgaataaaattataaataagtgttttccatttatgacatctgtccataaccaattacatattcatataaatctgggtaattttgaattctcccagttttagacttttaaaatgtgagttctcattttytaaggaccacttggtggtaatgtatttgtcaaattgttactaggagactatggttggagtaaaaccataaggcaataaaggcaatgtctgctataaccccaaacatgcatatgtatacatggatatacatgggtatatctatgtcatctctgtagaacatacagtgtc

SEQ ID NO: 705762 - DNA, 1680 bp, Homo sapiens
tgtcagttctaaagatgacagtcatggagatggagatgaagatatgacttaggaagcaattacgataacatatataagagaccctgaattagggtctggagtgctgagaatggagaagagagaaataacacaggagataattgggagatggaatgcataggcttggggaagtgaggaagcaggtggagacattagtgacttgcaggcttatggtataggcaattgggagggtcatgatagcatttgccatgataaagggaactggtataatttggtagagagtcaaagtagatgatctgttttgtagctaagtttgaagtgctcaactggaaatataaaattagtgataaaaatgtggatctgaaatttagaaacaatatcagggctaatatttagatttgaggagtcatacttcagaaaaatttattgggcattgatatggtttggctgtgttctcacccaaatctcatcttgamttatagttcccataatccccacgtgtgatgggagggacctgatgggaggtaattgaatcatggggccagtttctcccatgccattctcatgataataaagttcttagaagatctgatggttttataaggggcttctccttcgctccactctcattctctctcctgctgccatgtgcagaaggacatgtttccttccctttctgccatgattgtaagtttcctgaggctccccagccatagggaactgtgagtcaattaaatatctgtcctttaaaaattactcagtcttgggtatgtcttcatagcagtgtgagaatgaactaatacaagcattgatcatgtgtcaaacactatattagattatgatgatgcaatagggcatggtctctgaacttaaattgagaatacagagaagttctcagtgaaaacttcagagaggtacagggaagtagagccagaaggaaatattagatgcccctggggctaataatttggctctttttcaaaccaatatatgctttttaattttctttaaatcaattttttttttgagacagggtctcactttgttacccaggttggagtgcagtggcatgaacatgactcactgcagccttggcctcccaggctcaagatatcctcccaccttagcctcctgagtagctggaactacaagcacacacaccacacctgactaagttttctttattttttgtagagatggtgtcccatgatgtttcccaggctggtgtcaaactcctgggctcatgtgatcctcctgttctggcctcccaaagtgctaagattatagacatgaactactgtaaccagcctaaaccagtattttaaaaaacaggtactcaatatttatttacaaaaaagggagagctctgccttgctgtgggtggagctgggagttctcacgtgtcaactttcaaccactcttattctgagcaatttggctcagttctcagatttgcatacccccaatagtgtttctcaattgaggttttattagcattttgggtggaacaatttttccttgtgtgggacgatccccatgcatcataatatccctgtccaccccatgtcaatactgctcccagccatactgacatcaacaaaaatagccacacacatttttgaatgcccaaggtttggctgggagggtgggagtgtgagtggttggattgagaatgtttgc

SEQ ID NO: 705763 - DNA, 1680 bp, Homo sapiens
tgtcagttctaaagatgacagtcatggagatggagatgaagatatgacttaggaagcaattacgataacatatataagagaccctgaattagggtctggagtgctgagaatggagaagagagaaataacacaggagataattgggagatggaatgcataggcttggggaagtgaggaagcaggtggagacattagtgacttgcaggcttatggtataggcaattgggagggtcatgatagcatttgccatgataaagggaactggtataatttggtagagagtcaaagtagatgatctgttttgtagctaagtttgaagtgctcaactggaaatataaaattagtgataaaaatgtggatctgaaatttagaaacaatatcagggctaatatttagatttgaggagtcatacttcagaaaaatttattgggcattgatatggtttggctgtgttctcacccaaatctcatcttgaattatagttcccataatccccacgtgtgatgggagggacctgatgggaggtaattgaatcatggggccagtttctcccatgccattctcatgataataaagttcttagaagatctgatggttttataaggggcttctccttcgctccactctcattctctctcctgctgccatgtgcagaaggacatgtttccttccctttctgccatgattgtaagtttcctgaggctccccagccatagggaactgtgagtcaattaaatatctgtcctttaaaaattactcagtcttgggtatgtcttcatagcagtgtgagaatgaactaatacaagcattgatcatgtgtcaaacactatattagattatgatgatgcaatagggcatggtctctgaacttraattgagaatacagagaagttctcagtgaaaacttcagagaggtacagggaagtagagccagaaggaaatattagatgcccctggggctaataatttggctctttttcaaaccaatatatgctttttaattttctttaaatcaattttttttttgagacagggtctcactttgttacccaggttggagtgcagtggcatgaacatgactcactgcagccttggcctcccaggctcaagatatcctcccaccttagcctcctgagtagctggaactacaagcacacacaccacacctgactaagttttctttattttttgtagagatggtgtcccatgatgtttcccaggctggtgtcaaactcctgggctcatgtgatcctcctgttctggcctcccaaagtgctaagattatagacatgaactactgtaaccagcctaaaccagtattttaaaaaacaggtactcaatatttatttacaaaaaagggagagctctgccttgctgtgggtggagctgggagttctcacgtgtcaactttcaaccactcttattctgagcaatttggctcagttctcagatttgcatacccccaatagtgtttctcaattgaggttttattagcattttgggtggaacaatttttccttgtgtgggacgatccccatgcatcataatatccctgtccaccccatgtcaatactgctcccagccatactgacatcaacaaaaatagccacacacatttttgaatgcccaaggtttggctgggagggtgggagtgtgagtggttggattgagaatgtttgc

SEQ ID NO: 705764 - DNA, 1680 bp, Homo sapiens
tgtcagttctaaagatgacagtcatggagatggagatgaagatatgacttaggaagcaattacgataacatatataagagaccctgaattagggtctggagtgctgagaatggagaagagagaaataacacaggagataattgggagatggaatgcataggcttggggaagtgaggaagcaggtggagacattagtgacttgcaggcttatggtataggcaattgggagggtcatgatagcatttgccatgataaagggaactggtataatttggtagagagtcaaagtagatgatctgttttgtagctaagtttgaagtgctcaactggaaatataaaattagtgataaaaatgtggatctgaaatttagaaacaatatcagggctaatatttagatttgaggagtcatacttcagaaaaatttattgggcattgatatggtttggctgtgttctcacccaaatctcatcttgaattatagttcccataatccccacgtgtgatgggagggacctgatgggaggtaattgaatcatggggccagtttctcccatgccattctcatgataataaagttcttagaagatctgatggttttataaggggcttctccttcgctccactctcattctctctcctgctgccatgtgcagaaggacatgtttccttccctttctgccatgattgtaagtttcctgaggctccccagccatagggaactgtgagtcaattaaatatctgtcctttaaaaattactcagtcttgggtatgtcttcatagcagtgtgagaatgaactaatacaagcattgatcatgtgtcaaacactatattagattatgatgatgcaatagggcatggtctctgaacttaaattgagaatacagagaagttctcagtgaaaacttcagagaggtacagggaagtagagccagaaggaaatattagatgcccctggggctaataatttggctctttttcaaaccaatatatgctttttaattttctttaaatcaattttttttttgagacagggtctcactttgttacccaggttggagtgcagtggcatgaacatgactcactgcagccttggcctcccaggctcaagatatcctcccaccttagcctcctgagtagctggaactacaagcacacacaccacacctgactaagttttctttattttttgtagagatggtgtcccatgatgtttcccaggctggtgtcaaactcctgggctcatgtgatcctcctgttctggcctcccaaagtgctaagattatagacatgaactactgtaaccagcctaaaccagtattttaaaaaacaggtactcaatatttatttacaaaaaagggagagctctgccttgctgtgggtggagctgggagttctcacgtgtcaactttcaaccactcttattctgagcaatttggctcagttctcagatttgcatacccccaatagtgtttctcaattgaggttttattagcattttgggtggaacaatttttccttgtgtgggacgatccccatgcatcataatatccctgtccaccccatgtcaatastgctcccagccatactgacatcaacaaaaatagccacacacatttttgaatgcccaaggtttggctgggagggtgggagtgtgagtggttggattgagaatgtttgc

SEQ ID NO: 705765 - DNA, 593 bp, Homo sapiens
ttcctttgagctatttgtgtgtatgtgtgtgtgtgtgctgtatattttatttatatacataaatagcctgcctaagtttcatgtttaataagtctccaggtgaggtactgaatcttaactctaacttcaatccctcaccctaatcctaacccctaactctaatcctgaccctgatcctaaccctagctctgaaatcccagagtctrggaaagtttccctattcatattcaaactttaataagtgtctgcttttcattatgaatattaccatgatcctgacgtaattaagataaccagaaactaataattaagataaccagaaactaaggcagacacatattttgtgtatgttgtgttgttcagtgagaattatactgtttagaatgagtagcctttggcaatgaaagagtcagaatattaaaatactttcagtataaatttcagtgtttagtacgcaactgagtgtcttaaggcaatgacaatctataaagaggagttcagctaaccttatcaattaattggagtagtcaattgatcaacactaacaccacaccatttgcaaataaagtgtgtttactttaaggcttgttctc

SEQ ID NO: 705766 - DNA, 618 bp, Homo sapiens
gttttcacttgtgtagaaaaaaatgttgtaataaatccatcctacacagagatgatcacagacacaaccagttttactgcttattgttttacttaaatgaaagagaccttggttatagtaaaattgtatatagaaaatcctaaaccatagtgccagttagttgtcttacttcttgcactgtgacatctaaaaaaataagtcctttaagttacacaactgaggctatgtcaaagcatcacagcctaaaaacatraaagccacactaaatcacggataggtatagaagtagctggaggtagtagtggacaaagcctttcacacagctttacaacagagccgtggatccctaagggccagacctcagtaaagggcaaactatgcaatataatgaagcagttaagagggtgaactctagagccagactgcctgggtttaaatgccagtctaccagcaattgcctgtgtgtacttgagcaagtttcttagtttctctggcctcagtttcctcatctgtaaaatgggaataatatcatctacttcccatggttgctgtaagattaaatgaaatcatatacagaaagcagttagaactgtaacccctaaaaaatgttatcttgtg

SEQ ID NO: 705767 - DNA, 1053 bp, Homo sapiens
tgttttcttaaagatctcaacttagccacgggggcctgggggagatgagaattgsgcacttagcattagtttgctagggctgccataacaaagtaccatctgctcagtggcttaaacaacagaaatgtatcgtctcacagttctgaagtctagaagcctgagatcagtgcctgagcctggagaaaacccagatgtccagctgcttttttggccctagggtcacatttgctgaaaggagtccttttagagtctggaggatgagggctggagtcctttaacttccaagaatggggtcctggggcattacctatcagtgtgggctaaccttcaaaggggcagcaccttgagggtacaagttcagacagcagcccagcttcacctcagctgagtgaccaagaaaatctcaaaccttggtctactgtgaacaactttcacctacaaatgaccaggacgcctaaatcatggggtaaaccaccaaccaggctccaggtggccacctggtaaaatacagacaggtaacaaatagcactgcaaaggttttgaaaacaagtgacattgaaaccacaacccgcaaaaggctagttagaacagaacacatgccctgagctcaactaggtcaatgcctgctaaacaaatgcgtcaatattctccacagtatttacacaagacacagagtctcagaacataataaccaaaatgtcaaggataaaatccaaaattactcagcatataaagaaccagcgaaattgcaactcacatgggaggaaaagatatgccatgcaaacactaatcataagaaagcctgaatggctatattaatattcaacttcagagaaagaaaagtgtgggagataaagaaagacagtacataataataaaagggtcaattcaccaagaagatataacaatcctatatgtgtttgtacctaacaatagagcatcaaaatacataaagcaaaaactgacagaattgaaagaggcaaatctaaaattacagctggagacgtaaaaactctaatcagcaattgacagagctagtagacagagtcagca

SEQ ID NO: 705768 - DNA, 1070 bp, Homo sapiens
tttttyttcttcttcttcttttttttttttgagacagagtctcactctattgcccaggctggagtgcggtggcccgatctcggcttactgcaacctctgcctcccgggttcaagcgattctcctgcctcagcctcctgagtaactgggatcacaggcatgcgccaccatgcccagataattttgtatttttagtagagatggggtttcaccatgttgcccaggctggcctcgaactcttgacctcagatgatccaccagcctcagcctcccaaagtgctgggattacaggcgtgagccacctgcccggcctaacatttcaaaatgctaaaaacaggttcttgtagtcttttccttgggtccagcatcgtttgttgctgactatatcaagcagctaccaagatggcgcagtgaaggtgatgcgcagtggagactgttcccctcgccgctccctggttcctgcagagagtcctgttggcagctcgttggaacaatggttttcccctggagtttgaggagcttgtcttgggtgtggtgcatccctacaccatgtgtacagtttccagactgctatgattttatctctcagcaatgcgccaagaggttttagtgaaaatttaaaaaccgccaaatcgcctatcaaaccgagtttgaaaagagacctcttgggaaaggacaagctaactattctaagtggtctacgatccaaagcatttcctgggctgagtgtttatcaaagctgagctttacttccaaactaagcttgggaaggatctgggagtgtttcccagctgactgggggcggggagaagaggaggatgcgagtgttaaagaacagagaaaatatcactctcttttcttttacacagttatctgctgaaatctgtctatagatatggcttgcaaactaggtgttgttttggaggagagagaggataggtctgctaagtgttaatttagaaattatatacaatatcttaattttattttgggaatggaacattgggtaagattagcttttaaatggatcagctttactcttcaaggttagaaaaatgcatagaaaatagca

SEQ ID NO: 705769 - DNA, 1070 bp, Homo sapiens
tttttcttcttcttcttcttttttttttttgagacagagtctcactctattgcccaggctggagtgcggtggcccgatctcggcttactgcaacctctgcctcccgggttcaagcgattctcctgcctcagcctcctgagtaactgggatcacaggcatgcgccaccatgcccagataattttgtatttttagtagagatggggtttcaccatgttgcccaggctggcctcgaactcttgacctcagatgatccaccagcctcagcctcccaaagtgctgggattacaggcgtgagccacctgcccggcctaacatttcaaaatgctaaaaacaggttcttgtagtcttttccttgggtccagcatcgtttgttgctgactatrtcaagcagctaccaagatggcgcagtgaaggtgatgcgcagtggagactgttcccctcgccgctccctggttcctgcagagagtcctgttggcagctcgttggaacaatggttttcccctggagtttgaggagcttgtcttgggtgtggtgcatccctacaccatgtgtacagtttccagactgctatgattttatctctcagcaatgcgccaagaggttttagtgaaaatttaaaaaccgccaaatcgcctatcaaaccgagtttgaaaagagacctcttgggaaaggacaagctaactattctaagtggtctacgatccaaagcatttcctgggctgagtgtttatcaaagctgagctttacttccaaactaagcttgggaaggatctgggagtgtttcccagctgactgggggcggggagaagaggaggatgcgagtgttaaagaacagagaaaatatcactctcttttcttttacacagttatctgctgaaatctgtctatagatatggcttgcaaactaggtgttgttttggaggagagagaggataggtctgctaagtgttaatttagaaattatatacaatatcttaattttattttgggaatggaacattgggtaagattagcttttaaatggatcagctttactcttcaaggttagaaaaatgcatagaaaatagca

SEQ ID NO: 705770 - DNA, 1064 bp, Homo sapiens
tcattcactgaaaacaacatttaataagcgctttgtgccaggccctggaatggaaatgattgagatccctcctttcatctttggcagcagcaaagacaaggaaataaataatgtgaatagcgttatgaagacactgtgatgggaagacaagaaggagtaactagggagtagatcattctatagaaagaacatgtgtaaagacatgtttgagaggcagaatgcattcagggaaatgtgtttctatggaaggtttggttcaggaacaagaggagactagagcccgatgagaaaaggtcttctatgcaatgttaaggaatttggactttgccctggaggcaatgaggagccaaacactactactttttttttttttttttttggaaagctataaactctggcacgggagtagaaaatgagaaggaatggagagaggcaggaggcaggaagttgacctctttggtggctgtttcaatagtcgagggaggttttacattgctttgctgtcactccacagtatctaacacagggtctawcacataaaagagaacagtaacactgaactgaattgattctaagaagaaaatacctaatttcttacagagtggtttatctgctttctaaggtccgtgcagtaattcctttcccaggatagggggggaaatgccattatcatgtacacgctggcaagaccactgctgtggtttggtctgtccccaccaaaactcatgttaaaatttgatccccactgtggcagcggtgggaggtggggcctatgggcctactgggaggtgtctgggtcatgggggtggagctctcatgaatagattaatgccttcccacgggagtgagttctcactctcacggaatggattcattcccaagagggtgggttgttcagaagagtctggcttccttggtttctctctctggccatgtggtttctttgcacacatcatttccacttctgttttcaacatgagttaaacagtctaaggccctcccagatgcaaatgctcagtcctgaactttccaacccccagaatcatgtgctaataaacctcttt

SEQ ID NO: 705771 - DNA, 1064 bp, Homo sapiens
tcattcactgaaaacaacatttaataagcgctttgtgccaggccctggaatggaaatgattgagatccctcctttcatctttggcagcagcaaagacaaggaaataaataatgtgaatagcgttatgaagacactgtgatgggaagacaagaaggagtaactagggagtagatcattctatagaaagaacatgtgtaaagacatgtttgagaggcagaatgcattcagggaaatgtgtttctatggaaggtttggttcaggaacaagaggagactagagcccgatgagaaaaggtcttctatgcaatgttaaggaatttggactttgccctggaggcaatgaggagccaaacactactactttttttttttttttttttggaaagctataaactctggcacgggagtagaaaatgagaaggaatggagagaggcaggaggcaggaagttgacctctttggtggctgtttcaatagtcgagggaggttttacattgctttgctgtcactccacagtatctaacacagggtctaacacataaaagagaacagtaacactgaactgaattgattctaagaagaaaatacctaatttcttacagagtggtttatctgctttctaaggtccgtgcagtaattcctttcccaggatagggggggaaatgccattatcatgtacacgctggcaagaccactgctgtggtttggtctgtccccaccaaaactcatgttaaaatttgatccccactgtggcagcggtgggaggtggggcctatgggcctactgggaggtgtctgggtcatgggggtggagctctcatgaatagattaatgccttcccacgggagtgagttctcactctcacggaatgkattcattcccaagagggtgggttgttcagaagagtctggcttccttggtttctctctctggccatgtggtttctttgcacacatcatttccacttctgttttcaacatgagttaaacagtctaaggccctcccagatgcaaatgctcagtcctgaactttccaacccccagaatcatgtgctaataaacctcttt

SEQ ID NO: 705772 - DNA, 594 bp, Homo sapiens
ttagaaaattcaaagccaaaatgataggtcaggaatgaaaataagcatcgggtgagagggtattaggcataatgtttgagattggagaccagtatcaaggggatgctgattgcatcctggttctgccactattgggctgtgtgaccttaagacagtttcctgacccctctgtgtttgtctcttcagctttacagcgaggaaaatagtgcctgattcttagggttttggtgaaaattaaagcaattaatgtaaacaaaggtgtcaaaagtgtgcccaccaacacatagtaggtgtacaggaaatttattagctcttgttttttgttgattctgttagatcaggaccaattagcctgggcacaacaaggtggacacaccagtggtttttaacccatgttcattccagttgatcacagctcactgcagcctcaacctcctgggcccaagcaatcctcctgcctctgtctcctgaatagctaggactataagcgtgcattaccacacccagctaattttttattttttattttgtaraaatggggatcccactatgttgcccaaacttgtcctgaactcctgggctcaagtgatcttc

SEQ ID NO: 705773 - DNA, 1242 bp, Homo sapiens
ctcatgacacgattttatggggaatgtttacttgaaaacctttgaagagtattggctctgtatttagaccatgccgaataatctcctataatttacttagattttattttaattattctatttttcctctttttttaaattttattttattattattataatttaagttttagggtacatgcgcacaacgtcgaggttagttacatatgtatacatgtgccacgttggtgtgctgcaccrttaactcgtcatttagcattaggtatatctcctaatgcgattcctccccccgccccccaccccacagcagtccccggtgtgtgatgttccccttcctgtgtccatgtgttctcactgttcaattcccacctatgagtgagagcacgcgatgtttggttttttgtccttgcgatagttttctgagaatattaaaatattactggtatgttttcatctcagtaaaggatatcacgtttatgtcttatatgtttccctcacacagtcaaaaaattagtgttcaatatagttttttattatgaagtcctcatatttttaaggaatcacaaattgtcttatgagaagaatcttttatcctgaagatggaagctttgcgcttttacctcactctgctgctgctgctgggcgtcggatgctgctgttttgtgtctgtgggagggagaaatgaaaaggccagatttatgacaacatgaggcattgagtcagcccacatgaatatcattcgtgccatactctgtcttcttgtcttatggcaagttatatttccagtaaaaacataatactgtaattcagaatgttccccctagatttttggatgatattagacatttgaaaatcttaataaacctttccgtgagctgtgcagtatttatctttcttaaacagcttatgtatcaatttaatgagtatcaatattgaatagaacaggtttagaattttatcatagctacctgaaattcattaaaacatggaaatgtcatatgtactcttagactgttactagacaccctactcaaatgcaaatcttatcaactacaaaatacgtgtggcttttgcatctgacaactgttgaatatatgtttgacaatcatgtttaaagtagattttttattatttacatttaagtttggctttggtagccattacttgaagcattgagatgaactttttgataaacgagttatttaaaactaagtattagtattttgagtgtttgattattaa

SEQ ID NO: 705774 - DNA, 1242 bp, Homo sapiens
ctcatgacacgattttatggggaatgtttacttgaaaacctttgaagagtattggctctgtatttagaccatgccgaataatctcctataatttacttagattttattttaattattctatttttcctctttttttaaattttattttattattattataatttaagttttagggtacatgcgcacaacgtcgaggttagttacatatgtatacatgtgccacgttggtgtgctgcaccgttaactcgtcatttagcattaggtatatctcctaatgcgattcctccccccgccccccaccccacagcagtccccggtgtgtgatgttccccttcctgtgtccatgtgttctcactgttcaattcccacctatgagtgagagcacgcgatgtttggttttttgtccttgcgatagttttctgagaatattaaaatattactggtatgttttcatctcagtaaaggatatcacgtttatgtcttatatgtttccctcacacagtcaaaaaattagtgttcaatatagttttttattatgaagtcctcatatttttaaggaatcacaaattgtcttatgagaagaatcttttatcctgaagatggaagctttgcgcttttacctcactctgctgctgctgctgggcgtcggatgctgctgttttgtgtctgtgggagggagaaatgaaaaggccagatttatgacaacatgaggcattgagtcagcccacatgaatatcattcgtgccatactctgtcttcttgtcttatggcaagttatatttccagtaaaaacataatactgtaattcagaatgttccccctagatttttggatgatattagacatttgaaaatcttaataaacctttccgtgagctgtgcagtatttatctttcttaaacagcttatgtatcaatttaatgagtatcaatattgaatagaacaggtttagaattttatcatagctacctgaaattcattaaaacatggaaatgtcatatgtactcttagactgttactagacaccctactcaaatgcamatcttatcaactacaaaatacgtgtggcttttgcatctgacaactgttgaatatatgtttgacaatcatgtttaaagtagattttttattatttacatttaagtttggctttggtagccattacttgaagcattgagatgaactttttgataaacgagttatttaaaactaagtattagtattttgagtgtttgattattaa

SEQ ID NO: 705775 - DNA, 1062 bp, Homo sapiens
caaaaattctagcgaagcttgtttcactacttgtaaattaggattgaaaagaaaaatgattttattgactgtgattaaatgrtaatacttgactataagtcagactgaactatgtgaaattaaaaaaagattataaaaacaagttataaaacaaattaattattacctattgttagatttttatacatttagattataattgacaaattcaccttaaactaccacatattttaaagtgatatagttgaacatgactggtatttggctcttgccacatgtgactcaccagtggaatttgttgacttccgaatcagtttataacttggtgaatgaaacaagtccatagttcaagaatataagtgatgtaataatttcaaacaccatgaaattgtctaaatagtcattccaaatgtctgtcctcactctggactccacaatatacagtccctggaccagaaccagttttgagactccactttgagcagcacagtcttgtggtcccaggagggcagtgccagggactattccccgggagaaaggtgaaacccatataatgtactgcctttgatcataactcaagatgatttacttcagcagccagtagagatttctgaaagtaagaaaatggaatgaccagtcttaggaatattagtcacacctaagtgtttcagatggtgtgaataatggaaggcaagagtcaagaaaatttaaataatccagagactgggttagaatgatgattctgaatttgagaagaagcagacaacttaaagtaaaatcaaatttaatatggttttaactctgatgtttctattgccatgttttaaatttctaacaacatatctttcttagcaggtcttagtgaaacaaaatatgtgtgtagttatttaaaaatatattttatacaatcctcaaaataaaacaaagatggtgacatctgtctccggtatcaaagcaaagaccatactggcaaaatttgtgggaaaataacatttctagaactgtaaaaatcagccaaagttctgaaagaatctggagcacattaagaaaaacgtctgcata

SEQ ID NO: 705776 - DNA, 1062 bp, Homo sapiens
caaaaattctagcgaagcttgtttcactacttgtaaattaggattgaaaagaaaaatgattttattgactgtgattaaatgataatacttgactataagtcagactgaactatgtgaaattaaaaaaagattataaaaacaagttataaaacaaattaattattacctattgttagatttttatacatttagattataattgacaaattcaccttaaactaccacatattttaaagtgatatagttgaacatgactggtatttggctcttgccacatgtgactcaccagtggaatttgttgacttccgaatcagtttataacttggtgaatgaaacaagtccatagttcaagaatataagtgatgtaataatttcaaacaccatgaaattgtctaaatagtcattccaaatgtctgtcctcactctggactccacaatatacagtccctggaccagaaccagttttgagactccactttgagcagcacagtcttgtggtcccaggagggcagtgccagggactattccccgggagaaaggtgaaacccatataatgtactgcctttgatcataactcaagatgatttacttcagcagccagtagagatttctgaaagtaagaaaatggaatgaccagtcttaggaatattagtcacacctaagtgtttcagatggtgtgaataatggaaggcaagagtcaagaaaatttaaataatccagagactgggttagaatgatgattctgaatttgagaagaagcagacaacttaaagtaaaatcaaatttaatatggttttaactctgatgtttctattgccrtgttttaaatttctaacaacatatctttcttagcaggtcttagtgaaacaaaatatgtgtgtagttatttaaaaatatattttatacaatcctcaaaataaaacaaagatggtgacatctgtctccggtatcaaagcaaagaccatactggcaaaatttgtgggaaaataacatttctagaactgtaaaaatcagccaaagttctgaaagaatctggagcacattaagaaaaacgtctgcata

SEQ ID NO: 705777 - DNA, 2257 bp, Homo sapiens
  misc_feature 1160: n = A,T,C or G
tgtgtgtgcatgtatgtgtgtgtgcacttgtgtgcatatgcacttgtgtctacatgtgtgccttgctgtgtgtgcacacatgtgtgtgtgtgcatgtgtacatgcctatacatgtgtgtgtgcttgcatctgtgtgtgtttagttctttgtttgattagatcatcctatattcgagtgcaggctcttagtgtcctgtctttggggatcctgtgtcagactcccaccttgatgagctacctggctgagccatgaacacctgagctgtagctctctggtctttagcacatagtccagtacgaagtagcttcagtcttttcttaatgatctaaagctttcctttaactttgttttcttttttttcccacccctgaggattttctattttctttaagttaaatgagacatttaatagatttttattttttatgttaaacttttgttttaaagtgagaactttgttcagatattgaattggtcatactgctggaaacatataactaaactttaatttcaaactacaagtcaaatcatataatctaacagatagtcagacacaaagaaaatacataaaattaatacttagggaaggtaaatgagacacctgcagccaaccctcaatttacttagagtattaattagaaactgattcgttcataagtgaatataacaactatgttttctattaactttcattttgtccttatttcaagacagtgtgtttattcattggttgagtggctagcttaatcctggattttaactgtcaatggggaatatgaggattgtgaaataaattatttagaaaaccactataatacaggttttgctaagaatttatccttatgcccacgcggtttttggatgactggcattttagaagcttaaatattttattgcactgatataaaatgtaaatgactaatcattactgcgattaaaccaaaaagaaacatgtatgatgaagacagtatcttaaatctaacagcaattaccacaattatttttcagattcgtcaggtacctgatattcctgcatataacagcatgtggacttttacgcctgggagcgacctggaaattctattatctagctctctcatagtaggtgagtatggtgttaggggagtcgatcatgaagaaatactgacctttctgtgtntggtgatactagattcataaagtatctgagaggcatgcataagctctaagctcatgcatgaaggacaagtagatttggaagacatccacactttcttcagtaaacaactggagtctcagatattttctgagaatcttctgtgcatgtcactttgctatgctgggcttttgtgatgacaacctcagtgttaccagaggctgggaagggtactggggaggtgaggggagggggacactggggatgattaatgggtacaaaaagcagttagaaagaatgagtaagacagtatttgacagcacaacagagtcaataataatttagttgcacactttaaaataactaaagaagtatgttagtgacctactcctttagttgtgatgtttgtgacacaatgcataaatgcttgatgtgatggataccccattcagcctgatgtgaatactacatattgcatgcctgtgtcaaaatatctcatgtaacccttaaatatatgcacctattaggtagcaataaaaactaaaaatggaacatttaaaaacaaaaaaagaaaagacaagatttagttggggtatatggcctcattttctacctggttatgtcctgatttgtaaacacacatgtmaaaatatggactgagaggaagagagtttgtcacaggggacattaagtaaggtttcatggagaaagtggcttgaaagcttaaagatagctacggtggaacacgcatatgaagatagatgggaaggaagaacagtaaaaacagaggaaatagcacacacaaggctcctgggttgaaactgtgcaggagaagtctactggatttctgctagttagattgcccttccccagattaaagcggcactttgatcaggattccgtattccctaacccccaactaccttccccactatgtttctctctctctctctctcctttttttttctttttacatgtactcaattcctcatctatgcattaccctctgttcccatacaacttctcaaattctaatttttgtatttagtcaatgtcattattatgtcagccttaaaattaaattctatttttcaacagcctaccagtgcattatggccagg

SEQ ID NO: 705778 - DNA, 2257 bp, Homo sapiens
  misc_feature 1160: n = A,T,C or G
tgtgtgtgcatgtatgtgtgtgtgcacttgtgtgcatatgcacttgtgtctacatgtgtgccttgctgtgtgtgcacacatgtgtgtgtgtgcatgtgtacatgcctatacatgtgtgtgtgcttgcatctgtgtgtgtttagttctttgtttgattagatcatcctatattcgagtgcaggctcttagtgtcctgtctttggggatcctgtgtcagactcccaccttgatgagctacctggctgagccatgaacacctgagctgtagctctctggtctttagcacatagtccagtacgaagtagcttcagtcttttcttaatgatctaaagctttcctttaactttgttttcttttttttcccacccctgaggattttctattttctttaagttaaatgagacatttaatagatttttattttttatgttaaacttttgttttaaagtgagaactttgttcagatattgaattggtcatactgctggaaacatataactaaactttaatttcaaactacaagtcaaatcatataatctaacagatagtcagacacaaagaaaatacataaaattaatacttagggaaggtaaatgagacacctgcagccaaccctcaatttacttagagtattaattagaaactgattcgttcataagtgaatataacaactatgttttctattaactttcattttgtccttatttcaagacagtgtgtttattcattggttgagtggctagcttaatcctggattttaactgtcaatggggaatatgaggattgtgaaataaattatttagaaaaccactataatacaggttttgctaagaatttatccttatgcccacgcggtttttggatgactggcattttagaagcttaaatattttattgcactgatataaaatgtaaatgactaatcattactgcgattaaaccaaaaagaaacatgtatgatgaagacagtatcttaaatctaacagcaattaccacaattatttttcagattcgtcaggtacctgatattcctgcatataacagcatgtggacttttacgcctgggagcgacctggaaattctattatctagctctctcatagtaggtgagtatggtgttaggggagtcgatcatgaagaaatactgacctttctgtgtntggtgatactagattcataaagtatctgagaggcatgcataagctctaagctcatgcatgaaggacaagtagatttggaagacatccacactttcttcagtaaacaactggagtctcagatattttctgagaatcttctgtgcatgtcactttgctatgctgggcttttgtgatgacaacctcagtgttaccagaggctgggaagggtactggggaggtgaggggagggggacactggggatgattaatgggtacaaaaagcagttagaaagaatgagtaagacagtatttgacagcacaacagagtcaataataatttagttgcacactttaaaataactaaagaagtatgttagtgacctactcctttagttgtgatgtttgtgacacaatgcataaatgcttgatgtgatggataccccattcagcctgatgtgaatactacatattgcatgcctgtgtcaaaatatctcatgtaacccttaaatatatgcacctattaggtagcaataaaaactaaaaatggaacatttaaaaacaaaaaaagaaaagacaagatttagttggggtatatggcctcattttctacctggttatgtcctgatttgtaaacacacatgtcaaaatatggactgagaggaagagagtttgtcacaggggacattaagtaaggtttcatggagaaagtggcttgaaagcttaaagatagctacggtggaacacgcatatgaagatagatgggaaggaagaacagtaaaaacagaggaaatagcacacacaaggctcctgggttgaaactgtgcaggagaagtctactggatttctgctagttagattgcccttccccagattaaagyggcactttgatcaggattccgtattccctaacccccaactaccttccccactatgtttctctctctctctctctcctttttttttctttttacatgtactcaattcctcatctatgcattaccctctgttcccatacaacttctcaaattctaatttttgtatttagtcaatgtcattattatgtcagccttaaaattaaattctatttttcaacagcctaccagtgcattatggccagg

SEQ ID NO: 705779 - DNA, 2257 bp, Homo sapiens
  misc_feature 1160: n = A,T,C or G
tgtgtgtgcatgtatgtgtgtgtgcacttgtgtgcatatgcacttgtgtctacatgtgtgccttgctgtgtgtgcacacatgtgtgtgtgtgcatgtgtacatgcctatacatgtgtgtgtgcttgcatctgtgtgtgtttagttctttgtttgattagatcatcctatattcgagtgcaggctcttagtgtcctgtctttggggatcctgtgtcagactcccaccttgatgagctacctggctgagccatgaacacctgagctgtagctctctggtctttagcacatagtccagtacgaagtagcttcagtcttttcttaatgatctaaagctttcctttaactttgttttcttttttttcccacccctgaggattttctattttctttaagttaaatgagacatttaatagatttttattttttatgttaaacttttgttttaaagtgagaactttgttcagatattgaattggtcatactgctggaaacatataactaaactttaatttcaaactacaagtcaaatcatataatctaacagatagtcagacacaaagaaaatacataaaattaatacttagggaaggtaaatgagacacctgcagccaaccctcaatttacttagagtattaattagaaactgattcgttcataagtgaatataacaactatgttttctattaactttcattttgtccttatttcaagacagtgtgtttattcattggttgagtggctagcttaatcctggattttaactgtcaatggggaatatgaggattgtgaaataaattatttagaaaaccactataatacaggttttgctaagaatttatccttatgcccacgcggtttttggatgactggcattttagaagcttaaatattttattgcactgatataaaatgtaaatgactaatcattactgcgattaaaccaaaaagaaacatgtatgatgaagacagtatcttaaatctaacagcaattaccacaattatttttcagattcgtcaggtacctgatattcctgcatataacagcatgtggacttttacgcctgggagcgacctggaaattctattatctagctctctcatagtaggtgagtatggtgttaggggagtcgatcatgaagaaatactgacctttctgtgtntggtgatactagattcataaagtatctgagaggcatgcataagctctaagctcatgcatgaaggacaagtagatttggaagacatccacactttcttcagtaaacaactggagtctcagatattttctgagaatcttctgtgcatgtcactttgctatgctgggcttttgtgatgacaacctcagtgttaccagaggctgggaagggtactggggaggtgaggggagggggacactggggatgattaatgggtacaaaaagcagttagaaagaatgagtaagacagtatttgacagcacaacagagtcaataataatttagttgcacactttaaaataactaaagaagtatgttagtgacctactcctttagttgtgatgtttgtgacacaatgcataaatgcttgatgtgatggataccccattcagcctgatgtgaatactacatattgcatgcctgtgtcaaaatatctcatgtaacccttaaatatatgcacctattaggtagcaataaaaactaaaaatggaacatttaaaaacaaaaaaagaaaagacaagatttagttggggtatatggcctcattttctacctggttatgtcctgatttgtaaacacacatgtcaaaatatggactgagaggaagagagtttgtcacaggggacattaagtaaggtttcatggagaaagtggcttgaaagcttaaagatagctacggtggaacacgcatatgaagatagatgggaaggaagaacagtaaaaacagaggaaatagcacacacaaggctcctgggttgaaactgtgcaggagaagtctactggatttctgctagttagattgcccttccccagattaaagcggcactttgatcaggattccgtattccctaacccccaactaccttccccactatgtttctctctctctctctctcctttttttttctttttacatgtactcaattcctcatctatgcattaccctctgttcccatacaacttctcaaatyctaatttttgtatttagtcaatgtcattattatgtcagccttaaaattaaattctatttttcaacagcctaccagtgcattatggccagg

SEQ ID NO: 705780 - DNA, 2257 bp, Homo sapiens
  misc_feature 1160: n = A,T,C or G
tgtgtgtgcatgtatgtgtgtgtgcacttgtgtgcatatgcacttgtgtctacatgtgtgccttgctgtgtgtgcacacatgtgtgtgtgtgcatgtgtacatgcctatacatgtgtgtgtgcttgcatctgtgtgtgtttagttctttgtttgattagatcatcctatattcgagtgcaggctcttagtgtcctgtctttggggatcctgtgtcagactcccaccttgatgagctacctggctgagccatgaacacctgagctgtagctctctggtctttagcacatagtccagtacgaagtagcttcagtcttttcttaatgatctaaagctttcctttaactttgttttcttttttttcccacccctgaggattttctattttctttaagttaaatgagacatttaatagatttttattttttatgttaaacttttgttttaaagtgagaactttgttcagatattgaattggtcatactgctggaaacatataactaaactttaatttcaaactacaagtcaaatcatataatctaacagatagtcagacacaaagaaaatacataaaattaatacttagggaaggtaaatgagacacctgcagccaaccctcaatttacttagagtattaattagaaactgattcgttcataagtgaatataacaactatgttttctattaactttcattttgtccttatttcaagacagtgtgtttattcattggttgagtggctagcttaatcctggattttaactgtcaatggggaatatgaggattgtgaaataaattatttagaaaaccactataatacaggttttgctaagaatttatccttatgcccacgcggtttttggatgactggcattttagaagcttaaatattttattgcactgatataaaatgtaaatgactaatcattactgcgattaaaccaaaaagaaacatgtatgatgaagacagtatcttaaatctaacagcaattaccacaattatttttcagattcgtcaggtacctgatattcctgcatataacagcatgtggacttttacgcctgggagcgacctggaaattctattatctagctctctcatagtaggtgagtatggtgttaggggagtcgatcatgaagaaatactgacctttctgtgtntggtgatactagattcataaagtatctgagaggcatgcataagctctaagctcatgcatgaaggacaagtagatttggaagacatccacactttcttcagtaaacaactggagtctcagatattttctgagaatcttctgtgcatgtcactttgctatgctgggcttttgtgatgacaacctcagtgttaccagaggctgggaagggtactggggaggtgaggggagggggacactggggatgattaatgggtacaaaaagcagttagaaagaatgagtaagacagtatttgacagcacaacagagtcaataataatttagttgcacactttaaaataactaaagaagtatgttagtgacctactcctttagttgtgatgtttgtgacacaatgcataaatgcttgatgtgatggataccccattcagcctgatgtgaatactacatattgcatgcctgtgtcaaaatatctcatgtaacccttaaatatatgcacctattaggtagcaataaaaactaaaaatggaacatttaaaaacaaaaaaagaaaagacaagatttagttggggtatatggcctcattttctacctggttatgtcctgatttgtaaacacacatgtcaaaatatggactgagaggaagagagtttgtcacaggggacattaagtaaggtttcatggagaaagtggcttgaaagcttaaagatagctacggtggaacacgcatatgaagatagatgggaaggaagaacagtaaaaacagaggaaatagcacacacaaggctcctgggttgaaactgtgcaggagaagtctactggatttctgctagttagattgcccttccccagattaaagcggcactttgatcaggattccgtattccctaacccccaactaccttccccactatgtttctctctctctctctctcctttttttttctttttacatgtactcaattcctcatctatgcattaccctctgttcccatacaacttctcaaattctaatttttgtatttagtcaatgtcattattatgycagccttaaaattaaattctatttttcaacagcctaccagtgcattatggccagg

SEQ ID NO: 705781 - DNA, 720 bp, Homo sapiens
cttcaaaaagttattatgtatcctattgtctaatttatttttgctcttaaatgattcaggatccctaatatgaacataatatgtcacagatcatgcagacagtagacaagcattatttttctcttcgaattatctttgtaataaccgtagctattattttaacctgaaagatactaaaaatttttacattatagggaatgcgtgaattggggtagtcaggaattgaagctacacagtaattaaaagagaaaagttttaatataaacattattaactatatacaggggattaaatactgagaaaagataggacagaacaccaaaaaaaatgccttaggactgagaggaatatccaagtatgaaacaaacttggaaggcacttcccgccatgctgggattcatgcctcactggggaaggtgtatttgaagaccacagattgcagaaagctcactggatttcccaagacttccccaggcatccctccctgggttccccttaagctgacatgagctggcaggcaggcctggtaagctggaagccttcyctcggagtacaggtggactgaggctggttatatcaaaccaatgggctagaggggcaaggacgaaaccctatgccaagatataggctggctgagattggcaagcagacagagctcacatcttcagaggaagtcacaactctgggaaagaactggcaagttgaaaagtgagtgtcact

SEQ ID NO: 705782 - DNA, 600 bp, Homo sapiens
caaatccctctatataacactgttattatcaaatacatcgttccttcacccaaagtggcaaagttgtagttttacttatttttggatgcttccacaatctgattaatggctacctttccttctgataactcagtttcaagatggcagtaataatgtctttgttcatcattatatcaacatttttaatactatgcctagttcatagtaagacctaagtaaattgttgttgcttaaaaaaarataggtgaatgaataaagtgattattattattattaatttcaaattaagcctctagagtttatctctttcaaaatatctctaacttttgccttaggtgatattaaaataaaatattacatattaataattttgctcctgtgaatgtaagatctaaaaaattggattcaattagatttaccaccgagtttctgcaggtggtaagaaaggctgttgaaagaactacacagtggaatattgcttagcctttaagaagcaggaaactctgccatttgcagcagcatggctgaacctagaggacattctgccaagtaaaataagccaggcacagaaagacatataccacacaatatcacttctgt

SEQ ID NO: 705783 - DNA, 1601 bp, Homo sapiens
ttcaaggtagcgattcaccctctgattctctggactagagtcatcctgtggaagctctgcctccctcctctggtctctctctttcccgcatccactttcctcaaacacgtgtcacctctgtttcattctctggccacctacccccaccatcctttcttggctcagatctgaagtactccagactaccagattacgtaaaaattcaaaggcatgagaaaatggcaagcatggaaacaaattcttggtagagatgagtggcaacctcaaaaagaagcctcctctccccataaattcctcagtgccccatcaatctccatcaatccatacaagaccagcctcactctgaccacccgggtcttccacatactattgttttctgcawcttgaacaaaataatggattgtagttgatattctccaggggatttgactaccctcacataaaatctctagttaaaaagagctgatttaagtcatacatacaaaaacagcatgatagcatgcaatgtttatcaaacctgagtggaaaaggattgcctggaaggctttttgaaaattgtatccattctcatctctactgatggtgcctgagtaggtctgggcagaattcttggagtgtcaggggattcctgaaggaggtcaacaggaatctcactggcgaaagaagaactgactttggatttagacagaccttggttcagaccttacctttgccatatgcaaacattagaattttgaaagaattgctcattttaatttgacttttcatttcattttgaaaataaaaacttcccttttcattttattttgactttcagttttttctcttagaaaacaaatcaaaatgaaacctacctcaaggcattgttgccagacccaaataaaatcaattacatttcatgaaataaaataatcatcctatgttggttttcaaataaatggaaagttgcttttttcacgtcagagtgaatattttataaaagtataattacacataaaggaaaatataatacattgagaaagtggttgttttatttagtttgagaattacatgctattaatgtatttgtatcattagaaattttgcagagatccctacagaaaataattataacaatttccttttatttcaacttcgacaatgtggtagcaggtatcctgaaggtgctgcctctgacacctcctggaaattctgtgtgcatgactagaagcattatttgaatgcttggctgagttccggagagggactctgagcagccagagggaagaacaaagtgtcgggagatactgggaggacacaggaatgcaggggacaggaatgcttttccaatttgtgcattggggaattgggggcaatcaccacaggagacaaaagttgggtgcttgaatccttgggtcagaaatcaaaacttactcccaccttctgctccacctacccaactaagcctggccctggctgggctacaccctcactgaaaagtatgcaagaaaaaaacctgcctactagctcagagggctggaatgaatcccaggctgtgtctacgtgggtgtcagcggggattgagtaaaatacaggcggcgggaacttccctgaacatttgt

SEQ ID NO: 705784 - DNA, 615 bp, Homo sapiens
atcggaatgttcctaacacaagcaaatgctaaatgcttcaaatgctggatacaccaattaccctgtgatgattacattacccattgtacgactatcaaaacattacatataccacataaatacatatagctattatgtgcctataataattaaaacttaaaaataaatgaatgaataaacaaatcaataaaaaggaaacaaagaatagctgtttcacttttcatctccagtgtaagcctgggcctggaatggtagagaaaacagaaagcctctgcgctccgcttatagaaaaattatgtaacttgattacaaagattagttataaaattctggaatttggccgrgggcggtggcttattttgtaattccagcactttgggaggctgaggtgggtggatcacctaaggtcaggagttcaggaccagcctggccaacacagtgaaacctcatctctactaaaaatacaaaaattagctgagcatggtggcaggtgcctttaatcccagctactcaggaggctgaagcaggagaatcacttgaacccaggaggtggaggttgcagtgagccgagatcgcccattgcactccagcctgagcaaaacttcgtctgaaaaa

SEQ ID NO: 705785 - DNA, 1154 bp, Homo sapiens
tgttgaacagagattttactgtggccaatacaacaggatatgttttgctgagatgatctttaattcactcaaggaaaaattctagaagttaggyctgttgaaaaccttctgtttaaccaattatgtatatattttatataatacctaatacttcccaatactcagcaatagaatttatttcttttgccaacattatcttccaaaaagataccaggttgatgttttttcaaagcacttgtatatctgatgataatgtaaaacaatttgactaactgtaattcttagacctcaaatttcctactccaaaattctagagctgtgctggataagctttttagcacttaacgttgaggcaaagtataagtctagtgttgtttgcctttgtaggtgatcatcggatgactcacgcaaactaaataaatgcatatacgatttttcttttattaaaacaccaacagaatcagtttgggtatggatctggtaaacattttggagtctcatctttacatatgcaggtctttataaacccttgggtctgggtctcccaaatgatgcccagtgtcactaattgctggcacagtccccacccagcacctctgtgtccccttttttctgtacctaggaccatctcccttttcatttaccttcctgtggctcattccccttctcgacattcagtgctctgctatcccacacaggttgaccctgattgcatgatctaaagggagtttccagagtctcccttaacactttaccttgttttatttactttaaagcatttgtcactatctcacaatatcctatttcttcagttgtttgcttgtttatgatgtttcttctcctattagaaataaaaccccatgacagcaggatacttttgtgttactcattaagttcttccctacagcctaacactatgcctggaagatagaaattgcctcatgtatattttcaaatgaatgaatgaatggagaaatgaatggacggatagttgatatcctgcacagaaatgccaaacattttttgattgagatttttgatccctgccagccatcatcaatccctgtcctctcatcttgtttacctctcggttcttttcttcctatattccaggttgcatgggcttgatccacaatgactcagctttcagccat

SEQ ID NO: 705786 - DNA, 638 bp, Homo sapiens
tccgcaggcggctcggattggcacttagattggcaacggtgtccaggtacaaactgcagacctggagcgcccacaggctggatggtactaggggacaggtgtgcgcccaggtctgtgtggccgtgcgcgagactgctcgtgggcagcgtgggaataggggcaccgagtgtgcctttcacaatttccctgctgagctggatgtcggccacagaactattgtgtgccagctccgagcccacccatcacagcgggcgcgtgactccggcatgggggctgcacactacatttcccagaattcatggctgccagcttcctgctaggctggaccaataggaagtaccagggctgtaagctttcaggggcgtggacgcgattagcatttgatgacgcttagggaccccttctcagaatcaaggttaaaaaaaattgtagtaaaagatacataacataaagtttaccattgtaacatttttttttttttttagatggagtctccctctgtcgcccaggctggagtgcagtggygtgatctcggttcactgcaacctctgcctcccgggttccagtgattctcctgcttcagcctcccgagtagctgggattacaggtgcaggccaccacacccggctagtttttcg

SEQ ID NO: 705787 - DNA, 638 bp, Homo sapiens
tccgcaggcggctcggattggcacttagattggcaacggtgtccaggtacaaactgcagacctggagcgcccacaggctggatggtactaggggacaggtgtgcgcccaggtctgtgtggccgtgcgcgagactgctcgtgggcagcgtgggaataggggcaccgagtgtgcctttcacaatttccctgctgagctggatgtcggccacagaactattgtgtgccagctccgagcccacccatcacagcgggcgcgtgactccggcatgggggctgcacactacatttcccagaattcatggctgccagcttcctgctaggctggaccaataggaagtaccagggctgtaagctttcaggggcgtggacgcgattagcatttgatgacgcttagggaccccttctcagaatcaaggttaaaaaaaattgtagtaaaagatacataacataaagtttaccattgtaacatttttttttttttttagatggagtctccctctgtcgcccaggctggagtgcagtggcgtgatctcggttcactgcaacctctgcctcccgggttccagtgattctcctgcytcagcctcccgagtagctgggattacaggtgcaggccaccacacccggctagtttttcg

SEQ ID NO: 705788 - DNA, 1027 bp, Homo sapiens
ggctgctgcactgccatgtgwgcacatgtgagcacgtgtgtgtgtgtgtttttgcacaacccctggctgggctgtgctccatgcttctccgttgcagaatctggcagagaaacgtccctgagaagcagctccccctttgcaggctgcacagctccctcctgtgagtgcacacacagtgtggacagacccggcaggtgctgtatttcaggtaaagagacttggagaccccacagtttaccctctcatttcacaaataagagaatgaagaccaggagaggtgaagtaagagcagtacataataatccgagcttccatgtttggactctacccggatgccaggaacctcagttcctggcactcacacgtgttcacaggtgccctgcggagggcagttcccacctggctttgcagacaggaaagagaggctcagagaagcaaagtgacctgctcaaggtcacaccacctgtgggtggaagagatctggggtccaggggatctgacttgaggctggagctccaatgtcctcagcaaggtcaccaggacatgggtgacagccaggaccctgctcccctccccttttgtgccatggcctggctgaggctggctcactcctgcagggctggactggagcctgagagaggggtggcaggccctgagcatccctgggggcctggaggctggggccagggcttgccttctggctgctgctctgctgccctcactgaggggctttgatttgctgttaacacccaaagttgagcagagcctcatgaatcattcatgaaggtgctccagcgagatcattattttgagtgttgagtgtcaggaaaacagcgtctgatgggtaaacatgatgtctgatgacagaacagccgatggggtgacccagcagccgggcacctgccatgctgtggggaatttttaaacattaaaaaaaaatccaacccaggctcaaggatgagcaagccggctcatcataaacccctgtctgtggctaggaggccaggaggcaaggcacaggcggcag

SEQ ID NO: 705789 - DNA, 1027 bp, Homo sapiens
ggctgctgcactgccatgtgagcacatgtgagcacgtgtgtgtgtgtgtttttgcacaacccctggctgggctgtgctccatgcttctccgttgcagaatctggcagagaaacgtccctgagaagcagctccccctttgcaggctgcacagctccctcctgtgagtgcacacacagtgtggacagacccggcaggtgctgtatttcaggtaaagagacttggagaccccacagtttaccctctcatttcacaaataagagaatgaagaccaggagaggtgaagtaagagcagtacataataatccgagcttccrtgtttggactctacccggatgccaggaacctcagttcctggcactcacacgtgttcacaggtgccctgcggagggcagttcccacctggctttgcagacaggaaagagaggctcagagaagcaaagtgacctgctcaaggtcacaccacctgtgggtggaagagatctggggtccaggggatctgacttgaggctggagctccaatgtcctcagcaaggtcaccaggacatgggtgacagccaggaccctgctcccctccccttttgtgccatggcctggctgaggctggctcactcctgcagggctggactggagcctgagagaggggtggcaggccctgagcatccctgggggcctggaggctggggccagggcttgccttctggctgctgctctgctgccctcactgaggggctttgatttgctgttaacacccaaagttgagcagagcctcatgaatcattcatgaaggtgctccagcgagatcattattttgagtgttgagtgtcaggaaaacagcgtctgatgggtaaacatgatgtctgatgacagaacagccgatggggtgacccagcagccgggcacctgccatgctgtggggaatttttaaacattaaaaaaaaatccaacccaggctcaaggatgagcaagccggctcatcataaacccctgtctgtggctaggaggccaggaggcaaggcacaggcggcag

SEQ ID NO: 705790 - DNA, 598 bp, Homo sapiens
tgccaacaaagaggaaatgtattttaaatatacatagaatattttaaatttacatwgatgcacaattgatttgcagagacaggtattcatacttttaaaatgaggaagaacatatattaaaaaatgacagcataaataacatcttgactatatgatagaacttctaaagaccattcctatttattttttgagtgagtggttcaaagggcatatctcaaaaatatagtcagtctattgaatatgctgacattattacctgaactgaaatatcatgattttaattttgaagttttcttattaaactatgctgaaagcattggctagccaaacttgtaattttttctggcacatgatgatttttttgcttacaaacacatatttagaatatgttaagaaacatttaaattccataagaaaacatgaaaaaatgattttatgagctgaatagaatgaggaagcaataggaacataatgatgctatctcctagattgaaacagtcaacctctttgccgtacctccactctcatcccagctgttaaatatgatatattagtaaaggactcatctttgaaagagctaaaatctctctttactgaa

SEQ ID NO: 705791 - DNA, 653 bp, Homo sapiens
aaatataataggaatttttttcctcagaatgtattattagtgtgtgtgccttggccataatgtgatctgcttaattatatgttttaataggattataattctcgctttgtatgcgctagaaccatagctttgaaaatgtttgagtaaaaaatagttaattaacttcctataattccaagtgtattataggaagacattgaggaataacaatgtaccccatgtttgttttgttttgttttgttttgttttgttttgttttgagataggatcttgctactctgtcacttgggctggaatgaagtggcctgataatggctcacttgcagccacgatctctgctgggctcaaagatcctctcacctcagcctcctgagtaactaggaccacatgtatgcacccctttacctggctaatttttcttttattttttgtagagacgggatcttgctatgttgctcaggctggtctcaaacttctgggctcaagtgatctccccgctttggcttccaaaagtgcagggattacaggtgtgaaccaccatgyccagcccttgtgttctaattctttaaaggttacaggtatgatttgacttcttatgggttgttttgctgataatttctttcaatacataatgaaattatttaaatgagaaa

SEQ ID NO: 705792 - DNA, 613 bp, Homo sapiens
ttgttgtttagaagtgatacaaaatcttttttgctccctatcctgtttttctatccatttgtatttttggaatgtatgattgttagcccatatttcatttktatcttctatcttgtctgctattttgtcatgcattgtgttagaaattataatattcataaatactagtgtgcaagttgaattaataccgttactaccttttaagaaaataaaaacaaaaacagtgcactttaattctatccacttttctctcattttgttattttgttatgcattttaatgtcatcttttatgaatttattaactataataataaacaattagaataccatttattaagagttagataatatctaatttgcttatttttatgcaacttgtttatattttaaaaccagttgaacaatttcatgccttctcacatctcagactttctattttaaaatacttttctcatctgagaagaatgtttttagaattttctttgatgggtttctgctaatagcacacttagctactttttttttgtcaaaattagtttgttttaccctctacttaaaaaataaaagataaaaccaaaagcaatgtactggacacacagttcaaggttggc

SEQ ID NO: 705793 - DNA, 619 bp, Homo sapiens
tagattccacatttaaataagatcatgccrtgtttgtctttccatgcttgactgatttcattaacatgatgttcattcaggttgtcacaaactatgggatttccttccttttatggctgaataacaatctggttgtgtgtatataccatgagataatacattttttaattagctaagtttatgtatttaccacatatgtgtacttcaaaacattacgtggtacgtgataaaaacaaacaattgtatatgtcaatttaaaaataaataaatgtgaaaaaatacatatgagagctatatagaaaacatgtgtattttattttggtttttaactagaagttttgagaaacttaaagagcttccacaatgttttctgcaaataggaacaaaatgtgggagagttgaggaatatatcgagtatatggtagagattgcagaatactatgaaacagaaggccgaacagggacacacacatcttttattcagataaaaccactaagtgatttagaagtacaattggttgatcaagtaacttttaaagatattgcactttatgtggcaagaactggagttagcatcccgtcacttgaatacatagatgaaaacttaagaacaagataa

SEQ ID NO: 705794 - DNA, 455 bp, Homo sapiens
tatggggggctccagggaataaagcaggagaaacatctgtccctgggctgagggaagtgggcagccggtggcacctcagcacagagggatgggagtgttttccttccaccttgtcttgcttctggctccctggttagctccagctctggatcctgcctctcaagctggtgggtcttctggaatccctgaccagctctttcccaaaagcacccacagtaggacaccccagtgtgtttctgggagacatgtataggctgtcctgggagataacttttcctgatgtttaacttggtcctttttgataccatctgrccatcttcccttttgtgctggtatcttgggaaggagagagccttatgactggaaccctcagatgcccctcttcctgaaggccaaggggagaacagatgttccactgagtagaggaaagctcagacacaggtggtggaagaaaa

SEQ ID NO: 705795 - DNA, 2597 bp, Homo sapiens
tgagctatttgtgaatactactcttcctccttcatatatatataatatatacatatatttttaattaagaaaagaacttaattttttctttcccgaatttaattttttaattgacacataataattgtacatattcatagggtgcatagtgatgtttcaatcatatggtgatcaaattagggtaattagcatattcaaaattttaaacatgtgtcatatctttgtgttgggaacattcaatatcctccatctagctatttgaaattatacaacatattattgaagcagcgtcactgtctggggtaaatacgggaggttcattgcctcatgccaaggaaatcaaggactcagacacatatggattgaggttaagagcagaggtttaacaggcaaaagaaaaagaaaaaagaataactctctctcccttgagagagaggagtgactgaatgggaattccagcccacaagggagtgcactagattttatagacaggcttgaggaagtggtgtctgatttacataaggcccacagattggttggaccaggcatgatgcttacatagcagcagaggaagttggccactccatcctaatcctcttactatgcaaatggtgtctttgcttggccatggccatcttgtttgctccttactatacacgaggctggcaaagagaagagaagatggagccgccattttaaacgtgcctagttcccgggtagcttctttcctatcggcgcaactgccagcattcccccgtgcaagcttctagcattcctttctatgtctgcaactcgattttacaggctgctctttgttagaaaagaaagttatttcggggctgcttttcattaaaaggaaagccttactgagggcttccttgccctcactatctgcctaaataatttctttttaacttctatatcattattgttaactaaactatagaccctccagtgctataggagagattttttaaagaatacaaaattacagctaaatagaaggaataagttctagtgttctatatatatttcaaatttccctttgactttctttccctcactattgcatataacttcaccatttgccagtgatatatttagccaatataccagaacaagatcatggtggaaattaaggacaatgaataccacttagaaatcttggaattgaatctggaaaatgttcttaggggtaggatgacgattttatttttacagggaatgtttgcattatgtcaggtgggaagttttttgaaagcatacttttaggactaaagatgaggatagatgtaggggtaaaccttcatgaatttcttctccactatatgtacccttcctaggactgtttaacttctggttacagtgtgttctcatgaccgaagaaaggtaggcctactgggttstctctcttctaggaacttaaatcttcagcagaataatgtaaagactgaaagacagttagagcctattaattgcatttttgtattttgatggtgttctcatgaattgaatcattgtgcttgctggagtcaagaggttccaagttatgtgggaccacagcttatacagtttggagggtccacttgaaaacaaaagaatgcaaaataacaaaaattacttggaagtaattggaagaattacttggaagaacttgaaacttcagtttcattactgcatagtaaatgcacctcctacccttttctacgatctattctttcctgagaattcccatagattatctgaactgaacgttcagaaaacttaaatttctacttaagttaatcagagtcaatttcagttgccataaccaaaactccttaactaatgaaaatagtcaccattttattgttttaatgaaaatagtgctgtagaccgaattgaataacaattacagctacttgggccccattttcttattttttaatgcattcatctggaatatacacattattttccaatgtttctaatttcactgttgaatattattaaaaatggtcgatgaatatacccatttatttcattgtaaagcttttgagacttgcatcattggtatagttacactgatatttctccctctacaattctttagcaaactttttgatcatgtatgcagtttttatttttttaattccacatttttattctattatctaaactctgttctaagactacacaggtactccagcttatttttatagcaaatgcccatgtaaatattaagttactacaaacattaattaaatgattgcactgtattagtttcattatattgcctagaactttttcttttttctgtgaactctgcagagaagtagaacatttttataacagaaatacatcatttaaaatatatgaataaagtacaaagtaaaaatagtgagaatttttttaaatttgaaactaaattttagaaaaggttcaacatatagctttaatattctgaactgattttcttacaaagatcagttttgtatttttgtttatatgtttattattatatcccataccttgacagaaatctgcaatcaaagcacttttggagataatgtcctactgagttcagaacacctttacagtctccaaaatataagcta

SEQ ID NO: 705796 - DNA, 2597 bp, Homo sapiens
tgagctatttgtgaatactactcttcctccttcatatatatataatatatacatatatttttaattaagaaaagaacttaattttttctttcccgaatttaattttttaattgacacataataattgtacatattcatagggtgcatagtgatgtttcaatcatatggtgatcaaattagggtaattagcatattcaaaattttaaacatgtgtcatatctttgtgttgggaacattcaatatcctccatctagctatttgaaattatacaacatattattgaagcagcgtcactgtctggggtaaatacgggaggttcattgcctcatgccaaggaaatcaaggactcagacacatatggattgaggttaagagcagaggtttaacaggcaaaagaaaaagaaaaaagaataactctctctcccttgagagagaggagtgactgaatgggaattccagcccacaagggagtgcactagattttatagacaggcttgaggaagtggtgtctgatttacataaggcccacagattggttggaccaggcatgatgcttacatagcagcagaggaagttggccactccatcctaatcctcttactatgcaaatggtgtctttgcttggccatggccatcttgtttgctccttactatacacgaggctggcaaagagaagagaagatggagccgccattttaaacgtgcctagttcccgggtagcttctttcctatcggcgcaactgccagcattcccccgtgcaagcttctagcattcctttctatgtctgcaactcgattttacaggctgctctttgttagaaaagaaagttatttcggggctgcttttcattaaaaggaaagccttactgagggcttccttgccctcactatctgcctaaataatttctttttaacttctatatcattattgttaactaaactatagaccctccagtgctataggagagattttttaaagaatacaaaattacagctaaatagaaggaataagttctagtgttctatatatatttcaaatttccctttgactttctttccctcactattgcatataacttcaccatttgccagtgatatatttagccaatataccagaacaagatcatggtggaaattaaggacaatgaataccacttagaaatcttggaattgaatctggaaaatgttcttaggggtaggatgacgattttatttttacagggaatgtttgcattatgtcaggtgggaagttttttgaaagcatacttttaggactaaagatgaggatagatgtaggggtaaaccttcatgaatttcttctccactatatgtacccttcctaggactgtttaacttctggttacagtgtgttctcatgaccgaagaaaggtaggcctactgggttctctctcttctaggaacttaaatcttcagcagaataatgtaaagactgaaagacagttagagcctattaattgcatttttgtattttgatggtgttctcatgaattgaatcattgtgcttgctggagtcaagaggttccaagttatgtgggaccacagcttatacagtttggagggtccacttgaaaacaaaagaatgcaaaataacaaaaattacttggaagtaattggaagaattacttggaagaacttgaaacttcagtttcattactgcatagtaaatgcacctcctacccttttctacgatctattctttcctgagaattcccatagattatctgaactgaacgttcagaaaacttaaatttctacttaagttaatcagagtcaatttcagttgccataaccaaaactccttaactaatgaaaatagtcaccattttattgttttaatgaaaatagtgctgtagaccgaattgaataacaattacagctacttgggccccattttcttattttttaatgcattcatctggaatatacacattattttccaatgtttctaatttcactgttgaatattattaaaaatggtcgatgaatatacccatttatttcattgtaaagcttttgagacttgcatcattggtatagttacactgatatttctccctctacaattctttagcaaamtttttgatcatgtatgcagtttttatttttttaattccacatttttattctattatctaaactctgttctaagactacacaggtactccagcttatttttatagcaaatgcccatgtaaatattaagttactacaaacattaattaaatgattgcactgtattagtttcattatattgcctagaactttttcttttttctgtgaactctgcagagaagtagaacatttttataacagaaatacatcatttaaaatatatgaataaagtacaaagtaaaaatagtgagaatttttttaaatttgaaactaaattttagaaaaggttcaacatatagctttaatattctgaactgattttcttacaaagatcagttttgtatttttgtttatatgtttattattatatcccataccttgacagaaatctgcaatcaaagcacttttggagataatgtcctactgagttcagaacacctttacagtctccaaaatataagcta

SEQ ID NO: 705797 - DNA, 2597 bp, Homo sapiens
tgagctatttgtgaatactactcttcctccttcatatatatataatatatacatatatttttaattaagaaaagaacttaattttttctttcccgaatttaattttttaattgacacataataattgtacatattcatagggtgcatagtgatgtttcaatcatatggtgatcaaattagggtaattagcatattcaaaattttaaacatgtgtcatatctttgtgttgggaacattcaatatcctccatctagctatttgaaattatacaacatattattgaagcagcgtcactgtctggggtaaatacgggaggttcattgcctcatgccaaggaaatcaaggactcagacacatatggattgaggttaagagcagaggtttaacaggcaaaagaaaaagaaaaaagaataactctctctcccttgagagagaggagtgactgaatgggaattccagcccacaagggagtgcactagattttatagacaggcttgaggaagtggtgtctgatttacataaggcccacagattggttggaccaggcatgatgcttacatagcagcagaggaagttggccactccatcctaatcctcttactatgcaaatggtgtctttgcttggccatggccatcttgtttgctccttactatacacgaggctggcaaagagaagagaagatggagccgccattttaaacgtgcctagttcccgggtagcttctttcctatcggcgcaactgccagcattcccccgtgcaagcttctagcattcctttctatgtctgcaactcgattttacaggctgctctttgttagaaaagaaagttatttcggggctgcttttcattaaaaggaaagccttactgagggcttccttgccctcactatctgcctaaataatttctttttaacttctatatcattattgttaactaaactatagaccctccagtgctataggagagattttttaaagaatacaaaattacagctaaatagaaggaataagttctagtgttctatatatatttcaaatttccctttgactttctttccctcactattgcatataacttcaccatttgccagtgatatatttagccaatataccagaacaagatcatggtggaaattaaggacaatgaataccacttagaaatcttggaattgaatctggaaaatgttcttaggggtaggatgacgattttatttttacagggaatgtttgcattatgtcaggtgggaagttttttgaaagcatacttttaggactaaagatgaggatagatgtaggggtaaaccttcatgaatttcttctccactatatgtacccttcctaggactgtttaacttctggttacagtgtgttctcatgaccgaagaaaggtaggcctactgggttctctctcttctaggaacttaaatcttcagcagaataatgtaaagactgaaagacagttagagcctattaattgcatttttgtattttgatggtgttctcatgaattgaatcattgtgcttgctggagtcaagaggttccaagttatgtgggaccacagcttatacagtttggagggtccacttgaaaacaaaagaatgcaaaataacaaaaattacttggaagtaattggaagaattacttggaagaacttgaaacttcagtttcattactgcatagtaaatgcacctcctacccttttctacgatctattctttcctgagaattcccatagattatctgaactgaacgttcagaaaacttaaatttctacttaagttaatcagagtcaatttcagttgccataaccaaaactccttaactaatgaaaatagtcaccattttattgttttaatgaaaatagtgctgtagaccgaattgaataacaattacagctacttgggccccattttcttattttttaatgcattcatctggaatatacacattattttccaatgtttctaatttcactgttgaatattattaaaaatggtcgatgaatatacccatttatttcattgtaaagcttttgagacttgcatcattggtatagttacactgatatttctccctctacaattctttagcaaactttttgatcatgtatgcagtttttatttttttaattccacatttttattctattatctaaactctgttctaagactacacaggtactscagcttatttttatagcaaatgcccatgtaaatattaagttactacaaacattaattaaatgattgcactgtattagtttcattatattgcctagaactttttcttttttctgtgaactctgcagagaagtagaacatttttataacagaaatacatcatttaaaatatatgaataaagtacaaagtaaaaatagtgagaatttttttaaatttgaaactaaattttagaaaaggttcaacatatagctttaatattctgaactgattttcttacaaagatcagttttgtatttttgtttatatgtttattattatatcccataccttgacagaaatctgcaatcaaagcacttttggagataatgtcctactgagttcagaacacctttacagtctccaaaatataagcta

SEQ ID NO: 705798 - DNA, 621 bp, Homo sapiens
ggtaaatgttaatgtaactaacccacagttcacctaaaaatatgataaaccaaattgggttcaaccatattgtacactttcataacccattgatatttttttccatgactgtatcttttaaattttaaaggaattgtctgctttattcacatttttatctgaaaatcttttttcaacttttaagttccgggttgtatgtgcaggatgtgcaagtttgttacataggtaaatgtgtgccatggtggtttgctgcacttatcaacccatcccctaggtattaagccctgggtccattagctattcttcctaataccctccctccccacccctaatatgccccagtgtgtgttgtctacccccgygtatccatgtgttctctcgttttccttccacttgtaagtgagaacatgtggtgtttggttttctgttcctgcattactttgctgaggataatggcttccaacttcatccatgttcctgcaaaggacataatctcattcctttgtatggctgcacagtattccatggtgtatatgtaccacattgttttttatccagtctatcactgatgggtatttgggttgattccttgtctttgctattgtggttagtgctgcagtg

SEQ ID NO: 705799 - DNA, 603 bp, Homo sapiens
tgtaaaacacatcctaaagcaataaggaagtaattctgccaagaaaattagctaacaatttaaaacagcttcaaatgagattcttaccttatagactatatcagctaaattatttttattaataatgttagtattaataacaatatttttacttactatgagacaattattaagccatttatcagagtaagaaactgaaaaatttgcaaaggttggttaaataacttacccgaagtcaagaactaaaaggagagctagaattaaataaatatcttaatataaataggcaaataaattgataaaaggtaaaaaaaatagtgtggataagaatgttttaagcattaaggaaagagattgctatcaaatgaaaatatttgtagatttaattccagaagaatttaaaatttctgacagtgaaaatttataaccaaaagcagccatttctgaaagtatggcaaacaagctattgtgaaaagttgtrtacattactccaagcaattttaattgcactgctaaactcataaagctaggaaggaagaaagggaggaaggtaggaagggaggaggagaggcagggaaggagggaagaaggaaagccaaagac

SEQ ID NO: 705800 - DNA, 575 bp, Homo sapiens
tttgttcttactttccttaagttatactcatgttctctattgtcttacagttgtcagtgtgcatgtcaatttttcatacaagaatataagttctgtgaggatatgaattatattattcctatttttactgcctcactcgtgctacaacagagccttgcataaaataggtgtttaatataaaatgttctctcagcaatccaatggaaaactgagttggctgtgggggttggtgtatgttggttttgtccaagattcctagccaattattttcctgtagttgagtccctgactgcctctcctgttttacctacaccctcactcagccctaatgtctcaccctcaagccccacagaactacatacagctgcctgaaattgcaataatatttcatgacactgtgctttcattagcattgtcttgagtgtttttcttattgctttcagcttgtcagtcccccattaatccttcaacacggtttacatgttaccttctttcaaagcttttcctgacccccttactactcaccctctactatccatcctggaagaactggcscctcttctctctgccctgta

SEQ ID NO: 705801 - DNA, 1463 bp, Homo sapiens
aaccagtcaggcgtggcggtgcgcgcctgcaatcgcaggcacttggcaagctgaggcaggagaatcaggcagggaggttgcagtgagcccagatggcagcagtactgtccagcttcggcttggcatcagagggagactgtggaaagagagggagagggagaccgtggggagagggagagggagagggagagcgtcaaatcattttaaactagatccttgggaaagctagaataaagcccagaaatagttttgtacaaatgactgtccttaagataatgctgtgaaaattaaatgtgaatggaaagatattatattgagctatcatatgatttggagtggggaaggacccaaaccttcacccccacctacacttgatttcttcttctaacaaatggcacatggttgctattaaaatacaaattttttttaaaatgagaaatttatttttcttttctttcttttttttttttttttttggtttttaaaaaaattaaatcccaggccgggcatggtggctcatgcctgtaatcccagcactttgggaggctgaggcggacagatcacctgaggtcaggagttcaacacaagcctggccaacatggcgagaccccatctctattaaaaaatacaaaaattagctgggcgtggtggcgggcacctgtaatcccagctacttgggaggctgaggcaggagaattgcttgaattcaggaggtggaagttgcagtgagctgagatcrcagcacttcactccagcctgggcgacacagcgaagctccatttcagaaaataaaaaataaaaagaattaaatcccaacaaaaacattttctcactcttaactatattttggtctcagtttacaaaaactctttttcaactgctgttaccttgatataacctcttgcatatccataagtgaatagagcaggccaaattgtttcctcctgcttgggttaaagttttaaaattatatacatataaaaatataaaaaattttaaaaagaaacaacaaaaaaattatacatgtataattacagatgtatgtgtgtttgcatatatataagacattcctggtaggacacacagtaaactattcatggcagtacctctggtgagagaatcattgagaatttcaggatcaagaaggagacatttacattttactattaattctttgtataatttttgaatctttgaatgcgagcacatattaattctataattttaaaaaatctacctaacaaaattaatgaataaattaacagaatcaaaaggaaataactaactctatcaataggtgttttcaatcattgttgaagattatcttattgtttagtaacaaattatacagggtgaacaataaagcaaatatttcaccaaaaacaatcctgtacctttaatgaaaactctccctcactgtgaggccagggccaatcatccacacacaagtgtcttaaaccaca

SEQ ID NO: 705802 - DNA, 1463 bp, Homo sapiens
aaccagtcaggcgtggcggtgcgcgcctgcaatcgcaggcacttggcaagctgaggcaggagaatcaggcagggaggttgcagtgagcccagatggcagcagtactgtccagcttcggcttggcatcagagggagactgtggaaagagagggagagggagaccgtggggagagggagagggagagggagagcgtcaaatcattttaaactagatccttgggaaagctagaataaagcccagaaatagttttgtacaaatgactgtccttaagataatgctgtgaaaattaaatgtgaatggaaagatattatattgagctatcatatgatttggagtggggaaggacccaaaccttcacccccacctacacttgatttcttcttctaacaaatggcacatggttgctattaaaatacaaattttttttaaaatgagaaatttatttttcttttctttcttttttttttttttttttggtttttaaaaaaattaaatcccaggccgggcatggtggctcatgcctgtaatcccagcactttgggaggctgaggcggacagatcacctgaggtcaggagttcaacacaagcctggccaacatggcgagaccccatctctattaaaaaatacaaaaattagctgggcgtggtggcgggcacctgtaatcccagctacttgggaggctgaggcaggagaattgcttgaattcaggaggtggaagttgcagtgagctgagatcacagcacttcactccagcctgggcgacacagcgaagctccatttcagaaaataaaaaataaaaagaattaaatcccaacaaaaacattttctcactcttaactatattttggtctcagtttacaaaaactctttttcaactgctgttaccttgatataacctcttgcatatccrtaagtgaatagagcaggccaaattgtttcctcctgcttgggttaaagttttaaaattatatacatataaaaatataaaaaattttaaaaagaaacaacaaaaaaattatacatgtataattacagatgtatgtgtgtttgcatatatataagacattcctggtaggacacacagtaaactattcatggcagtacctctggtgagagaatcattgagaatttcaggatcaagaaggagacatttacattttactattaattctttgtataatttttgaatctttgaatgcgagcacatattaattctataattttaaaaaatctacctaacaaaattaatgaataaattaacagaatcaaaaggaaataactaactctatcaataggtgttttcaatcattgttgaagattatcttattgtttagtaacaaattatacagggtgaacaataaagcaaatatttcaccaaaaacaatcctgtacctttaatgaaaactctccctcactgtgaggccagggccaatcatccacacacaagtgtcttaaaccaca

SEQ ID NO: 705803 - DNA, 613 bp, Homo sapiens
taaaggaaaattcccttctataagcatcaaaaaatgatagaggagaacaaagaaaaattaaacaaattaaattaaattaagcaatttcatatgttttaaaatggtggcgaaggaaactcatttcctccatgaaaaaattaaaattttaggtaagactagaagaattcagtataactcctttcccctcaattattgtttttattgccttgctgtggctcattaaatctttatgtattatttgtagaaatgtaaggggtagaatatacaactgcagtttcgttacatggatagactgcacagtggtgargtctgagcttttagagtaaccatcacctgaatagtgtacattgtacctgttaagtaatttctcgtccctcaccgcccagccccgcccacccttctgagtctccgatgtctgttattgcattctctatatccgtgtgtacacattatttagctcccacttataagtgagaacataggacatttgactgtttctgagttgtttcacatattaaatctttatgatggttttctctcctctcctctccttttctgtctcctattcttttactgcttttttttcctcttctccccttccctttccttctct

SEQ ID NO: 705804 - DNA, 711 bp, Homo sapiens
attttaatgttatcatcctgggaagctattaagttctagtaggtattaaaatagtagaaattaggttgaattcctttaaggtgcatcttttcataaatwagttgactaattgagactccaaacttttaaaataactgcagcactttctaaacttgggctgaaggaattgtaagagagggatttggtattcccacaatgtcatttattattcagtttcgacttggtacttccatacctcactgcttttatttttctttttcttaactcaacacaatgaaagccttacaaattttaaaggaagcaaagggaataccagtgattaagagagagcatatccttaaatttgcaaagcagtaatgctgttggcatttgagccaaggctgtaaaaatctactttaaaatgcttcctagttcagtatttgctgtatccatcaattgtttttaaattgaattactgtgattcaaataaacacatttcctagaggagaaagaacataaagttttaagtaaaaaatagttcaattcagggcctggtttcatctcttactatctgtgaatttggacatggtgtttaactgctcttggcttccattccatcatctctgaaatagcaacacctgcccaacaggataacagtaaagattcaatgagatgagagaaataagatacatttgtacactgcagaatgcctcaaaagcagaaggttttgtc

SEQ ID NO: 705805 - DNA, 711 bp, Homo sapiens
attttaatgttatcatcctgggaagctattaagttctagtaggtattaaaatagtagaaattaggttgaattcctttaaggtgcatcttttcataaattagttgactaattgagactccaaacttttaaaataactgcagcactttctaaacttgggctgaaggaattgtaagagagggatttggtattcccacaatgtcatttattattcagtttcgacttggtacttccatacctcactgcttttatttttctttttcttaactcaacacaatgaaagccttacaaattttaaaggaagcaaagggaataccagtgattaagagagagcatatccttaaatttgcaaagcagtaatgctgttggcatttgagccaaggctgtaaaaatctactttaaaatgcttcctagttcagtatttgctgtatccatcaattgtttttaaattgaattactgtgattcaaataaacacatttcctagaggagaaagaacataaagttttaagtaaaaaatagttcaattyagggcctggtttcatctcttactatctgtgaatttggacatggtgtttaactgctcttggcttccattccatcatctctgaaatagcaacacctgcccaacaggataacagtaaagattcaatgagatgagagaaataagatacatttgtacactgcagaatgcctcaaaagcagaaggttttgtc

SEQ ID NO: 705806 - DNA, 570 bp, Homo sapiens
tggtcttgaacttctgagctcaagcgactgtcccacctcagcctccaaaaatgctgggattacaggtgtgagccaccacactctcctcgattgattttaatcaggcagaaattggtctaaaactgggagacatcatatgtaagtcgaatttgcttatggtgcacccaaccgtagtccatttaaatccttgaagacataattatgaccatcagtgtgaatataatgccttttttaacccaaagaattacttttatgggtaaaatctactttagactgcttttagcttctctgaatactctgagtttgcatttataattttaatgaaaggatcatgatacctgcccaacatggagatcttaaactttcaataaggtgtgatatattcattcatttctttggataccttggggaactgtagcttgatttgttttctctttcaaaataagagtrtgttccacagactgctttctaggtgtgaacacgtgtggtgaggcacgtgctcacaggaaccactgtggctaaggctttgcatttctagaagctgaggataatccgtactctaattggaaa

SEQ ID NO: 705807 - DNA, 656 bp, Homo sapiens
gagacagaaatgagaattgtgtttagtggtaaaaacatagaaattcttgcaacatcacaactttttgaaagatgttccccaccacaccatgaagagtattatggaagttgtactcaaagcaatttgacacaagaaacatgagaaatagaaaattggaaagcagatgacaaatagataattacatatattttgcataaatgaaaatgttataactatcggaaaaaaatctttcaaacatagtaaaactactaaataaagtttcaaactacaaattaatatcttattatgcacaaacatattttacctctcctgaagcaggaggatcacttaaggctgggagtttgagaccagccagggcaacctaggaaaactctgtccctaaaaatttaattagctgggtgtggtggtgcaggactataatcccagttactcggaaagctgaagtgggaggattgcttgagaccaggartttgagaccagcctgggcaacacaatgagatccttgtctctaaaaaataaaaaataaaaaattatccaggcatagcagctcattcctgtaatagctgcaacttgggaggttgaagtgggaggattgtttgagcccaggagttgaggctgcagtgaggtatgatcataccactgcactccagcctggg

SEQ ID NO: 705808 - DNA, 652 bp, Homo sapiens
tgttaaagcagagactgctgtgagatgatgcagtcatgcccagcgcggcacctggtgtgtgataaacttccagtcaggacacccttggctttcatcagtccaggggcccctgcctgccctgggctccccacagcctctgcccttggccgggtgccttgtgagacagcgctggaggcccgatttggaaccttgcctggcttccccaagcaggtggccggtaccctggggccgtcctcatcactggtctcctcagcagcctagaaggcctctgtcttgggtcagcacttctagggcttcctccaggactccctccagaaggacctgcccccaagtggcagctggagtgtgcctgaggcccractgggctcccgaattcctctccctctcgcagagggtggcctgctgccaccttggtggctctgggtggggaagggtgatgctcatatgtgttattggttcctcagttacccaaccatggctgctgctcagggcagactcgggccagcgaggcctcttcccaggcctgcctgatagttgggggtgggggcagtgtgtgtacctggggcagagaagcgacctggcccctgcttgtcccccacttcctccccagctgccatttactgggtttctactgtgtaccagatgcttggca

SEQ ID NO: 705809 - DNA, 652 bp, Homo sapiens
tgttaaagcagagactgctgtgagatgatgcagtcatgcccagcgcggcacctggtgtgtgataaacttccagtcaggacacccttggctttcatcagtccaggggcccctgcctgccctgggctccccacagcctctgcccttggccgggtgccttgtgagacagcgctggaggcccgatttggaaccttgcctggcttccccaagcaggtggccggtaccctggggccgtcctcatcactggtctcctcagcagcctagaaggcctctgtcttgggtcagcacttctagggcttcctccaggactccctccagaaggacctgcccccaagtggcagctggagtgtgcctgaggcccgactgggctcccgaattcctctccctctcgcagagggtggcctgctgccaccttggtggctctgggtggggaagggtgatgctcatatgtgttattsgttcctcagttacccaaccatggctgctgctcagggcagactcgggccagcgaggcctcttcccaggcctgcctgatagttgggggtgggggcagtgtgtgtacctggggcagagaagcgacctggcccctgcttgtcccccacttcctccccagctgccatttactgggtttctactgtgtaccagatgcttggca

SEQ ID NO: 705810 - DNA, 1364 bp, Homo sapiens
ggactaggttaaagggactgagcagagggctcccgactgctgagctacgaggaagagggggcagtggagagcacactgagggctcagtgttgatgacatccagcctcctcgtgccagaggtccaggtcctcctggtgcaggagcagaagctgctcaggatcctgcagagatggtggcagagcccaggtagaacctggcaccctgttgcctccaagaccacctcagatgctggtttggccgcctcccatgcctccttcccctttgccagcagctcagtccttcaagagcagggccttggcaggtctgtcttaaaacaccgtgggagtctggccatcatcctggcctagcactgctgtgccctgtccctggggttgtgggaagctggtagcatcctggcagcccgaggagagaagggctcccccagaagcatgtgcccagcaagtcacagtctgcagagtcagccctctcaccagatttcctggggctcagggattccgtccccttcttcccagccccttgagagtgtgtggcagcgctggcagctctgagcgcctattgatctctctgctggcagccaggtgcgcctgcgtccgcctcctctcctcagcttctgctgaaacgacttcactttctcatgtctcctcccacctccctttctctccagaggccattaactgtttgatgcgagcaatcgagatctacacagacatggtaagggctgcttgcttgtcctgacacccccgggtcccactgcattgccccagccttgcgtcccctctttcagcacccccagcactgttcttattctgcggccaaaccacttggggagggggaagtgggagctggggggattaggtcacctgagctggcctgggctggctgggtcttcacccagctccccaccagcctgacggccccctcactccacaggcagtcatggttttcattcatagaacttaggytattgagctgggcagggtggctcatgcctgtaatcctggcatgttgggaggctgaggtgggaggatcttttgggcacaggagttcgagaccagcctgggcaacatagcaagacctcctctctacaacaaattagcctggtgtagtggcatgcacctggggtcctagttcttgggaggttgaggcaggaaaatcgcttgagtccaggaagttgaggctgcagtgagctgtgatcacaccactgcactccagcgtaggcgacaaaacaagaccctgtctcaaaacaaaaaaagaaattaggttactggagagtgtgtgtccggcacttccccttgcccagccttcccgcaagtgtcacatttgataagcatcttgcagcaggccacagggataggcagagccca

SEQ ID NO: 705811 - DNA, 277 bp, Homo sapiens
gaggcgggcagatcacttgaggttgggagttcgagaccagcctggccaacatgacaaaaccccgtctctactaaaaatacaaaaattagctgacgtggtggaacacacctgtaatctcagctactcaggaggctgaggcaggagaatcgctgcctcagagcgacagagaaagactctgtctcaaaaaaaaaaaaaaagaaagaaatagaaatcttttctttataacacagttkggacattatactgacttttgggaagccaaatgcataggggagtt

SEQ ID NO: 705812 - DNA, 874 bp, Homo sapiens
tctccaagagattccttatcttcatactcccatatgtgagaatcacattgtctcaggatggcccccaaacaactattccaagcttttttttttttttttttttgagacgaagtctcaactctgtcatctaggctggagtgcagtggtgcgatcttggctcactgtaacctctgcctcctgggttccagcgattctcctgcctcagcctaccaagcagctgggattacaggcacatgccaccatgcccagctaatttttttatttttaktagagatgggggtttcaccatgttggccagactggtcttgaactcctgaccttaggtgatccgcccacctcagcctcccaaagtgctgggattacaggcgtgagccaccatgcccggccaattattccaagctttttccatcccacctacaggtgaaattttcctattcctcacgcttgtccttcctctctgagaagactaacaaatcccttcatcttaactacggaatcactctctgctcacagtcaaccccaaccacataactttctttcgtttattacttccactaacagaattcagtccttatcacttcccttaatttattcagctaggacacattcttcctaccccaggaagtcctggaaatcaattatttataataaaatagtactcacattattcattaaccaggcaaaggacagtgctttcttttaaaaaaatgactccattgtagaaaggtttaaagatattaaaattttttaaatagctggattttgattttgttttttaaagcctcaggatgtaaaaagtttctttattctattcctgggtgggtttcttccctaaggtcacaagatcaaatcaaacaagataggtagactggtt

SEQ ID NO: 705813 - DNA, 874 bp, Homo sapiens
tctccaagagattccttatcttcatactcccatatgtgagaatcacattgtctcaggatggcccccaaacaactattccaagcttttttttttttttttttttgagacgaagtctcaactctgtcatctaggctggagtgcagtggtgcgatcttggctcactgtaacctctgcctcctgggttccagcgattctcctgcctcagcctaccaagcagctgggattacaggcacatgccaccatgcccagctaatttttttatttttattagagatgggggtttcaccatgttggccagactggtcttgaactcctgaccttaggtgatccgcccacctcagcctcccaaagtgctgggattacaggcgtgagccaccatgcccggccaattattccaagctttttccatcccacctacaggtgaaattttcctattcctcacgcttgtccttcctctctgagaagactaacaaatcccttcatcttaactacggaatcactctctgctcacagtcaaccccaaccacataactttctttcgtttattacttccactaacagaattcagtccttatcacttcccttaatttattcagctaggacacattcttcctaccccaggaagtcctggaaatcaattatttataataaaatagtactcacattattcattaaccaggcaaaggacagtgctttcttttaaaaaaatgactccattgtagaaagrtttaaagatattaaaattttttaaatagctggattttgattttgttttttaaagcctcaggatgtaaaaagtttctttattctattcctgggtgggtttcttccctaaggtcacaagatcaaatcaaacaagataggtagactggtt

SEQ ID NO: 705814 - DNA, 631 bp, Homo sapiens
ggggccaagagtcagagagctcaacagatctttctatagccttactgtgctgtggagacaaaaattggagttaagggctactgagacaggcagatcatgaggggtcaagatcccagggagatggggaagtgccaaaaagtaagcctaacaggccaggcgtggtggctcacacctgtagtcccagcactttgggaggccgaggtgggtggatcacgaggtcaggagattgagactattctggctaacacagtgaaaccccgtctctactaaaaatacaaaaaaattagctggatgtggtggcgggcacctgtagtcccagctacttaggaggctgaggcaggaggatggtgtgaacccgggaggcggagcttgctgtgagccgagatcgcgccactgcactccagyttgggtgacagagcgagactccatctaaaaaaaacaaaaagtaagcctaacattcagcattgcttttccttcaagatatttgctgatttatgcatggcacaggctaaggggtaaagaaaccaacagatgtggcagttatgaagttgagaagtgggctaggtgtgatggtttacacctgtaatctcaggactttaggaagttgaggggggaagatcacttgaggcca

SEQ ID NO: 705815 - DNA, 1492 bp, Homo sapiens
tttttagtatgcggacattctctttgttaaggacatctattttagtaatastgcttttaaattcagagaaaatgtccttaatgaagtcatattttgatagcataatattaacagcaaatatagaaaatcatgtatatgtttattatttactcagttatatacagtatatggtcacaatgtaataaggtcacgtgtaataagggatcactaagtgtattgaaagagagtatattaaaatactgtcattttgcttctaatgactcattaaaactccaaaaaaaaggtcatacgctttcaatggctgaaccattgtagaaagctgtaaggtattattggtgtatagaaaactgtcattttttttgtcatagagtaatcactgagactttgaaattattttattaattctaatgctataacatgttaatgcaaaagcatgacagtttactagaaaattcataattagtctttgtaaataaagtatacagatgatatttgtaaaatcacctctgtatatattggcttttacactaaaacacataaaatgctcaactgaagaagaaaacaatgaatactgttctcataagacaggtagactcaaacacagtttcatagggctgtctcccaaagatcaatacttgaagaaaattcctgtatactgccataaaatttcagagatttttcgtggaggagaagtgtttcttcaagattacttccacggatgttctgggcattaaaatgatttagattacaatatctaaaaaagaaagaaagaaagcttttcttaggaccagatgtagatgaattgataaatcatttgcttccctcctgcgcttgtctaccttttatgatgggctcatagatactggcacaacagtgacgattatttaagagcactgctcaccaaaacagcctttttaaaaggacaaaaggagtttttgtgacttagtaaagtgtctcataaggacctttaggtggcgctttttaacaacctgctacgctgtcttcagtgctgacagagagatggtgagaaggctgaaagcctattgacttgacagatttcatggcggtcaggatgcataagaggtttactgggaatttgtaaattcagtgctgagattatgtggaaagcaccattgtcaaagaaggagtctatgaatatatttctagaatgtgcactctccatccccaacctccagaaaaacctgcctttccagtgtcttctaagtaccagccccatgcaagggtgggatagaatcatcccatttcacagattaagaaactgaagtttccaagagattaaataacttgcttaaggttcatagaaatagtagttggcagagtttggatttggaaccagaacttgattattctgaatcctggcgcttttcctccatggcatactgcctctaaagacaaattactttcttaaacactttcgggtaagttccagcaaaataggaacttcaaattgctttattcactgctttattcc

SEQ ID NO: 705816 - DNA, 1492 bp, Homo sapiens
tttttagtatgcggacattctctttgttaaggacatctattttagtaatactgcttttaaattcagagaaaatgtccttaatgaagtcatattttgatagcataatattaacagcaaatatagaaaatcatgtatatgtttattatttactcagttatatacagtatatggtcacaatgtaataaggtcacgtgtaataagggatcactaagtgtaytgaaagagagtatattaaaatactgtcattttgcttctaatgactcattaaaactccaaaaaaaaggtcatacgctttcaatggctgaaccattgtagaaagctgtaaggtattattggtgtatagaaaactgtcattttttttgtcatagagtaatcactgagactttgaaattattttattaattctaatgctataacatgttaatgcaaaagcatgacagtttactagaaaattcataattagtctttgtaaataaagtatacagatgatatttgtaaaatcacctctgtatatattggcttttacactaaaacacataaaatgctcaactgaagaagaaaacaatgaatactgttctcataagacaggtagactcaaacacagtttcatagggctgtctcccaaagatcaatacttgaagaaaattcctgtatactgccataaaatttcagagatttttcgtggaggagaagtgtttcttcaagattacttccacggatgttctgggcattaaaatgatttagattacaatatctaaaaaagaaagaaagaaagcttttcttaggaccagatgtagatgaattgataaatcatttgcttccctcctgcgcttgtctaccttttatgatgggctcatagatactggcacaacagtgacgattatttaagagcactgctcaccaaaacagcctttttaaaaggacaaaaggagtttttgtgacttagtaaagtgtctcataaggacctttaggtggcgctttttaacaacctgctacgctgtcttcagtgctgacagagagatggtgagaaggctgaaagcctattgacttgacagatttcatggcggtcaggatgcataagaggtttactgggaatttgtaaattcagtgctgagattatgtggaaagcaccattgtcaaagaaggagtctatgaatatatttctagaatgtgcactctccatccccaacctccagaaaaacctgcctttccagtgtcttctaagtaccagccccatgcaagggtgggatagaatcatcccatttcacagattaagaaactgaagtttccaagagattaaataacttgcttaaggttcatagaaatagtagttggcagagtttggatttggaaccagaacttgattattctgaatcctggcgcttttcctccatggcatactgcctctaaagacaaattactttcttaaacactttcgggtaagttccagcaaaataggaacttcaaattgctttattcactgctttattcc

SEQ ID NO: 705817 - DNA, 1492 bp, Homo sapiens
tttttagtatgcggacattctctttgttaaggacatctattttagtaatactgcttttaaattcagagaaaatgtccttaatgaagtcatattttgatagcataatattaacagcaaatatagaaaatcatgtatatgtttattatttactcagttatatacagtatatggtcacaatgtaataaggtcacgtgtaataagggatcactaagtgtattgaaagagagtatattaaaatactgtcattttgcttctaatgactcattaaaactccaaaaaaaaggtcatacgctttcaatggctgmaccattgtagaaagctgtaaggtattattggtgtatagaaaactgtcattttttttgtcatagagtaatcactgagactttgaaattattttattaattctaatgctataacatgttaatgcaaaagcatgacagtttactagaaaattcataattagtctttgtaaataaagtatacagatgatatttgtaaaatcacctctgtatatattggcttttacactaaaacacataaaatgctcaactgaagaagaaaacaatgaatactgttctcataagacaggtagactcaaacacagtttcatagggctgtctcccaaagatcaatacttgaagaaaattcctgtatactgccataaaatttcagagatttttcgtggaggagaagtgtttcttcaagattacttccacggatgttctgggcattaaaatgatttagattacaatatctaaaaaagaaagaaagaaagcttttcttaggaccagatgtagatgaattgataaatcatttgcttccctcctgcgcttgtctaccttttatgatgggctcatagatactggcacaacagtgacgattatttaagagcactgctcaccaaaacagcctttttaaaaggacaaaaggagtttttgtgacttagtaaagtgtctcataaggacctttaggtggcgctttttaacaacctgctacgctgtcttcagtgctgacagagagatggtgagaaggctgaaagcctattgacttgacagatttcatggcggtcaggatgcataagaggtttactgggaatttgtaaattcagtgctgagattatgtggaaagcaccattgtcaaagaaggagtctatgaatatatttctagaatgtgcactctccatccccaacctccagaaaaacctgcctttccagtgtcttctaagtaccagccccatgcaagggtgggatagaatcatcccatttcacagattaagaaactgaagtttccaagagattaaataacttgcttaaggttcatagaaatagtagttggcagagtttggatttggaaccagaacttgattattctgaatcctggcgcttttcctccatggcatactgcctctaaagacaaattactttcttaaacactttcgggtaagttccagcaaaataggaacttcaaattgctttattcactgctttattcc

SEQ ID NO: 705818 - DNA, 890 bp, Homo sapiens
tagacaaagatcaaaatattatgctaagggctgaaattaatatcttgaggcaagtattatcatttcacaatgacacataattgatgcagtcttttagaagtcaattttgctttaattctcgatagtctttaaaatatttatcctcactgaaggaataatcccatttccaggattctagtctaaggcgggaataagttatgtacttaatgatcatagaaaaggatgcttaccttagtaatatttatagcatgaaaaattagaaataacctaaatattccataagaagrgaaaggtgcatatatatatatgtatatatatatattccataagaagggaaaggtgcatatatatatacatatacacacacacacacatatatatacacatatatatatacacatatatacacatgtatatgcacctttcctcacttcagcaatatgtcactccatctcccaccaaaatcagagctttatcagatacttcaagtgtatgtggcattaagtgcaatagcatattgcttttgattcaaggcagatttctgttatctctctttggagaaagatgcaatatttcccctctttacaaactactgttttattttgaatgtaatggaactatgaaaatcttaaaatgtgccttttggaatctcttcaaaagatagttggagacagtgaggaattatttccctcagacttcactaaatttttttaagttattttgtagtgctgatgttctagcaaaagtccaaaattgtcgagacaaaactgaaatggattttatactctgctttatctgaggcacgccttctacttcactatgtgctttttgcttgggagcgaaaaagggtgcaattaaaaagatgtaacagtctgtctccagggtggatg

SEQ ID NO: 705819 - DNA, 890 bp, Homo sapiens
tagacaaagatcaaaatattatgctaagggctgaaattaatatcttgaggcaagtattatcatttcacaatgacacataattgatgcagtcttttagaagtcaattttgctttaattctcgatagtctttaaaatatttatcctcactgaaggaataatcccatttccaggattctagtctaaggcgggaataagttatgtacttaatgatcatagaaaaggatgcttaccttagtaatatttatagcatgaaaaattagaaataacctaaatattccataagaagggaaaggtgcatatatatatatrtatatatatatattccataagaagggaaaggtgcatatatatatacatatacacacacacacacatatatatacacatatatatatacacatatatacacatgtatatgcacctttcctcacttcagcaatatgtcactccatctcccaccaaaatcagagctttatcagatacttcaagtgtatgtggcattaagtgcaatagcatattgcttttgattcaaggcagatttctgttatctctctttggagaaagatgcaatatttcccctctttacaaactactgttttattttgaatgtaatggaactatgaaaatcttaaaatgtgccttttggaatctcttcaaaagatagttggagacagtgaggaattatttccctcagacttcactaaatttttttaagttattttgtagtgctgatgttctagcaaaagtccaaaattgtcgagacaaaactgaaatggattttatactctgctttatctgaggcacgccttctacttcactatgtgctttttgcttgggagcgaaaaagggtgcaattaaaaagatgtaacagtctgtctccagggtggatg

SEQ ID NO: 705820 - DNA, 890 bp, Homo sapiens
tagacaaagatcaaaatattatgctaagggctgaaattaatatcttgaggcaagtattatcatttcacaatgacacataattgatgcagtcttttagaagtcaattttgctttaattctcgatagtctttaaaatatttatcctcactgaaggaataatcccatttccaggattctagtctaaggcgggaataagttatgtacttaatgatcatagaaaaggatgcttaccttagtaatatttatagcatgaaaaattagaaataacctaaatattccataagaagggaaaggtgcatatatatatatgtatatatatatattccataagaagggaaaggtgcatatatatatayatatacacacacacacacatatatatacacatatatatatacacatatatacacatgtatatgcacctttcctcacttcagcaatatgtcactccatctcccaccaaaatcagagctttatcagatacttcaagtgtatgtggcattaagtgcaatagcatattgcttttgattcaaggcagatttctgttatctctctttggagaaagatgcaatatttcccctctttacaaactactgttttattttgaatgtaatggaactatgaaaatcttaaaatgtgccttttggaatctcttcaaaagatagttggagacagtgaggaattatttccctcagacttcactaaatttttttaagttattttgtagtgctgatgttctagcaaaagtccaaaattgtcgagacaaaactgaaatggattttatactctgctttatctgaggcacgccttctacttcactatgtgctttttgcttgggagcgaaaaagggtgcaattaaaaagatgtaacagtctgtctccagggtggatg

SEQ ID NO: 705821 - DNA, 890 bp, Homo sapiens
tagacaaagatcaaaatattatgctaagggctgaaattaatatcttgaggcaagtattatcatttcacaatgacacataattgatgcagtcttttagaagtcaattttgctttaattctcgatagtctttaaaatatttatcctcactgaaggaataatcccatttccaggattctagtctaaggcgggaataagttatgtacttaatgatcatagaaaaggatgcttaccttagtaatatttatagcatgaaaaattagaaataacctaaatattccataagaagggaaaggtgcatatatatatatgtatatatatatattccataagaagggaaaggtgcatatatatatacatatayacacacacacacatatatatacacatatatatatacacatatatacacatgtatatgcacctttcctcacttcagcaatatgtcactccatctcccaccaaaatcagagctttatcagatacttcaagtgtatgtggcattaagtgcaatagcatattgcttttgattcaaggcagatttctgttatctctctttggagaaagatgcaatatttcccctctttacaaactactgttttattttgaatgtaatggaactatgaaaatcttaaaatgtgccttttggaatctcttcaaaagatagttggagacagtgaggaattatttccctcagacttcactaaatttttttaagttattttgtagtgctgatgttctagcaaaagtccaaaattgtcgagacaaaactgaaatggattttatactctgctttatctgaggcacgccttctacttcactatgtgctttttgcttgggagcgaaaaagggtgcaattaaaaagatgtaacagtctgtctccagggtggatg

SEQ ID NO: 705822 - DNA, 1264 bp, Homo sapiens
cagagactgagagaaaaagagaggtcagaatttagaactttctcctgaaaatgctttcatagagactgttcaaattgatgttgatcatgtatcaaagaaaatttactgatacaataaaaatttgggttggactttgttaaggttactatagtaagatatactgtgttacaatttacagatgtcttcaaggaataaaatatgacaaaaatataccttgacccagctacaatgagaatttgattacttagtagttgagtgtcctgatgtattcaccctaatttcactccaaattgaatatttctgataaattttggatagaggtgtggcctctattagataatatcatgacaatctatcaattttgtgattctgtgtaattcattaagttccttatagaaaacttgtattatataaaatttgcatcaaggttaagagcatgggctctggagttagacaagatagtattaaaataccatgtcagccatctactatttctgtgattttaggtaggtgacttaaactttccagcctcaatgtcctcctctatgaaatgggaataatatcgttattcacttgcagaggtgctgggacacttacctgcaatactacatgtaaagtgcttagtacaatgctgactcgtaggtcctgggtcctgaataagggttaggtatttttgacagtattaatcttatcaaattgagtagttcctacttgtgcaggcactgtacaaagcccttaatatgcattatctcatttcaggagaggtgctgagagagagagagacaatagcttaagcattggttctccaaagtggttatctttccttcccaagtcattttttgggtgccggtaatgatagtaacaagaggttaaaaaaaccacgaaaaaaatttttttaaattttcaattaaaaataactttcttttggaatcagaaatagatgaaaataagtatatgagattttgtacgtgccatataaacataatattttaaaatgcatgacaatcttagcgatatgtgttaaaatatttgatgtttattataatatgatatttgggattgcttcaaaattatacaaccagaaggaaaaaagatgtgaatgagagtagaaatgaaacaagttttggctatgagttgaaaaytattgatgctagaagatggatacaggggagtttattatactaatctctattatatatgtgtgccaaaaaaattgtaaggaaatacactaaataatattaacagtcttagctttgagtggttg

SEQ ID NO: 705823 - DNA, 1382 bp, Homo sapiens
agtctattgtttcagagagctgctaaggtagcatatgggttggcagcaggggcagtgatgggtagcaaggcagaattacataaaacaaatgaaaacactatggctaaaggaaaacaaccttggatttggctacagccaaatatgactgagaatgaatacagcagaaacgtattatgtttttgagagtactaagaaatgtatttccaaaggaaccaaagcctggtctgcaaaacacctgtgactgaggtttaaaacaaacatggtatcaccaaatttgcacaagcaagaagcaggctgcaaaagtgacacagyccctaaagagggacactttggatattttccaggaagataatagagaggaaattcctttgagaaagcagaaccagggttaaatcaagtaaattcaactgccagattagggcatttaagcaattcctacacagcaggacccatcactacataaaccattgactgttgtttgttcatttgtttgtttccagttgagagtttttaatatggttatcctgtctctagtccatgattgtatatagggtttgtttgttgcattgtgagtttgcaaacaccttgtcttttagtttttgtatcctaggagtacatccagatttggtggagaaaattgttcatcacccagagactctgggctgtgatctaaattcaaaaattggtgggacttagggttttcttttttgaagagggattatatgtatttttacatgaaaagaaaggtccacagatatttgatggccaaaggatcaggctgaagtaaaagtaattagttgtccaatataatctgttctccccttctcccatagtaatacaattggagcctgatacatgactagccatctttactgcatttccctgtgtccctgccccactcatgtgacaaggttcatgacaatggagtacgaaacactactgaggcagaccttttaagagactgggattgctcctttatatgcattttcttcttctcatcagtctggtgcaacacaggaatatagctttggcaatgcagatgatgacaatactgtaaacttgataaacaagatggaaaaacctgagcccctgaataattgaatggagcagaattgtccaccagcctagaacttagattattctatgagagagaaatcaacctttatcttatatatgggggtagctttgttatagcagtttagtctgctagagctgccataacaacacatcacacaccgggtagcttcaacagcagaaatttattttctcactgttatggaagtcagaagtccaagatcagggtgctgtcaggtttggtttctggcaagcctctctttctggctcgcagacggctacactcttgctttgtcctcacatggcct

SEQ ID NO: 705824 - DNA, 577 bp, Homo sapiens
ggtttggggacattgagttagtaagagcaacagcatttgccgtctttggaggggatatttggtaaccctccaagagagccacctatttagaaataaagtttattttagttatctgtaagggggaaaaatctgacttcaatagggacataatagttagccaataggatattcatttaagtgggagttaggagaactaagttatattcctgcccctttatcacttaaggcaaatttcttcctgtctatgagcctattacattaactgcaaaatacaaacagtaaagcctgtctcagaagatcatttctgaggcttggtataaaaaacggcttatgaaatgtcaagaattgcacatggaaatgcctttgttattacttgcttctatattcctgcattttctagctactctaagcaatgagccataaagaaatgtcatggaaccacttccaaattccagtttgcacaagagacagacgttaggaggcctggattatgyggaatagagttgaagcaatgggaaaccaccgcctttttatttgtcacatccctactagttctcaatacaaagttcacagtgag

SEQ ID NO: 705825 - DNA, 601 bp, Homo sapiens
gaatcaatacctgtgaaaagaaagaaaaggacagtggatgacattaaaaggatttaaccagaggagtagagtgataaggtgtgcatgtaaaaaagatagctctgaatactgtgtgggaaataaacctttaaactaaaagggaagcaaggccaggtgtggtggctcacgcctgtaatcccagcactttgggaggctgaggcaggaggatcacgaggtcaggagatsgagaccatcctggccaacatggtgaaaccctgtctctactaaaatacaaaaaaattagccaggcctggtggtacgagcctgtagtcccagctgctcaggaggctgaggcaggagaatcacttgaacctgggaggcagaggttgcagtgagccgagatcgtgccactgcactccagcctggtgacagagcaagactctgtcataaataaataggaggcaaatgtagaatgggtcggtcagttaggaggcattattcatttttaggttcatccttgtcccttgcaatcttgcacatggtaggtatttaacaaaggcttgctgagtgaaggaatgtgtcttctgtaatttgtattcatggtaaaagcaaggctcctatt

SEQ ID NO: 705826 - DNA, 1065 bp, Homo sapiens
ttttctttaatttctttggctttgaatagcattgtttttcactagctttccattaactcaccctttaactctcttagcatagttatttatattttgtcctaggcttgagattcctcctaattggagtggactgataaaataggtgtatcttaactaatgctaaaaaccaatgtgtctmttttcttacaaaatcatgttttcttttgattatttgtttctgattactctgtttcagtagctatacatataaaacccaaacaaaactaaaatagtttatgaaatggtagaaagtgatagtggcatagcagaaatactctacaatatggcaagacacctacaatgagatgaaatcttaattccaagcaggtaaagaatattgtaaccagctgttgctctaattatattctaattctgccaaagttaggctgagaagaaagaaaaagacaacgatgatgacaaaaatgttatttggctcaaatattccaccaatgagttaaactattttccttattccacatctctttctaccacagtttgctaaggtaaacatagcacattgtgaaagaagtacccagtgaaggaaaataaagtaataaacatagcagacagttctgctttgctttttttgtcagcttacagtaacagcacttgtatagcaccaagataccaagataagttcttaggaaaaccccaacaggaaccagctgattattaactttacaaccggtttcatttcatcaggaaagagatgctctttcttgtaattcatgtgggttataaacaccaaaatagaaagcttaactcaagactgtgccagtcttcactaacagtttttaaatcaggaaatgatagtgattaagcttgactgtcctcattccactaacatttcttagatttaatgtcttaccagttgtcacacagtcgagtttcctggtcatctagaaattcagccatctttagctcttcctgaaaaccacaaaggaagacatgaactttctctttcatttctgctttaaagatgacatgcaaaaaaacaaataaaaaactagtatacagaaactgtca

SEQ ID NO: 705827 - DNA, 2357 bp, Homo sapiens
caggttcaagcgattctcctgcctcagcatcctgagtagcggggattacaggtgcgcgccaccatgcctggctaatttttttgtgtatttttagtagagatggggtttcagcatgttggcccagctggtcttgaactcctggcctgaagtgatgtgcccaccttggacttccaaagtgctaggattacaggcctgagccactgcacccagcctcttctttttttattccttactggcatcttaataggattttagaagtgagaggaaataagcgtgtatttaataaatacataactagaactggtatgtgggttttatttttaaatttttatccaaatttaaaggatgaaaaacattttaaggcaagatgtaaccattcggagaaaactggatgaatggtacatgggatctcatttctcatagctgagtatgaatctataattataagttcaattaagaaaaatgtagggtcactgacataaggtaaacagtatctttccatgtataacctttcctttcagaatttatcagcataattacagattaawttttttttaattttttggtaatctgctcttttctatagtcttcctaatgttttcattgctgtaatatatattatgttaatatgctgtaagttatggaacattttcagaagtataaaaatctttcactgcctgtagtacgtggtattgacaaatacttttggccagtaatgaatgagtgtgccagtttcattggagcttcaccagtgttgtgtgctgtcacaaattttttttgttttagctattttggtagatagaaaatggtttatgaaaggaattttagttttttttttcttgatgtctttttctagaccattcaatttctgttaattatggcctactgaagactagttgtgttttgagacctttgctccttttttccccactttgcagtttattaatcagttacttggagttgttcctttgtcgacaccaacagaggataagctggcactgcctgctgacatcagagctctgcagcaacatttgtgtgtggtgcagctgacgaggttacttggcttgtaccacaccatggataaaaatcagaaattgagtgtggtcagagaattgatgttaaggtaccagcatggactggaatttggtgagcaaccattcaaaatgtgcagtagttccctgatctacactaagacttagaaggcagttttttaagcacctgtagcaccctgttttaatgagttttgtaaggagactattttgtctgggaagaccatctaagtaatatgatgtaaagcctttcttaagcctggagttttaaataattctgattggctttcagttgtctgtattcttcttgatctgatgagctaactttttattagattggggctcatatagattgcatagtttatgataattatcacattttctgcttgtaggcctaaatattcttaatatatagactgtaagtgaacaaaaagaatattgtaaattgtaagataaatatttagtttagaaatagatgatcttcagataggtgtggcctttgctagatatatgtgatagacatataattgtctgactataagatgtcagtatttatctgtagtctaaagaattagatgaagtcaggagcatattgtgaatttagttatacatggcacttggcttatgttcttttcttcacctcaacctccttcaaatcttccttctctccctttgggaccatcatggataccacctctgctctggaaccctaccttctgttccagctgagtgtggtctcaccttcttttgaaccctttgaatcgtggcttatatttttctcctggtacttatcttattcttaattttcttttacttttcctcctctccctcctgtcactttcctgcttttaaaaactcctttggggtcagtaatagttgaacaaatgttaaaatagatatgatttttttcccccatagggaaaacctgtttgaaaacagaattgcaattttctgactattactgtctccttgctgtccatgcgcttattgatgtatggagggaaacaggtaagtagcagtgatttcagttcaactttactttttgcttttattgattataagtactgcattctttcattagactaattttacaatccacaaattttatttatgcttttaggttctgcttttcttgatatttctagggtgcttccagaaaaacctgtcttggccaggtgcgatggctcatgcctgtaatcctagcactttgggaggctgaggcgggtggatcacctgaggtcaggagttcgagattagcctggccaaaatgcaaaaaacttcgtctctactaaaaatataaaaattagc

SEQ ID NO: 705828 - DNA, 650 bp, Homo sapiens
ttgtattaaatataaagtgatttggaaacatctgacatatttctgtatgacatgctcagatctcttgtccagattattttgtagtattttttgtccttttcttactgattcataagagctgacatgttgacatgattgatgacacattgatgctacatggtacaagtatttccccctgcccagttggtactttctttcttatttttctttaagacatttaatataactsagaagtttctaaactttgaaaaataaatatatcaacattctgggggtatagctctgtggtagagcatttgactacatgaacatatcaatattttcttttctttctttgcttttatattcagaaagattttccctttttctcactatctggtatttggtacaggagactattgtatattttttctcaagatatattaattgaatgaattttgtttattatgtcatttgttttccactattagaaaatgtatatttacagcagaataaaggagtaaaatgttctattcaacaaatactggaaaattagttcataaaaacttgccattcagaataaaaaaagtcttactaaactaaatgtaaaaggaaatataataaatggtatctacaaaaggcacacctcaaatattctagatagagaaata

SEQ ID NO: 705829 - DNA, 650 bp, Homo sapiens
ttgtattaaatataaagtgatttggaaacatctgacatatttctgtatgacatgctcagatctcttgtccagattattttgtagtattttttgtccttttcttactgattcataagagctgacatgttgacatgattgatgacacattgatgctacatggtacaagtatttccccctgcccagttggtactttctttcttatttttctttaagacatttaatataactcagaagtttctaaactttgaaaaataaatatatcaacattctgggggtatagctctgtggtagagcatttgactacatgaacatatcaatattttcttttctttctttgcttttatattcagaaagattttccctttttctcactatctggtatttggtacaggagactattgtatattttttctcaagatatattaattgaatgaattttgtttattatgtcatttgttttccactattagaaaatgtatatttacagcagaataaaggagtaaaatgttctattcaacaaatactggaaaattagttcataaaaacttrccattcagaataaaaaaagtcttactaaactaaatgtaaaaggaaatataataaatggtatctacaaaaggcacacctcaaatattctagatagagaaata

SEQ ID NO: 705830 - DNA, 1019 bp, Homo sapiens
ccaattggatcctgtgcctgtgatcaaggtgtctggattacagctgtgaagcctctattctccaatccttttgcaaagggaggggccctttttctactaagcaaataaaacttgatctatttaaaatttccctagtcctgtggttctttacagatgtgccaatagtgttaagcaacctgggaagaattgccggacacaggattcaaggaacgccgcaccctgctcccataagcagggcagacattatcaacagatcacagccctttctgctgccatgctatgggagctatgcttctccacatagccctgtagtgattgacggaaactgacctaaaggatagattcaatcctttactaccacaggcacagggtgcttcgatccaagatgagtctggttgaacatacactccctcctcctgatgtagacagaccacagtccagtctacaagatgcacattaaayacagacacattcatatttcgtcatgtgccaatcaataaagcaatgccagtaagcccaagttataagcttgcaggacgtgtgataagatttcaggtgtgtgcaggagctaggtaccaaaatgggaaaaaggccactggcagtcttctgcacaagcaaattactttctcttgagacacatacacttgcaggcagaggaggaatggcaggaagaggaagtgaaaccgacaacaaataactttaatttcaggggtgtatgctcttttgtctcagaagccaacctaggtgggtgtgaagaagtgacagcccttaggcataatccctgcttctgacagcctccagcagactttggagagtgacaggtaaagccacatttggcccgtacttagaggtggcatgtttcctggtatcataatggaagtataagaacaaggaagggaactgaactaagaacctagaaaccaaatgcaagcaactgagatgggggcagttgaaaaaagaatttaaagctgaactgcagatcaactgcatggtttcacacttttctcggaaaaaagcaa

SEQ ID NO: 705831 - DNA, 619 bp, Homo sapiens
gcacatgaggcacctgcagagaggcacacggggctatcccggtagatttcgggcttggtgtgaatttcaagtctggacagcttttaagttcaaatcacaattctaccattgactaactrgctgtgtgactttgggcaagttacttcactttcccttctggcttcttttattttttatttattaatttttttttttttttttggagatggagtttcactcttgttgcccaggctggagtgcaatggcgtgtgatctcggctcactgcaacctctgcctgcctggttcaagtgattcccctgcctcagcctcccgagtagctgggattacaggtgccagccaccacgcctggctaattttttgtatttttagtaaagacggggtttcactatgttggccaggctggtctcgaactcctgacctcaggcgatccacccacttcggcctcccaaagtgctgggattacaggcttgagccaccacacctgggctatttattaattttttaaagagacagggttgctctgtcacccaggatggaataaagtggtacaatcatagctcatcactgtaacctcaaactcctgggctcaagccatccttccacctcagcctctctagg

SEQ ID NO: 705832 - DNA, 626 bp, Homo sapiens
atcaattaaatatattcaatttattaatgaaaatataatatggcatgtgtacctctttgttcatttkttaggggtgaaaactgtatcacccccaaaaaagctctgagctacctgaaggcaagagctatgccactgtctagcacaggctaattaaaacacactttctaaaatatacatatgcccccatcacctactagacttttttttttttttttgagacagagtctcattctgtcacccaggctggaatgcagtggcaaaatcatggtgtgctgcggcctcaacctcctgggctcagcaattatcccacctcagcctctcaagtagctgggatcacaagtgtacaccaccacacccagttaatttttaaaattttttatattgcccatgctggtcttgaactcctggcttcaagcaaccgtcctgcctcagcctctcaaagtatttggattacaggcatgaacaagcacacccagcctactatgctttttgagaaccaatctcttcctttattcagcaatcacaatacctttttgtgcttctatcacatatactccctaacctctaagagttcatagcctgagaaaagcaggtaattagagtaaatggaggtgcactagtactga

SEQ ID NO: 705833 - DNA, 626 bp, Homo sapiens
atcaattaaatatattcaatttattaatgaaaatataatatggcatgtgtacctctttgttcatttgttaggggtgaaaactgtatcacccccaaaaaagctctgagctacctgaaggcaagagctatgccactgtctagcacaggctaattaaaacacactttctaaaatatacatatgcccccatcacctactagacttttttttttttttttgagacagagtctcattctgtcacccaggctggaatgcagtggcaaaatcatggtgtgctgcggcctcaacctcctgggctcagcaattatcccacctcagcctctcaagtagctgggatcacaagtgtacaccaccacacccagttaatttttaarattttttatattgcccatgctggtcttgaactcctggcttcaagcaaccgtcctgcctcagcctctcaaagtatttggattacaggcatgaacaagcacacccagcctactatgctttttgagaaccaatctcttcctttattcagcaatcacaatacctttttgtgcttctatcacatatactccctaacctctaagagttcatagcctgagaaaagcaggtaattagagtaaatggaggtgcactagtactga

SEQ ID NO: 705834 - DNA, 2000 bp, Homo sapiens
cgaggaatatttgaaacagctgctgcccgtcctaatgtgccagggctgagattgctgctggaacttcccagggctgctgcagtaaccccgccccactcctgggaagaagattctaggcaagtgaccgcttccaccctctttatggccctggtctggggtcagaaaggaagaggactggtatgcattgaattcttcttgggtgcctggcaacttctagcacatgtgtgcatgttgtttcatttaagtcttcacaataatttggccagaggagtattactacccttgtttttgcatgagagggaactgggctcagagaaattaggggactggctaaactcatacagcagggcaggggatcagaagcccagtgcacctgccctgtctcatagcgtctttttattggggcacactgtggttatatattgagcccaactggcaaaactatgcagtaggtgaagtgaaagttgaactcagcatccttcacctctcccttgtgtgagcctctctggcctctcttctatcaaatcaccccatgttgggcactgtgcattttttttatgcttattatctcatttggttccccaaacagtgctgccagcatatgtgttatccttaactccattttacagatgagttaactgaggcatccaggggcttcgtgcatgcccaggccacacagtgaatacatgcagagctacactcttattctcggtaactgtacttaaaaaaaaaaaaaaatcagcattcctctcccaggcactcagtgacaagggtcccctgaggtgatctataatctctaatcttccagcttcttggcactgtaaaggaattgaaaactaacatagccaagtcaagaatgctttttgtccttccctttttctctcctaaattcatcttttttctttcttcttctcaattttgaagccctccttactaaagtcaggggcaaggggtgctgcagaaagtctacatttatgctcactaactggggaggaaacactgaagtatttatttttgttttcagaggaaaatataggtaaaggctgtccttgcattgtgaatgtccagcccaggggaatacttggcacatggtaaatgctcgaatatattgtatgaatgaatgaagataatgaatgaatgaatgaatgaatgaatgaatgaatgaagataaaaagggaataggwtccagttcctggtaagtacatgaataaaaaattaaaagtaataattaaaaagggaatagaaaaaaatcagtactctcatagcaaacaaatcagacttagatggtaatatctgaggacagcaggaggattcatttgcatacattatttacctccatctggaatatccactcttgaacttgcctgcagaaaggccttctactcttcgggtaacatctcaaatgctaactttaaaaaaatcttcttcagttggatgtaatttctctcctccttggcatctcataggactttaatttctcctggcatttactctcttctacctcaaagtctatttattcatatggagacaggattccatagtgttaagtagattctagtttgctgccaggttccccgagtttgaatcccaatttggcacttgctagctgtgtgaccttgagcaaattacttaacctctctgtgcttcattcaccttgtctgcaagatgggaataatactaatccttcttatatgtggttattatgaggatttaatgagttaatatactaatatacaagttaatttcatccttaaaacaggtctagccgcacagtcagcactacataaatgctggccattattgtggatctgtctggctggaaggcagtaacagcatcttactcagtttaatgtttcctttagttctgaccacagggctctggacagaggtttattgaccatcctaattgtatttgggctttaagaaaacacatgtccttaatcagagtgcctggaacctgacccactttgggtctgtgacttcctagcccctcttccagg

SEQ ID NO: 705835 - DNA, 1183 bp, Homo sapiens
cacaaaagtttttaattttaattaagttctattcatctatttttaatattgtcagttgtgctttcggtgtcatatctaaaaaaaatcattgcctaaccccaagtcacaagtatttactcctatgttttcttctaacaattttatattttagctctcatgtttgggtttatgattcattttgagttaatctttaaatatggtgtaaggtagaggttccaattcattcttttccatgtagatattcacttgtcccagcaccgtttgttgtattcttcccctattgtagtgtcttaacattcttatttatttctttaatttctccaactttttattttattttatttccaacatattttaggtttaaggggtacatgtacaggtttgttacatgggtaaatttcatggccattcattgaaaatcagatggtcaccaggttgtgtaccagcagagcaacagttgcatcagctgtgccccattctcctaggatagtctgaaccagcacatgcagtgctggatgagaggacrgtgtaataattccctgcaagagattatttgaatatattttgctccgtaaggatggagtgatgtttcagactgagaaagctaccaagcagtgctcaaagatgactctgacagagccctaggagcctcctgacattccacagaactccacctttgaagatcaatactctactgggggcccccaggtgcagaccactgtccaggtgtcatcggacagaaagtcagccagatcctaggaaatctgaaaaggcatctatacagtcaaggattgttgccctgtccgggaagcatttatcaaaaattacagtgtgatattgtccgtgtgattttttgacacatggctgggctttaaagatcccttggtgtttacccctccgagcacatgccagatggcccaggcacagaagaagagcaagaattgttcctcgtgagactgtgaaacacagaagttatagcattggatgtcagttgccaatggattctgctggagatggttttgaggctagttagggataagaatctttatttgagataaatataattctaggaagatacacattgctgtgggttttttggtatgtttgattttgactactcaagatatgtttacagaagaaaattgaatggagaggatgtggtaacatgggctggctagatggc

SEQ ID NO: 705836 - DNA, 638 bp, Homo sapiens
aaaatctttagagagttgcacaaagcctatactattcactccatttttaattcatccctccaaattaatggtttccattaattagacaacaaaaactgaaaaggaaaaaatggagggtacagtgtttctcatctaaaggtgagtgctgtaagagatgttaagcagttgggccagattttaatgaattctcagataggttttaattagggctggcatatgaactgaataggtctatagtaccctatacatgaagggttctttttaacactaaaacctagaattattatatgtaattagtgttaraaatgaaaagatacgaatggcatattttcagggccaaaataatactaattcagaccacatttctagcaggtttccagatcacactggctgtcatttgcgatctgtactgtattaccatatttcacaaatgtcaacgtttggatatctaataggtaaacaaaaggtataagggcaatatctttgttcttattcaattggtaatttaatcaccaattaatttactttttataactacgtgggttttatattctgtagctcttcaaaatgtaccatatgtgccagctgacagaatcaacctgatctgaaagatggtgaagagtctcaataaccacaca

SEQ ID NO: 705837 - DNA, 973 bp, Homo sapiens
gatcaccttttcaaagctgaatatcaaagtcagaaaatcaactaaatgaaaggcaggtttatctataaaaatcaaaatgttatttatcataaaatgccataaatacctttggataaaaagacattataaataatgactgccacattcaatcattcatgacaaatttattcattcatgtcatattcaagtattttcaagatttaggcttttttctattaagatgcaataaagaactaaagcttgaaaatacatttcaatcaggaatgactacacaatacaatatgtttcatctcaagcagagaagtgctcaaacattgaggttaatagtatgaactctaacaataatgatcatgttcaaataaacatcaactctaagggtccctgttgtgaggacaaagttatttaatcactctttgtgactattaccttatccacaaatgaacatattaatagtacctacttcagagctatataagaaataaatgtgttaatacagataaggaaattaaatgaatttaatataggtaaaggcttagaacaaaaaaatcgcacatattcattatcactgtatttcagtaatggtgttaccaatccgtaaaataaaatctaaaacaatggtgagtatatcatcttgttacaccatttagatttacaaagattaaaaaaaaaaaaaggccaaacatggttgctcacacctgtaatctcagcaccttgggaggctgaagaaggaggatcatttgagttcagcagctcaaaatcaacttcttcatcttattttctctttgcattttagtttgaatttatactcatgcatcctcaagatcactaattatttcctgagccatatccagtcarctgatgagtccattaaagattttttaattgttattagctttttatttccagcattttcttcgaatccttttttagtttccatctctctgcttacattacccacctatccttgaatgtt

SEQ ID NO: 705838 - DNA, 1111 bp, Homo sapiens
atcacagtaaaacttgaaaattaaaaatgaagaaaaaatcttgaaagaagcaagaaacgggcttcaagaatgacgctcatgtttataattttgaaaattaagtgaattgaaatgccattaccaaaagaaggaatagaaaaacagtaggtttcagatgggaagataatgagttttaatttgatgggcctttgatatacacaactggaattgcccagtaagaaattaaacataaaaatttggagctccagggaaattctgaactggaaataaggatgttkaacgcatcaccgtaactggcactgtggaaacggtatacagaataagaaaaggagaagttaggcttcactagactatgcaataagaacaaatcttaaaatctcagcagaagaactcaatggaattttgtttctcactcatagcacagtccagtgcaagtcatgcagccacgtctgtccttagctttgccagcgggagcacgtgccttccaagttcaacatggctggggaagacatttgttacttacttccactcaccttccttgggcaaattagtccaatggctccaatccaaatgcaagggagactgtgaaatatagtccccctgtgtgtccaggaagggaaaatggtgcagcaaacaatgccaatgtgtctgtcacaagggccaaaggcagatccttataaacttagccaatgacaggatagaagtatagacaagtgtgcccacctggactgcttatgagttcatgccacaattttaatagcttgtagtggaaacaaaagtgaaaataattgtcctcaaatacccatacctaataaccacttaggcttggctcctggtctaaatctgcccttcacctgaaatatccattcagtctcttatgtatccatgtccctatcacatctggatctctgtcaagtttcctctggctctagcattcgttatacctcaggaatgcaattgtcacacaaaactgaaactgagctcttcgaataacccttcttcacacctttgaacaactgtggactcttctgtgatttctgtgagggttttctgcaatctggatgtagaagaatgtggtgcaataggtcattctgagtgacgatctatttcc

SEQ ID NO: 705839 - DNA, 3346 bp, Homo sapiens
gtagctgggcacatcttggctgtctgctctaggactgttatagaaaaacaggtcaaagtgtatcaccattatcccctaagccaatgagtttcagatgttgtttttaaaacaactctaggttattaaaactgttttgagagtcatttatacatttttcaaagtaaaatgaattttaattcattatctcctaaaacataaatacaggcctctcatcccttttctactgagaggaagtggaatgcactccgacaaggataaggtaatacaaatatatgtgagaggttaggacatttggttgttttggtatgtgtgtaggtgtgtgtgtgtgtgcgttttgttgttgttgttgtttttgagagggagtctcactctgtcacccaggctagagtgcagtggcgcgatctcagctcactgcaatctccacctcccgggttcaagcaattctcctgcctcagcctcccaagtagctgggattagaggcatccaccatcacacacccggctaatttttgtatttttagtagagacagggtttcaccatgttggccaggctggtctcgaactcctaacctcaggtgatccaccgccttggcctcacaaagtgctgggattacaggtgtgagccactgtgcctggccatggttgttcttcaaggaaacaattgtgtttgtgacacttgtttctaatgtccagaaatgtttggtgaggtcaggagagaccttttccgcagggtgagggctccgaattatcgagtgatactcccaaacaccctaaggtcttttgtgcattcccagagcctagatttagtttgataggatcaatcgcaatgcagatatttcagtttgtgagacaatacccctctttatccaacctgctggttactcttgatacccacacacttttatatccatgcaaggcacaatgtttaaatatcaacggtaagtagcacacctttaggacgacctgatgtcccaacaattcttctagttccttctgctcttttaataactgcttttgtttagatgccaaatcttctcgtaaatttttaatttctaatttcttctgcattatttctttacgtaattcttcagtgctttctctcaatattttcatcttcttctccatttcctttaaaagtcgtgaagatgattaggttatatagtctgagcaaacatttatctacctaaaaactgaactaaaactaatttcacccaccattttgattatatttgttttgaagttcatgaatgatttctcacaaggttaaatgatttctcataaagctaaatgcaacttatgatttctgacatctttaacaaaggcatgataatgatactgcatgtataattaaacacaacattatatttgaattattttattagtgctcttttctatcctcctacatttaaaaacgtttcattttatgtgttaatttttatttcataccaagaagcatgaaaaaaaatgtacagtctgttttctagtagctttgtgatctgacaaaatcagatgccaataatctttgaatatctgacttatggttaacctgagtcacatgggaactaaagacaaaggtgttcatatttggatacccaacactttgcactccttaatcccccactttcttattgatattacttctctagctcatgcacatcctccccaaataccatctaccccagaatcatcaaagatctttgtctcatgtctgattacctggggagggtttgacttatgggagagaaggcttcttacactcagaaggtctacacgttactcttactaatgacgaagtgctgggtctatttagcctgccctgggctttctgcatagctccctcctcccaccactgctgggtgagagcatcattggtgatcctaggatctgaatgaaaattcaaaatgtttctcccataaaatctgtattgtaaatgatggtttggcatacttatttgaattaatagtattttactctatgctaaacaggttttattgtgagctggccttggaattaaaccaccaccaacacacttttggattatcagaaggtggaaggagtgcaaagtatggtgaccattctatttacgttctataatagattgtaaaaagtggccacgaattcctcctatctgcagggtatgcatgtccctttgcattgtcttgatccttcttcccattaagaggtagggccaacttgattctagacttgcccatgttataatacttgcattggccaatggggtattaccaaaaatgattttagcagaggcccaaaaaggtcttacatattggagtttgctctttattgagtctggaaacccttccaccatcatgtgaccaactagtgacatgtgaccttagaccaagtagcctaccaaacggctggtatatgaatggagctatcctagattacccagccccaattcggccagctcagaccagaatattcggaactgtgaaaaaatgaaatggttgttgttttaagccactaagttctgggatgatttgttaggcaggaatagataagtgatacattttctttgtaaaaatttrttgtaataacttgagatgttcagagagctatgagaggtgatagctatagcaaaataatatttttagtgtcaaccacagaatcttttttttcttctgaaaacaaagcagatattgtccaactaaatacagcctaaattagatgccaagttgctaaagtctataataggcatcacttatatttactccagaagttatgtagctagtcttttcagcatcattcacagttaagactttagaatctttaaaatgtttcaggctatggtggttgtgataaacattaatatttataaaaagggatgattgaatccagctgtatttaagaaactctatatcatctaagacttactcctggctttgttatcttctcaaattcttttactatgatgattttttcttcctttaagctgcaaaaaaaaaaaatcaagtttgaaaaagtacaaagaaataagctctttctgtaataacaactttctatcttctcatcccagaatgtcattcccatgcttgtctgccaggcaacctggtgtccattctttatgacgcctttcctgaatcacaggtgcattggggtgcttcctcctccccaggactcccacccaactttgtgaacacaacccacttagaggagttatctcagcacattataaatgttggggacacgggcctcgggacacagggtccttcccagcaggctctgggctttttctcctttatgttacttggaatgggcgggtgcctgcctggattcctgctacagcctcccaatcgatctcctactttgcctgcatccacctt

SEQ ID NO: 705840 - DNA, 3346 bp, Homo sapiens
gtagctgggcacatcttggctgtctgctctaggactgttatagaaaaacaggtcaaagtgtatcaccattatcccctaagccaatgagtttcagatgttgtttttaaaacaactctaggttattaaaactgttttgagagtcatttatacatttttcaaagtaaaatgaattttaattcattatctcctaaaacataaatacaggcctctcatcccttttctactgagaggaagtggaatgcactccgacaaggataaggtaatacaaatatatgtgagaggttaggacatttggttgttttggtatgtgtgtaggtgtgtgtgtgtgtgcgttttgttgttgttgttgtttttgagagggagtctcactctgtcacccaggctagagtgcagtggcgcgatctcagctcactgcaatctccacctcccgggttcaagcaattctcctgcctcagcctcccaagtagctgggattagaggcatccaccatcacacacccggctaatttttgtatttttagtagagacagggtttcaccatgttggccaggctggtctcgaactcctaacctcaggtgatccaccgccttggcctcacaaagtgctgggattacaggtgtgagccactgtgcctggccatggttgttcttcaaggaaacaattgtgtttgtgacacttgtttctaatgtccagaaatgtttggtgaggtcaggagagaccttttccgcagggtgagggctccgaattatcgagtgatactcccaaacaccctaaggtcttttgtgcattcccagagcctagatttagtttgataggatcaatcgcaatgcagatatttcagtttgtgagacaatacccctctttatccaacctgctggttactcttgatacccacacacttttatatccatgcaaggcacaatgtttaaatatcaacggtaagtagcacacctttaggacgacctgatgtcccaacaattcttctagttccttctgctcttttaataactgcttttgtttagatgccaaatcttctcgtaaatttttaatttctaatttcttctgcattatttctttacgtaattcttcagtgctttctctcaatattttcatcttcttctccatttcctttaaaagtcgtgaagatgattaggttatatagtctgagcaaacatttatctacctaaaaactgaactaaaactaatttcacccaccattttgattatatttgttttgaagttcatgaatgatttctcacaaggttaaatgatttctcataaagctaaatgcaacttatgatttctgacatctttaacaaaggcatgataatgatactgcatgtataattaaacacaacattatatttgaattattttattagtgctcttttctatcctcctacatttaaaaacgtttcattttatgtgttaatttttatttcataccaagaagcatgaaaaaaaatgtacagtctgttttctagtagctttgtgatctgacaaaatcagatgccaataatctttgaatatctgacttatggttaacctgagtcacatgggaactaaagacaaaggtgttcatatttggatacccaacactttgcactccttaatcccccactttcttattgatattacttctctagctcatgcacatcctccccaaataccatctaccccagaatcatcaaagatctttgtctcatgtctgattacctggggagggtttgacttatgggagagaaggcttcttacactcagaaggtctacacgttactcttactaatgacgaagtgctgggtctatttagcctgccctgggctttctgcatagctccctcctcccaccactgctgggtgagagcatcattggtgatcctaggatctgaatgaaaattcaaaatgtttctcccataaaatctgtattgtaaatgatggtttggcatacttatttgaattaatagtattttactctatgctaaacaggttttattgtgagctggccttggaattaaaccaccaccaacacacttttggattatcagaaggtggaaggagtgcaaagtatggtgaccattctatttacgttctataatagattgtaaaaagtggccacgaattcctcctatctgcagggtatgcatgtccctttgcattgtcttgatccttcttcccattaagaggtagggccaacttgattctagacttgcccatgttataatacttgcattggccaatggggtattaccaaaaatgattttagcagaggcccaaaaaggtcttacatattggagtttgctctttattgagtctggaaacccttccaccatcatgtgaccaactagtgacatgtgaccttagaccaagtagcctaccaaacggctggtatatgaatggagctatcctagattacccagccccaattcggccagctcagaccagaatattcggaactgtgaaaaaatgaaatggttgttgttttaagccactaagttctgggatgatttgttaggcaggaatagataagtgatacattttctttgtaaaaatttattgtaataacttgagatgttcagagagctatgagaggtgatagctatagcaaaataatatttttagtgtcaaccacagaatcttttttttcttctgaaaacaaagcagatattgtccaactaaatacagcctaaattagatgccaagttgctaaagtctataataggcatcacttatatttactccagaagttatgtagctagtcttttcagcatcattcacagttaagactttagaatctttaaaatgtttcaggctatggtggttgtgataaacattaatatttataaaaagggatgattgaatccagctgtatttaagaaactctatatcatctaagacttactcctggctttgttatcttctcaaattcttttactatgatgattttttcttcctttaagctgcaaaaaaaaaaaatcaagtttgaaaaagtacaaagaaataagctctttctgtaataacaactttctatcttctcatcccagaatgtcattcccatgcttgtckgccaggcaacctggtgtccattctttatgacgcctttcctgaatcacaggtgcattggggtgcttcctcctccccaggactcccacccaactttgtgaacacaacccacttagaggagttatctcagcacattataaatgttggggacacgggcctcgggacacagggtccttcccagcaggctctgggctttttctcctttatgttacttggaatgggcgggtgcctgcctggattcctgctacagcctcccaatcgatctcctactttgcctgcatccacctt

SEQ ID NO: 705841 - DNA, 1382 bp, Homo sapiens
tggaacagagcttgtcatacagaaggtggtcagtaaatatttactgaatgaatgaattaatgcaaaaatccagcttttatcaaaaagtaaggagagagaaatggttaacataggggattgtctagacattcaattcattcacttaaaaaaaaggctttaatgaggctaaattcacatagcatacaattcactcacttgaaatatataatgggctttagtatattcacagtcttgtgcatctatcaccacaatcaactttagaacattttcattcctccaaaaagtatcccaaacctcttagccatcaccctatgttacccaaattccccagccctgggcaatcacaagtctactttctatctctatagatttgcctatttggaacatttcctacaaatgaaattatgtaatatatggtcctttgtgaatggcttcttttgcttagcataattttcaggattcatccacgttgtagcatgtcatttattttttcagatttccaaattctaattcttcacaagttataccacgtgaaggctacatgctgggataatagtagtttatcttagcaattttaaattatggctgcacatcagaatctcctttcccctgccccatgacactttttttttttttcccccgagatggagtcttgctctgtcgcccaggctggagtgcagtggtgcaatctcggctcactgcaagctctgcctcccaggttcacgcttttctcctgcctcagcctcccgagtagctgggactacaggcacccaccaccacgcccagctaattttttgaacttttagtagagayggggtttcaccgtgttagccaggatggtctcgatctcctgacttcctgatccacctgccttggcctcccaaagtgtagtaatcccaaagtgctgggattacaggtgtgagccaccacgcccagccaccatgacgcttttataaaacccagagtatcaagctccactctagagtctatgatgtgcagtctgagctgacaaccattggattagctaattaccttcagtgggttgttatttaatgttatgcatttgacttttacctgatattgcaagtaatggttatatgaaacttgctgctacaagatattgtccctaattggctgttggggaatcagatcttggacatttgtcatttaacaagtgtaggtgctgtctgtagagtaatgagaaaacacagagctggaagttgtaatatgctttgattctatctcaagctttttcctttgtgacatgaggcaagttgttcaacttcttatcacctcagtttttctatctgtaaaatgatctatcttctagagttgttggaagcattaaaagaaataacgtatgaaaagcatacgaaaaatta

SEQ ID NO: 705842 - DNA, 1382 bp, Homo sapiens
tggaacagagcttgtcatacagaaggtggtcagtaaatatttactgaatgaatgaattaatgcaaaaatccagcttttatcaaaaagtaaggagagagaaatggttaacataggggattgtctagacattcaattcattcacttaaaaaaaaggctttaatgaggctaaattcacatagcatacaattcactcacttgaaatatataatgggctttagtatattcacagtcttgtgcatctatcaccacaatcaactttagaacattttcattcctccaaaaagtatcccaaacctcttagccatcaccctatgttacccaaattccccagccctgggcaatcacaagtctactttctatctctatagatttgcctatttggaacatttcctacaaatgaaattatgtaatatatggtcctttgtgaatggcttcttttgcttagcataattttcaggattcatccacgttgtagcatgtcatttattttttcagatttccaaattctaattcttcacaagttataccacgtgaaggctacatgctgggataatagtagtttatcttagcaattttaaattatggctgcacatcagaatctcctttcccctgccccatgacactttttttttttttcccccgagatggagtcttgctctgtcgcccaggctggagtgcagtggtgcaatctcggctcactgcaagctctgcctcccaggttcacgcttttctcctgcctcagcctcccgagtagctgggactacaggcacccaccaccacgcccagctaattttttgaacttttagtagagatggggtttcaccgtgttagccaggatggtctcgatctcctgacttcctgatccacctgccttggcctcccaaagtgtagtaatcccaaagtgctgggattacaggygtgagccaccacgcccagccaccatgacgcttttataaaacccagagtatcaagctccactctagagtctatgatgtgcagtctgagctgacaaccattggattagctaattaccttcagtgggttgttatttaatgttatgcatttgacttttacctgatattgcaagtaatggttatatgaaacttgctgctacaagatattgtccctaattggctgttggggaatcagatcttggacatttgtcatttaacaagtgtaggtgctgtctgtagagtaatgagaaaacacagagctggaagttgtaatatgctttgattctatctcaagctttttcctttgtgacatgaggcaagttgttcaacttcttatcacctcagtttttctatctgtaaaatgatctatcttctagagttgttggaagcattaaaagaaataacgtatgaaaagcatacgaaaaatta

SEQ ID NO: 705843 - DNA, 1160 bp, Homo sapiens
cctgaaccctgacagcctaacaactcaactcatgtgcaattgtccgttgtcacaatcatcctccctgattaccaaaataacctggcattcatgaggagaaaggtttcaaagagtgaattttaaggctgagcagcattaagacagtcccaactgtgtatctattggaaacattaaacaagcaattaagcacttcatctccagtcattccacattatttatccaggtgagacagcgtcccaaccagatataatgttgctttaggaagcatgaattcagctgtgatttttaagacagcaaaaaatttgtatagcaattatatatggatcatgagtcaaaaattctctaaatccaaatttgaacatatagtttaaattttatgttctttctaccgtttgactctgcttccaggctctaccagtcaatgtcatcctaaacatctgcatcaaagttagccttcataaaacatcattcagcaaattgctccacaggggagtaaagttcctccctccctcccctaccctctttcttcttttcctttcctttcctatctgtggagtgcctacatcagccatggccctaggtgctgggacctccacaatgaacaaatcagatatagtccatggtttcatggagttgatcgtcatcaaaatgtccccttgactagagccagtcattgcaagccctccaaagtaaatccccgccctccccaggcttatctcgtgattgtgccccygcaccactcaaacttccaaatcacagcaatgttaaactttgaattcctggagtttgtgtttgtctcctgacacttggtgtttcactactcccttatcatgctgctccctaaggtgacacagtctgatctgcatttcaattctgactacatttttctagctgtggtatcttgaacatgttacttaatctctgggagcttcaatttcctcatcaggtaaatgaaaataataacatctacatgtcagggatgttgaaaagattaaatgagataatgagtatgaaaacatccaatagttggtgatgagtttctcctacaaccccagtgacaaatgagcacacttttcaaattcccagagcatgattacaccaccagactgttgagccactttgtattatcaatcttttttgtgtctgtcttcacaacctac

SEQ ID NO: 705844 - DNA, 1135 bp, Homo sapiens
attagtaactacgtcgtgggcctattgtggggactgagttaacatctgtaaagtgcttagaacagtgtctaatatatagttaattctcaatacacgtaagtcgttttcattataattatgttcctctatgtagtagaaagggggtcttgtcttcaccatatcggtagtgaggactccctcagctctaagtcatttctggcaggtgagagggtgggacagctctagcagaatatgggtttaaaggggaaagcaactaataggagatgcagtggggtaacgggaaaagaacagttttaaggaagaggtggagctcaaaatctgagtgacccaaaggacagcttttgacttcaagaagtccttcttgtttgttggcttgcttccagcttacgttctttacatctgctggctcagcgcattgggcagctttcttcttttttctcagcgacaatcttttatcctatctgaccaggatttctctgctccccgatcactgagaaagcatgtattctcccagcttttcttcagtacttctgtccctaaaacaaggactcttttcagagctctcttaaaaagttttctaaagactttcactgttactaacaaggagtaaaaaggcaagcatatattttttatcatttcatcccagaggraaaaaagttgtaaagttgttaatgctaagtctttaatcttacaaaagattacataagataacctttcactttctaagaagctcccctttcccaggaacaggatgggggtcctgagaggacaagcagagagaagacaggcttggcaggcactatgtcagcccttttggctcctctcacccctgctggcctcaccgtctcagagccacaggctgaaaggggaaacatgatagtcatcgggtagtggagtatggctgagcacagcaggctgaggaaaagggaagggaatcccaatagcaactacccttcctgtttgcagaccatgcccatgctgaggtaagcaaaacttggaatcctggggtggatctctgctatggttgcaatttcaggtgcttccctctttttatttgccttcccaattcactgaagattaggcgatggcagcggactggtagttcatgtattgtcttacaccctctatgtatgct

SEQ ID NO: 705845 - DNA, 626 bp, Homo sapiens
tgacctcaagtgatccgcccgccttggcctcccaaagtgctgattacagacgtgagccactgcacccagcctaattgttaaattttaatatgttgttgatggaaataatatttaattggtggaaatttctgcctcattttcatttgtatttcttacatatgatagggatttttatagtggaatgtatgtatatttagtatatatcattgttgacagattgattattctgccaatagaaactgaaataaagaataaggtaataatttttactaaacttaygaacttctttgcagtacttgaaaatggcaaacaataccaaagaattagaagattgtgagcaagctaataaactgggagcaattaacagcacattaaggcaagttttattttggtaatattaagaaaatattctcgttgatatcaagaatcaattttttatgattttggtaaaacattttcgaacccattaaagttttaactaatatatttttaaaaggaagaaaaagtttttctttatcctaaatttcataatagctttgcctcttcttggctgatttatccttaaatttctagaatgtatcatccatagtaaatcttttaaaaagtagaaatttacaagattgttc

SEQ ID NO: 705846 - DNA, 536 bp, Homo sapiens
attttttgtatttttagtagaaayggggtttcactgtgttagccaggatggtctccacctcctgaccttgtgatccaccggcctcagcctcccaaaatgtggggattacaggcatgagccaccacaactggcctgtgcactcctgatttttaaggacgaggctgagtgagactgaggcaaaatcctttggcaactgcaataatatcatttatttacagcatatgaataagtttcaaaaagccacatatattatataattctattcactacatataagccatgtacagtgatatggattttcctcagatgagcaatgtgactatgtgaatatttcaagggcttgttaataggtgtgtatattcacaggtgtatgtgtgtaataccaacagacatcctggctttgtagtagatgcctgtgttttgtattatgcaaaatttattaaatcctgaaaaatagtggatgggtgataaaaagaaagtgctgcttcaccaagaaaaaaatattctgaaccttagactatagatggtaacttaac

SEQ ID NO: 705847 - DNA, 661 bp, Homo sapiens
cacccaagtaaaagagtatgtgtattaataaggcaagagattcatgaacttataaagaaatatattccccttttaactggagaaatcccaataagggaggatcatctggcatatacattgtatttaataaaaatttatctttaaatgaggacaaacacaggctatttattcatcccatgctataacaaggaagacagtcaccatctcttgcatttggaacactcaaargggagtgcacaagttttacggtgaaaaaaatagaagactttaggtatgttctaagtggaggttgttggcatggggaagctgaaggcagggtaactagaagcacggcattttaggtaatgagttcagggaatatatttggcttttctctcagtggctctgagttgtaagtatgcaggggtggagggcatgatgagagcaaaaaaatagggaaggtggcggtcattgaccaaatcctggctgtgctaagctgattgctacagagactgtgatttggccttctaagctgcctgctgaagagaatgtgggtctgtcattatatgtggactggtcattgtccatttgtatacccaatctctcatatagaagaccagtttataattttataaaaggttgtaactcagaaacagccagatggaagagatacatagggcga

SEQ ID NO: 705848 - DNA, 570 bp, Homo sapiens
ttccccactacgtgtattacaaggtcaataaataagacaacaagccattttgatgaatacaaaattcttcagttggaggttgtgaatgacatgtgccattctatatcagccttgccctctacagtgcttctttattggaggctgtttttgcgtattatgaaggaaaccctcgttgacactcataggtaatactgtgttcagcatgaggatgtaatgagccaaatacagaatgtgggaaattatacaggacaaatcaycaaatttcttcctttaaaaactgaaaagaaaaaaaacctataaataaaggaaacttgagagacatttcaaccaaatgcaatgtgtgaatcttgatccaaacaaactaaatgtaaaataacattcaggagacaatcgggaaattcgtgtgctgactggatattcaatgatattaaagaactgtggtcacattttttaatgtgataataatattgtgctttcatgtttttacagagtccctatgctttaaaggtatacattaaaatgtttacaaataaaattatataatatcttggatttcctttgtcaacctta

SEQ ID NO: 705849 - DNA, 567 bp, Homo sapiens
ggactacaagtgcacgccaccgtgtctggctaatttttgtattttttgtaaagatggggttttgccatgttggtcaggctgttctcgaactcctcagctcaagtgatctgcctgtcttggcctcccacagtgctgggagtgtaagccaccacacctgtctaaggaaagggatttaatgcaggtattgcaaaagtatcaaagtaagcttgaccaaggtaggtggaaattagtaaacatcaaagcactacaacaaaagcttttacaggatattggccttaaattaacatacatatgtttgttaacaaataggctgatcctttaactgaaatcttagcgtggtcttttaagaatggcactttcattttttaacagttatttactgagtgccaagtactggcaaggcttggagctatatttgggaatctgccagagttgggtggcaggggaggttacaaagaggtatragaaatccctcctattgattagaggtataagaataaaattaaaaaagaaatccctgaactctccaggggaggttacaaagaggtataagaaatccctcctatt

SEQ ID NO: 705850 - DNA, 2902 bp, Homo sapiens
  misc_feature 1180, 1181, 1182, 1183, 1184, 1185, 1186, 1187, 1188, 1189,1190, 1191, 1192, 1193, 1194, 1195, 1196, 1197, 1198, 1199,1200, 1201, 1202, 1203, 1204, 1205, 1206, 1207, 1208, 1209,1210, 1211, 1212, 1213, 1214, 1215, 1216, 1217, 1218: n = A,T,C or G
  misc_feature 1219, 1220, 1221, 1222, 1223, 1224, 1225, 1226, 1227, 1228,1229, 1230, 1231, 1232, 1233, 1234, 1235, 1236, 1237, 1238,1239, 1240, 1241, 1242, 1243, 1244, 1245, 1246, 1247, 1248,1249, 1250, 1251, 1252, 1253, 1254, 1255, 1256, 1257: n = A,T,C or G
  misc_feature 1258, 1259, 1260, 1261, 1262, 1263, 1264, 1265, 1266, 1267,1268, 1269, 1270, 1271, 1272, 1273, 1274, 1275, 1276, 1277,1278, 1279, 1401: n = A,T,C or G
gtttggaaataagctgtgatttggtctcatgtgccaattaaggaagggtggtgcacaataacttgagcagcttagctcattagcattggccagagaggcggcgatgcatcggaggcaagagtagggcccgcaaggtgccctgcctggcaccccttgcagttgtgcacatactgacccctgaactagcatgtttttacccaactgccctgcctccagttcatcccctgaaatgttctggaaaagcaaatctcagggtataaagagccgtcgttctgggttttgttaatttaaaataattcccagaagcaatcttgctgctatgattataatatagcaaaatgtttagccctcatgctaggcaggtttttttggtttgctttaatagagacagggttttgccatattgcccaggctggtgtcaaactccctagggtcaagcgatccacctgctttggcctcccaaagtgctgggattacaggcatgacccactgcacccagctaatgctaggaagtttttaaaaaataataatttcttttaactcagcaagctaagatgaatttcctaggtgagaaatttcagattgatattgcaagtgttttctgtgcagggtgtcctgatacttgttgcggcagtatcacttcccccacccccagccttgagattgtaggtgttaaagaaccttttaaatctcagttaatcttctgtctcccactcatctgttcatttattcaacaaggtacctttacatgtatcttagtcaccagccaaactgggctggtcaccatcccaaatatattttgttgtggtctacagtctagaaaccctcttcctttgctttgtaaacttttttgtctcctttgagatgtggctccagtgtgcctggggagatttccctccaccccaagcaaaattgtctccttacttctgtagctctttgttactctgctttcttattgaaaaagtgttagtccaaaatagagtcattctcattcccattttgtagctgcagaagcattctcagtgaccatggatttttccaacctcccaggcagtggataacagtgatttttgcacccaggtctgtctggctgtgaagcctgtgatcctatgaaggcggatggggaagggacgttacctcggagctgggtcttcagactttagaactggctttttcaggnnnnnnnnnnnnnnnnnnnnnnnnnnnnnnnnnnnnnnnnnnnnnnnnnnnnnnnnnnnnnnnnnnnnnnnnnnnnnnnnnnnnnnnnnnnnnnnnnnnnggtagagtgcagcgtgagctgagatcacgccactgcactcagccctgcgtgacatggcaagactctgtctccaaaaaaagtaatgggatactttagttgataacttttttaaaagaattctntgctaaaagggttcattttgtgtacagaaattgtatgttttaagtctgatgaattttaattatacttcacacctactagaagcaagtcacaagtcagtatataattatattttgctttgtttgcagagtacgttagtatatatccaagtactttatagtagattgataattctgtgaaggaaatgaaggcgtgagtatcagggtaaccaaatgaaagtttcctgactaaaggtagctggtttaaacctacaaacatttacatgtgattggtatgatgggtactgaatgaattgggttggatcagtataagttgatcatrtcatgtagaaagttattaaagtagagaaaagagtttttactccagactggtttagggcaggtctttctgatttaaaaacagtgtccaggaagctgcacagatgagcagtactaggtcatgctggtggctgagctggagtttggacctgaccctcaaacacaggtgcatgtgcacatttcgtggtctccttactgggcttttgacttttcccttattttctcctgtgctttatttctgtaacaaatttcccaataaaaccaacatgttccttttatgtttttgtaaaaattatttcttaagtactgttttttttatttttttgagacagagtttcgttcttgttgcccagactggagtacaaggggtgtgatcttggctcactacaacctccatcttccgggttcaagcgattctcctgcctcagcctcctgagtagctgggattacaggtgtccaccaacacacccagctaatttttgtatttttagtgtagagcgggtttcaccatgttggctaggctggtctcgaactcctgacctcaggtgatccacccacctcggcctcccaaaatattgggattacaggcgtgagccaccatgcccggccgcgagtactgttacttttaactccactagcagatttctgtttgtaaaaaagtcttcaaacaacagtaataataccaaacaattaccaagtatgctctgtgcctggcacagttgtatgcacattgcatgtgcccctctaaccctggtgtggggcagagtgtaggaacctagttcagagtcccagccattgagtcgcagagctcgtatctgagtccagcctgtctggctctgaaacccatactatactggtaactccttttcttcatcacttgcagaaaatagatctatcacacaggaggaaaagttagccaactgagacaaatcagcaaaagaagaaaatatgtctgcctttttttttattctgaaagtgataggtgttcattatagaaaaatggagtgtatacaaaactgtgtaagagagtaaataagtgttgcataagcctaccaccgcaagatgatctgttaatatttttgttgttatttccatttgagtcattttatggacttatgtaaggtacttccagtttagtattagtttacttattactactagttgatttatgccacattttttccca

SEQ ID NO: 705851 - DNA, 1230 bp, Homo sapiens
tgtttttaattcatttagtttaattctaaagatagcattttatgaagataataaataccaataataaggaaattttaaaaaatctttcattattaatttttcagtgtacccagaccagaatcaagattgagaagccttggaaaaataagcaactcaattttcccctttggtctaaggaagacattgattcaaagtcctctgagttccattaagatttcaggggtaatcctctcacttgtgtctataattgatttattaataaaataacctctgattagttatacctttcaacagaatgtttttccacttacacaataaaaaattaaacagtttagacttgaactaatatttgaactaataattgtgtacccatctgtgtgctatgcactttcatataaacagtgatacaaaatctcttggcaacacatggccagcgttaagtctctgtaactggctcattgtatttttttcaatatgttgcaatcctttttgcatgtggattccacacctttctaaacacttagtaatttacaggaacagcaacctttttttttcctggtgagaggttatggaatttgtttttaccgaaatgcagaacttccttttcatttcaagtaatgtgacactgtaagctgctagcatggccacaagtaacactgaaacaaaatttcaggcaaaatggatcatcaatgtttaattcaaatctttaagaacggcgactgccttgaaaggatcttcctgaataatctcttctaggtgtctaaaactatattgtagatgaaaagtactttttttattttttatttttttgagatggaatctcactctgttgccaggctggagtgcagtggcgcgatctcagctcactgcagcctctgcctcccgggttcaagcgattctcctgcctcagactccygagtagctgggactacaggcacccaccaccacgccaagctaatttttgtatttttagtagagatgggttttcactgtgttggccaggatggtgtcaatctcctgacctggtgatccgcccaccttgacctcccaaagtgctgggattacaggcatgagccaccatgcccggcccgaaaagtacttttttacaaagagagaataaagtaagaccctgtagataacctcctcacactgttttaccaccactctctcaaaacaatttattcacagagaattctggagttttgggatttggacatattgcagggttcc

SEQ ID NO: 705852 - DNA, 596 bp, Homo sapiens
ctgtaccttaactgatactcatccttactccatgtgacatcaccctaagagtattccaggactgtcctgtcctattttggattagggttcattctactctcactacccccaacttccagaaagtttaaccacatttctctttcctagtttttcttggataaatctgttttcatgcctcagtttagaatcctgatttggccttatattctgtctcactatcctcaatctctcttgggtcatgctggctggatgtgtacttrctctcagcaatgtcccagcttcaatatggctgtgatgctctcacagtcttcctcaaaaaaagaagtttgcctcatctttctaggccttaggatctcacattttccctactcctttttccactgaacctctttccctagtgcatatataaatacattacaaccacaaaagaaaattgctacagtaagagaagtaaggtagactcttggcagtttcattttcatgtttgtagtttcagcatttgtcagctctttgcagttaagtttaagtggccatggcatctaatgatctacagttttgctttgactttgctagtcattgttgtcatggtattgcac

SEQ ID NO: 705853 - DNA, 596 bp, Homo sapiens
ctgtaccttaactgatactcatccttactccatgtgacatcaccctaagagtattccaggactgtcctgtcctattttggattagggttcattctactctcactacccccaacttccagaaagtttaaccacatttctctttcctagtttttcttggataaatctgttttcatgcctcagtttagaatcctgatttggccttatattctgtctcactatcctcaatctctcttgggtcatgctggctggatgtgtacttactctcagcaatgtcccagcttcaatatggctgtgatgctctcacagtcttcctcaaaaaaagaagtttgcctcatctttctaggccttaggatctcacattttccctactcctttttccactgaacctctttccctagtgcatatataaatrcattacaaccacaaaagaaaattgctacagtaagagaagtaaggtagactcttggcagtttcattttcatgtttgtagtttcagcatttgtcagctctttgcagttaagtttaagtggccatggcatctaatgatctacagttttgctttgactttgctagtcattgttgtcatggtattgcac

SEQ ID NO: 705854 - DNA, 596 bp, Homo sapiens
ctgtaccttaactgatactcatccttactccatgtgacatcaccctaagagtattccaggactgtcctgtcctattttggattagggttcattctactctcactacccccaacttccagaaagtttaaccacatttctctttcctagtttttcttggataaatctgttttcatgcctcagtttagaatcctgatttggccttatattctgtctcactatcctcaatctctcttgggtcatgctggctggatgtgtacttactctcagcaatgtcccagcttcaatatggctgtgatgctctcacagtcttcctcaaaaaaagaagtttgcctcatctttctaggccttaggatctcacattttccctactcctttttccactgaacctctttccctagtgcatatataaatacattacaaccacaaaagaaaattgctacagtaagagaagtaaggtagactcttggcagtttcattttcatgtttgtagtttcagcatttgtcagctctttgcagttaagtttaagtggccatggcatytaatgatctacagttttgctttgactttgctagtcattgttgtcatggtattgcac

SEQ ID NO: 705855 - DNA, 933 bp, Homo sapiens
tgaaatgatttcttcaaaggctggaaaaaaatctttcaattcagaatcctactcaaagcagccttaaaaaataatcatacaattaaaacattttcagaaaaaaaactgagagaatctgtcaccatcactaaagaaaacactaaataatttttttaactttttttgtctttttttattgtacttttaagttctagggtacatgtgcacaacgtgcaggtttgttacatatgtacacatgtgccatgttggtgtgctgcacccattaactcgtcatttatattaggtatatctcccccgtgcccccaccctacaacaggccccggtgtgtgatgttccccttcctgtgtccaagtgttctcattgtttaattcccacctatgagtgagaatatgcggtgtttggtttttttgtctttgcgatagtttgctgagaatgatgctttccagcttcatccacgtccctgcaaaggacatgaactcattcttttttatggctgcatagtattccatggtgtatatgtgccacattttcttaatccagtctatcattgatggacatttgggttggwtccaagtctttgctattgtgaatagtgctgtaataaacatacttgtgcatgtgtctttatagcagcatgatttataattctttgggtatatacccagtaatgggatggctgggtcaaatggttctcataaataattttattttatgagaaaaaagtaatcccagaaggcaactcagggaatcagcaatgaatttaaaaagcaatgaaaaatataattatgtatattagtaacagttataagactgagtaaaaatagcactaatactggtctctgagtgtactgcatatatagaagtaaataatcagcaaacaataaagtagcaaggtaaatggaattaaagtgttttaataggaaataatgaaat

SEQ ID NO: 705856 - DNA, 1066 bp, Homo sapiens
tgcctcctttaatttcttctatcctttataggaatattgaaagcactaaatgacaaaatatatacaaagcacagagcacaatattaaattgcctaagaacaaaaaaagaaaaaagaatagttatgttggcaaggatgtgaagaaaaaggaactcttatacattattgatggaaatgtaaattggtacaacttctacataaagcagtatgcagatttttttcaaagattaaaaatagtactaccatttggtccggaaatcccactactggtatctatgtaaagaaaaaaaattattatatcaaaaaactctctaaacttgtatgtttattgcagcagtactcacaataggaaagacatggaaccacccctcatgtccattaccagatgattcaacaaagaaaatgttgtgtgtgtgtgtgtgtatatatatagatatatatggaatatttttattccatataaatatacaatggaatagtattcacacataaaaaataaaatcatgtgtttgcagcaacatggatggaattggaagccattatcttgagtgaaaccagtcagacacagaaagacatatgtagcatgttctcatttataaatgtcaattaaagatgtacacatgaatatgaagttggaatgacagaaaaaggaggctcacaggagtgaggcagtgggaggaagtagatgatggtaaattacttaatgggtacaatattttattcaactgatgaatacaccaaaatccctgactttaccactatcccatcaatccatgtgacaaaattacacttgcaccccataaatttatagcaataaaaaagtgcataaaaataaaattgcacaggtactacgatcatagctatgcaaatacatgtaaagattagaagaaaaattagcaacatgtgtcaatacatgtgacaatagtatctttatatagacattattaaaatkagtgattttatatcttgtcctgctagtcggtatttttattttgagtattgattgtacttttatggacaaatgcacagtaaatgttattcagctttaaattccccttggaaaattg

SEQ ID NO: 705857 - DNA, 695 bp, Homo sapiens
tcctctgatcatttctgctcatggagcggttctgagattggaggatggcggccgctaagcctgcattggtgagaggtcccccaagctctcgacagaccctgagccagtcttgtaagcctttgttctttcttggggctatggccgctcggcactcctttgtggcttgctcatagattagctgttctatcagaggcgcagcttgctctgamtctccaaaaatacgctctgctgcctctgtcattctggccacaaaatctgagaaggattcctgaggtccctggattatctttgttaactgaccagtggtttcacctgctcgagagagcgccttccaggccctaatagccgtggaagaaatctgggcataagctccccaatggtagtttgtctgatcagcagaataagctccctgacccgttacaagtcaaaagtccaatctctctgctctggagtcaaagcagctgcgtttgctcgggcctgcgcttgtgcagcttcgtgccaaagcgctctccattccatatatttgcccatactagggagagcggcttttacaaccgtttgccagtcagcaggagttagtgccatgccggcgagcctgtctaactgcaccaaggtgaaattagcattggttccgtatttacggaccgactcggcatttctttaatttgtgagtattctaccggagcgtggacacg

SEQ ID NO: 705858 - DNA, 695 bp, Homo sapiens
tcctctgatcatttctgctcatggagcggttctgagattggaggatggcggccgctaagcctgcattggtgagaggtcccccaagctctcgacagaccctgagccagtcttgtaagcctttgttctttcttggggctatggccgctcggcactcctttgtggcttgctcatagattagctgttctatcagaggcgcagcttgctctgaatctccaaaaatacgctctgctgcctctgtcattytggccacaaaatctgagaaggattcctgaggtccctggattatctttgttaactgaccagtggtttcacctgctcgagagagcgccttccaggccctaatagccgtggaagaaatctgggcataagctccccaatggtagtttgtctgatcagcagaataagctccctgacccgttacaagtcaaaagtccaatctctctgctctggagtcaaagcagctgcgtttgctcgggcctgcgcttgtgcagcttcgtgccaaagcgctctccattccatatatttgcccatactagggagagcggcttttacaaccgtttgccagtcagcaggagttagtgccatgccggcgagcctgtctaactgcaccaaggtgaaattagcattggttccgtatttacggaccgactcggcatttctttaatttgtgagtattctaccggagcgtggacacg

SEQ ID NO: 705859 - DNA, 695 bp, Homo sapiens
tcctctgatcatttctgctcatggagcggttctgagattggaggatggcggccgctaagcctgcattggtgagaggtcccccaagctctcgacagaccctgagccagtcttgtaagcctttgttctttcttggggctatggccgctcggcactcctttgtggcttgctcatagattagctgttctatcagaggcgcagcttgctctgaatctccaaaaatacgctctgctgcctctgtcattctggccacaaaatctgagaaggattcctgaggtccctggattatctttgttaactgaccagtggtttcacctgctcgagagagcgccttccaggccctaatagcsgtggaagaaatctgggcataagctccccaatggtagtttgtctgatcagcagaataagctccctgacccgttacaagtcaaaagtccaatctctctgctctggagtcaaagcagctgcgtttgctcgggcctgcgcttgtgcagcttcgtgccaaagcgctctccattccatatatttgcccatactagggagagcggcttttacaaccgtttgccagtcagcaggagttagtgccatgccggcgagcctgtctaactgcaccaaggtgaaattagcattggttccgtatttacggaccgactcggcatttctttaatttgtgagtattctaccggagcgtggacacg

SEQ ID NO: 705860 - DNA, 583 bp, Homo sapiens
tgtccttcccagttctgtccctcccctctggtggccaccattcttgattttgtttccttaaatgtggcataagtatacataagagaaaatttgccattttaaccatttttaattgtatagctcagtggcattaagtctattcatatcgttgtacaagcatcactctcatccatttccagaacttttttaccttcccaaaccaaaactctggacccattaaatagtaacttccccttcctccggcccctgacaaccaccattctactttctttctctgatatggtttgaatgttttgtcccctccaaatctcattttgaaatgtgacctccaatgttggaggtgggrcctggtggggagtgttttggtcatggaggtgaatccctcatgaatagcttagtgctgtcctatgagttcatgtgagatccagttgtttaaagaggctggtacctccttgccctctgtcttgctccttctctgttgctggttctcactgtgtcatatgcaggctcctcttttgccttctaccatgattgtaagttttctgaggtctcaccagaagcagatgccagcatcatactgctt

SEQ ID NO: 705861 - DNA, 1171 bp, Homo sapiens
tttgtctagcactccacagtctacagagtgttttaacatagttctgtttttctcagccattccccaggagcagtccctagtagcccaggcacaggatggcagaggatggtgatttttctctgaggtggtatcgcccagtgcagcttgtgtgcaggtttcaaatctctctaaagtctgctgttgtcttaaatacttgtggggatttcttgttctactccatgctgaacctgtgttggcataaatataataataatgtgctaaattgttttccttggagtaaaactgaggttcctgctgatcctttagtttgagacaggaagatacccccgctaacctcagcccagggcggatgcttactactgtttgagatgcamgtgatcgcccaacgactccctgggtaaaggatgactcctcccatgtaaacaagacaactagttcgcagagcgaagagaccagctcagttcccctggctcaaaggggatggggctggccgttcagtccaggtcttctggtagaaggctctttgcacgtgccacccagcctgatgggcagggagccacagctctggtctcggtgggtgtaactaaccaagaagagctttaatgtaaggtctgtagggggcgctgccagggctgccatggaagagggctcttttttccctccgtctaacacaggaagttgagcagggcatattctttcgctgagtaacggggagtcagtgactttttcttccgtggtaaggtacatttgcaaagataaaaagccctcagccatttggttttgatcatctcaggagctgccaatgggcttccagaagcttgagtggcagccgtagaatggagcctgcctcactttccccccatggctctggccgcctgaccttatcctctgcagtcaacaaccctcagccacataaacagtcccaggtgctggttcaccagctgctggctgggcccaacaactgcttcaggtgtgcttttgtcaaaaggcaacattacagcaaagttagtttaaagatctcagctggctttatttgcgattgtagaatccataaaatagaataaatgccccaatgagttgaacagagggggttggtttttatggacagaagaaggactgaaggaagcagaaacagataacaaaaagtggattggctgtttaaaggttattt

SEQ ID NO: 705862 - DNA, 1171 bp, Homo sapiens
tttgtctagcactccacagtctacagagtgttttaacatagttctgtttttctcagccattccccaggagcagtccctagtagcccaggcacaggatggcagaggatggtgatttttctctgaggtggtatcgcccagtgcagcttgtgtgcaggtttcaaatctctctaaagtctgctgttgtcttaaatacttgtggggatttcttgttctactccatgctgaacctgtgttggcataaatataataataatgtgctaaattgttttccttggagtaaaactgaggttcctgctgatcctttagtttgagacaggaagatacccccgctaacctcagcccagggcggatgcttactactgtttgagatgcacktgatcgcccaacgactccctgggtaaaggatgactcctcccatgtaaacaagacaactagttcgcagagcgaagagaccagctcagttcccctggctcaaaggggatggggctggccgttcagtccaggtcttctggtagaaggctctttgcacgtgccacccagcctgatgggcagggagccacagctctggtctcggtgggtgtaactaaccaagaagagctttaatgtaaggtctgtagggggcgctgccagggctgccatggaagagggctcttttttccctccgtctaacacaggaagttgagcagggcatattctttcgctgagtaacggggagtcagtgactttttcttccgtggtaaggtacatttgcaaagataaaaagccctcagccatttggttttgatcatctcaggagctgccaatgggcttccagaagcttgagtggcagccgtagaatggagcctgcctcactttccccccatggctctggccgcctgaccttatcctctgcagtcaacaaccctcagccacataaacagtcccaggtgctggttcaccagctgctggctgggcccaacaactgcttcaggtgtgcttttgtcaaaaggcaacattacagcaaagttagtttaaagatctcagctggctttatttgcgattgtagaatccataaaatagaataaatgccccaatgagttgaacagagggggttggtttttatggacagaagaaggactgaaggaagcagaaacagataacaaaaagtggattggctgtttaaaggttattt

SEQ ID NO: 705863 - DNA, 814 bp, Homo sapiens
tcatccctttctagttatggcaaataagaaaccaagaaacacaacaggattttggtaagtttcacattcttttggttttcaggtaattctggcccatattttcttctgtcattttttctttttctattatttctatcagtgattttaaaaatttatggccttgtttctcttcccctcctaaattaaactgattacakttttatatccccaactcctgagataagttactgctacatattgaacttatttcttatacactcgaggatttaatgctgcttcctttaaaactaagagcagttcttaattcatcttatttttagatgaaggcaggtgatgattactagccaaatatgtagtctccctttattacccaaaataggtcactcttttgatagttaacttcagctcattataggttttagaatttccaactggcttcatcataactagacttttatattgctgtggtgcaattcaattccaccagtttaagaagtggaagtccccaaagttttgttacaatctcttcctcccatctcttagttcaattatagtgtccaatctggcagcctagccaagatacttttgagatatcaatttataagcaccaagtactaaaaaagggcttagtttatatacatctcagaaggatgacgtttggcttgatcttattttcgtaggaaggtgatgcgttctcaagaaagagagacaaaagaaaggggagggacatatctcacctattgatgacagtattcattttatctactggttgtacttacttccttcaaagcaatactctagcacatagccatct

SEQ ID NO: 705864 - DNA, 814 bp, Homo sapiens
tcatccctttctagttatggcaaataagaaaccaagaaacacaacaggattttggtaagtttcacattcttttggttttcaggtaattctggcccatattttcttctgtcattttttctttttctattatttctatcagtgattttaaaaatttatggccttgtttctcttcccctcctaaattaaactgattacagttttatatccccaactcctgagataagttactgctacatattgaacttatttcttatacactcgaggatttaatgctgcttcctttaaaactaagagcrgttcttaattcatcttatttttagatgaaggcaggtgatgattactagccaaatatgtagtctccctttattacccaaaataggtcactcttttgatagttaacttcagctcattataggttttagaatttccaactggcttcatcataactagacttttatattgctgtggtgcaattcaattccaccagtttaagaagtggaagtccccaaagttttgttacaatctcttcctcccatctcttagttcaattatagtgtccaatctggcagcctagccaagatacttttgagatatcaatttataagcaccaagtactaaaaaagggcttagtttatatacatctcagaaggatgacgtttggcttgatcttattttcgtaggaaggtgatgcgttctcaagaaagagagacaaaagaaaggggagggacatatctcacctattgatgacagtattcattttatctactggttgtacttacttccttcaaagcaatactctagcacatagccatct

SEQ ID NO: 705865 - DNA, 1208 bp, Homo sapiens
aaaaaaaaaaaaaaawagaaaatgaaaatggaaaaaatttgtttgtgaagaaagacccctgaaaagaaagtcaactgccagtattaattatgaaagcaaaaaaagaaaagtctataaaagtaatggaatgtgaataaaggtagaagggatggacacacttttgcatatattagcctcagtaatgaagagccaggacacattcaaacctgtgccagactgtctacggaaaggatacaagtaaattaaagaagacaacccagtaaactaatttagtcttgcttccattaaattttcgatttttcatttagtaacttcattttaaaaatacgctgtcatggccaggcgtggtggctcacgcctgtaatcccagcactttgggaggccaaggggggtggatcacgaggtcaggagatggagaccatcttggctaacacagtgaaatcccatctctactaaaaatacaaaaaaatacaaaaaattagctgggcgtggtggcgggtgcttgtagtcccagctactcgggaggctgaggcaggagaatggcgtaaacctggggggcggagcttgaagtgagccaagatcgtgccactgcactccagcctgggtgacagagtgagactctgtctcaaaaagaaacaaaaaacaaaaacaaaaacaaaaaaagcactgtcataatatttatgacttttgcaacaacgatggcatttatcatcatgtgatgattatccatacatctgcctcttccaccaggtgagttcttgacagcaaagatggtgttttcatctctgcttcctccacagaccagcagcaaagtagatggcacagagcggacactgcaaatagtctcgtaagtgctgagcctaattacaaagcctaaactgtcacctcagaccgtctttcctacttgaaaagctgctagtgatttcttacccagtaccagctacatcatataagtacaaacaggaagccaacaatgcttaataagagttcaaaaagggaaaagaggaagcttcagacaagtggtaagcagcagaacagttcagtgaggccaccatcaggaagccgggcccaggaggagcttgagaagactgctcacggcaataacagttgaagttacgctcaaacagcaagaaaggccagagcacaatggtttaaaaaacatgggattacaggcatataaaagagcagaatacaaaaattcatcaaag

SEQ ID NO: 705866 - DNA, 1208 bp, Homo sapiens
aaaaaaaaaaaaaaaaagaaaatgaaaatgraaaaaatttgtttgtgaagaaagacccctgaaaagaaagtcaactgccagtattaattatgaaagcaaaaaaagaaaagtctataaaagtaatggaatgtgaataaaggtagaagggatggacacacttttgcatatattagcctcagtaatgaagagccaggacacattcaaacctgtgccagactgtctacggaaaggatacaagtaaattaaagaagacaacccagtaaactaatttagtcttgcttccattaaattttcgatttttcatttagtaacttcattttaaaaatacgctgtcatggccaggcgtggtggctcacgcctgtaatcccagcactttgggaggccaaggggggtggatcacgaggtcaggagatggagaccatcttggctaacacagtgaaatcccatctctactaaaaatacaaaaaaatacaaaaaattagctgggcgtggtggcgggtgcttgtagtcccagctactcgggaggctgaggcaggagaatggcgtaaacctggggggcggagcttgaagtgagccaagatcgtgccactgcactccagcctgggtgacagagtgagactctgtctcaaaaagaaacaaaaaacaaaaacaaaaacaaaaaaagcactgtcataatatttatgacttttgcaacaacgatggcatttatcatcatgtgatgattatccatacatctgcctcttccaccaggtgagttcttgacagcaaagatggtgttttcatctctgcttcctccacagaccagcagcaaagtagatggcacagagcggacactgcaaatagtctcgtaagtgctgagcctaattacaaagcctaaactgtcacctcagaccgtctttcctacttgaaaagctgctagtgatttcttacccagtaccagctacatcatataagtacaaacaggaagccaacaatgcttaataagagttcaaaaagggaaaagaggaagcttcagacaagtggtaagcagcagaacagttcagtgaggccaccatcaggaagccgggcccaggaggagcttgagaagactgctcacggcaataacagttgaagttacgctcaaacagcaagaaaggccagagcacaatggtttaaaaaacatgggattacaggcatataaaagagcagaatacaaaaattcatcaaag

SEQ ID NO: 705867 - DNA, 924 bp, Homo sapiens
ctttttttaatagcatcccgctcttatttcagaataaaaaaawttttaaggtatgttgagtaagaatctatagagcaatgaaaatgcaagagcaatagctatgggcaccaaatggtcaatcttcttatcataatgttgagtggaagaagccaggtccaccagacacatgctgctcatttatgcaaagtttggacacaggcaaaacaaaactagtttgatcgtgatgggaaacattagagaaatgcaaagacatgaccatcataattgtcaggagaaggcattggttaggattgggaagcggcaagcagaagcatttagggattggctggcaatgttttacttctcggctgagtgagggttgcatcggtgtttatttgataacacgttctaggggctgggcaagatggctcatgtttgtagtctcagtactttgggaggccaaagatgggaggattgcttgagcccgtgagtttgagaccagcctgggtgacatagcgagaccctgtctctacaaaaaattaaaaaaaaaaaaaacaaaaaaaaccagctgcgtgtggtggcacagcctcaaactcctgggctcaagcgatcctcccttggccttccagccactcaggaggctggggtgggaggatcgcttgaacccaggagtttgaggctgcagtgagctatgaatgagccactgcactccagcctgggcaacagggcaagaccctgtctcaaaaaaaaaaaaaatttaatttgaacacttctgttttgtgcagttttctctgttatattttactttttaaaaagaaaaagcaggctgctcacctcctgctgtgcagcctggttcctaatgggccacagatggtactggtccatggttcaggggttggggaccccaatgtatagtattattcttactttgtaaaataaaatgca

SEQ ID NO: 705868 - DNA, 1235 bp, Homo sapiens
gagcagtgatctcgctacctgctaagtgagtatcatttgattctcttcttcggagagaatactaggaagagttgtccttctcctgcctcatttcctcattcttcatctccattgctttcatgtgaaagttttcctttaaggctttgtcccggccgggtgtggtggctcatgcctataatcccaacactttgggaggccgaggcgggtggatcacctgaagtcaggagtttgagaccaccttggccaacacggtgaaacacctgtaatcccagctactcgggaggctgaggtaggagaatcgcttgaacctgggaggcggaggttgcagtgagctgagatcatgcgattgcactccagcctgggtgacaagggtgaaactccgtctcaaaaaaaaaaaaaaaaaagactttgtcccaacttcctactaacaataagctcattttttcttaaaatctggatatgtttttctcatggagatggggtgcggtgagagacagagaaaccataattaattagccttttatatggagggaatagggtggttatatttaaagagaaccatactttctcacaggaatggcgactctttgttagctgatgaagacactgactttgaagacagcttgaatcgcaatgtgaagaagagagcagcaaaacgaccaccgaaaacaacaccggtgagtcagccagttttcttttgtttttgaatcttgtgggggaagcagcccagctacttgggaggctgaggcaggagaatggcgtgaacccagggggcagagcttgcagtgagccgagattgcgcccctgcactctagcctgggcgacagagcgagactccgtctcaaaaaaaaaaaaagaaaagaaaacctaaaagaggttcaggtgatacggttcataaaaggacaagatttacaaagtattaagggatggaaataggaagaagagaaattttgaagagaaaagaagagaaaaggacgttaggatgtagagatacaggaaggggactcaaggactttttttttaagggaaaaaaataaacttcataacaatataaaaatcaattatttcaggactgagtctaactcagactctgctgtggaattggcagcttaagcctacttgtgtgataatgatgaaaccaagcrttaatgtcactgttaccttttttgtttttttttcatatttctgatctttttatacatattaggtggcaaaacatccaaagaaagggtccc

SEQ ID NO: 705869 - DNA, 636 bp, Homo sapiens
atatggattgtaggaaatgccccttaggctaggaagcagatgtcttaaactcctaaaagtttccttttcctctattctgccataaatataatttgcctttctcaaaacaatacaaactccattttacctccagccttcccgcagcttgacgaatgttctaaaaaagccttcttaaactgtgagccaagtctcacagtagatattagagaaggtaagttggttggcatctgagtccttctttgctcattgataccatggtggtattgccatgtgtgtgttgtaagaatttgaatgaagcagyaactcctcaatttgaaatgataggggaatgaggttgtctatgtattaacattttccagcttcccattttaagaaacagacttaacttagtgtaaatgtttttggcaatcacagtaaatattccatttggagacctttccaaagtttatttcagatttctctgacctttgaatggggtatctaaatggattaaaccttcccttgtagatgtagattcttagttgtaaaagccactattatactactgaaacatggacaaaattttttggataaagggccttttttttttctttttctttttctttctttctttctttctttttttttttttaacgg

SEQ ID NO: 705870 - DNA, 976 bp, Homo sapiens
tgcatcgtctgttagatttccccttggtgcatttgatagtttttaatgttattataagaagtatcttttaaaaattttcatttttatttgtttgttgctgatatatagatatacaactgatttttatatattaaccatatagttttccaatgataaagttaaccaaaataacacctaaaacccaattttgtaattaataacctgctttctgctattttaaaatgatgacagcaggccgggagcagtggctcatggctgtaatcccagcagtttgggaggccaaggcaggtggatcatctgaggtcaggagtttgagaccagcctggccaacatggtgaaaccccgtctctactaaaaataccaaaattagccgggcatggtggcgggcgcctgtagtcycagctatttgggaggctgaggcggaagaattgcttgaagccgggagggggaggttgcagtgaggtgagatcacgccatcgcactccagcctgggcgacaagagcgtgactctgtctcaaaaaaaaaaaaaaaaaagagagagagagcagaattatatttacatttatagaaatctaagccagagtagtttatagaaatatatcaccactaggtattataaagaattactaattcaaacaaatagagacaaggagactataaattcataaatgaataaagtacatatgatacctttatttctactgagtttttaatgacacaattaggcttacaaagcttgtcaattaaagcttatgtcttttttcaaatataaatggatgtttacatttaaaagtaatctgttcttttaaagtctttatggcgtttgcttagcaaccaatatataaacataacataaagataaatcatccttaccagtatttagagagttacaaacttgaatagagttaggttcaaattaatatgtttacttgtatcagatacaatgataatttgaatatatataacatatgcaaca

SEQ ID NO: 705871 - DNA, 976 bp, Homo sapiens
tgcatcgtctgttagatttccccttggtgcatttgatagtttttaatgttattataagaagtatcttttaaaaattttcatttttatttgtttgttgctgatatatagatatacaactgatttttatatattaaccatatagttttccaatgataaagttaaccaaaataacacctaaaacccaattttgtaattaataacctgctttctgctattttaaaatgatgacagcaggccgggagcagtggctcatggctgtaatcccagcagtttgggaggccaaggcaggtggatcatctgaggtcaggagtttgagaccagcctggccaacatggtgaaaccccgtctctactaaaaataccaaaattagccgggcatggtggcgggcgcctgtagtcccagctatttgggaggctgaggcggaagaattgcttgaagccgggagggggaggttgcagtgaggtgagatcacgccatcgcactccagcctgggcgacaagagcgtgactctgtctcaaaaaaaaaaaaaaaaaagagagagagagcagaattatatttacatttatagaaatctaagccagagtagtttatagaaatatatcaccactaggtattataaagaattactaattcaaacaaatagagacaaggagactataaattcataaatgaataaagtacatatgatacctttatttctactgagtttttaatgacacaattaggcttacaaagcttgtcaattaaagcttatgtcttttttcaaatataaatggatgtttacatttaaaagtaatctgttcttttaaagtctttatggcgtttgcttagcaaccaatatataaacataacawaaagataaatcatccttaccagtatttagagagttacaaacttgaatagagttaggttcaaattaatatgtttacttgtatcagatacaatgataatttgaatatatataacatatgcaaca

SEQ ID NO: 705872 - DNA, 1155 bp, Homo sapiens
cttccgaaatattgcttaataacacattttcaaataccctggtgccatctcaggcaaattaatctctgaactaacaagagtctttactgtgctgcacagatcttctcagagatatgtaataaatggtatgtattcaaggactgctgcagtaatagtatttatgtagcttggctagaaacatttgctctcttaacagtgggcatttaagatgaagactgtccctggcattgtgcagcacagtaggaacattggcctgctgactaaacaaatatgattgccaaagtgaattattaaattccaactggcctcacttgctagagaatttcactcctttttctcccacacagcttcctactttttattaaaggaacagttttcagctcttgcaaataattgcagtattttgctagtcattactacagcagtttcccactgtttatattttaaaactagcacttggatgagtcctgttgaagcagaacaaataactgtgtgtgcatctgtgtaaatatttatcgaaatttgctttattaaaagtcccagtgaacttttgttctaactgctataccttgtgtcacttctgacacagtcacatcatcaagctactgttactttacaaaacatgggtgacttcatttcagtatttccttcagaggacttatttgggagactcccttccaatagaggaagtgggttgatgagtgctggtgttctcattccagatccttcacatctctggaaagctgcatcctttgtagaaaatagatctgtatgtgtgccaaagtataaccctgatgttcatcagggcagtgggaggaggtcatatattccttgtctgtttgaacagtgatcctcccatttggcaggactttgagaggaagtatttaacaatgggattttataaaattwaatgtagtaaagactgtttttatatttgaatggatctaaggaagttttctttttctccctccgataagtggggggtgtttaagggtaatggtgtctacgaatttattgggaggatttggctgttttattggaccttgtggaataatttgctttcattttatcatttccatgaaaggtagtcctcagaagaaaaaaatgtggtctcttaacttcataccaatcttaaatgttttgcttaaggggaat

SEQ ID NO: 705873 - DNA, 632 bp, Homo sapiens
ccacattttacacagctgattagtaagaaatttgactcaaagtctaaagggcaggaggcagagctaaatggctgaatagaaccttttcttgattgcccccctgcagaaacaccaaactgaacagctgcctacatgaaaaagcaccttcataagaacgaaaaataaaatcagatatgtgttgtgtacttggttttaacacaataacaaagaaaaaggcattgaagagggcagaaggacagtcctgcattgcctgcaccacccttcccacaaccctaagcagtacaacatggagagaatttatgtgctttggggatggaaagcaaagtgggagtacgggatttgcattggaactcagtgcttcctgtcacagtaaaatacaaaacagggcagaattctggcagaggtgcccacaacgggagaatttagacaaaccctgggccagaagggacttttccaccctagcagaagaaaactgagtcctggcccrctttaccactgactgactaaagtggcctgggtccccagataaatttgagaggaagttaggccataatgactgtagtccttgggcaagctcaggtgctgtgctggtctcataggcaatggatttgcggtgcaaccagagtggcact

SEQ ID NO: 705874 - DNA, 590 bp, Homo sapiens
cttgagcccataaggcggaggttgcagtgaaccaagactgcaccactgcactccagcctgggtgacagagccagaacctgtttcaaaataaataaataaatatatatatatatattccctgtgctcaagattaaaaatgagttgtgaaacaagacaaacaagtaaaaagttatataacaataagagatacaaatgatattctaggacaataggacagatgacacaaggcagccaattattaattgccatctggattgcatacacaataattgccaaaaatgyccagaggagggtgaggtcttttcaggctagctcaatcacggcaggtatttatgaagaggacagaatttgatatgggtcttgaaggataattcagatgatagatttagagaggaggaggacatatttactggcaaaaattcaatgtaagaaagctaggccaggcatggtggatggcgcctgtaatcccagcactttgggaggctgaggtgggcggataatgaggtcaggagattgagaccatcctggctaacatagcgaaaccctgtctctactaaaaatacaaaaaattagccgggcgtggtggcggg

SEQ ID NO: 705875 - DNA, 666 bp, Homo sapiens
ttattgcattggagtcttcattttgaccaacctagagatggttttggagaatatctcatgatgaataaatattagctaacaattttttaagctcattactcctttgtcaacattaatcattayggatctttccttcttccacagaagtaatgcaacatgacatgtagactgtagttgaagttttaagaaagagtttaaaggattttaagtttgagctccctcaagttccataatttcacgtctttgaaatgagtatttattgaaatttagatttatcaattcaactagcatttgtcaagctcctaatatgtgtcaagcattatactacttgatgagatacagaatttctgcccacaggtctttctgaagtgagtagatgaaaatagaaatgtgggcataagttttgcaagcgagtacactagggacccaaagggaggaatggtggatggtactatatatctagccctgtcaggtatagtagagagatataagaatgttgaagaggcagcccttgctctgtaaaacagttttgcactgtaagaaaggtcagtactttgcccaaagttataaagctgctaggaaccagagccaggactcaaactagccctatcctgtaagtaaagagaaggcagtgtgatttgtccccaaccccaaatttgagagctt

SEQ ID NO: 705876 - DNA, 589 bp, Homo sapiens
tttggcctgggaatatattctctctggtctgtatttagggaggttgaggataggattatatacgaagatatctttaccggtaaatttttcttcgtcaacctcactttttattcctggcctcggttacaactgctgagtctaaatcagaattaatctgaggttcccatgcagagaaggagaagggaaattaatctgagaacatttatttgcttaggaaagttcaagatctgttagtacaaatacttgttaatattcctgagggcacaggattggcagaagatggaagtttggctgaagagccaggaaaatgtattttctctccattcgtccgtcataagaaggcttctgtagagattactagttgccccaactttatctttttctttccagacaacatggttgttcccagtgcaatatcaggacaattaacaatgaggcattttggtttctatcaggttgtaagcatggaaagatagattcttytcatgattccattattgactatgggtctatgattggaaatagtacctagtggtaaaagatatgagtttagacatagacttcattgactcaaatcctggttccatca

SEQ ID NO: 705877 - DNA, 819 bp, Homo sapiens
  misc_feature 2, 3, 4, 5, 6, 7, 8, 9, 10, 11, 12, 13, 14, 15, 16, 17, 18,19, 20, 21, 22, 23, 24, 25, 26, 27, 28, 29, 30, 31, 32,33, 34, 35, 36, 37, 38, 39, 40, 41, 42, 43, 44, 45, 46,47, 48, 49, 50, 51, 52, 53, 54, 55, 56, 57, 58, 59, 60,61: n = A,T,C or G
  misc_feature 62, 63, 64, 65, 66, 67, 68, 69, 70, 71, 72, 73, 74, 75, 76,77, 78, 79, 80, 81, 82, 83, 84, 85, 86, 87, 88, 89, 90,91, 92, 93, 94, 95, 96, 97, 98, 99, 100, 101: n = A,T,C or G
tnnnnnnnnnnnnnnnnnnnnnnnnnnnnnnnnnnnnnnnnnnnnnnnnnnnnnnnnnnnnnnnnnnnnnnnnnnnnnnnnnnnnnnnnnnnnnnnnnnnnttaaaaataaaagatgatgcaggggcctaaaaccatggacaaggtggtcaacaacgtcgcgtatatgccccccaactcactctccctagaggaatgcttaggaaggcatagacagccactgcaaggctgccccaagtttacatgtcattgtagcctaacagttatttgaaacagaaacctaacccaaccacacttgggatgttctcttcaaaggaatcccaactgttttcggcaaaaaaatttctgtgcaagtcagccccagctgggaaggtggtgccgtgctggggacgtggttcttccaagcagcagagtgatatttggagattaatattgaaagctgkgcttaatctggatatcatcaagaatctgatgcagcttctcatcttcaaacaaccacgccaggtttaggattagggctttggactcctcaacagtctctgggaaaaggctgacctcttggcaaaggttggccaaacagctcaaacttacgaagatttttctctggagcatcaagctacaaacactggcaatggtctctctgtttggggaatgactaaaactggctgtctaggttaatgttttcatgaagacctctgagggttcctgttcatcctctgcactctcattctgttgtttttgctgctccagaagcatagaaacttctgcatttagaggcggctcagctgcttcaaactctttttttttttttaatttttta

SEQ ID NO: 705878 - DNA, 772 bp, Homo sapiens
taatttgtaagataataactcataacactgattgttttcgtgtagcttatctacaaattcaataatgctcctgaaaataagacagattccatattgtttctcaaacatattccattaccaaagggttaattttaagttacataatctagtgaaaatgcaaaatctgtacaatcttgtggaatcataagacaactatattcaataaaatattaggaataattgtggagttatttttggatgaagttgctcttgtttttatatataattcttgcttttctctttgtcatctgtggaattctctaaatttttaaggtcttgtggtttcagaggttattcaaaaagaatgtgaaarttcaaaatattttcttaccttttagctattgaagaagggaaaatggcttggaaaagcttgatgttttcaaccattgcttcatttttctttttagtcattgtgatgaagaatggagctaaccattatttactaaaaattaacaccaccactcaataatcatttttttcttctttatcacagtcacataataattatcacacttacttttttttttttttttttttttagacaggatctcacactgtcatctaggctagagtatactggcttactgtgacctggaactcctgtgctcaagcaatcctccagctttagccttctaagtagctaggactataggcttgtgccaccatgactagctttttcttttcttttcttatctttccttttgttttctttccttttcttttcttatcttcc

SEQ ID NO: 705879 - DNA, 2070 bp, Homo sapiens
  misc_feature 348, 349, 350, 351, 352, 353, 354, 355, 356, 357, 358, 359,360, 361, 362, 363, 364, 365, 366, 367, 368, 369, 370, 371,372, 373, 374, 375, 376, 377, 378, 379, 380, 381, 382, 383,384, 385, 386, 387, 388, 389, 390, 391, 392, 393, 394: n = A,T,C or G
  misc_feature 395, 396, 397, 398, 399, 400, 401, 402, 403, 404, 405, 406,407, 408, 409, 410, 411, 412, 413, 414, 415, 416, 417, 418,419, 420, 421, 422, 423, 424, 425, 426, 427, 428, 429, 430,431, 432, 433, 434, 435, 436, 437, 438, 439, 440, 441: n = A,T,C or G
  misc_feature 442, 443, 444, 445, 446, 447: n = A,T,C or G
tgcataaattgttaaatgtgtatacatatttatatacatgtttatatgtatgattgacccttgaacaacacaggggttggtaccacctgtgcagtagaaaatttgtgtataaattttgactcccccaaaactttagtaatagcctactgttgaccagaagccttaccaataacaaagttgattaacacatattttgtatatgcattatatactgtattcttacagtaaagtaagatagagaaaataagaaaatcataaggaagagaaaatatttcctactcattaaatggaagtagatcatcataaaggtcttcatccttgtttcttcaccttgagtaggctgagaannnnnnnnnnnnnnnnnnnnnnnnnnnnnnnnnnnnnnnnnnnnnnnnnnnnnnnnnnnnnnnnnnnnnnnnnnnnnnnnnnnnnnnnnnnnnnnnnnnnttatgtccccgaatcctcattattggcattccttttaatttgtttttttttgaaacagagtgtcactctgtcacccagcctggggtgcagaggtgtgatcttgatctcggctaagtgctacctcctcctcccaggtctaagtgattctgctgcctcagcctcccgcgtagtgggattacaggtgcccaccaccacaactggataatttttgtatttttagtagagacaaggtttcaccatgttgcccagggtggtcttgaattccccagtgatctgcctgcctgggcctcccaaagtaytggtattacaggcaagagccaccgagccctgccaatttgcatttctctaattattcagaatcctcttgtagaaatattggttataggtatttatctctctgtatttgctttccaatccatatactttgtctagttttgtactagattgtttgcctttctcttattgatttgtaggggctttttgtctatctatcatctatctatatcaatctatctatcatctgtctatcacctatctgtctatcgattatctatctatgtatcatctgttgagggagggagagagagagagagagagactataaatatttgtctgtcactcggtccctgtatgtagtattgtcattatgcttttatttttttagtaaaattcttatccaagtaatttttattattctcaagctttcttttttaaaaaaattaatcttgaaatacttttagatttacagaaaagttgcacatggtacagagagtttctatatattcttttacttagcttcccctgatgttggcatcttacataattatcgtgagtttgttaaaactaagaaattaacattagtgcaacaccattaactaaattacagactttaatcagatttcaccagttttcccattaacgtcctttttctgttccaaaatctcatctgggacaccacattgcatttattcaccatgttttctttgtttctgcaaatatgtgacaatttttcagtcttcccttgtttttcatgactttgacattttgaagagttcttgttgggcatctttagaatgtttctcaattgtaatttgtctgatattttctcatgattagactggagttatggattttggggaagaacactacagaagtgaattgccctgttcatcatattatatcagagggtacacaatatcaacatgacttatcaccggtggtgacagtaatcttgattacttgcttgaggggatgtctgatgaatttctcctgagtaaagtccttttcccttcctattttttattgttaaaagcaaattagtaaatccagtccatatttaagatgaaggaaattaagctccacctcctggagcaggggagagaatttacatttaatattggaaatttttctgtaaaaaattttgttttttttccttgtattattcatctgattatttatttatgtaactgtggcttcataaatatcttagaaatttacatatgtacatataattcacatatatatacacaagtaatctgtacatattacacataatgtaatacatattattttgccatgcagaagtgcatatacctctaggtggcacaaggtattataaacact

SEQ ID NO: 705880 - DNA, 2248 bp, Homo sapiens
tgctgacataaatacctaactccagcacagttatttgtatttgtgatttgaggtccaaaataatgaggccacaacagggactgaggaagtgggatactctttctagatttgactccatacctcttcttctgtcaattaaacagtcctccagacaggatgcttattttattccggcaataagtattgggcaagatgttcaacatgctgataaattatgtagtaaataaattaattttattgaagtgtattattaattaaggcataatgaaatagttaggtggccttttcatttgacagctaggagttaaaatttgagagagctgtttattatatagcacaaatagcatcaagatcccaaagtagagtacrggaaaggtatatgtctatatgcactaaatgctcatatttctgttgactctcatgcaattacaatgcactagctaccaagtcatttttgatagcattctcttagcttttaatttctcgtgtggggaaaagataatagaaaatcctccattgctccaactacactacagtgtagtctgtacagagtctgtctacactagagtgatataataaaaccatagcagtgatatatgtagaagtcacactttgtttaaatgataattgtttcttttatgctgccatccaaagaaattgtctaaaaatggcgattgattcacatactctcaaattattttatgaacatattaagagacagtacatgccatgattgtgtctatacctatatccatgtgcatgtaacttctatatctatatccatttaaaaatgtgtgtatcagtgattctgtgtgtatatacacaatggagaatgctgtttagatctctaaatgatttttccctgcccttaatctgtatttaatcaggaaaccattctgtaatgagaaaactgttcattttagtcttttatgtttgcgatcccaaggttcctccttagtgattacatttagtaactccctttcgctgtctgaaagcacaggcagtttttccataataaaaactggattagcacgtatcaggaagagacaccaccagctgtcactttgaaatcagaccactcggccctatttgagatgacaatggataaactgataaatgacaggcagttttcctatatttatctagtaagtggttaatatgggctaacactgtctgtaataaagctataaacagggtcaaagaagaaaaaagcttcatttgaataggatatacattattaagagaaaaatccactatagcacactgtattatttatttcattcagttgcgctattacaattgtcactaatagttccacttctctttccttatttcttttgctgtcttcccatttgataatattacagttatgttacttctgctgtacaaattctgaatacatatgtttaaggacaaaatccaaaatgattaaaacttttttcttctaagaatttctgcaaatcatagcatttcagagaattctctgtaactgaaattagtgaaataattttatttctcactatatttagcaagtcgtatgcttcaggcagacctcaaatactgccacattgttaaactaatccaaactacagttgaactaaaataaacgatgtatgagcaatatgtatcaataatggtttagggaacacttatattgatagtgggctatcagtaatcattaggaaattaagggattgtgatactctgatatttgtcacttatagtaatggccttgggggtttaaatgatgactgccggacttagggccttttagttaaataatttgtttttaagtttttcttcattcattaactaaattataaaaataataattatcttttcaagggttgaaaatatatacatcaagaaaaagttaatagtcctctccattcccccctttatttttgagctaatcaatattatcagattggtatctgcctttacctgacttccttcatgttatacccatgttagagatgatgaaaccagcagagatagattaagtaacttgcaaaagatatggacctaccaagtaacatagccgggatttaaacaaaggcagtccacttccaaaacctacatcaaaaccattatactaaaaggctgcttctgttagattttatgaccgaataagtgaatgaatgatttaggtgacataaaagttacattgacccctatgtttcattttgggtgagtataatcattaatagatattgggtatgaaggggatggagatttggagtaggag

SEQ ID NO: 705881 - DNA, 2248 bp, Homo sapiens
tgctgacataaatacctaactccagcacagttatttgtatttgtgatttgaggtccaaaataatgaggccacaacagggactgaggaagtgggatactctttctagatttgactccatacctcttcttctgtcaattaaacagtcctccagacaggatgcttattttattccggcaataagtattgggcaagatgttcaacatgctgataaattatgtagtaaataaattaattttattgaagtgtattattaattaaggcataatgaaatagttaggtggccttttcatttgacagctaggagttaaaatttgagagagctgtttattatatagcacaaatagcatcaagatcccaaagtagagtacgggaaaggtatatgtctataygcactaaatgctcatatttctgttgactctcatgcaattacaatgcactagctaccaagtcatttttgatagcattctcttagcttttaatttctcgtgtggggaaaagataatagaaaatcctccattgctccaactacactacagtgtagtctgtacagagtctgtctacactagagtgatataataaaaccatagcagtgatatatgtagaagtcacactttgtttaaatgataattgtttcttttatgctgccatccaaagaaattgtctaaaaatggcgattgattcacatactctcaaattattttatgaacatattaagagacagtacatgccatgattgtgtctatacctatatccatgtgcatgtaacttctatatctatatccatttaaaaatgtgtgtatcagtgattctgtgtgtatatacacaatggagaatgctgtttagatctctaaatgatttttccctgcccttaatctgtatttaatcaggaaaccattctgtaatgagaaaactgttcattttagtcttttatgtttgcgatcccaaggttcctccttagtgattacatttagtaactccctttcgctgtctgaaagcacaggcagtttttccataataaaaactggattagcacgtatcaggaagagacaccaccagctgtcactttgaaatcagaccactcggccctatttgagatgacaatggataaactgataaatgacaggcagttttcctatatttatctagtaagtggttaatatgggctaacactgtctgtaataaagctataaacagggtcaaagaagaaaaaagcttcatttgaataggatatacattattaagagaaaaatccactatagcacactgtattatttatttcattcagttgcgctattacaattgtcactaatagttccacttctctttccttatttcttttgctgtcttcccatttgataatattacagttatgttacttctgctgtacaaattctgaatacatatgtttaaggacaaaatccaaaatgattaaaacttttttcttctaagaatttctgcaaatcatagcatttcagagaattctctgtaactgaaattagtgaaataattttatttctcactatatttagcaagtcgtatgcttcaggcagacctcaaatactgccacattgttaaactaatccaaactacagttgaactaaaataaacgatgtatgagcaatatgtatcaataatggtttagggaacacttatattgatagtgggctatcagtaatcattaggaaattaagggattgtgatactctgatatttgtcacttatagtaatggccttgggggtttaaatgatgactgccggacttagggccttttagttaaataatttgtttttaagtttttcttcattcattaactaaattataaaaataataattatcttttcaagggttgaaaatatatacatcaagaaaaagttaatagtcctctccattcccccctttatttttgagctaatcaatattatcagattggtatctgcctttacctgacttccttcatgttatacccatgttagagatgatgaaaccagcagagatagattaagtaacttgcaaaagatatggacctaccaagtaacatagccgggatttaaacaaaggcagtccacttccaaaacctacatcaaaaccattatactaaaaggctgcttctgttagattttatgaccgaataagtgaatgaatgatttaggtgacataaaagttacattgacccctatgtttcattttgggtgagtataatcattaatagatattgggtatgaaggggatggagatttggagtaggag

SEQ ID NO: 705882 - DNA, 1621 bp, Homo sapiens
gtacctgtaaatcaaactattgatgagaagagagatgttgtttcgtaagtggtgaatacttcttttcttttcttgatgctaggaagtaaaaaaaaaggttttttatatatttattctagtagatagtgcaataattaaaaatttaacaattccatattagcaacactgtttctatttaaatatgcggtgttcgctttacaattacttaatgaaaaggacagcctcattttatggagataacattgctcccctaaatcacaaagcaaaaaatagaagaccaaatcaatagccaaaataaagctgatgtattgctgatctccattaattttttactttgaaataccatttacatgttttggtgttttaaatttcagcattttagataaatattgaccaggaagttcccatgttttctaatcaaatttttacaataattacattatatagaaattgttgtgctatatatagttgttcatctaaaacattgatgatagtacattacaaaaaagaataagatcagcagcaatattagtagccagaaatgtgttcctggatattcttgtttctctgaattttttaatcccacaagaaacattcagaatgataaacatgcattagaaattgaactttgtaaawcaagtgtttggaattcaagaacctgaacatcaaagaaggtcaaatggcatactgtttcacagagccctaaaacgactaaatatgtggaaaatcacatattaagatgcaagtaaacacaatttactaatgatcatctctagtgacattatggctttgcaagtacacaggctttgcttgtatgcagattcaggaaaataacagtgatttgccattttacctgatagaagttgccttaacttccagttccatcgctgtgaaaatactccttcaagcttttcttacaataagaggaggatggctcatctccaaatgttgagctgagacacttgagtatgttctgttagatcaaaaattgcagaaataagcttattcactaggaaacctacttgtagagaaattggaaaaccaagaaatgttaagaggaaatagttgtaaaacacaatggtggtggagatatagagtaagaataggtatataacatctaggtgtaaatttgaaggtaaatattttaataatgaaagattcaggaatgagaattttctgatcgcacaatgaagaacaatacaatttgctcatgccattggcaatacttgtcaaataaaaccatatagtttgtgaacaggaagtatattaacacacttcactttttcttcaaagatgtacacatgaaatccataaaatcagaggaaaatttctcaaacatgtgcatgcttttctggtgaatttactaaaccaagaatctagtcactcaactctgaatcatggcaaaaatttatctcccaagttactgcaagattagctgggtgcaaagaaatgtctgctatctaaaaaaaaagaaaaaaaaacaataaaagaactaagaatcaactttgctttctagaggcacagagaccaattttagtcatctcatctgtttcaatatatgtatgtataaaaacaagccttctacaccttagagccattggtgcaacaatgaccagaaaca

SEQ ID NO: 705883 - DNA, 1621 bp, Homo sapiens
gtacctgtaaatcaaactattgatgagaagagagatgttgtttcgtaagtggtgaatacttcttttcttttcttgatgctaggaagtaaaaaaaaaggttttttatatatttattctagtagatagtgcaataattaaaaatttaacaattccatattagcaacactgtttctatttaaatatgcggtgttcgctttacaattacttaatgaaaaggacagcctcattttatggagataacattgctcccctaaatcacaaagcaaaaaatagaagaccaaatcaatagccaaaataaagctgatgtattgctgatctccattaattttttactttgaaataccatttacatgttttggtgttttaaatttcagcattttagataaatattgaccaggaagttcccatgttttctaatcaaatttttacaataattacattatatagaaattgttgtgctatatatagttgttcatctaaaacattgatgatagtacattacaaaaaagaataagatcagcagcaatattagtagccagaaatgtgttcctggatattcttgtttctctgaattttttaatcccacaagaaacattcagaatgataaacatgcattagaaattgaactttgtaaatcaagtgtttggaattcaagaacctgaacatcaaagaaggtcaaatggcatactgtttcacagagccctaaaacgactaaatatgtggaaaatcacatattaagatrcaagtaaacacaatttactaatgatcatctctagtgacattatggctttgcaagtacacaggctttgcttgtatgcagattcaggaaaataacagtgatttgccattttacctgatagaagttgccttaacttccagttccatcgctgtgaaaatactccttcaagcttttcttacaataagaggaggatggctcatctccaaatgttgagctgagacacttgagtatgttctgttagatcaaaaattgcagaaataagcttattcactaggaaacctacttgtagagaaattggaaaaccaagaaatgttaagaggaaatagttgtaaaacacaatggtggtggagatatagagtaagaataggtatataacatctaggtgtaaatttgaaggtaaatattttaataatgaaagattcaggaatgagaattttctgatcgcacaatgaagaacaatacaatttgctcatgccattggcaatacttgtcaaataaaaccatatagtttgtgaacaggaagtatattaacacacttcactttttcttcaaagatgtacacatgaaatccataaaatcagaggaaaatttctcaaacatgtgcatgcttttctggtgaatttactaaaccaagaatctagtcactcaactctgaatcatggcaaaaatttatctcccaagttactgcaagattagctgggtgcaaagaaatgtctgctatctaaaaaaaaagaaaaaaaaacaataaaagaactaagaatcaactttgctttctagaggcacagagaccaattttagtcatctcatctgtttcaatatatgtatgtataaaaacaagccttctacaccttagagccattggtgcaacaatgaccagaaaca

SEQ ID NO: 705884 - DNA, 1230 bp, Homo sapiens
tctctatctatccaccatgcaaatgctatggtatttaaggaaatgctaacaggtccatgccagcccaccagtctactctttagagttcagcaagcctctacaccagccctcactctcataagaattcaagaccattctcttttatgtgacatatctctttggacttgaattaattgtttatttgtgagttctttgggacagagagtgtatgaaccaaccttacatattatacactcaatattaggggaggagtttttgaacatgtctgccagtctctggaactgtgctttttacatarattatctcatttactcttcacaaaacttttatcaaccataattactgtacacattttcaggctgaaaaaaaaaatgagtgcagagagattaagcaaggtactcaagaccacaatgctaaaaatatctctgaccacaccaaacagagctctacctatatctgtaaaactattaatacaatgttactgtcattccactgtattagtttcctgcttgcatgaatggttgactccaaagagtcttatgtatcagtcaacagagacatcagctccatcatgccttaaataggcttttaaggacttgttcacaatagtaatgataaaattagattaataaccacaccttaccatttaaaaaaacttttaaagtaatttaaaaaaccaagacagcagtaagaattaagacaaaaacagcaattaataaacgagaaaacaaggccaggcacagtggctcacgcttgtaatcccagcactttgggaagctgaggcgggtggatcacctgaggtcaagagatcgagaccatcctggccaacatggtgaaaaccccgtctctactaaaaccacaaaaattagctgggtgtggtggtgtgtacctgtaatcccagctactcaggaggctgaagcaggagaatcgcttgaacccaggaggtggaggctgcagtgaaccaagattgtgccactgcactccagcttgggcaacagagtgagacttcatcaaaaaaaaaagaagaaagagaaaacaaagaaactagacttgattactaaaccgaaagatgatacttggaaaagaccaataaagcagacaaatcacaggctggtctgatttttcaaaagaggaaatacacaagtaaaaccagaattttctttaaaattataaggggacataatggctaatccttatcaagaaaacattatagatttatactaataaatt

SEQ ID NO: 705885 - DNA, 615 bp, Homo sapiens
aggttccaaaagcaggagtggtcttggcaaacacatagcttcactccttcaggcataagtgagctaaaagacaatacaatcgcttgctctgagactcttttaagatattaatgtaatactgtgctccactcaactcataatctatttattcatttcttaagccttgactactattcctccttctctccattaatagccaaactttaccacttttggaagaaacatgagactccaccattgtactgctagtctagattacaggcagcaatcccagcctagcaagtgcctcccccatccactcccattcagatgggataaggttacatagccatctttaccaccaggcaatatggttgcattcactctcaatcccaatttggctagatgggatgaagccacaacccgccaccatcaggcccttaggaattctgtacttgtagttgcagaccagtcctagaactactacatcaggcaggggaaaggaaaaataaattgaggtgatgtggggaagaaasaaaaagtataatcattaaaccagcattactcctcccttggcaagaatttcatagtcttaccagcatcctcctccacccactctcgcccagatcaaccaga

SEQ ID NO: 705886 - DNA, 755 bp, Homo sapiens
taatgactatcatatatcaacgttccacagttaagcagcatagctaagatgaaaacaggtaggtcagaggggattcaatttagttaacagtaatgctcagttcacacagaaggacacgcaagaagaataactcaccacgtataagacataaaattatttataaggtcagaaaaaataaataaagagagctagctcaaacagtatgattttaggatttatagaagaaagtagatgcttaaagccagggaacgagccctacaaaacccagcagccttgtggcatgcaacactagggtgggttcagatcaggagaaaagcattatttcatttcatcttcacaacaagctaacgtagtaggtactatcattccattttacatgggaagaatcaaagctcttttgtaggtaaagtaataataacaggcccaagctcagaaagctagaaagtagtgagaccagcatcacacccaggatcattacttcaaagggttttcctctatcctgcagtctttcttgtatttcatcctcactaggaaacgtgagtaacaaaaaaaaaaaaaaaaaaaaaaaaagaaagaaaaagaaaatcctatcactgccaattcatacctaattttatacagtaaacttctgatagacactagttataaaaaatttgcttcccaattatgtttcagaaacttatatatgaatattasaaagtcacttgaatcccttcattttattttattttattttatttcattttattttttta

SEQ ID NO: 705887 - DNA, 805 bp, Homo sapiens
aaaatcttgaattttagacaaaagctgaagtatttcttccaagcctagaagaaaatacttttttttttttttttttttgagacggagtctcgctcattgcccatgctggagtgcagtggcttgatctcgcctcactgcaagttccgcctcggagtttcaagtgattctcctgcctcagcctcctaagtagctgggactacaggcacgcaccaccatgcccagctaatttttgtatttttagtagagatggggtttcaccatattggccaggctggtcacgaactcctgacttcaagtgatctgcccgtcttggcctcccaaagtgctgggattacaggcatgagccactgcatccggccaaaaaaatactttttagcctcacaaaagwtcagtgtgccactcacagatcttccctaaaacaattttaaaattatttctattacagcaggacaaattaccacaaatttaacatcttaaaacaacacgtatttattatctcacagtttcttttggtcaggagttcagatgtatcttagctggggtttctgcttcagggtttctcacaggctataatcaaggcgatgggcaaggtgcatatcatccaaaggctcagccagaaagtgaggtcacacaagtgttggcaggatttggtttttctatgttttgaaccgagaatcttagttccttgttggctgccagccataagctaccctcagccccttatcacatggacttctccataggatcactcacaacatagcagtatccttcataaaagccagcaagggagtctactagctaacca

SEQ ID NO: 705888 - DNA, 805 bp, Homo sapiens
aaaatcttgaattttagacaaaagctgaagtatttcttccaagcctagaagaaaatacttttttttttttttttttttgagacggagtctcgctcattgcccatgctggagtgcagtggcttgatctcgcctcactgcaagttccgcctcggagtttcaagtgattctcctgcctcagcctcctaagtagctgggactacaggcacgcaccaccatgcccagctaatttttgtatttttagtagagatggggtttcaccatattggccaggctggtcacgaactcctgacttcaagtgatctgcccgtcttggcctcccaaagtgctgggattacaggcatgagccactgcatccggccaaaaaaatactttttagcctcacaaaagatcagtgtgccactcacagatcttccctaaaacaattttaaaattatttctattacagcaggacaaattaccacaaatttaacatcttaaaacaacaygtatttattatctcacagtttcttttggtcaggagttcagatgtatcttagctggggtttctgcttcagggtttctcacaggctataatcaaggcgatgggcaaggtgcatatcatccaaaggctcagccagaaagtgaggtcacacaagtgttggcaggatttggtttttctatgttttgaaccgagaatcttagttccttgttggctgccagccataagctaccctcagccccttatcacatggacttctccataggatcactcacaacatagcagtatccttcataaaagccagcaagggagtctactagctaacca

SEQ ID NO: 705889 - DNA, 1547 bp, Homo sapiens
tgacacagaagtaacaaggatgaaagggaataaattcagggtaaagggcaattctataatttaaccgaagactaacaatttttaaacgtgcactatttaataaaatactgggggacagaccagacttatagcagtggttaacagctgaggggttgggaatggtggtaaagttaagcagctttcagtcttaactgttacatttaatattttaataaggagaatgtatttcttttacttcagtagttcaaaaataattattttaaaaaacttaatcagccttaaattttgaattttaaattgaaaaattagaaacacacacatgattaacaacaagaaattggttaaaagagctaaacatccacttatttgaggagctagtatgtgggctttaaaaaggttgtagaagaatatttaatgacatagaaggtcattcataacactgttaaaaaaaggtgacaaaacagcaggcttaataacatgaaaagatatttacgacactgttaagggaaaaaagtgacaaaactattactacattattgatttttgcgtaaaagacaatccttctatatatttttaaatctgaaaagttatagacaaaaatgttaatagtgattgaatagaaagagatagttcaatttttttatctattggtactttctgatttttctgtaataaacatgtcttggctttgcaattaaagcaacacttcgaataacaaaaactaaaatactacttcaacatcctctcccaaaaaagaaacaaaacgagtagggcagacaagtagaactgtttaaaggtgccaataatayctctatttctttgttgctgccccaaagagaaactagagaaatgagagatgaccacctgtagataaaagaaatgagaagctaaggtaaagggaggcaataagaaagaaagattttaatcaagtccaaactgagcaatagcttatgaggcagtgctgaaaatgagtgatgacaggccaatctgcaagcatgagagataaaggaggataaaggagtctgcgtaactgagaatgatgccatttacacatagtgaaggtatgagtcaaggggttaaggaaggtacaacaggtctgatgttcctctcttgcggaagaaaagaacacctatttctaaaggtgatgccaatatattagttgctattttatttttgcttgctatttttgtaaaatgaccagtggataggaatgagaaactccaaaacaataagctacttagaacaacagcgactctgaatttctgagattttgcaataaaaatctaacctgagcaaaatctgtttctgaaaaatgggtaatagagtaaactgatgctttccattagatgtacaaagcaggcagtggtttctttggacaggaattaccttattgtacggagatctgagaaacagacacagaagtcctatctttcttcttccctttgcctacctatcaagctttattggctgggcgcagtgactcacgcctgtaatcccagcactttgggaggccaaggcaagtggatcacttgaggccaggagttcga

SEQ ID NO: 705890 - DNA, 1547 bp, Homo sapiens
tgacacagaagtaacaaggatgaaagggaataaattcagggtaaagggcaattctataatttaaccgaagactaacaatttttaaacgtgcactatttaataaaatactgggggacagaccagacttatagcagtggttaacagctgaggggttgggaatggtggtaaagttaagcagctttcagtcttaactgttacatttaatattttaataaggagaatgtatttcttttacttcagtagttcaaaaataattattttaaaaaacttaatcagccttaaattttgaattttaaattgaaaaattagaaacacacacatgattaacaacaagaaattggttaaaagagctaaacatccacttatttgaggagctagtatgtgggctttaaaaaggttgtagaagaatatttaatgacatagaaggtcattcataacactgttaaaaaaaggtgacaaaacagcaggcttaataacatgaaaagatatttacgacactgttaagggaaaaaagtgacaaaactattactacattattgatttttgcgtaaaagacaatccttctatatatttttaaatctgaaaagttatagacaaaaatgttaatagtgattgaatagaaagagatagttcaatttttttatctattggtactttctgatttttctgtaataaacatgtcttggctttgcaattaaagcaacacttcgaataacaaaaactaaaatactacttcaacatcctctcccaaaaaagaaacaaaacgagtagggcagacaagtagaactgtttaaaggtgccaataatacctctatttctttgttgctgccccaaagagaaactagagaaatgagagatgaccacctgtagataaaagaaatgagaagctaaggtaaagggaggcaataagaaagaaagattttaatcaagtccaaactgagcaatagcttatgaggcagtgctgaaaatragtgatgacaggccaatctgcaagcatgagagataaaggaggataaaggagtctgcgtaactgagaatgatgccatttacacatagtgaaggtatgagtcaaggggttaaggaaggtacaacaggtctgatgttcctctcttgcggaagaaaagaacacctatttctaaaggtgatgccaatatattagttgctattttatttttgcttgctatttttgtaaaatgaccagtggataggaatgagaaactccaaaacaataagctacttagaacaacagcgactctgaatttctgagattttgcaataaaaatctaacctgagcaaaatctgtttctgaaaaatgggtaatagagtaaactgatgctttccattagatgtacaaagcaggcagtggtttctttggacaggaattaccttattgtacggagatctgagaaacagacacagaagtcctatctttcttcttccctttgcctacctatcaagctttattggctgggcgcagtgactcacgcctgtaatcccagcactttgggaggccaaggcaagtggatcacttgaggccaggagttcga

SEQ ID NO: 705891 - DNA, 1290 bp, Homo sapiens
agatagtctcgatctttgcctcgtgatccgcytgcctcggcctcccaaagtgctgggaatacaggcgtgagccactgcacccggccagagactttacatttttgttaacccgctgattgtgtttttttcttttttttttttcatttctctcatgactaatgagatgaagcgcttttcatatgtttttggaccattaggatttactcttacctgaagtgtgtactcaagtgttttgtccgtttttctaattgattgtaatgagttcttcacgtaattttaaatactagtctttcgcaaacattttgtcccattctgttgcttgtctttttattctttatggggccatttaattattataattataattttttgagacgggagtgtcatgctgttgcccaggctggaatgcagtggcgcgacctcggctcactgcaacctccacctcccaggttcaagcgattttcctgcctcagcctcctgagtagctgggactacaggcacacaccaccatgtccggctaatttttgtattttttagtagagatgaggtttcactgtattggcttggctggtctcgaactgctgataattatttttaaaaaatatatttataatgaaattttacacctcagaaaagatttgttctttcattttaagagactagggtattgattatttggaggaaaggcattagaaaagattacatgttcctttttttatttttctgtagtgcttggatttttataatgattatgtattccttcattcaacaaatatttactgagcacctaatatatgccaagaaaggctttaggtcctagagatccattactgaacaaaagaggcagagactcctggcctaatggaatttacacaggaggactccatatagcttttatttagaaaaaatgctataaaagactttggtttctatcaaactttcattttgcacttttaaatatctatatataaaaccaacatggcacagaactcagagtaaatacttgaaaagataagcaaaagctttttgtccagggttgctattgatttttcccttatttcagcagcaaattttccagaaagcacactaaaatgtcagaccccaggcctctcaaacatataaataatacaaaaccatataaaatatttattttaaaacaccttagtgtaatgagccaccttaaatcaatgatgcaagtagtttaaatgtgagtcagattctgggctggctttgtctatagtaattatatttaaatatcattttgagtcagtaatacatacacaaggaaaa

SEQ ID NO: 705892 - DNA, 1290 bp, Homo sapiens
agatagtctcgatctttgcctcgtgatccgcctgcctcggcctcccaaagtgctgggaatacaggcgtgagccactgcacccggccagagactttacatttttgttaacccgctgattgtgtttttttcttttttttttttcatttctctcatgactaatgagatgaagcgcttttcatatgtttttggaccattaggatttactcttacctgaagtgtgtactcaagtgttttgtccgtttttctaattgattgtaatgagttcttcacgtaattttaaatactagtctttcgcaaacattttgtcccattctgttgcttgtctttttattctttatggkgccatttaattattataattataattttttgagacgggagtgtcatgctgttgcccaggctggaatgcagtggcgcgacctcggctcactgcaacctccacctcccaggttcaagcgattttcctgcctcagcctcctgagtagctgggactacaggcacacaccaccatgtccggctaatttttgtattttttagtagagatgaggtttcactgtattggcttggctggtctcgaactgctgataattatttttaaaaaatatatttataatgaaattttacacctcagaaaagatttgttctttcattttaagagactagggtattgattatttggaggaaaggcattagaaaagattacatgttcctttttttatttttctgtagtgcttggatttttataatgattatgtattccttcattcaacaaatatttactgagcacctaatatatgccaagaaaggctttaggtcctagagatccattactgaacaaaagaggcagagactcctggcctaatggaatttacacaggaggactccatatagcttttatttagaaaaaatgctataaaagactttggtttctatcaaactttcattttgcacttttaaatatctatatataaaaccaacatggcacagaactcagagtaaatacttgaaaagataagcaaaagctttttgtccagggttgctattgatttttcccttatttcagcagcaaattttccagaaagcacactaaaatgtcagaccccaggcctctcaaacatataaataatacaaaaccatataaaatatttattttaaaacaccttagtgtaatgagccaccttaaatcaatgatgcaagtagtttaaatgtgagtcagattctgggctggctttgtctatagtaattatatttaaatatcattttgagtcagtaatacatacacaaggaaaa

SEQ ID NO: 705893 - DNA, 395 bp, Homo sapiens
aaagtaggcgtggaaagggattgatggttcgagacagcaatttataacaccctgccaggccatccrcgatgttgggatggatggtgactctgccagctgctgggacagaatgaaaatgagaatatttatgccgacatgggagcaggaacccaaatgcagctaagtgatttcttctcaggtaacttcctgtgcaagggggcacccattgagcagtgtggacttttgatttgagctaatactattaccagtagggggaaaaacccatcctcttacttgatacttgaatttaaggagttgctttcgatatcaggaggcagaagaagcatgactgaaggttagagagttactgtactcagtgatttagacggtaacgttcagggttctttctcactgat

SEQ ID NO: 705894 - DNA, 629 bp, Homo sapiens
tattgcaaaccacaaaggatctatgttcatgaataagcaataatcagctgaaaacatattatgtttaccacaaaaaaaaaaaggcggaaagagcacaaaatctagtgagtaaagtgtaggcagcagatagtaatgtggtagccgatgttcatccccttgaccactctcatcaggcccagagacatggtgcttacatttgctccagtgragactggatagaaagagtagagatgcaaagaaaaaaacaaccttagctttttagggaaaacactaagggctctggcataaaactggagagattacagggggtatgtgaatatacagagcaggtacctcatctgctctgccatcatgaccaataaagagctttgagccagagagagggaaaagagtttgcagtcaaggaaaattataaattatagcatgaagtccctgtactgtgcttctataccctggaatacatcctgggggaagagtgaccagatgccccatgaaacatgaagagatccaaggcagagagaactcatgtcctgttcttcatctggatatttgatgtctgtttggagaaggccaacaggaaaatggtatggaagatctaaccaccagagggccaatagctgaccccatgt

SEQ ID NO: 705895 - DNA, 588 bp, Homo sapiens
caccagctaagttttaaatttttggtagagatgaggtctttctatgttgccaaggctggtctcaaactcctggcctcaagtgaacctcccaccttggcatcccaaagtgctggcattatagacatgaactgctgcacctcacctgatttacatttttaaatgacatcttggaatctataattatctcaaaataaaagttttttaaaagatatctctggctactgagtggagagatgactgtaggggttatggtagatagactctcagatggccacagtgatccccaccttccggtgctcctaccctttagcatgagtacacactcgatttgttaactcactaatgaggaattgaatatgacagaagcaataggatgtcacttctgagattagactaaaaaaagactgtggcttccatcttgaacatygtctcccatattctctccatcccccacccccttccctgccatcttgctcattctgggtgaaggcagttgccacattgtgagctgccctgaggtctacacgataagaagctgaagcctgtgacagcacatgagtggtcctggaagtagaccccccaacccta

SEQ ID NO: 705896 - DNA, 635 bp, Homo sapiens
atacggtagtcctgtcatcattctcaagaaaatttgcaaatcacttttatatgaaaaataagaaattgttttctctacctcacaccaccaaataacatcatgcattaaaatttctgtcaatgatcagttgaggaatattgtaagaggttacacaaggaacaaatagaaaatgacaactgagtttgatgtatgactgcttaacctggagaaaccaggtcctgcaaagaagaactcttttatgaaacacacacacacaccacagccagttagaaggaaatattgatattattaaatacactrgggtgccaatctgctcatgtaatactaagcatctgaataacattctgagcataaaagatttagaaagaaaaggaatcatggctctggaatgaacagtcaataatatgacaactataaaaggactatttggaattcagagatcaaaaaggagctgtagtctttgcagctccatcaggaattaggcccaaaccacttcccctttttatgacagtattcaactgcgcactttagatcttcccaacagaaagcctaatgagccctgtggaggccacgctacctgccaagaaaataatccatcctccaaaagccccagtgacaatatttctcaatgctca

SEQ ID NO: 705897 - DNA, 578 bp, Homo sapiens
ttattatactttaagttttagggccatgtcacatatgtcgaggttagttacatatgtatacatgtgccatgctggtgcgctgctcccactaactcgtcatctagcattaggtatatctcccaatgcyatccctcccccctcccccaaccccacaacagtccccagagtgtgatgttccccttcctgtgtccatgtgttctcattgttcacttcccacctatgagtgagaatatgtggtgtttggttttttgttcttgcgatagtttactgagaatgatgatttccaatttcatccatgtccctacaaaggacatgaactcatcattttttatggctgcatagtattccatggtgtatatgtgccacattttcttaatccagtctatcattgttggacatttgggttgagaaaaatatggtttacatacatacggacaaggctataatcaaaggatctaggaaatcgattatggctctgttttacattgagattattaccattcaaaggggctccattttacatttttaaaataaaaatattttacatttatactggttaaattctaatattccttaat

SEQ ID NO: 705898 - DNA, 2148 bp, Homo sapiens
tgcatgcctataatcccagctacttgagagaatgaggcaggagaatcgcttgaacccgggaggcggaggttgcagtgagccaagatcttgccattgcactccagcctaggcaacaagagcaaaactcagtctcaaaaaaaaaaaaaaagtaaaagtttacaatataaaaataagtctattcttacacagtatttctaacatttgtgaaaacaaatcacgggtatgctcttgctgttaagatgtaaaaattaaataagaccgcaggtatcagagaaaggagtttctgcagttcaagactgaggacaatattttacaaaattgtacatctctgctgtcaagaaagacaatttataaaggtctgagtcatgtttgctattatttcacttctcatatttctgaaattttcaggaaaaaaaagtagaaaaaaaactgcacctcaatctgtctgtaagtttctattacttacttcccagatcttcaatttgaggagatgtcccccatcttactgagactctccagccatattcacaaacgtttctcagcttttgatttctttttcagtgtcagtatatttataaaatatattttaacacttggatacaattatagaacagaatatagacaatatgaataaccaaaaaccaaatgttaaaaaaagaggatccattttcataacttagtgcagttgagacttaagttgttttcacataggatggaattaagaggaaactgggttttctcagtacaactttggttccctcaagatcatgtaaaagctagatggtccccacagaattcagaaagctttcggatatgcatgttctaataaatgtctttacatttttgatggaccctggcgcttcccaggtcccttacaagccaaggtatctgaaagactttttcttaacatccaaagggtagcaatgtcagtcttttacgataactcagaaaaggtcagaatttcttcaccatggaaaatttagcctccattccctctaaattaattttccttctttttctttctttccagagcattagtatgcctcagtgaagtatgacattattgtgttccgmatgccaagtggaataacttataaaactttttttaatagaaggaaatagaagatagagcccaaagccctcccaaatatgaaatgtgaaaagaagtaaatgagaggagaaccgatccacagtagacaaaatgaaataaaatattctacgctcttttgaaatgatgacaagcacctctctcaacatccttgattacctgttaaggtaccacaattttccaatacatacgccaagctctcagcactccctgctactcctttccctcacaaaaccttttcttccttaattatgtatccccacaaattagtcatttttggaatttaaagaatgatgagccaagagtactttaagagctctctaaactaaaacttctttccaaactccctctctttcctccaatatttggaatataagctatacaataagatatcctaagatcagcattgctggagttggccaggtgaaattagtgaatgccagacaggaggttacttaggaatagttccaagtcatcttcaaaagaatagttacacacacacacacacacacacacacacacacacctctctctctcacacacacacactcactctctctttctctctctctctcttttggttttaccttcagcaatgcaacctcaaaaacttgtactccatcctcatactagaagggaatatcacttagcaggttcagctacagacaaggacagagaaggatctttccactgcaactgatatgacaccctctgctttgcctcaaccaaggtcaggggacatgaccgctaataccactgcatgtatgaagggaaggcaaagcagggaagagagaagaaccaaaaccaaaataataaaagtatcttctttcttcttcttttttttacatgcagatgaaaaaaaaatctgaaaagtcttcttggggtggttattgtgaaagagcagggctgaatgagggacaaggagggtgacagttgcagcacaggacacataagcagataaatactgaactcaagcctaatcttcaggactacaaaccgaggaaacatattaatggtatgcagagtaacttaaatatgca

SEQ ID NO: 705899 - DNA, 3503 bp, Homo sapiens
tgtgttaatgttaagtaagaagtataggtgacataaatagcatagtgtttaccatcacacagtaagtgcttattataagtcatttaaacaatagggtccctaagaaaatctaacaactgtaatacatgtggtcctttattcaggcattcactatgtggcacaggtactagacaccatgaaaaaatacatatgaaagtattattttacaggagcttccattttgaactatccatgtgtgaaagttgttgataccaaaatggaatcaattatgtcaaaccctagcaaatggagttggaaggccacgaagggggagccctcactcacaaatgcctgtaaaggccttataggagacattcccgcatttactgcacatttgcctgtaacaggacttttagcaaggaaattcccctagaccgcaaagctccagataagcagcttgcacaaggacatctgtctagtaatgacgtctttaacaatgatttgtcgccaactcttacagcaagctcttgtaaccaatgatctttctggtttaacaaacagtttatgaagacttctctttgtctttaaaagtctccctttggtcccagtctccttgatgcgcctgtgatctggctcagcacacattttctgggttataatcctctgctattttcaaataaactcctctgttctggagaacctaagtttcttttcagattgacacatgaaaatacatgaaaaattattccatagtttcatgaagaacaagtatgagcagattcacaattgacagaaatgaccagtataaatcctatgggctttaaggatctaattaaatatatcagttcactcgaaacctacctgagtgacaaataatgaattatctcaattctaagggtactaagaactagacaggagaaaacaaataccaaactgagtattatccaatacagttttctttctttccagagtgtgttttttgtaataagattttgcttttactcctatcctctcttctggaattaggatgaagggaggatgagagattggctggacaaaatagcatagcaagagcagactgagctattttgactatatttctaacatcattaacaaacttgagtaactcacacactggttttcatttacccaccacattgggtctcacatgtaaataggtccatttacataagaatattaggaacaggtgtgcccattttaaaatgtgtttaaaatgtagaacattctttgattttcggtacactgagggagttgtctacataaagtaatctttagaaaaattcttttgtaatgtagsagatcttttgtcaaattaaaagccgccccctgatacatttgctttcccagtttgaatttttatgtgtgagaggttttcttgacttaggaaaacctcccatttcttgatcggtattatgatagggaataaaggaatgttggcatggtgaagtgaaaaaatgcctcaaggagagtatggatcttatatttccttaatataatacatattttctctttttaaacaaaatctctttttaaaaataacctgtaagaatggaggaatgacagtcatgttgttctgttattctaattagttgcttgtctgttcaaatagtagacagccacagaggaacctagtaacattttggtgagctaactgtggaaaaaagtctccaattaaatgcaaagaaaggaacttaacatgcacacattttaaattaaataatgctttgactttactggagtcaggcaaaaccagtgttgactcatcatacacttaagggaatgcttctactaaataaatgaaggttaaaaaggtggaaaaacatgcctcaataacttttcaagccgaatagaattgcatgacactgtaaccactaattttcttaatcttgtagagggggtagaagtctgacaaagtgaactgttaagtaagtatacagtaaaatcgaaggagtagacctaggccttgttaccatttatttaatcaggtaaaatagaatctgtttagtgacccatatgaaagatcaacaagaaaaggatttcaagttcagagaataagagaaatgaacccctagagtgtgtgctaaataatatgttttcaataaaggtgtgttgattcaatgtgatggaccactgaataccattttgacataaatttttttaaagagttgctttctcccccactcccattacaagcagccaactctgctctgacctcccactttttgccagagtcagaaccatgctttgagaagcccataatactcacatcaccaacacagctttctccatacctcctgccacttttaaaatttgttctccttgagccccaacagccccgttatacaacacagacttcttgatcatcacctttaagggtgtcttctccagatccttttattttttcagattcttatgcatttcctctaacccttcagattctgtctcttgttattaatcaaaaaactaacatcacctgtatgtttgccaccttgtcaattttgcaaagtatcgttttatgacgtgaatcctatttccattatttacctaaatgtttgtgttttctctgttccttctaaattgaactaagaggaaagcccaaggaataatgcagaagttatctttgaagccagtgaatttaaagacatcttcaaaacaaaatactttataacaaaacagtatctaaggactataagtattttaaaagatacaattctattgaactgaataaacaaaattatttttaataattaaagcagacacaaataattccttagagtgtccttaagaacaaaaattacttgggaatagaatccaatttaatccctggcatggatatacctccaggactttacaaaattctatgctaatctcaacctaaaataaacaatagagggaccaactctccacaacaaagagtttattgagaatagcaagaaattgcaattcgggttatgcttgctatggcccaccacaggtgcatgcaaagaggctgaagcaaggggaagcttttgaaagaaaaaaagtccacatgaactgttttgaaacaaagaccactggttccaggagcttgttacaggaatccacattagctcattgatgaaggcagctcttgttaggcaaacttccttgtgcaagcagcttatctggaatactatggttctgaggaatttcttgggaaaagttccatcataggcatacatgtgtgtgctcccttacttcatggcctcctggctccattttattactgcttggcataaaccactccattttggtactggcaactcttacatcaactaaattcaaatttattattactctttaatgaagttgagataaagttggtttctctgacaaactaagaattacaaaatgatacaatttctttttagaaaaacactgtggaaaaatgtaactaaaacactgccagggaaaaaaatataaagtaggccctaaaaatatatgactaatatatagccaaatatataattccatatactttatat

SEQ ID NO: 705900 - DNA, 1050 bp, Homo sapiens
tcctaaataatcctaaccaaaaatctcaatgcatttttctgtgtattggcagaaattaatatttcacaaatacctaagaattaattgatttagtaagcagaaaaatttttaagtagttgatatttcctatagctatttttatttaatgcgttttatactactttctctgcttaactgttaggaaaacattaactcacaaatgttaataagcaaataaaatggtggatatagttttaatgtgaaagaaaaataactagacacagtttcaaggagtagatatatcacaagattataattgaaataattctaaatacagtctagatgctttatcatttgcttacttactttaatatttattcacatcttagtggataactttagtattaaatcttacatacttatgaagataagtagtactaagcctattatgaaacattatctttactgagattacaagctatcctatattcggtttactcttctcttttcactaacttcatatataaggttggagtcatataaattaaaaggaaatcacgaaatacaattcctgatagattagttaatatgttaatgtgaaacaatatcatacagcgttttttgartaatagtactgataataaacaaaaccaacataaaatcgtatattagaactttcaaaagaaaaacaatgcaattttttctaaaatcaagtactgctaaagttcaaaaaactaagttacatacaataatcttaccaacataacaaatgccattagtaaattaattgtcacaaagtcataaaatttcatctaattacttatgccttaagtatctgtaaatgtgacataatactagaatgacttgtatatacataatttactaactcttcaaggtagccagtaaactgtcaaggaaaaaagaataacaatccaaagtaagaagatattaagagatataattacacctaatccttactataatggaaatcactattctctataatcctgaggaagcataccaaaaggactctttattaataatttaataaataaatattgctcctgaaaa

SEQ ID NO: 705901 - DNA, 812 bp, Homo sapiens
aatttctcagagaggaagaaattacaatagaatatttcatttctggataaaaatatattagtgagaaacagaagcaatgaagtctaagtatatcttctcaggctcaatgaaacagctggtgccctagacattttcctgtttttcctcttgggaaccgagatactgaccatatatgtttttctagactaaaaataaatattagcccgacgcttcaactgaatattagtccagcaagccctgagggaaatctaactgcagatctaaaagagtcagtaaaatgtatcacctgcttttccgcttccttgtgaaattgcttttaactagggagtgtatttgtatgaatatgtagggattcattcataaacagaaaaaataaaaataaaatggatgaaaatgagagacatcaaattcagaatgatgagtgagtgcatgggtaggggtgtacaataactttggttgataatgtttattttatttatttatttatttatttgaggtggagtcttgctctgtcacccagcctgcagtgcggtgacgctatcttggctcactgcaacctcgtcctcccggattcaagtgattctcctgcttcagcctccagattaactgggattacaggcacccaccaccatgcccagctaatttttatgtattttaggtagagacggcgtttcaccaygctggccaggctggtcacaaactcctaacctcaggtgatccacccgcctcggcctcccaaagtgctgagattacaggcatgagccactgcgcacagccagtaatgtttattttgtaagctgaatagcatggtg

SEQ ID NO: 705902 - DNA, 2763 bp, Homo sapiens
aatgcatctgaagtgagttcactctaggtttcctcagcagaaaccccaaaattatataaatgacttcctcttttcccaccttcctgcctcacaatccgtcttcattcggaaaataattgctacaccaggggtctccttagttctcctaacagtgtctacgggttgttacaacaagctttctgtcttttcttggcagtacaatctgaagtgtgtaaattctatacttcctctctttctccttccacccttactgaaaacaagctggagaattaaagcaaaattatgttgtttcccagagccccttatgccttgaactgctctccatatttcttcttcccactttcaatggggggaagtgtatactcttactgcgaagatcatgttccagagcagcagcatcatcatcacccaagaacttatttgaaatgaagaatctcaggactgctgtatcagaatgtgcagcttcaacgaaccccccgctgatttattcagggaagagaatttcttatctatctgcactgaacatgacattaaatctcttttcaaaattacctctcctagttttttctccatgcttttttcctctggctatattcaaaasagaatctttctcatctcttgtagcctgaatggaatttgaaatgaaataataaattaataaagtatgtttcatagactatacatttactagttcacaatataaatgacagtttcattaccttcaagcctggtggttgctcagaagacactgaaaagtaaaagggattcataatcactcatatgtaaaaatgacaaaattatccacatattcatgcagtgttagcatcaacctccgtcctcctgcctgtattagcgtagctttgatggcttctactttgtgtctggggactagaacatgacagaaatatgctgagaaaagggaatacaggctccacgaaatatagtcttagaatttcaaacatggtatgatttgtcatatgccaaaaactaaaataaaaccatgtcaatatcaacgtggatatgccgagtgatgaggtcaaagtgatctaaaatcagaggagcaacacatacacctgagaatcaatgtcaaagcaggtgctacatgatcccacttacctttcatgcaacaaattaaaaggatttacaccattataatacaaacattcatcgtgctctttaacttgcccaataactgagaaggcacacaattacgacgacaattcagttgaacgtacacttcacatcacttcagtggaagtgtgctaaattaatcaccttggatatctgtttgctgatacctagtagataatattcattatctctctcaaccatatggtgtaataatctgcctaagtttcttgtatccactagtttagccttccgaaagtttcttcatccagtcgtggcaacaaaggataatatattagcctcaataaaaatatcatcaattatcaattttgacatacatatacaaagtaaaactgctgcaagcattagatattgatcagtttttcattcagaaatcagtgcaatattcattgaaaatgaccattttaggagttaattagaatccagcataatttttgtttctaaaatagccttgttgggagtatcatgttgttctctaaagaagtttcatgaaatagctattgtatccaagaggtagctccttgaacaaggaagccaatgtattcagattcaactttgtctcatttctgtaactaaaatcaacaaaacatgtatctctgatgcctaatagtaacaaagaggagtaatgagtcagtgtgtgtgtttttatgccaattctaggattgtttccttcttccagcagttcctgcagcagccaaaatcaagtattttttattaaaatattccaaatgcatctgaagtgagttcactcaggtttcctcagcggaaaccccaaaattatataaatgactgcctcttttcacaccttcctgcctcacaatccgtcatccttgggaaaatgattgctacaccaggggcctccttagttctcctacagtgtgtatgggttattacaacaagttttctgtctgttcttagcagtacgatgtgacatctgtaaaatcgatacttcctctctttctccttccacccttactgagaacaagctggagaattaaagcaaaactatgctgttccccagagccccttatgtcttcaactgctctccatatatcttcttcccaacttcaatgtggggaactgtataatcttacagccaaggtcatgttccagaccagcagcatcagcatcacccaagaacttactacaaatgaagaacctccagcctgctgaatcaggaagtgcagcttcgacgagccccccgctgatttattcagggaagagaatttcttatctatctgcactgaacatgacattaaatctcttttcaaaattacctctcctagttttttctccatgcttttttcctctggctatattcaaaacagaatctttctcgtcacttgtagcctgaatggaatttgaaatgaaataataaattaataaagtatgtttcatagactatacatttactagttcacaatataaatgacagtttcattaccttcaagcctgatggtttctcagaagacactgaaaagtaaaagggattcataatcactcatatgtaaaaatgacaaaattatccacacattcatgcagtgttagcatcaacctctgtcctcctgcctgtattagcgtaggctttgatggcttctactttgtgtctgagga

SEQ ID NO: 705903 - DNA, 2763 bp, Homo sapiens
aatgcatctgaagtgagttcactctaggtttcctcagcagaaaccccaaaattatataaatgacttcctcttttcccaccttcctgcctcacaatccgtcttcattcggaaaataattgctacaccaggggtctccttagttctcctaacagtgtctacgggttgttacaacaagctttctgtcttttcttggcagtacaatctgaagtgtgtaaattctatacttcctctctttctccttccacccttactgaaaacaagctggagaattaaagcaaaattatgttgtttcccagagccccttatgccttgaactgctctccatatttcttcttcccactttcaatggggggaagtgtatactcttactgcgaagatcatgttccagagcagcagcatcatcatcacccaagaacttatttgaaatgaagaatctcaggactgctgtatcagaatgtgcagcttcaacgaaccccccgctgatttattcagggaagagaatttcttatctatctgcactgaacatgacattaaatctcttttcaaaattacctctcctagttttttctccatgcttttttcctctggctatattcaaaagagaatctttctcrtctcttgtagcctgaatggaatttgaaatgaaataataaattaataaagtatgtttcatagactatacatttactagttcacaatataaatgacagtttcattaccttcaagcctggtggttgctcagaagacactgaaaagtaaaagggattcataatcactcatatgtaaaaatgacaaaattatccacatattcatgcagtgttagcatcaacctccgtcctcctgcctgtattagcgtagctttgatggcttctactttgtgtctggggactagaacatgacagaaatatgctgagaaaagggaatacaggctccacgaaatatagtcttagaatttcaaacatggtatgatttgtcatatgccaaaaactaaaataaaaccatgtcaatatcaacgtggatatgccgagtgatgaggtcaaagtgatctaaaatcagaggagcaacacatacacctgagaatcaatgtcaaagcaggtgctacatgatcccacttacctttcatgcaacaaattaaaaggatttacaccattataatacaaacattcatcgtgctctttaacttgcccaataactgagaaggcacacaattacgacgacaattcagttgaacgtacacttcacatcacttcagtggaagtgtgctaaattaatcaccttggatatctgtttgctgatacctagtagataatattcattatctctctcaaccatatggtgtaataatctgcctaagtttcttgtatccactagtttagccttccgaaagtttcttcatccagtcgtggcaacaaaggataatatattagcctcaataaaaatatcatcaattatcaattttgacatacatatacaaagtaaaactgctgcaagcattagatattgatcagtttttcattcagaaatcagtgcaatattcattgaaaatgaccattttaggagttaattagaatccagcataatttttgtttctaaaatagccttgttgggagtatcatgttgttctctaaagaagtttcatgaaatagctattgtatccaagaggtagctccttgaacaaggaagccaatgtattcagattcaactttgtctcatttctgtaactaaaatcaacaaaacatgtatctctgatgcctaatagtaacaaagaggagtaatgagtcagtgtgtgtgtttttatgccaattctaggattgtttccttcttccagcagttcctgcagcagccaaaatcaagtattttttattaaaatattccaaatgcatctgaagtgagttcactcaggtttcctcagcggaaaccccaaaattatataaatgactgcctcttttcacaccttcctgcctcacaatccgtcatccttgggaaaatgattgctacaccaggggcctccttagttctcctacagtgtgtatgggttattacaacaagttttctgtctgttcttagcagtacgatgtgacatctgtaaaatcgatacttcctctctttctccttccacccttactgagaacaagctggagaattaaagcaaaactatgctgttccccagagccccttatgtcttcaactgctctccatatatcttcttcccaacttcaatgtggggaactgtataatcttacagccaaggtcatgttccagaccagcagcatcagcatcacccaagaacttactacaaatgaagaacctccagcctgctgaatcaggaagtgcagcttcgacgagccccccgctgatttattcagggaagagaatttcttatctatctgcactgaacatgacattaaatctcttttcaaaattacctctcctagttttttctccatgcttttttcctctggctatattcaaaacagaatctttctcgtcacttgtagcctgaatggaatttgaaatgaaataataaattaataaagtatgtttcatagactatacatttactagttcacaatataaatgacagtttcattaccttcaagcctgatggtttctcagaagacactgaaaagtaaaagggattcataatcactcatatgtaaaaatgacaaaattatccacacattcatgcagtgttagcatcaacctctgtcctcctgcctgtattagcgtaggctttgatggcttctactttgtgtctgagga

SEQ ID NO: 705904 - DNA, 2763 bp, Homo sapiens
aatgcatctgaagtgagttcactctaggtttcctcagcagaaaccccaaaattatataaatgacttcctcttttcccaccttcctgcctcacaatccgtcttcattcggaaaataattgctacaccaggggtctccttagttctcctaacagtgtctacgggttgttacaacaagctttctgtcttttcttggcagtacaatctgaagtgtgtaaattctatacttcctctctttctccttccacccttactgaaaacaagctggagaattaaagcaaaattatgttgtttcccagagccccttatgccttgaactgctctccatatttcttcttcccactttcaatggggggaagtgtatactcttactgcgaagatcatgttccagagcagcagcatcatcatcacccaagaacttatttgaaatgaagaatctcaggactgctgtatcagaatgtgcagcttcaacgaaccccccgctgatttattcagggaagagaatttcttatctatctgcactgaacatgacattaaatctcttttcaaaattacctctcctagttttttctccatgcttttttcctctggctatattcaaaagagaatctttctcatcwcttgtagcctgaatggaatttgaaatgaaataataaattaataaagtatgtttcatagactatacatttactagttcacaatataaatgacagtttcattaccttcaagcctggtggttgctcagaagacactgaaaagtaaaagggattcataatcactcatatgtaaaaatgacaaaattatccacatattcatgcagtgttagcatcaacctccgtcctcctgcctgtattagcgtagctttgatggcttctactttgtgtctggggactagaacatgacagaaatatgctgagaaaagggaatacaggctccacgaaatatagtcttagaatttcaaacatggtatgatttgtcatatgccaaaaactaaaataaaaccatgtcaatatcaacgtggatatgccgagtgatgaggtcaaagtgatctaaaatcagaggagcaacacatacacctgagaatcaatgtcaaagcaggtgctacatgatcccacttacctttcatgcaacaaattaaaaggatttacaccattataatacaaacattcatcgtgctctttaacttgcccaataactgagaaggcacacaattacgacgacaattcagttgaacgtacacttcacatcacttcagtggaagtgtgctaaattaatcaccttggatatctgtttgctgatacctagtagataatattcattatctctctcaaccatatggtgtaataatctgcctaagtttcttgtatccactagtttagccttccgaaagtttcttcatccagtcgtggcaacaaaggataatatattagcctcaataaaaatatcatcaattatcaattttgacatacatatacaaagtaaaactgctgcaagcattagatattgatcagtttttcattcagaaatcagtgcaatattcattgaaaatgaccattttaggagttaattagaatccagcataatttttgtttctaaaatagccttgttgggagtatcatgttgttctctaaagaagtttcatgaaatagctattgtatccaagaggtagctccttgaacaaggaagccaatgtattcagattcaactttgtctcatttctgtaactaaaatcaacaaaacatgtatctctgatgcctaatagtaacaaagaggagtaatgagtcagtgtgtgtgtttttatgccaattctaggattgtttccttcttccagcagttcctgcagcagccaaaatcaagtattttttattaaaatattccaaatgcatctgaagtgagttcactcaggtttcctcagcggaaaccccaaaattatataaatgactgcctcttttcacaccttcctgcctcacaatccgtcatccttgggaaaatgattgctacaccaggggcctccttagttctcctacagtgtgtatgggttattacaacaagttttctgtctgttcttagcagtacgatgtgacatctgtaaaatcgatacttcctctctttctccttccacccttactgagaacaagctggagaattaaagcaaaactatgctgttccccagagccccttatgtcttcaactgctctccatatatcttcttcccaacttcaatgtggggaactgtataatcttacagccaaggtcatgttccagaccagcagcatcagcatcacccaagaacttactacaaatgaagaacctccagcctgctgaatcaggaagtgcagcttcgacgagccccccgctgatttattcagggaagagaatttcttatctatctgcactgaacatgacattaaatctcttttcaaaattacctctcctagttttttctccatgcttttttcctctggctatattcaaaacagaatctttctcgtcacttgtagcctgaatggaatttgaaatgaaataataaattaataaagtatgtttcatagactatacatttactagttcacaatataaatgacagtttcattaccttcaagcctgatggtttctcagaagacactgaaaagtaaaagggattcataatcactcatatgtaaaaatgacaaaattatccacacattcatgcagtgttagcatcaacctctgtcctcctgcctgtattagcgtaggctttgatggcttctactttgtgtctgagga

SEQ ID NO: 705905 - DNA, 2204 bp, Homo sapiens
  misc_feature 579, 580, 581, 582, 583, 584, 585, 586, 587, 588, 589, 590,591, 592, 593, 594, 595, 596, 597, 598, 599, 600, 601, 602,603, 604, 605, 606, 607, 608, 609, 610, 611, 612, 613, 614,615, 616, 617, 618, 619, 620, 621, 622, 623, 624, 625: n = A,T,C or G
  misc_feature 626, 627, 628, 629, 630, 631, 632, 633, 634, 635, 636, 637,638, 639, 640, 641, 642, 643, 644, 645, 646, 647, 648, 649,650, 651, 652, 653, 654, 655, 656, 657, 658, 659, 660, 661,662, 663, 664, 665, 666, 667, 668, 669, 670, 671, 672: n = A,T,C or G
  misc_feature 673, 674, 675, 676, 677, 678: n = A,T,C or G
ctgtcagcttctttccccatcttccctcttaacttctgtctcccacccagagttcaacatccccccataagcaggttacagtttcaaagaagagaacacaggctgaacctctcccgtttctgctccccatctccaaatttatctacagtgcacaatttatttttttaacctattcatatacgttttattctttttttttttttttttgagacggagtctcgctctgtcacccaggctggagtgcagtggcgcaatctcggctcactgcaaactcagcctcccgaagttcatgccattctcctgcctcaacctcacgcgtagctgcagactcaggcagccgcaaaaacagacgagctattattttgctacttttaatagagacggagtttaaagtacatagccaagatgatctacatataatagaactagtagaaaacaagacacggcatacaaaaaagataagacataacggatcacgacaacagagactgcaaacgcaaaaagaataaacacaaaacaacaaaaacacgacacaaagaaaaacaaacaacaacaaccaacaaaaaacaacacaaaaannnnnnnnnnnnnnnnnnnnnnnnnnnnnnnnnnnnnnnnnnnnnnnnnnnnnnnnnnnnnnnnnnnnnnnnnnnnnnnnnnnnnnnnnnnnnnnnnnnngaattcatcaggtataaagttctgaaatggggcatgactttttaactgcaaggaattccaaactttgaaatgggagttgttctggtctaaggatgcagaaaggttgacatgcttggctctgcatgatgatgggttctgccgtcctctggtcatttctgagggtccagcagatctgaaagcacaagggtgtctatctagttgtggatgttcagaagttagagtccggaaacatcccttttcatggctctcaataataatgtgaytacatacagcttctggcttgcatcccattccccgtggactctgtaaaccctagaagatacaaacaaacaggttcttatttgaagtagtccaagtagttataaacaaatcagttttatacaaatcagttttatacccacgctaagattagaccatgaaggtcatgtcattcttttatagtataacaggacaaacagcacagcaagcaaaaaagacagttaactacagaataaaatggctcacaatgattaagaccactcagagagttcttctaaaaaatttccactaaagtaaacagcaaagattactattgtccaccagtaagtattctcacctttcttttaataatagaaatgccttactcaaatttttgctggccacatagccaccaagtgggagacatttcctgtttcttctgcagctagttgtaaccacattactagactgacaccaatgggatatgaatgaaggcatcaagtacaacttctgcttcctgtccttaaaatcaagttcttgacctgcatgttcccccaatatcaccaccactatcatcactatttttcttgcctcctgaaaatggtaatgcatggaacaaccttggaagtcatgtgtaagacagcttagttgtccagccagcttgggtccctggatgacatcaaggaacagagctcactttcctaacatgaacaatgacgtgaaaaaataaaattctatcttatttgagccactctatgtttggctattacagaagcttgacctacatcctaatattttacccctaacaatggggggaaaaaaccaagaccttgtttcctggcgcataggatcagtactcaaagctaccataaatataacatttctttgagatttctgtattttacctatacagtcattataacttggcattctatttgatgatatagcaacatctgatttcagataaaaatattttaaattatgctgcatctccccaggtgatggagtagatatatttttgatggcagcggcatcccatctggagtggctgctgcaatgatgccagctgcagtggggaaggaacagctagggctactcgctgtactgaggtggtgggagccaggaacaggcagaagccccactcccttctgagttggaggggcaggaaccccaccctcctgggcacagctgcagctcccagtcacagctgtagacccaggcaccactgcactttcggggatctgggaactccccctgcccctgcagctcagaagtgcctctcccactgc

SEQ ID NO: 705906 - DNA, 2204 bp, Homo sapiens
  misc_feature 579, 580, 581, 582, 583, 584, 585, 586, 587, 588, 589, 590,591, 592, 593, 594, 595, 596, 597, 598, 599, 600, 601, 602,603, 604, 605, 606, 607, 608, 609, 610, 611, 612, 613, 614,615, 616, 617, 618, 619, 620, 621, 622, 623, 624, 625: n = A,T,C or G
  misc_feature 626, 627, 628, 629, 630, 631, 632, 633, 634, 635, 636, 637,638, 639, 640, 641, 642, 643, 644, 645, 646, 647, 648, 649,650, 651, 652, 653, 654, 655, 656, 657, 658, 659, 660, 661,662, 663, 664, 665, 666, 667, 668, 669, 670, 671, 672: n = A,T,C or G
  misc_feature 673, 674, 675, 676, 677, 678: n = A,T,C or G
ctgtcagcttctttccccatcttccctcttaacttctgtctcccacccagagttcaacatccccccataagcaggttacagtttcaaagaagagaacacaggctgaacctctcccgtttctgctccccatctccaaatttatctacagtgcacaatttatttttttaacctattcatatacgttttattctttttttttttttttttgagacggagtctcgctctgtcacccaggctggagtgcagtggcgcaatctcggctcactgcaaactcagcctcccgaagttcatgccattctcctgcctcaacctcacgcgtagctgcagactcaggcagccgcaaaaacagacgagctattattttgctacttttaatagagacggagtttaaagtacatagccaagatgatctacatataatagaactagtagaaaacaagacacggcatacaaaaaagataagacataacggatcacgacaacagagactgcaaacgcaaaaagaataaacacaaaacaacaaaaacacgacacaaagaaaaacaaacaacaacaaccaacaaaaaacaacacaaaaannnnnnnnnnnnnnnnnnnnnnnnnnnnnnnnnnnnnnnnnnnnnnnnnnnnnnnnnnnnnnnnnnnnnnnnnnnnnnnnnnnnnnnnnnnnnnnnnnnngaattcatcaggtataaagttctgaaatggggcatgactttttaactgcaaggaattccaaactttgaaatgggagttgttctggtctaaggatgcagaaaggttgacatgcttggctctgcatgatgatgggttctgccgtcctctggtcatttctgagggtccagcagatctgaaagcacaagggtgtctatctagttgtggatgttcagaagttagagtccggaaacatcccttttcatggctctcaataataatgtgattacatacagcttctggcttgcatcccattccccgtggactctgtaaaccctagaagatacaaacaaacaggttcttatttgaagtagtccaagtagttataaacaaatcagttttatacaaatcagttttatacccacgctaagattagaccatgaaggtcatgtcattcttttatagtataacaggacaaasagcacagcaagcaaaaaagacagttaactacagaataaaatggctcacaatgattaagaccactcagagagttcttctaaaaaatttccactaaagtaaacagcaaagattactattgtccaccagtaagtattctcacctttcttttaataatagaaatgccttactcaaatttttgctggccacatagccaccaagtgggagacatttcctgtttcttctgcagctagttgtaaccacattactagactgacaccaatgggatatgaatgaaggcatcaagtacaacttctgcttcctgtccttaaaatcaagttcttgacctgcatgttcccccaatatcaccaccactatcatcactatttttcttgcctcctgaaaatggtaatgcatggaacaaccttggaagtcatgtgtaagacagcttagttgtccagccagcttgggtccctggatgacatcaaggaacagagctcactttcctaacatgaacaatgacgtgaaaaaataaaattctatcttatttgagccactctatgtttggctattacagaagcttgacctacatcctaatattttacccctaacaatggggggaaaaaaccaagaccttgtttcctggcgcataggatcagtactcaaagctaccataaatataacatttctttgagatttctgtattttacctatacagtcattataacttggcattctatttgatgatatagcaacatctgatttcagataaaaatattttaaattatgctgcatctccccaggtgatggagtagatatatttttgatggcagcggcatcccatctggagtggctgctgcaatgatgccagctgcagtggggaaggaacagctagggctactcgctgtactgaggtggtgggagccaggaacaggcagaagccccactcccttctgagttggaggggcaggaaccccaccctcctgggcacagctgcagctcccagtcacagctgtagacccaggcaccactgcactttcggggatctgggaactccccctgcccctgcagctcagaagtgcctctcccactgc

SEQ ID NO: 705907 - DNA, 604 bp, Homo sapiens
tcattawaatctcatttaactaaaagattttatcagttaaatgttgatttttatcaaatgctttcctgccttatgagaagacttatctggtttttcctttattgtagtaataagtattctaatgttgacctgttctgcattcctgaaggacaccctacccttaaattagcgtgatgatttctacagaataggtacaaaatatatagattaatttactaatcaattgattgggaaatgaaaataaaagtcgctgatcctcactgttgttaggaagtgaaattactgtggttattttgtcctccttaggataataagaacaacaaagacccaaattaattagctccaagaatgatgaatgccaaggaagaaattttcctggatattaagtttcaattcctgagagaaagtagttactggcttctaagtagatttttacatcccttgacttgataaatgttaaagtgagtataaaacaacagcactcagaaagttggcctaattcaactactgtttacaatgggtggacatgttggataggttaacatctgaaaaacagatgttccctgttgtggaaaccttaggaggtattattattctgtctaag

SEQ ID NO: 705908 - DNA, 1275 bp, Homo sapiens
tctgcagctccctttctgtttgaatcttctatatagagcagtggttagaaaagtgacctttagagtcacacagacctagattctagttcttacttgttcatcacttgctgtctgaccattgtacattactccctaacaaaaaatgtcttcatctctgaagaggaaagaatacattttcttctgttttgtaggattgttgggatacaagcgtacaaggtggttagcttagtgcctggcatacagtaacattgagtatgtattagccatagttattaataaaaatagccaacattaaaaaaagacaaagatgtaaatgaaatataaagaatacttatgtatcctaatgtccagtcccccaacaggaactttctgcataaagtccactaatctgcagtttccctcaaatctggctgcttatagaaaccaacyagacatttaaaaaaaaacacagattctctacctttattctgatcttttgaatacgaaaccttggcagtggctctgggaattttcattaaaaaaaacccaccaacaacaaagaaatacctccccaggtgtggaaatcactaaagtccttagaaatgagacgatggtgaaatctctcaaagcatatataaaacatttgtccttcagaacataacactattttggaaaatgtgggaaatatataatatgaacagaataaataaaggtattcatggtaaggcaacacttcagaaaatagtcttgtggtgcctctatgtaatttatgtaaggcaagcctctcagtacatagtctatattatctttcttctgattaaaaccagaattaacctttcaacatattataatagggttttgttttagtcaaaattgtaatttctttttatgcttttctcaagtgttctatttttccctcatcaaagcatccgcttttattttactttagacataagtcccaatgtttcatagacatgagctaagaacagtcttattgagaagagagaaacattgagaataataggagttgttacacacacagtaacaaatgaaatacatcttttgtaaataactcccaccagaaatcttatatttccaggcatctatgcatataccttcatataacaacttttgcgttcgtaaaacattcatggaaggcagctctgcagttttatagaaaaacaacgtgccagggatgcaagaatcttgccagttctgtgaaaaatgacaccaattaaagcttaaattgcttgttttctcataaggtacatattttcataactttgaaatcaaata

SEQ ID NO: 705909 - DNA, 1290 bp, Homo sapiens
tcaatttttaactttatatttcagaattccaccatgtgtttttccttctcataaaggatcaaaaccacatcatgacagaacaatctgtgagaatcataggcttttaacaaggaagaaacggattaaaaaatacttcatgccttattaaagaaatccctatgttcctcaaaagcactttttagcatcttattagtggcatttgatctgactgacatattgaccagtaattggagcagaagatggatctattccacttagatcacaaagggaataaaaattttggctgtaaattcaagacggacaacttccaaataatttctttagaataactccctataaaacagccttctaagttgttctagatacatcgtcagattctttaataaatcactggccaataggtgaaccttattgtttttatttggatttggaaataaaccaaaataggattgatctgaaagtgaaagtgactttaaatgcccaccctctactcatatcaatagaaaaatctatattggtagctaaawcattattggataatattttgttgttgttcggcttgtgttttttctttttctttttttttgttatctcaccactcacacattaactttcattggtttcagtatcatattctcattgagtaactgcttctcaagttggaatgagatagttatttcatcattttctaaaatttcttaaatagccaaatagctctaactttaacacaatgataaatgtttcactatttcacaattatgtgaaacaacaagctataaaccaacgaagcatctacagagcatactcaaatatttcgtttgtaactatactaaaaaactctcattatctagatcactaccaatattaattactgacttgcattttgtggttttgtttttattgtttaaagaataaggggaaaaggccgggtgtggtggctcatgcctgtaatcccagcactttgggagggtgaggtgggcagatcacaaggtcaggagatcaagaccatccgggctaacacagtgaaaccccgtctctactaaaaatacaaaaaattagccaggcgtggcagtgtgcgcctgtagtcccagctactcgggaggctgaggcaggaggatggcgtgaacctgggaggcggaggttgcagtgagccgagatcgcaccactgcactccagcctgggtgacagagcaagactctgtctccaaaaaaaaaaaaaaagaaaagaaaagaataagggaaagaattagttgcaggtatgtaagagaaaatatacatgtctacatgcatt

SEQ ID NO: 705910 - DNA, 1060 bp, Homo sapiens
tgtagcttagtgctccaaccagaagtgtctatttttaagctgtcagtgaatttcaaagcaacacacatttcttgaaatactactatgtgtaacttgctgcactaggccttgtttcaaaatgtttgtcattttctcaaataccacatgcttccctactcaggaatttaagataacttcttaatgcttaaaaaacttaagcttagccctaaatactgtgtattaaatgactgcttcttgcctctgtgtatttaactattattatttcacccatgtgctcctacacactaaccaaagcaaattatagtccttccaaattgtttgataagctctacctctatgcttcaackgctgcagtcctctacttaccctcacccaaataaggcctcttattattttcttttttctccgctaatcttgtcctctaatatagttcgaaactgtgttgcaaatatatgtctactatcccagtagacatatattgctatcctagtagagatatatttgcaacatagttttgaagtattaattaagcaagacataattaactccaagccaattctgattactctttgattgtggatttcatgtttacctatagaattatttaatttcattgctataaaaggcccacagatgtatatatgcccatgattatcattacttggggaaaaatcagggtcaaaacctagtttccctggctctccatttgtttccgtgctacctgtacctatatcatatttcgtacttttgattaaccataggcttgatagttctctcaagctgacttatagtgtacttatttcctcacatataaaatagtaattttagatgcatttttaaataatattaataagaactatcatttattaggaaatgtatattaatacacttgcatctcaatccaatgaaataggtactattacaaccatcattataattttacatattaagtttctgagacagaaaagacttaaataactttttcaaggtagcatggtgactacctgagattcaagcccaggtagtcaagctccaaagcttacgatcataattaccttcc

SEQ ID NO: 705911 - DNA, 1147 bp, Homo sapiens
gctatttctgtagatcagtcattgattggaagtaaactatattgcctgtgggaggatgggcgagttttttttctttcttttttttttatatgattttggttgcctaaatcaatcatctacctccctgcccccaattccttaaggtttctgtgacagatacaactacttgtgcataggtattaattctgacaatagagttttttccccttctgattgtacaaacactgtcactctgaatttagcctcctcttatatattctgtaataacaattcctttccctagcttaattttaatcttttaagttacatttcaacactacaggaaaataatttataattcggctattctttttcatatctatattttaaatctcgctttgcataggttctttaggcattcaagcaactgaagaatctcctattacaaaaaatcatgcatacacatgcacacacacatacacactttgatgccttatagttctcttctcctacacagttatactttttgaaagtataatttaaacttcttttctgtaatgttttacttattccttgacccagaacaatcttctatttcttagcaagtgactacatcatgtgacttattttatgactaaaaatgttttcatgaacataagaaatgactttattataggtgaaagtaatgcatactttactttcttatttgtatttaccttacagcaatatctaacaatttaaccatttctttcttcaattaacttcttttgcatcagcatgcttgtcacatttatttcctatatctatgattttctgtctcagtttcctttaaagatttctctgagtgtgttattaggcatctcagagttgtctcttaggctttctccatcgcactgtatgtactttcgtagaagattgaatcaatttatgtggtttcaatcatcatctgatgtcatgatgcctctactatcaaagctctagcccagacacatatgtcccaatgccttctgggcatttccacttgaatatctcataggcmccacaagttaaaatgttccaaactgaacttttcaccttcccctcactcctctactgaccaaatgactctttttcctttgttgtccacctctctaaataacattagcatctattcagtttccaaagtcag

SEQ ID NO: 705912 - DNA, 1147 bp, Homo sapiens
gctatttctgtagatcagtcattgattggaagtaaactatattgcctgtgggaggatgggcgagttttttttctttcttttttttttatatgattttggttgcctaaatcaatcatctacctccctgcccccaattccttaaggtttctgtgacagatacaactacttgtgcataggtattaattctgacaatagagttttttccccttctgattgtacaaacactgtcactctgaatttagcctcctcttatatattctgtaataacaattcctttccctagcttaattttaatcttttaagttacatttcaacactacaggaaaataatttataattcggctattctttttcatatctatattttaaatctcgctttgcataggttctttaggcattcaagcaactgaagaatctcctattacaaaaaatcatgcatacacatgcacacacacatacacactttgatgccttatagttctcttctcctacacagttatactttttgaaagtataatttaaacttcttttctgtaatgttttacttattccttgacccagaacaatcttctatttcttagcaagtgactacatcatgtgacttattttatgactaaaaatgttttcatgaacataagaaatgactttattataggtgaaagtaatgcatactttactttcttatttgtatttaccttacagcaatatctaacaatttaaccatttctttcttcaattaacttcttttgcatcagcatgcttgtcacatttatttcctatatctatgattttctgtctcagtttcctttaaagatttctctgagtgtgttattaggcatctcagagttgtctcttaggctttctccatcgcactgtatgtactttcgtagaagattgaatcaatttatgtggtttcaatcatcatctgatgtcatgatgcctctactatcaaagctctagcccagacacatatgtcccaatgccttctgggcatttccacttgaatatctcataggccccacaagttaaaatgttccaaactgaacttttcaccttcccctcactcctctactgaccaaatgactctttttcctttgytgtccacctctctaaataacattagcatctattcagtttccaaagtcag

SEQ ID NO: 705913 - DNA, 904 bp, Homo sapiens
gtatgtatgtatgtatgtatgtatgtatttacttagagatgggggtctcactgtgtcacccaggctggagtgcagtggcacgatctcagctcactgcagcctcaatctcacgggctcaagtcatcctcccatgttagcttcccaagtagctgggaccccaggagcgcgccaccatgcatgactaattttcttgtatttttgatagagacagggttttgccatattgcccaggctggtatcaaactcctgagttcaagcgatccacctgcctcagcctcccacatgatgggattataggcatgagccaccatgcccagccttgtactgcacttgcaaataattgaaaatgtatttcatgtttaaatacatttgtattgtcggtacaatatcttgttaataatcaaacacattgaaatcaaacacattggattctcaccarttttaatttgaccaacatagtcaagaaaacaattttcctataaagtgccctgcagctctgaaattctttaaactacaaaaaataaagatattttaaggattatcttaccaccattttgtgttaaacagggtaaatacaatctggtatatagcacacatcaaacaaataataaatattgaagtactttttcggttttcagcagtgttgaacattcaaaattgataaaacaaaaatcaagtaacaatttggtaatgaaaaatattactggaacaaaaaattcttagcatcttccccaaatttataacttataacttatacacatagattgttatcttgattatttggtactaaatatcacctaagaaggacactaccacttacggattgtgtacataaaacatgaagtgggggtctaaagttttgttttaaatgcatcaacaagttatttcttcatactttggctca

SEQ ID NO: 705914 - DNA, 904 bp, Homo sapiens
gtatgtatgtatgtatgtatgtatgtatttacttagagatgggggtctcactgtgtcacccaggctggagtgcagtggcacgatctcagctcactgcagcctcaatctcacgggctcaagtcatcctcccatgttagcttcccaagtagctgggaccccaggagcgcgccaccatgcatgactaattttcttgtatttttgatagagacagggttttgccatattgcccaggctggtatcaaactcctgagttcaagcgatccacctgcctcagcctcccacatgatgggattataggcatgagccaccatgcccagccttgtactgcacttgcaaataattgaaaatgtatttcatgtttaaatacatttgtattgtcggtacaatatcttgttaataatcaaacacattgaaatcaaacacattggattctcaccagttttaatttgaccaacatagtcaagaaaacaattttcctataaagtgccctgcagctctgaaattctttaaactacaaaaaataaagatattttaaggattatcttaccacsattttgtgttaaacagggtaaatacaatctggtatatagcacacatcaaacaaataataaatattgaagtactttttcggttttcagcagtgttgaacattcaaaattgataaaacaaaaatcaagtaacaatttggtaatgaaaaatattactggaacaaaaaattcttagcatcttccccaaatttataacttataacttatacacatagattgttatcttgattatttggtactaaatatcacctaagaaggacactaccacttacggattgtgtacataaaacatgaagtgggggtctaaagttttgttttaaatgcatcaacaagttatttcttcatactttggctca

SEQ ID NO: 705915 - DNA, 978 bp, Homo sapiens
aaaaaaaaaaaaaaagatcgtgggattgtcttgtcttgaaataagaaaaagagaatctatgccaagtgtttacgtgctgagagtacccctttaaaaatacaaaagctaccctacagttatcaataactactaattgtaaaatgtgtaaaagggtattttattggataaattaagacaaacagagctaatataaaatgttctcctagcccagttttatgtgatgctggctaacatgacacaagcactctcttccaacaatgaaaactaagaaaatgaacccaaagaagacttgcatagaagcgtaagtcagattgttatggttatttatggttgtgattgtttgggccatatcttgtgaactgacatgacttcttaaaggacaagagagttagttggtcacccagttgagcccacatcaaagcctgagaggagtctttcctaccttttcaggtcattctagatctaaataatagtaaaagtcccagatctttagaggatgctaataggtactgagcattggaagcggagtaggggcaatggtttggtgctgctgtttcctgctttgtctacccaacaccagtaaatttgtctctatttaaaagccttggcaatgaatgcgaattttattagcccatgtggattaaaaagaagtaggaagagttgtatttacttcttgtgaactttgttccaggtctgaagtaaagctctgcaggatgtataygacaatgattttttttttttgagccaaaaataagacttaattcctagatttgtactaagcacaggaaaaaaaaaaacaacaacataagacagaaaagttatttatagtttgtatggcttatttacagttttcttcagaaatctctctgctgcttgcttctgacgtgatatctcacatatctttgaagttcagaacattattgtttttttctacctcccctgggccatccataaaaccccatacatgctacaaagaac

SEQ ID NO: 705916 - DNA, 614 bp, Homo sapiens
taaataattaagatataattattttcttaagacatccataagtaattttaatgtgggatatactatcccaagaattaaagaccttagtctcacagtctctagaaaaggtaaaatttacttctttttttttcatggcaaggaagtacaaataaatacaatccactactgttccagctaataagtttatagaagttaccgaaaacaataaaaaatgatgagaactctaaaagattcaagttggggttatacgttctttagtttcctttatgtcaattatggaaaatatatggcaagccagtatggggttttgtactcgttaaagacaaataacataaccggtgggaagtattggtgaggtaactttttagtgtatcaaatgattttaaaacatagttcaatctacaggccagtccactttctgttatatctgtataaatcagatgtttagaagatagagtttgacccatrtatatatgcatatgtgtatacataaaacacagtttgaatattaagtctcttcgaaccatgcttatcaaactttaatgtttatacaaagtacctggtgattgtcttaaaacgcagattctgcttcagtaaaaagagaatagtcctga

SEQ ID NO: 705917 - DNA, 1289 bp, Homo sapiens
aacatcagcatcatctaggaatgcattcaaaatgaaaattcttggggcccatggaagacggatggaatgaggaactccatgatgggtcccagcaatctgtatgttaccaagctctccaggggattttgatgcacgctaaggtttgagaagcactggtatagaacagggacttactgtgagtcagacacattgttcggcaggggacaggctggggtgaataagctacggtctccggtttttttttttttttttttttttttttgagacagagtcttgccctgtcacccaggctgaagtgtagtggggcgatcttggctcactgcaacctccgccccccgagttcaagtgattctcctggctcagccatccgaggggctaggattacaggcgtatgccaccatgcccagctaatttttgtgtttttagtagagatggggttttgccatgttggccaggctggtcttgagctcctgacctcagttgatctgccaaccttggcctcccaaagtgctgagataacaggcatgagccaccacacccggcctatggtctctgtttttgttttttaattaattaaattttttttttgagatggagttttgcccttgttgcccaggctggagtgcaatggtgcaatctcagctcactgcaacctctgcctcctgggttcaagcgattctcctgcctcagcctcctgagtagctgggataacaggcatgtgccaccatccctggctaattttgtatttttagtagagacagggtttctccatgttggccaggctggtctcgaactcccgacctcaggtgatccacctgcctcggcctcataaagtgttgggattacaggcgtgagccatcgtgcccggcggtctctgttttcaaagaggttggactctagtagagatgagttcagcatgtcaataactatatcccctcctccaagcagggctccccagagcctggacacccaggagagacacaggcrtgtttctaaagggggacttgtttctatttgttcctattagagttttgttgttattgttgttttgtgggtggtttgttttgttttgtattttttgaaacagagtcttgctttgtctattacagtttgatttagttcaacactttattgagtgtgaaagggtgattcctaggcatggggcagggaaacattgtttttgatttttttttttttttttgatgagagagagagagaacatcaaaaaaaaaggggaaagaaacagagaatgttatatgtaaatgcttatttagaaataaaatgcttgt

SEQ ID NO: 705918 - DNA, 664 bp, Homo sapiens
atgtattaaaataggaattccttggttagaatagcagtgtatctaaaatagtttggctgttaagtgtacttgtgacttactagaaatttacttttctttcaggatatcttatttggtttattgaagaagctatttcaggagaagtctcctaataggaaggagcatttaaaagtggtggtaatgtcagcaactatggaattagccaagctctctgcattctttggaaattgtccaatatttgatatacctggaaggctttatccagtcagagagaaattctgcaatttgattggtccacgagacagagaaaatactgcgtatattcaagcggtattacttggcattcatttaatgtctttttwaaatatctatgattcttactaattgggtggtttgataattcatttgttcactactattttaatgacagtcctcacaggtcctagaacttttaagaaccaaatttaatttttctgtggggcaagggaagtggtggtaagggaatgactgtatttccactagcatattatgcctgcatttcttgctttagattgtgaaagtcaccatggatatccatttgaatgaaatggctggagacatcttggtttttctgactggtgagcattcagtatcaagttaaaaaacttaagtatttgtaagtaag

SEQ ID NO: 705919 - DNA, 1538 bp, Homo sapiens
tgataaaatatggtagcatgataaaaattcctttatttgacttttatagcttgattataaagagtgcatcattgtgttatttgctttatttttctcttcattgtgaaagtcctgactctgccagattttcaaatgtttaatggatttgcatgtgatttaaatggtcctctgacatcccttttatcaatttcgggaagtccatcttttgtgagaattgcaatttcaattagttttgggtttgcattgcactggctagtatttatataatcaacattcactgaaagactgaccaaagggattaccataatgggcagagatagctgctgatattgaagagagagagagctatttgggcaagtactaattttatggaagtccgttcatcagtaaatatttcttattatgatgacttttgcaactcagtgggtggggataattggatagttgggtagtaaagaccccatctgctgaatgtttgctatagaaggccacgtctttcagtatatttcctgctctctttccaggcttatgctttcagcaaatacctgttgagtcctgcctgactcctatgttgagtcatagggtactgagtaaaaattatttatgcagtatcttgaaatacctagctgaatgggtttttttagtcattgttttttgttttgtattcccagtctggtcaatcagaatgactcacagggtacttctgttctaagagtttattgttttaatggacaaatgtttcattattttcagatctttagcacaaactggaaaaaacacccagacattttctttawaccacttaaaacaacaatacagtctggaccgcagacatactggcttcatctccaacctcaaattcagccctcaatatttgcctatataagcaatgtttacagcctcagaagccaaacaatctcttcttttagtttttatcttgattccaggccccatactttattcttatctgagagtccttggaatattttcatttcctgaagttctgaaaaatggattgtctctgctgtgtagctcctctctcctttctctcattctttatagcttatttgtgatttttttactctgtctctgtagtgcctttagcattaaaaagatagtgatctgccatcttggtgggtgtgtatttctccttctttgtgtgtgtgtgtgtgtgtgtgtgtgtgtgtgtgtgtgtggtttgtatctaaagccatggtgacttctgtatggctctatatgtatattgatgtagatgtgggaaaagagtgtaattctcatgtgggttctttagttgcatcatagtataattaaagtggcattgggccaatcttcatttttccttttatcctatgggtctctaacattcaaaacttctggagtagacaagtagatctgctggtttgtgggccagaaataaataaatggtctaccttgtttgatcatgtcattttttatacattgaattctatttttcacttttaagcactttccttagtaacttaagttctgaagattcttctatttttatgtaattttct

SEQ ID NO: 705920 - DNA, 1538 bp, Homo sapiens
tgataaaatatggtagcatgataaaaattcctttatttgacttttatagcttgattataaagagtgcatcattgtgttatttgctttatttttctcttcattgtgaaagtcctgactctgccagattttcaaatgtttaatggatttgcatgtgatttaaatggtcctctgacatcccttttatcaatttcgggaagtccatcttttgtgagaattgcaatttcaattagttttgggtttgcattgcactggctagtatttatataatcaacattcactgaaagactgaccaaagggattaccataatgggcagagatagctgctgatattgaagagagagagagctatttgggcaagtactaattttatggaagtccgttcatcagtaaatatttcttattatgatgacttttgcaactcagtgggtggggataattggatagttgggtagtaaagaccccatctgctgaatgtttgctatagaaggccacgtctttcagtatatttcctgctctctttccaggcttatgctttcagcaaatacctgttgagtcctgcctgactcctatgttgagtcatagggtactgagtaaaaattatttatgcagtatcttgaaatacctagctgaatgggtttttttagtcattgttttttgttttgtattcccagtctggtcaatcagaatgactcacagggtacttctgttctaagagtttattgttttaatggacaaatgtttcattattttcagatctttagcacaaactggaaaaaacacccagacattttctttaaaccacttaaaacaacaatacagtctggaccgcagacatactggcttcatctccaacctcaaattcagccctcaatatttgcctatataagcaatgtttacagcctcagaagccaaacaatctcttcttttagtttttatcttgattccaggccccatactttattcttatctgagagtccttggaatattttcatttcctgaagttctgaaaaatggattgtctctgctgtgtagctcctctctcctttctctcattctttatagcttatttrtgatttttttactctgtctctgtagtgcctttagcattaaaaagatagtgatctgccatcttggtgggtgtgtatttctccttctttgtgtgtgtgtgtgtgtgtgtgtgtgtgtgtgtgtgtgtggtttgtatctaaagccatggtgacttctgtatggctctatatgtatattgatgtagatgtgggaaaagagtgtaattctcatgtgggttctttagttgcatcatagtataattaaagtggcattgggccaatcttcatttttccttttatcctatgggtctctaacattcaaaacttctggagtagacaagtagatctgctggtttgtgggccagaaataaataaatggtctaccttgtttgatcatgtcattttttatacattgaattctatttttcacttttaagcactttccttagtaacttaagttctgaagattcttctatttttatgtaattttct

SEQ ID NO: 705921 - DNA, 1538 bp, Homo sapiens
tgataaaatatggtagcatgataaaaattcctttatttgacttttatagcttgattataaagagtgcatcattgtgttatttgctttatttttctcttcattgtgaaagtcctgactctgccagattttcaaatgtttaatggatttgcatgtgatttaaatggtcctctgacatcccttttatcaatttcgggaagtccatcttttgtgagaattgcaatttcaattagttttgggtttgcattgcactggctagtatttatataatcaacattcactgaaagactgaccaaagggattaccataatgggcagagatagctgctgatattgaagagagagagagctatttgggcaagtactaattttatggaagtccgttcatcagtaaatatttcttattatgatgacttttgcaactcagtgggtggggataattggatagttgggtagtaaagaccccatctgctgaatgtttgctatagaaggccacgtctttcagtatatttcctgctctctttccaggcttatgctttcagcaaatacctgttgagtcctgcctgactcctatgttgagtcatagggtactgagtaaaaattatttatgcagtatcttgaaatacctagctgaatgggtttttttagtcattgttttttgttttgtattcccagtctggtcaatcagaatgactcacagggtacttctgttctaagagtttattgttttaatggacaaatgtttcattattttcagatctttagcacaaactggaaaaaacacccagacattttctttaaaccacttaaaacaacaatacagtctggaccgcagacatactggcttcatctccaacctcaaattcagccctcaatatttgcctatataagcaatgtttacagcctcagaagccaaacaatctcttcttttagtttttatcttgattccaggccccatactttattcttatctgagagtccttggaatattttcatttcctgaagttctgaaaaatggattgtctctgctgtgtagctcctctctcctttctctcattctttatagcttatttgtgatttttttactctgtctctgtagtgcctttagcattaaaaagatagtgatctrccatcttggtgggtgtgtatttctccttctttgtgtgtgtgtgtgtgtgtgtgtgtgtgtgtgtgtgtgtggtttgtatctaaagccatggtgacttctgtatggctctatatgtatattgatgtagatgtgggaaaagagtgtaattctcatgtgggttctttagttgcatcatagtataattaaagtggcattgggccaatcttcatttttccttttatcctatgggtctctaacattcaaaacttctggagtagacaagtagatctgctggtttgtgggccagaaataaataaatggtctaccttgtttgatcatgtcattttttatacattgaattctatttttcacttttaagcactttccttagtaacttaagttctgaagattcttctatttttatgtaattttct

SEQ ID NO: 705922 - DNA, 599 bp, Homo sapiens
taaaatttttaatatagttaaaagtctaaataagataaaaaatctgaagttatctaataactgagtctataattattactattagtggcagtatccctatttatgatgttattttatgggcactgtagaataaagccaataaattaatacattaattttatgaaaagaaaacatgccagtaatcccagtgctttggcaggcaaaggaaggaggattgcttgaggtcagcctgagtaacatagcgagacaccatccctacaaaaaatgtttaaaaattagctgggcatggtggcacaagcttgtagtcctggttactcaggagtctaaggcaggaggattgcttgagcctactaatttgaggctgcagtgagctatgatcatgccattgcacaccagcctgggtggcggagcgagaccttgtctaaatcatacatacgtgcatatttttactgagagaaaaacaggtaccaatataaaatacaaggtaaaaaaatcctgttaatgttaaaattttattagaaatattagtttgaattcttgattaaaaacaccaaaagacatttcctgtgtctgtccactayaaaggtctagaaataaca

SEQ ID NO: 705923 - DNA, 1141 bp, Homo sapiens
atacttacagatctaattttctcatttcatttctggcacttggagattagagattcctctttcacacaaactccactatgccttaaaaaatgttatctttatgaatcatttataggtttttctcagtggaatttggggggtttggggagaatttttttgtttgtttgtttgtttgttttgcctacgtttaatttcctcagccttggacgcaatgttagtgtaaactggaagtaatttcaagtggtgtcctagttagttttttccctttgatatgttgacagttttaaatctgatttgtcagttcaaacgccattaaatagatatatttatttgtcctcacagaactacagttcaagtaatgctatctgaagtaatagtgccttctttatcatcctattgcccacacacctagttgcttcctaggtatagtcatggacatcagctatttctccacaaaaaaaatcaacaaattaaagaagctaagtagaaatgttaggcaaaatatgataagacttaaaataccaagttattaaagaaagcacatagtcaagtagagtcaagatcatttacatgatgtacaagctaagtaattaaatgctacacaggagcgtatgtcacactctattatttctacacatcattctacttttctatttatatgtatccacctgttgtcctctctatgtgagaagtattttgaaaatctattaggaattaaacaaaacaaatcaaaaccagtggttttccagaatagaaggctccctaaattctatctcagctgaatttctaaccaaataacataaaggccagtactttctctgggttataccttgcctataggaccagactacttcttgcttgtttattcctctctcaaataattttcaaaaatttttcttaaaaatatttatgaactttgtgtcaagatataaatacacatagtcttctacctctaaaacaatatttatttcaaaaaataaatagtcatactacaaaaygtaaataagataaatgcagagctggaatctttaaaatgcaaagtggtgaaagtggctgaagccacccagcccactgaaaggtagtgcaggtgggtagaggctactgtcgctgcaatgtcctgtcctgccagtagagaagtcag

SEQ ID NO: 705924 - DNA, 1141 bp, Homo sapiens
atacttacagatctaattttctcatttcatttctggcacttggagattagagattcctctttcacacaaactccactatgccttaaaaaatgttatctttatgaatcatttataggtttttctcagtggaatttggggggtttggggagaatttttttgtttgtttgtttgtttgttttgcctacgtttaatttcctcagccttggacgcaatgttagtgtaaactggaagtaatttcaagtggtgtcctagttagttttttccctttgatatgttgacagttttaaatctgatttgtcagttcaaacgccattaaatagatatatttatttgtcctcacagaactacagttcaagtaatgctatctgaagtaatagtgccttctttatcatcctattgcccacacacctagttgcttcctaggtatagtcatggacatcagctatttctccacaaaaaaaatcaacaaattaaagaagctaagtagaaatgttaggcaaaatatgataagacttaaaataccaagttattaaagaaagcacatagtcaagtagagtcaagatcatttacatgatgtacaagctaagtaattaaatgctacacaggagcgtatgtcacactctattatttctacacatcattctacttttctatttatatgtatccacctgttgtcctctctatgtgagaagtattttgaaaatctattaggaattaaacaaaacaaatcaaaaccagtggttttccagaatagaaggctccctaaattctatctcagctgaatttctaaccaaataacataaaggccagtactttctctgggttataccttgcctataggaccagactacttcttgcttgtttattcctctctcaaataattttcaaaaatttttcttaaaaatatttatgaactttgtgtcaagatataaatacacatagtcttctacctctaaaacaatatttatttcaaaaaataaatagtcatactacaaaatgtaaataagataaatgcagarctggaatctttaaaatgcaaagtggtgaaagtggctgaagccacccagcccactgaaaggtagtgcaggtgggtagaggctactgtcgctgcaatgtcctgtcctgccagtagagaagtcag

SEQ ID NO: 705925 - DNA, 1141 bp, Homo sapiens
atacttacagatctaattttctcatttcatttctggcacttggagattagagattcctctttcacacaaactccactatgccttaaaaaatgttatctttatgaatcatttataggtttttctcagtggaatttggggggtttggggagaatttttttgtttgtttgtttgtttgttttgcctacgtttaatttcctcagccttggacgcaatgttagtgtaaactggaagtaatttcaagtggtgtcctagttagttttttccctttgatatgttgacagttttaaatctgatttgtcagttcaaacgccattaaatagatatatttatttgtcctcacagaactacagttcaagtaatgctatctgaagtaatagtgccttctttatcatcctattgcccacacacctagttgcttcctaggtatagtcatggacatcagctatttctccacaaaaaaaatcaacaaattaaagaagctaagtagaaatgttaggcaaaatatgataagacttaaaataccaagttattaaagaaagcacatagtcaagtagagtcaagatcatttacatgatgtacaagctaagtaattaaatgctacacaggagcgtatgtcacactctattatttctacacatcattctacttttctatttatatgtatccacctgttgtcctctctatgtgagaagtattttgaaaatctattaggaattaaacaaaacaaatcaaaaccagtggttttccagaatagaaggctccctaaattctatctcagctgaatttctaaccaaataacataaaggccagtactttctctgggttataccttgcctataggaccagactacttcttgcttgtttattcctctctcaaataattttcaaaaatttttcttaaaaatatttatgaactttgtgtcaagatataaatacacatagtcttctacctctaaaacaatatttatttcaaaaaataaatagtcatactacaaaatgtaaataagataaatgcagagctggaatctttaaaatgcaaagtggtgaaagtggctgaagccacccagcccactgaaaggtagtgcagrtgggtagaggctactgtcgctgcaatgtcctgtcctgccagtagagaagtcag

SEQ ID NO: 705926 - DNA, 540 bp, Homo sapiens
tcgggtccttcaagtttctaaaattttttgtttgtttgttctgtttrttttttgttcgagatggagttttgctcttgttgctcaggttacagtgcaatggcgcgatctcggctcactgcaacctccgcctcctgggttcaagcaattctcctgcttcagcctcctgagtagctgggattacaggcatgcaccaccatgcccggctaattttatatttttagtagagacaaggtttctccatgttggtcaggctggtgtcaaaatcccgacctcaggcaatccacctgcctcggcctcccaaaatgctgggattacaggcgtgagccaccacgcctggcccaagtttctagattttgacacgtccttccagtggctgctaatcaacccctggccctttgaaaagttgtatctttttaaattgatttctttcaaaattgtactaaatgtagttagttgcccggaaggtgtgacttgtttaacctaatgaatcaaagctgggctttagcagttgagccacctgggccactaacatctacccac

SEQ ID NO: 705927 - DNA, 506 bp, Homo sapiens
  misc_feature 2, 3, 4, 5, 6, 7, 8, 9, 10, 11, 12, 13, 14, 15, 16, 17, 18,19, 20, 21, 22, 23, 24, 25, 26, 27, 28, 29, 30, 31, 32,33, 34, 35, 36, 37, 38, 39, 40, 41, 42, 43, 44, 45, 46,47, 48, 49, 50, 51, 52, 53, 54, 55, 56, 57, 58, 59, 60,61: n = A,T,C or G
  misc_feature 62, 63, 64, 65, 66, 67, 68, 69, 70, 71, 72, 73, 74, 75, 76,77, 78, 79, 80, 81, 82, 83, 84, 85, 86, 87, 88, 89, 90,91, 92, 93, 94, 95, 96, 97, 98, 99, 100, 101: n = A,T,C or G
annnnnnnnnnnnnnnnnnnnnnnnnnnnnnnnnnnnnnnnnnnnnnnnnnnnnnnnnnnnnnnnnnnnnnnnnnnnnnnnnnnnnnnnnnnnnnnnnnnnttttgaagcctttcaggtgcatttttcaatatattgttttccagcaagtctacactactatgtacaaagccttgtgtaagtagaatgagagctataaagatgaacacactgggggcttgcacgatgcctgctccagttccttgtttccttttctaggagttcattcaaaagtgcctgcagtctgagcctgctcgcagaccaacagccagagaacttctgttccacccagcattgtttgaagtgccctcgctcaaactccttgcggcccactgcattgtgggacaccaacgtgagtcgtcttggccctatgggacatagtcttccaatctggagccctgtaactatcactggcatgcttgttttcctctttatttccaaagggattctttkgtttttttttttttt

SEQ ID NO: 705928 - DNA, 506 bp, Homo sapiens
  misc_feature 2, 3, 4, 5, 6, 7, 8, 9, 10, 11, 12, 13, 14, 15, 16, 17, 18,19, 20, 21, 22, 23, 24, 25, 26, 27, 28, 29, 30, 31, 32,33, 34, 35, 36, 37, 38, 39, 40, 41, 42, 43, 44, 45, 46,47, 48, 49, 50, 51, 52, 53, 54, 55, 56, 57, 58, 59, 60,61: n = A,T,C or G
  misc_feature 62, 63, 64, 65, 66, 67, 68, 69, 70, 71, 72, 73, 74, 75, 76,77, 78, 79, 80, 81, 82, 83, 84, 85, 86, 87, 88, 89, 90,91, 92, 93, 94, 95, 96, 97, 98, 99, 100, 101: n = A,T,C or G
annnnnnnnnnnnnnnnnnnnnnnnnnnnnnnnnnnnnnnnnnnnnnnnnnnnnnnnnnnnnnnnnnnnnnnnnnnnnnnnnnnnnnnnnnnnnnnnnnnnttttgaagcctttcaggtgcatttttcaatatattgttttccagcaagtctacactactatgtacaaagccttgtgtaagtagaatgagagctataaagatgaacacactgggggcttgcacgatgcctgctccagttccttgtttccttttctaggagttcattcaaaagtgcctgcagtctgagcctgctcgcagaccaacagccagagaacttctgttccacccagcattgtttgaagtgccctcgctcaaactccttgcggcccactgcattgtgggacaccaacgtgagtcgtcttggccctatgggacatagtcttccaatctggagccctgtaactatcactggcatgcttgttttcctctttatttccaaagggattctttgktttttttttttttt

SEQ ID NO: 705929 - DNA, 630 bp, Homo sapiens
agattggcaaaaagttaacagtgaattgaagggaagggtattcagatgctcatgcactactcaacttayctgcaggtgtacgtaattcttttcaaaacataagaggaatgggattatgacaccttgcatacaaggatatctttgctcacttttgcaaaatggaaaagagtgtgtatacataatcttctataactacagaacttggccacataagcactcagcagtatttcacaacccaaactggctgaaaaggctactctaggtccacatatctactaaccaccgaccatccccccaccccgctccttcctgccgtctctttcttgctttttaattttataaccaggaagaagcttaagactgaataatacccagcaacagcaactaagtagtccttaaacacagtccagtttcagatactctattacttaacagtttcttaaaaaattaattctgaagcaacctacccacacctctgtgggtgatatccatctgtacctccaccggtgataagactacataagaacagtgttggctaaactctacctttatccttcattagcccaaataatttacagctatctaattttgacctccggctcatcagcttatggtctacattcaaatgtt

SEQ ID NO: 705930 - DNA, 630 bp, Homo sapiens
agattggcaaaaagttaacagtgaattgaagggaagggtattcagatgctcatgcactactcaacttacctgcaggtgtaygtaattcttttcaaaacataagaggaatgggattatgacaccttgcatacaaggatatctttgctcacttttgcaaaatggaaaagagtgtgtatacataatcttctataactacagaacttggccacataagcactcagcagtatttcacaacccaaactggctgaaaaggctactctaggtccacatatctactaaccaccgaccatccccccaccccgctccttcctgccgtctctttcttgctttttaattttataaccaggaagaagcttaagactgaataatacccagcaacagcaactaagtagtccttaaacacagtccagtttcagatactctattacttaacagtttcttaaaaaattaattctgaagcaacctacccacacctctgtgggtgatatccatctgtacctccaccggtgataagactacataagaacagtgttggctaaactctacctttatccttcattagcccaaataatttacagctatctaattttgacctccggctcatcagcttatggtctacattcaaatgtt

SEQ ID NO: 705931 - DNA, 974 bp, Homo sapiens
aattcattacatattaacataaaatactttttccaaaaaaaaaaatcagaaagaaggccagcgctgtttcacacttttgagacttcctttaatgtgtggtttaagagaactcatcttaactctcacttatgtttctgtctttaatctgttgtgatgtcacatgtcaggtagcctctggaagacttcagcatacacttggagagaatgagagtgagaaatagctaagactttatttccctgttgtgaaaatagttttaactcagagattccctacaaaggtcttagggaacccaaggggtccctgggaccacactttgagaattgccgctttaagggcatagtcttcaaacacttttgatcaagaatcccagcactggccaggtgcgggagttcatgcccgtaatcaatcccagcactctgagaggccaaggcgggcagatcacctgagctcaggagttcaagaccagcctgggcagcatggcgaaaccctgtctccacaaaaaaaaagaaatcagccgggacctgtggtcccagctactcaggctgaggcaggaggatcacttgagcccaggaggcagagggtgcagcgcaccaagatcatgccactgcactccaacctgggtgacagggcgagagatgtctcaaaaataaatacataaataaaatcctatcactaaagaatttcactacataccttcaatcctaaattacacacgtactattctgtactagtaaagtatgtatgcagtgacacatacccctaaataggcatttaaaaataagccataaataagtatttcttaaaagatttttctattttcttcccatacccagaagaccgtggtgcatgtggcaagtgcagcrctcctgtcctctttgaaatcagcatttccttttcttgagcagagtttgtcttgactactgctggagtaacagtgatatgatcagagtcacttgcatcagtggctaaaaac

SEQ ID NO: 705932 - DNA, 1524 bp, Homo sapiens
ttaacatttaaaaagttccttatgttcaaaagagttgagaccagtggttgaggtatgaagtaggttcttggcagtattaatggagagtgggtccagatcagggaagagatttttgtggtagaaagaagaaaagttaacaactgccaattatggggcagagaagagggatgagtaaaaatcacattgtaccaatgtcctggtaattatttaaaagtcttcacaacgaagtgcccagataaataccaaatgcagtaagagctatgttgtcttgctgctttgtctttcactcaatacactcacactgaaataaaacatcttcgattattgtttatttaaaactaggggattaccgcataaaagatggcataggaatgccaaacttagggagaactgggtagaacaggcagacagaagcaggacttgtggttcggggtttggtttttgcaaagagcattttctatagtaaatgcttgatgatacaatcaaaatgtttttggaagaacagtactgagaaaatcccactggcctccaaggacaagaaaaggtgatttaatatggactctgggtcctggtgccgctgttttcctcagatagtgagaaactgcacttgtagctgtgagtaaactgagatgctaagagagattgaagagaacgtagggccagcgattaacatctgaaaaatgtttttcactgtaagaaacatcaccaccgtcatggacaacacacatattttcaacaccaactatctgacacagcttcaagatttctggaatgaatttaaattgcctgatgcttgcaacaaggaaattgtatcagtctctgctttctaatacagcttagtaaatacctggatcatagaaatcatggctaattcagtgcttaatacttgttggcccaaagagaacrtaatcctattggaacatattataataatgagtttgtcctgggactgcccaatctggggtctagaatcttacctgaaaatgacatggtcagtcttttctggacaaattctttaaggaactgtttgttttaggattttaaagaagccaacaaaagaaattttagtctctcattattaaatatctccggactacagtagctggaataagaaataatgtctctgtgagttgggagtgggggtctgcgccctccttaagggcatgatgtaggggaggctggtagtggccatggcagtggtttgaccagacccaataaaggcggtgcaaagcgtggtgggaacaacccaggattcccaggcaccctcccctctgcgccccagcggcaggacacaccagcgcttgcccaggctgaggttcaggagttaatgtggctcccgtgggctggactctagggtaaggaaagaagagtgagcaagggggaaacacataagaaaggagggaaagacaaaaaaggaagtgcggatggggccatcagctgcagcttcccgcgccgggccggtctggttggggaatcaagcctgggggacccttgggaaggaaacgtctcaggcgattatgccaa

SEQ ID NO: 705933 - DNA, 923 bp, Homo sapiens
tgcacatatatgrggcattttaaagatagtttgtgggacacctaacgtcagtatctttgggtactttttcataggttggtcagattctccaaacaagtagggttgccagatgtagcaaataaaaatataaggatgcccaattaaactatattttcagaaaaacaaagagaattttaggatgagtgtgatccaattattaaatggggacatacttatactaaaaagtatttattctatatatgaaattcttattttatttggcaatgctatagacaagcctcttgtattcaattcccttcctggagtgtagaatccttagtgccaaaattcacagagtgattcatgcaaaatactgtggctaccatatttcttacataacttttcagttaaatgcctccattttttacatagtttcccacctttggttttattctctttaaataataaatttccagtcttctgctggcatgggaaaccattttgcagtttagtttttcttaatcaacttttagatttcatagctatttttagctctgtgttttcacctatcagttctaccttcacacctgattctagatatacctgttacacccctttctgaaagttttgccttctgaggtggtaattgtgtttcttcttggcttcttttgcagcctgtttaggattcaggttactcaatccgtctgacaattatcacttgtccaactatttttcagctttataaatcccgtcattttgggaaggcacagaggcaaatatgcatctccaacccatcttctttaagcaaaagtcagatctagatgttttagtaaatgacattgaaggagcagattatctttaggaaactcttcctgagactaaaaaatgaaagaattattctcaactcattttatgagagaatataattttgatacaaaaaaatc

SEQ ID NO: 705934 - DNA, 588 bp, Homo sapiens
tctgtcattatgtgcaaattatcttcttgctggatctggagagataaataagatgcaattgcacatggttctatatcctgttttaactaaacgaacgtatggcccaataagaataggggtcagacatcatgggactcaatggagcctgtgattctggaagtaagccagctaaggcccctctgagcctgctcctgctttcctctggatttttgtatgcmcaatgatacctaaaaaacactgaacaccgtttgacttaaattctatttcatatttgttcacgtcatgcttgaactcttagcctggtccttatctcttcaaatttgcccgcatctaactccaaagatgattctttgagttcatttcagacaataccattttagtctccagcaggagccctggggaaactcaccatgtctaatttatcttcagtgaatatcaaatcatattcaccacataaaagttaggatggctttatcagttttattaaagctgtaaattttccttttaaaacctgccaaagcctatgcttctagaatcctctaacaacaaattaactttttttcccttctttctctgcttagtccttca

SEQ ID NO: 705935 - DNA, 588 bp, Homo sapiens
tctgtcattatgtgcaaattatcttcttgctggatctggagagataaataagatgcaattgcacatggttctatatcctgttttaactaaacgaacgtatggcccaataagaataggggtcagacatcatgggactcaatggagcctgtgattctggaagtaagccagctaaggcccctctgagcctgctcctgctttcctctggatttttgtatgcacaatgatacctaaaaaacactgaacaccrtttgacttaaattctatttcatatttgttcacgtcatgcttgaactcttagcctggtccttatctcttcaaatttgcccgcatctaactccaaagatgattctttgagttcatttcagacaataccattttagtctccagcaggagccctggggaaactcaccatgtctaatttatcttcagtgaatatcaaatcatattcaccacataaaagttaggatggctttatcagttttattaaagctgtaaattttccttttaaaacctgccaaagcctatgcttctagaatcctctaacaacaaattaactttttttcccttctttctctgcttagtccttca

SEQ ID NO: 705936 - DNA, 887 bp, Homo sapiens
tgaggtgggatgatacagcacttcactcatagtccatttgacagggatgtggatgtataagcatcggagacagaaagagaaataaatggataaaaattcatttcactgcctattgtgccttcttggtctgtagggtggtatgtttctcatggttataaacagaaatggccctgtctgtgacaaagggctgtcacaaatgtgtcaggaatgattggaggacagtaactttatgaatatattaaaaataacatgctgtagtatggagtaattgatgtgtagaatattctgaagaacttttgaaaaatcaggggatttaaagtagtttattaaagtaagtaaaataacaaattacagtagtttttctcaggttttgtttttaaagatgctattacaggctggtcacagtggctcatgcctataatcccagcactttgggaggctgaggtgggaggatggcttgaggcctggagtttgagactagcctggacaacatagccagactctcttctctgcacatttttttttttaaagttagctggacgtggttgttcgtgcctgtagtcccagctactcgggaggctgaggtcagaggactgtgtgagcccaggaatttgaggtgacagtgagccataatcactgcattccattcctggagacagagcaagaccctgtccctccaaaaaaattaattaattaaataaatatgccattagagacaccaattttttagaagtatactagctcctcaatctgcgtacttttctaaatacctcrtctttattattacttttgagtgtatgtgctttatttttactttctgtgtccagttgtaaagcgaaattcttctgatttgtgttcgaaagcagtttagtggcacaatacaatta

SEQ ID NO: 705937 - DNA, 656 bp, Homo sapiens
tatgctttatatatttcttactaagaagaaggaaatgcttgctatataaccaaaagagattcctattttaagccttttctatgtcacaatgtatgtstgtgtgtgtgtgtgtgtgtgtgtgtgtgtgtatctgtaaatataatcttagaggtggcagcctttattttaacacatgatatttgtgtaccatgggtttctgtcaaggaggtattctgtcagcaagtaattaacaaggccttacattgagtaggtgtgaccaaattctcatgggttactataatgctacaatctcatctgggattccattttgtgcctggaatccaaggacactcttaccttgaaactatagatatgaacaggtttcatgaccacagtcctgggttaaccactaccccagggaagtccaattaacaaatttattcatttgggccctattacacttctcctgtcaactctaattacttatttttgaaataaaaactttgaccttcacaatggtccccagtgccgttcagtgaatgataatctgtttgaatctcttcagctttattagaatttcacaggtctgccatctggtagtaggaaccaaagctcgatcaatatttatacatacaaaatgacacttcctgagaagggatggtttccatgcatggtcc

SEQ ID NO: 705938 - DNA, 656 bp, Homo sapiens
tatgctttatatatttcttactaagaagaaggaaatgcttgctatataaccaaaagagattcctattttaagccttttctatgtcacaatgtatgtgwgtgtgtgtgtgtgtgtgtgtgtgtgtgtgtatctgtaaatataatcttagaggtggcagcctttattttaacacatgatatttgtgtaccatgggtttctgtcaaggaggtattctgtcagcaagtaattaacaaggccttacattgagtaggtgtgaccaaattctcatgggttactataatgctacaatctcatctgggattccattttgtgcctggaatccaaggacactcttaccttgaaactatagatatgaacaggtttcatgaccacagtcctgggttaaccactaccccagggaagtccaattaacaaatttattcatttgggccctattacacttctcctgtcaactctaattacttatttttgaaataaaaactttgaccttcacaatggtccccagtgccgttcagtgaatgataatctgtttgaatctcttcagctttattagaatttcacaggtctgccatctggtagtaggaaccaaagctcgatcaatatttatacatacaaaatgacacttcctgagaagggatggtttccatgcatggtcc

SEQ ID NO: 705939 - DNA, 656 bp, Homo sapiens
tatgctttatatatttcttactaagaagaaggaaatgcttgctatataaccaaaagagattcctattttaagccttttctatgtcacaatgtatgtgtstgtgtgtgtgtgtgtgtgtgtgtgtgtgtatctgtaaatataatcttagaggtggcagcctttattttaacacatgatatttgtgtaccatgggtttctgtcaaggaggtattctgtcagcaagtaattaacaaggccttacattgagtaggtgtgaccaaattctcatgggttactataatgctacaatctcatctgggattccattttgtgcctggaatccaaggacactcttaccttgaaactatagatatgaacaggtttcatgaccacagtcctgggttaaccactaccccagggaagtccaattaacaaatttattcatttgggccctattacacttctcctgtcaactctaattacttatttttgaaataaaaactttgaccttcacaatggtccccagtgccgttcagtgaatgataatctgtttgaatctcttcagctttattagaatttcacaggtctgccatctggtagtaggaaccaaagctcgatcaatatttatacatacaaaatgacacttcctgagaagggatggtttccatgcatggtcc

SEQ ID NO: 705940 - DNA, 656 bp, Homo sapiens
tatgctttatatatttcttactaagaagaaggaaatgcttgctatataaccaaaagagattcctattttaagccttttctatgtcacaatgtatgtgtgwgtgtgtgtgtgtgtgtgtgtgtgtgtgtatctgtaaatataatcttagaggtggcagcctttattttaacacatgatatttgtgtaccatgggtttctgtcaaggaggtattctgtcagcaagtaattaacaaggccttacattgagtaggtgtgaccaaattctcatgggttactataatgctacaatctcatctgggattccattttgtgcctggaatccaaggacactcttaccttgaaactatagatatgaacaggtttcatgaccacagtcctgggttaaccactaccccagggaagtccaattaacaaatttattcatttgggccctattacacttctcctgtcaactctaattacttatttttgaaataaaaactttgaccttcacaatggtccccagtgccgttcagtgaatgataatctgtttgaatctcttcagctttattagaatttcacaggtctgccatctggtagtaggaaccaaagctcgatcaatatttatacatacaaaatgacacttcctgagaagggatggtttccatgcatggtcc

SEQ ID NO: 705941 - DNA, 656 bp, Homo sapiens
tatgctttatatatttcttactaagaagaaggaaatgcttgctatataaccaaaagagattcctattttaagccttttctatgtcacaatgtatgtgtgtrtgtgtgtgtgtgtgtgtgtgtgtgtgtatctgtaaatataatcttagaggtggcagcctttattttaacacatgatatttgtgtaccatgggtttctgtcaaggaggtattctgtcagcaagtaattaacaaggccttacattgagtaggtgtgaccaaattctcatgggttactataatgctacaatctcatctgggattccattttgtgcctggaatccaaggacactcttaccttgaaactatagatatgaacaggtttcatgaccacagtcctgggttaaccactaccccagggaagtccaattaacaaatttattcatttgggccctattacacttctcctgtcaactctaattacttatttttgaaataaaaactttgaccttcacaatggtccccagtgccgttcagtgaatgataatctgtttgaatctcttcagctttattagaatttcacaggtctgccatctggtagtaggaaccaaagctcgatcaatatttatacatacaaaatgacacttcctgagaagggatggtttccatgcatggtcc

SEQ ID NO: 705942 - DNA, 656 bp, Homo sapiens
tatgctttatatatttcttactaagaagaaggaaatgcttgctatataaccaaaagagattcctattttaagccttttctatgtcacaatgtatgtgtgtgtgtgtgtgtgtgtgtgtgtgtgtgtgtatctgtaaatataatcttagaggtggcagcctttattttaacacatgatatttgtgtaccatgggtttctgtcaaggaggtattctgtcagcaagtaattaacaaggccttacattgagtaggtrtgaccaaattctcatgggttactataatgctacaatctcatctgggattccattttgtgcctggaatccaaggacactcttaccttgaaactatagatatgaacaggtttcatgaccacagtcctgggttaaccactaccccagggaagtccaattaacaaatttattcatttgggccctattacacttctcctgtcaactctaattacttatttttgaaataaaaactttgaccttcacaatggtccccagtgccgttcagtgaatgataatctgtttgaatctcttcagctttattagaatttcacaggtctgccatctggtagtaggaaccaaagctcgatcaatatttatacatacaaaatgacacttcctgagaagggatggtttccatgcatggtcc

SEQ ID NO: 705943 - DNA, 613 bp, Homo sapiens
ccatgaagcggggccacaaattgggaggttgcgttggtggcgagaacagagaacaggacctggccgttagtcagtagcaggccgcgcggtcggcacagtcagtactggtgatcgtgctggtcaggcgcaggctgcacatagggcggccgcttgcaggagtccgggcggcagactatgagcttccccggcgcacgcacagggactgccgctgcggcgctgaatatgcaagtcctggggagcagcagctgaatgtgtagaactctgtcccaatgatctggactctgcacaccagtaggatccaggactctgttactcacagaaagcacccccatartccctggctctttccaagtttaagggaagtcaacttttcctcctcaatttacccactccagttttctcccactcttaagcataccctatccacttcacccctaaactttggctctgagcctctttttgtgtttttataaacaactgtgtttagttctacttcagaaaagagaaggtccatttttcttggattcagaggcttaggtactctcttgaatgtgtgtgttggagatgggggatgggcaaggctcctttgacactttaacaaaacacaatttaa

SEQ ID NO: 705944 - DNA, 621 bp, Homo sapiens
gcattttaatagttcagccatttgatcatggaatggatattaaaagacactctggaataagctcaagaaaaaaagagacagtgatgcaaaaacatatgtgaaactgggcattgcatctaatctctataaatctcagtgatcatggatgggcaaatataatgggagtggtcaggtaatttctaagaccttcaattccaaaccccaatttagttcaatgatttaccaaatatctattaagtaaaaaacactgtattcattgtttaatgctaccaaagatgaacaatatatccttcctgcttccaaaagtttacaacataattgggagcaaaagagaaataaatatacctaagacaatagcacaaggctgartgtgagaggtgtatgaaagcattaaactcttaagacaaggaaaattgtgggacagtttcgagacacattacagagtttagttcagtagagagtacgtgaagggaacagtaggaaataaaaacaaaaacgtttgcaggaactcttttgaagaacatttaatgccagactaaaaaattcccatgtatatgtgcaaccttcataaatgatgaaggtgacattgcagatcattagagaaagaagaagctcctcact

SEQ ID NO: 705945 - DNA, 1246 bp, Homo sapiens
gacctcaccagtcccttctcacacagacacagacacacataagcacacaagtatagacacacacagacacacggggacaggcatcggcatttttttttttttttttgagacggagtttcgctctgtcactcaggatggagtgtagtggcgtgcatatcggctcactgcagcctccacctcccgggttcaagagatttgcctgcctcccctcccgagtagttgggattacaggtgtgcgccacacgcmgggctaatttttgtattttaactagagaaggagtttcaccatgttggccaggctggtctcaaactcctaacctcaagtgatctgcctcccttggcctcccagagttctgagattacaggtctgagcccccgcacccagccagaacatgcacatttttatcaagagaaaatatctggttctcaagagatcacacacttgtaggagcaatctactaagaaatttcctactttcacaaaaacaaatattcaaaacattcttatttttttttatctagctcagaaaatacaatttgtgcaaattctgcattttctaaaataaagaaaaaaatttttttgagatggagtttcactctgttgcccaggctggagtgcagtggcatgatcttcgttcactgcaacctctgcctcctgggatcaagcaattcttgtgcctcagactctcaggtagctgggactacaggcatgtaccaccatgcccagctaatttttgtatttttagtagagatgagattttaccatgttggccaggctggtcttgaactcctgacctcaggtgatctgcccgcctcggcctcccaaagtgctgggattacaggtgtgagccactgctcccggcctaaaataaagaatttaaaatgcaagtccaagcaaccaagatttgttagcatacatgactggaagtcatgcaccacttaattaagtgcctcatgaagtgggaagtgcagattatgggtatgaaacagcacgagtgctagaattgtttaaaacaaaagtcagtggttataacaaggagtatttctgtctgtttataaagatgtgttggttacgagttttgttttttgtttttcgtttttttcgagatggagtttagctcttgttgctcaggctggaggcaatggcacgatctcggctcactacaatctccggctcctgagttcaagtgattctcctgcctcagtcttcggagtagctggaattactggcacacaacaccacagcc

SEQ ID NO: 705946 - DNA, 1386 bp, Homo sapiens
cctctggacacaccccccccaagacctgtcggcatcccacagtcagcacttctctccaagtccatgctctcattgattcacttcctggattgcttctttgatggaggtatcacaatttctaagaaaatctaatccagaaacctgagattgaggtttaccaaggatgtaggattcacccatgcagggtctccagacttttaccccttaaggctgtctcccatgaccattgaactaagtagagtctcataatttcccccctggacaaatattatcaatctctgcctaggctctttttctcaaatatcttgtccctatgatccatctggcattttatgataagcccaatattctttttttttttttttttttgagacggggttttgctcttgttgcccaggctgggttcaagcgattctcctgcctcagcctcccgagtagctgggattacaggcatgcaccaccacgcccagctaattttgtattttttagtaaagatggggtttctccatattagtcaggctggtctcgaactcctgaattcaggtgatccacccacctcggcctcccaaagtgctgggattacaggcgtgcagccacacctggcctgataagcccaatattctgataacaaagcttaggttttgttataggcatctttaaagtatatcttcaatggatctcaattttcttttaatgaaataaagctcaatatctcaattcataaattagaatattcaagtttttgtaataatcacaacctcacattgtttaagaatacatgttgttttctttctttctttatacttccatctattctctcccaatgaactaaccatggtttctgacagagttagaatctaggaaaagaggaaagagaaggaaatcagaaagctctgaattaacttgcccttttttgtgattggttcaggctctctgggtctgtcagatgytttgtgtcctggacagttccatgagtgcttctgaaagcccacactacctaggtaattttctagaataaaaagattgaaaaatctatagaaatccactgatttcccataccaaaacaattttgatcatattttggaacatcatcttaaataaaagccccccactttttttttggaagaaacagctagacacttacaagaatggagaataataatggaaccaacacaagaacaggaaggcagagcagtaacactcagaattcagagtatttcaacctgtaattctacacagatgtgaatctacatccaggctacaattattcaagcatgaagacaaaataaagatattttcaggcatgcaaatctgcaaacattttatcaccaatgaacttcttttcagaaagttattgtaggatatgctccaccaaaaagaagtaga

SEQ ID NO: 705947 - DNA, 1021 bp, Homo sapiens
gtttatataggtctgggttaaaatgctgccttctctgtgaacccttttctgacttcatgcagttaatttcccctttgctgtgtgcccacacagaatgtgtacagtttttcactttcacacatatcaccttgaattgtaatctatctgatttttcctctagaaattcatcttcttgaaacagagatgactaggtcttaattacctctatatcttactgcctacactgcctctgacatatgagagatattcaacaagttttagttgaaaatgtacgaataagtatccccagttaattgattcattggttaagactatcagctactgctcaatctgtgcataatatgaagagaaaaactttaatactgttacttccatgcaacactaacataaacaattgattattttactttcatttaacttcctctacaactgttccagccttctgtgatccagtcatgccagctctgcatatcatctgtttacatgtatctgatcaaaatattatttttcagaaatcatttcctgggcatgatttctaatataagcactgtgtggtctgtgtcttctgaaataaatggttgaggacattggcaagcttttgctgtcaatcttacagctgaaaaaagattggtaagctcaccaaaatttgcactatagctgaggtagactgattccatacaataggtggaagaaaagtagcatcaggtccaattggttgagtgtcaaatttaagtccaggacttacttgttaggtttctgctttgatgctgtctaacactgtcagtagagtcttgaagcctgttactattattttgtggctgtctagttctccagaacaatcaggcaagataaataaataaaagatatccaaatatgaaaagtcaaactatctcttttcgccggtgatatgattctatactatatctagaaaaycctaaaaactctgcagaaatgcttctagaactaataaacatattcagcaaagtttcaggatacaaaaccaatgtacaaaatgagttga

SEQ ID NO: 705948 - DNA, 2315 bp, Homo sapiens
tacgcatatatacatctatatacatagatgtatatatgcgtatatatcatatacatacgcatctatatatagacctatatatacatataggtgtatatacgcatatatacatctatatacatatatgtatacacacatatatacacatatacacacgtatacatctatatacatatacacacacatatatacatacatatatgtatatacacacatatacatacatatatgtatatatacacatatacatacatatatgtatatatacatgtatacgtgtatatatacatacatatatttatatatacatgtatatatgtatatatacccacatatacctttttttaatttatcatatatttttccaagtcaaagaccatgatgtatttccagtgctggtcacagagtaagtactcagtgagtcctgaatggatgaataatacggtccaactaatattaaatataccaaacttctctcaaatatgtaatgaagtcttagagagtacttgccctttaacttatattataggtttcctactattctgatataataaggctgtctcctgattttctgtaggtctttgtgagcatattctctttaccagtaattaaataaaagcataaaacccctctatcctcgtagaacaacacttaccattcctcaatttgtaatgtagtggaaaaaaattataaaagatttttaggaaataacttcttgagttcaactcgatgtttttcctaataatgcaactatttctatagatagctacatcgtggtatttaagagaaacacattacatataagattttaaaaacatctaagtcaatggcagagcataaaaaattaaaatttgtttttaaaacctacatatatcttgggaaaaatacatttgcaatttttgtgaaatattggaaaaaatataaaattttgcaaaataaatttgtgaaagtgtacaacacataaagatataacatctcattgagtttacaaacaacaaaaaatgtcgatttatcattggcaattgagcaaatcgtttagttatgctatgaatgcatggtttcaatcctcatcctgctaaaaaatgaatgtataaattcaggaatttattacatgtgactaactttcttacttcagagtacttttttctttttgctgacacagtcctatttttagccacaaaatkgaaattttgtaaaactggaatttgattagttctgtttgacagttaattaggtgggcaaatacagtatataagattaaccatttgcaaaagaacaaagttatgaaaattagatacatctttctgaacagtagaaacctaagtgaattgaaaggagccatagacatttatgattcattttaaggtagtggtttccaaactttgtgttctatgaactacttatagacttttctttaggatcagttgaaagataaatttaagagtcttacaaattgagatacaaataatcacctttattattgataacactgatagtactggaaaatgtgactttgatgttttgcctaagttgacttgacaacactttatccataagatagacttactcattcaactagatggagtacaaatcacaagtttcccctttaagaaatggtacctttgaagtcacagcaaaaggaaattgtgtgcaattccaaacagaaatgaagtggcatgcccagttccttctttcaaacccaaaaagatgtctctccttcctaactggagtagagaaagtgaagaggttgagagatcgcagagatgttgctctagggaagttctatccacacagaagccagataactaaaggccacactaacctttatttttttgtgtttctaaacatactgagaagaccacaacaatctactattcatatcacttcatgattattggaggaggagtcctagcatctgtttcctgagttgccttctaagaccttccaaggttctgcagatccaccttttgctacacttggccatgtaccctatgctagcatctgccattcacatctgagtctccctccttcccccacctacctcaagtcacctggctatctccaggggtgcagattgtagtctaatccagaaggtttcaaacaatctgtgatgaagcatgtgggcttttttaaattctattttgtacctgattaattttgtgaaatgcaatggaaatgaatgaccagaaaaatgacaatactcaaatgtcacatcaatttcaaaatactagtttctaaacatttattttcaatttctgtcattcactgcttgtgtttcagtactgattatgtgaccttattttaacaagcactgg

SEQ ID NO: 705949 - DNA, 825 bp, Homo sapiens
tctctcctgttcattatcacctgttgagcttttgcttttcaacagctattactgatcccaatcattgtcttcctctataggctttatttaagggaaaaatatatttgagttacaataattttcatagaatagacaactcacattatattgttgcaacagatatggctaggagatgaaaaatgtccaaacagtagagggtttcaaatgcagtttggacactttgcctgctaggggagggaaagtgttgggatgtgatggaagaattttgagcaggggatggtgatgtgattaggtttatgcatcagaaaagctaatctgaaattatatgcaggccatatcacacatgataaaaactggaggcaggaacactagcgaggaagctagtccagacaaatgagaggcaatgagtgcagaaattaggacaatggaagggagactgacatttctgagggctgactggaacatatgctctgtatatctgtcaataaactcttaaatttgagatactctccatccccaaacaacaaagttcaaaaaattaaaagctccttcatctccatccccaaggyactcattattcccatcgctggcatcatctccttcacttttctcaactcatcagtcactcactcctgttgattttatttcccaaacacttcttaaatcctttaaccattctgtttatattgcctatggagaagaagaaggaaacattatttagtgagcatagttaaccagataacatgatccagtcctacccacagtgattaaattaattttaaatgatctttggtgagccacttaatcttgctgcattttccccct

SEQ ID NO: 705950 - DNA, 825 bp, Homo sapiens
tctctcctgttcattatcacctgttgagcttttgcttttcaacagctattactgatcccaatcattgtcttcctctataggctttatttaagggaaaaatatatttgagttacaataattttcatagaatagacaactcacattatattgttgcaacagatatggctaggagatgaaaaatgtccaaacagtagagggtttcaaatgcagtttggacactttgcctgctaggggagggaaagtgttgggatgtgatggaagaattttgagcaggggatggtgatgtgattaggtttatgcatcagaaaagctaatctgaaattatatgcaggccatatcacacatgataaaaactggaggcaggaacactagcgaggaagctagtccagacaaatgagaggcaatgagtgcagaaattaggacaatggaagggagactgacatttctgagggctgactggaacatatgctctgtatatctgtcaataaactcttaaatttgagatactctccatccccaaacaacaaagttcaaaaaattaaaagctccttcatctccatccccaaggcactcattattcccatcgctggcatcatctccttcacttttctcaactcatcagtcactcactcctgttgattttatttcccaaacacttcttaaatcctttaaccattctgtttatattgcctatggagaagaagaaggaaacattatttaktgagcatagttaaccagataacatgatccagtcctacccacagtgattaaattaattttaaatgatctttggtgagccacttaatcttgctgcattttccccct

SEQ ID NO: 705951 - DNA, 825 bp, Homo sapiens
tctctcctgttcattatcacctgttgagcttttgcttttcaacagctattactgatcccaatcattgtcttcctctataggctttatttaagggaaaaatatatttgagttacaataattttcatagaatagacaactcacattatattgttgcaacagatatggctaggagatgaaaaatgtccaaacagtagagggtttcaaatgcagtttggacactttgcctgctaggggagggaaagtgttgggatgtgatggaagaattttgagcaggggatggtgatgtgattaggtttatgcatcagaaaagctaatctgaaattatatgcaggccatatcacacatgataaaaactggaggcaggaacactagcgaggaagctagtccagacaaatgagaggcaatgagtgcagaaattaggacaatggaagggagactgacatttctgagggctgactggaacatatgctctgtatatctgtcaataaactcttaaatttgagatactctccatccccaaacaacaaagttcaaaaaattaaaagctccttcatctccatccccaaggcactcattattcccatcgctggcatcatctccttcacttttctcaactcatcagtcactcactcctgttgattttatttcccaaacacttcttaaatcctttaaccattctgtttatattgcctatggagaagaagaaggaaacattatttagtgagcatagttaaccagataacwtgatccagtcctacccacagtgattaaattaattttaaatgatctttggtgagccacttaatcttgctgcattttccccct

SEQ ID NO: 705952 - DNA, 525 bp, Homo sapiens
taagaggttatagaaaagttgtggatagacatgaggaagaggtagaataaaaccaaaagagatttataactaattttgatttttatttttaaagcatagattgttttcattgctgcattaaaaatataaataatggcaatgtatagaatggcaatataaattatttttaagctggcattggtaacaaaattatataaatgtttgcacttcttttgtgcttgcaaatttaatamtattgtttctaaatatattaaaaagagtttcaaatatgttaaataatttcaagggacaaccacattttgaataatgtatgtaacttaggtaggtgacacaaagcatagccatcagtaacatgcttttcttttttctttttttattattttttattattatactttaagttctggggtacatgtacagaatgtggaggtttgttacgtaggtatacatgtgctgtggcagtttgctgcacccatcaaccggtcgtctgcattaggtatttctcctaatgctatccctccccta

SEQ ID NO: 705953 - DNA, 1082 bp, Homo sapiens
gccctggggatacagagattaataagataagatcccagttcttgaacagctcagtctagtgggaaaagcaggcatatacacaaatattacagtgcataagatctgctataatagaggataagcagaatgttgctgatggattttgtaatgatcttatgcggacaggatgcttttcttctataaggatttactgtcaatcagtttgagtgtgtctgcattttaataaaggcgatctgatcactctaccctaagtcagcaaggcacccccttgaaaccaacaattgtcgttattcacatcagctctgcagttctactgggacatcataagccccttctttttatagcagwccttctccagcttctattttaacttaaatatcacacaaacaattctttctgaggaaaagcaggggaaagatgactaattgaaaatagcatttcttagactagaattatgattccaggctgggtacctcccaagcagctcaaagtgacgaagggaaaggttgctgaagtaaaaggaaagacagaactatggaaaaagaaagactataaagaaaatgagggattattttacggctagagataagtaatgtgtcgtataagttgtcagtttacacaacaccctgcattttctccttcctctttttaaaccagtgcacaatgttgtgctcactgatagctaaaaagcagaagctgcctgaagtcaatagtttttttctaccatttcctaaattctgacctcactggtgagctcatgctagtgacttgaactggtggtagttgataggtctgtatccctgtaaaaaaggagcttctggcaaactgaggagtgactttgagaaggagggaagggagctcatcctagaccgtagggtaatagaggtctgtgtgtcttagagtagcaaaaaaccatgatatgtcttttgaactgggacaattttatgagttaaacctgatacaaaaacataattaaaattaattcatggtttgaaacatttattaatggagtaaccaactggctttgtaatattgtttggcccctcaaatagtgtcattcagtaatttttttcatatctaaa

SEQ ID NO: 705954 - DNA, 582 bp, Homo sapiens
aaccctgcatctactaaaaatataaaaattagccgggtatggtggtgtatgtctataatcccagctactcaggaggctgaggcatgagaactccatgaactcaggaggcggaggttgcagtgagctgagattgtgcccttgcactccagcctgggtgacagagtgacagtcttgtctcaaaaaaaaaaaargaagaagaaaaataaacccagagttatctgtgatgtattggaggaatacaaaggtaattcaatattgtgaaatttgttaatataattaatggtagtaatagttcaagagagtttgtctacccttctcatttgttattataaaatatataatttagagttaaaatccagtttagtgctattatgtgatttttaaaataaaggtacgtctttattgaggtgtaatttacttgtggtgaaatgcacagatcttacatatagaattcagtcagttttaacattcattcgtgtaacccacaccttatctcttttaaaagtttgtttgtgcttttctttgcagtcagtcctggcccccagcatccagaagcaacaactgctctgatttcacttacaa

SEQ ID NO: 705955 - DNA, 822 bp, Homo sapiens
ctgtcattttttcagcattccacaatggtttcagtcttattctgcagaaatagatacgattggtctggctttatagagaggagctgactctsaaaatagctccttccaaagttcctcctagaaaacaccctccgcatgtacaagttcctccttgttttctccataccagaatgttttacattaaagtcattattatttccttgctctcatagatgcttatataatgatagatgtaagatcctaaataaagtaaaatcagaaatattatagtccattatccctagaagatgatttcaagcagactacataaaattcaagttatgtactttgactaaatctgcatactggcatccagttctgcagataaggcttgattttaaaaacactcaagatgaccttaatcttgaccactgttctgttttggggatcactattcaaaaagactgttggccttgtctgtccgaattttaagttagtacctttgggttgattctataacaaaattgaggacttcttgctatcggagcaaagggacacaagggttttttgcttgctgtttcttggagtcaggcagaaggcccttctccctccttttatctggttgaattactaaatggctcttttttctgccctgatctattactttagcctgtgagttatctgatagttaaataattaaagctaactttaccatttccgagagagagggagggggagaagagagagagagagagagagagagagaaagcctccttgtggagctgggttgttttgaaaaaataaaacagactttcaaggtttggggttctcttcatgtgagag

SEQ ID NO: 705956 - DNA, 648 bp, Homo sapiens
ttcaagttttgggttcaaaatatatctagttaacgaaaattctaaattggctgcattgatccagcagaactaaaaagaatggtccctgattctgatcttaataattaaagattatctttcaataactgagacagagaacataaagcagcrgcagagcaattgaagctaagttaatgttttggtaaaaaataaagtttgaggccaggcgcggtagctcacgcctgtaatcccagcactttgagaggccgaggcgggtggatcacctgaggttaggagtttgagactagactgaccaatatggtgaaaccccatctctactaaaaatataaaaattagccgggcatggtggcacatacctgtggactcagctactccgcaggctgagacaggagaattgcttgaaaccaggaggcaaaggttgcagtgagccgagatcgcgccactgcactccagcctgggtgacacggcaagactctgtctctaaataaataagtttgagacttggttctctaaccaaatagccctaagtacagttggcccttgaacaacaggggtttgaactgtgcaagtccacccctaggtggattcttttcaaccaaacgtggatggaaaatgcagtattcactggatgcaaaacccatgtaccct

SEQ ID NO: 705957 - DNA, 1032 bp, Homo sapiens
taaaaatagtactaccaacttctagaactataatttcactgtaccatcaattgctaaaactagctgggattacaggtacccgccaacatgcccggctaatttttgtatttttagtagagacagggtttcaccatattggtcaggctcatctcaaactcctgacttcaaatgatccacccgcctcagcctcccaaagtgctgggattacaggtatgagccaccgcacccagccaagaagcattagttctaactggagataaaccaatgacatctcctgcatcagcctccatagtaactgagattacaggcgtgcaccaccatgcccgactaattttttatttttagtagagacagggtttcacaatattggccgggctagttccgaactcctgacctcaatcctgacytcaagtgacccagccgcctaggcctcccaaagtgatcccactgcaccaggctagtagtttattttagatatttgcactcatatctcaggtggagataatgtcaggagtctaaactggaggcctacaggctttcctgatctaactggggtttcagaaggctctgtgtccatggcacatgacaggaaatgtatggttaaaggacataaactggaaaaacctgcagcttgggagacatgttttatttgacccacacaattctttttttttttattattatactttaagttttagggtacatgtgcacaacgtgcaggtttgttacatatgtatacataagccatgttggtgtgctgcacccattaactcatcatttaacattaggtatatctcctaatgctatccctccccactccccacaccccacgacaggccccggtgtgtgatattccccttcctgtgtccatgtgttctcattgttcaattcccacctatgagtgagaacatgcagtgtttggttttttgtccttgtgatagtttgctgagaatgatggtttccagcttcatccatgtccctacgaaggacatgaactcatcattttttatggctgcatagtattccatggtg

SEQ ID NO: 705958 - DNA, 609 bp, Homo sapiens
tattcctgtacctctgcataacaagtgatttagtctcatcttatagcaggggctgtggacgtgtgttttccttataatgggatagtaggcattatgggcactaagattagcctgcccaggatctgaattcaaatcctgtttttgcaatttatgacttgttaatcttgggtatattacctaaattctgtaagctaattcctaaaatgaagataataatatataacacattgggctgctgtggggattaaaggatacatatgtaaggcacacagtttaaataggtacaggacctagtctcaataaacagtggcttttattataatggtggtgatttgtattgctctttctgaaactgcttttagaaggtctcagattctctgggtcagactaattaagaacctatcaagctgtgtrgcatctcgataaactgtgggcaaaaaacgcagatacatgattgctatcaccttttcattctctcaacaccatcttgtctttgcaaaacatccataaaacttgtgtttgctgaggaatcccagtgggtaaaaacagtgaagagaaaggttaaaatggatggttagcaacaggtatgaaataacaaaatagagagag

SEQ ID NO: 705959 - DNA, 785 bp, Homo sapiens
tataaaagaccatgttttccattgtgttaatgtttctcggcagaagagcgatggaggtttctgtaaactgagtttctacatctggcagcagaaagtggcccacagttatattttttgtagggaaagatatgttttyagatgaccactctgcacagattctgggaggatttcacagtatttgtaacctgttattttagattctaagcacatttgtagttccagtggcacaaaaataaactgtgttttcttggaaaatgtgtgtgtctgggatatgtgacaggacttgcaaccttaaacaagatttccaggcacttatagttgaaccatgccagtaaaaatatgcttatttagacattaaaatcctagggtgcccacgtaagtatcctaagcaatgtgtgttacatgagcattctttgctaatgtgctttagctttgaacgttcttagctctggctcctgcagtgttaatgtactgcagggaaagttgaactcagatggtggggcttagtttctgttcaacacatttgatgatgtgtttcttacattcaagagagtagtttctcgtgtaggtataagtcacatcacaactggtaaagtagacttcctcactcttaatactcatagcaatgtggaagtttttcttgggcattcagaagagagaaaaggcagcaggtatacccttcatctgtgtattcggcaagcatcacttgatcatccattgtctgcaaagctgtatgtagaaacggggaagacaaagaggaagttggggaccctttcttctggagc

SEQ ID NO: 705960 - DNA, 597 bp, Homo sapiens
atcaattaaagatatataagatcactagactgaaaactataaaagcttactggaggaatacctaagattcgtggactgtaacactkaatattataaaaatattaattctccccacagatttacatcctagcagcataaagaaaatatttttgatgagcatgtggcagaaattttaaaatcagaaaaggttaactataattatattagaaaacctaacatagagttattaagattaaaaacaacaaagaattatgacagaaaggagtggcagggcattacttaccctacccagaaaaatttccattcataataacgtaaaccctgactatttaacctatttacctaaaattgtgatacatctaggttgggagcatgacggcagagagagagaactatgtagtcacctatccttggggaaagtaaagaaataatggctaaaattaacaaagacagcctaacaagtatattaattagaaatatgaagataattataaagagatatgataagaattaagaataaatgtttctggcagagactagaagacttaactggagtagtaaactactgttttgagaagtagtttttaaaaacactat

SEQ ID NO: 705961 - DNA, 788 bp, Homo sapiens
tgacatctccccaagaagtgcatatactgtcataatttcaggcattttggtgggtcagtagaaaaaatacatatttgttgccagggtgtttattcccaatatttcacaaatcctttcacattggtgattaccactttctctctgcaaaacattcctaaccaaacctctgtctcagagggattacacacctgaacactggaggatcaattttccattagctcagctggacatctctctttcagtgatccctgccatcataaacatatgtattcctctcttttaaggcagaaaacatgtttttatttctgaaaagcaccagggtcagttttagcatcttccttacaaataggggaaaagagagagaaagaaaaatggaaaacaaaaatgagctaatatcctctsttttctaatatgtcgcattttattttagttcacttgtgcaagtatctagattatgcttaaacagcaaagctttcttcttttgcagccccttgcagacatttgcattaggtagagaaaagaaaggttaagaaaaagttcctctgaacaaatgagcctttagatgggaactttcattaggcatacagttcgttgaatctaatcagagagattccaaggagggtcacacttgacctcagccctcttccgctggggtagatagtaggtgttcagcttggccctcgatttctgaatgtcaattagagaggaaatgtccataggacatgctcacatggattatgcataatgaaattgggactttaaatctgtttttttttctttcttatccc

SEQ ID NO: 705962 - DNA, 596 bp, Homo sapiens
ccctgcctctattatctctagcatttcagaaatgtacacaaagttgccttttccccaagctaagcaccccactctttttctccatcattaaaccataaaataaaataaaataataggacatttataaatatccttagtttcctatctgttgggattaatagtgtgtatccctacctaacataaggtgaaccatttcataatctaagatcttttaaataatttttatgactagattttcttgatcaatcatatttatgaacctattgtgcaatcatttgcttattgaatgacattacaagagtttataaagagtgaaaaaatgcatatcaattgacttcgacagtggaatagaaggtacatcacgagttacagtatgtcaagaatgtatgcatcttcaaataatctaagaagttataaatgtatggttgtgtgtttacwaataagctgctagagctttttttaaaaaaaaaaaactttgaatcagactctaaattatcaacaaagtgcagttattaaaaagttttatttctttagatctatttctatgaaaattaagcacaggagaaactagaatattttttcttgtttaaattttg

SEQ ID NO: 705963 - DNA, 596 bp, Homo sapiens
ccctgcctctattatctctagcatttcagaaatgtacacaaagttgccttttccccaagctaagcaccccactctttttctccatcattaaaccataaaataaaataaaataataggacatttataaatatccttagtttcctatctgttgggattaatagtgtgtatccctacctaacataaggtgaaccatttcataatctaagatcttttaaataatttttatgactagattttcttgatcaatcatatttatgaacctattgtgcaatcatttgcttattgaatgacattacaagagtttataaagagtgaaaaaatgcatatcaattgacttcgacagtggaatagaaggtacatcacgagttacagtatgtcaagaatgtatgcatcttcaaataatctaagaagttataaatgtatggttgtgtgtttactaataagctgctagagctttttttwaaaaaaaaaaactttgaatcagactctaaattatcaacaaagtgcagttattaaaaagttttatttctttagatctatttctatgaaaattaagcacaggagaaactagaatattttttcttgtttaaattttg

SEQ ID NO: 705964 - DNA, 591 bp, Homo sapiens
gtgacaagtctcagaaataactataatatcaatcaacattgtaatgaattatatagtaggaaataaagatgataattttactactggtgtatttttaatagaaattatagtcatggagagaacttgtttttttccataacaatgtctaatcttcattccctacttgagttttgaggggcaggtgcgagtcattcaggtttgrgaaataaaaatcaatcagatgtagcatatttctagagccaacaggtgcagcagtgacagactcaaaatccctagataaaaggtaaataaatatgttcctttggtcaacagcccctgccataatgcagtcttatgtccccattcaatggaatcatcactgatatttgaaggaagctttctgatattagacgttaagatttaaactaaaaacttgaaaagctgccttaatttataattatttcttctttttttcatcagatattacatttctaaagtgttatcaatataaatcattctccacaatctcaggtatataagaaacgtaactttatttttccattttcaagtctatttctaatagaatgatgtaaaatagacatagtagtttgg

SEQ ID NO: 705965 - DNA, 1026 bp, Homo sapiens
cttaagactgtagttcttaggatgtcttcagtcatttaatatcacagctgtttatacctgacttgtactgcctggccctgaaaagatgagcaaatccaaatgcacaaaagttatattatcacagttgaaaaatgttatgattaggttctgtatgctaagaaaaccccccttatgttctcatactatctttatatttcaaatatacatgggttaaacatttcaaytggctagagaaacaggttagaatacagttaaaattcttagttttacataatgtaagtaaatgaaaatctaatctaaaagtgagtaatgactacattagtagtcttgaccatctaccaaaattgagtattcttcctccgaagataagagaattaggaaaatgaatcacaattactaatctgttggtacatgaaaataaatgtagtctgtactatttcttttagtgcctgtatggagtggaatgaatgttgctggtgtctctctgaagactctgcacccagatttagggactgataaagataaggaacagtggaaagaggttcacaagcaggtggttgagaggtaataaatctttcaatttggcaacacagaatattaacatttactatttttatttaaaaggttaaaattgtaatagtatttgcatttgagaactttttgttagaaaacttgtgtggtttttttgttttgttttgtttgagacagaatcttgccctttcgcacaggctgcagtgcagtggcgcaatcttggctcactgcaacctctgcctcccgggttcaggcgattctcctgcctcagcctcctgggtacctgggactacaggcatatgccatgacgcccggctaattttttgtatttttagtagagatgggtttcaccatgttagccaaaaaaaaaagaatgtgcctcaccttgcaagcccaggccctaggatcacttgagctcaggagttcaaggccagcctgggcaacagggcaaaaccctgtctctacaataaatacacaaattagccaggcatggtg

SEQ ID NO: 705966 - DNA, 582 bp, Homo sapiens
tgtcatgttgcccaggccgttctcaaactcctggattcaagcacttcacccaccttgggctcccaaagtgctgggattacaggcttcagccactgcatctggcctcacactagtattttttaaagtcattatagtatatacactgattaccactgtgcaaagtacatattacactaacaaaacagaaagagattctggaattatactggtggtttacgatttaatattcattaaatkctttttctcctcaaagttactaaacccacccccaaaaactccttcactgaacagtgaaaataaagctgtcctatgcagccataaaaaacaaaatcatgtcctttgcagcaacatggatgcagctggagatcattattccaagctaattaatgcaggaacagaaaaccaaatacatgttctcactataagtgggagctaaacatgtgggtgcacatggacataaagatgggaacaaatgacactggagactactagagagggagggagtgagagcagcaagggctgaaaaactattaggtactttgctcagtacctgggtggcaggatcaatcctaccccaaacct

SEQ ID NO: 705967 - DNA, 626 bp, Homo sapiens
ggcttgtctctttgctcttttatattatatttttgtgaacactcttaactttgtattctttattgattatgctttttgtgtctttgtgtttaaatcagtccctaccttcaggtcataaggatattctacgttatcttctaaaggaaattttgaagttttgcttttcacattttagtcttcaaccaacctggctttgatttttgtgtgtggtatcaggtagggtgtgtgtgtggtatcaatttattttttccataatgataactactgccataagaacaattctaaaggtccataaatttcctatttatctagaaaatyatcagtgttatataacaatcttttatattgtctcctaattaagtctctgcacataattagtgctttataataagtcttgaattagcttggaatgtccaataataacaaaacctgcggggttttgactaggattgcatataatcaatatgggaagaatggatagcttacaatattgagacttctatgaacaaggaatatcacttcatttatttattttactcttgagtagctgggactacaggtgtgtgccatcacgcctggctaattttttgtatttttagcagagacagggtttcaccatgttggcc

SEQ ID NO: 705968 - DNA, 626 bp, Homo sapiens
ggcttgtctctttgctcttttatattatatttttgtgaacactcttaactttgtattctttattgattatgctttttgtgtctttgtgtttaaatcagtccctaccttcaggtcataaggatattctacgttatcttctaaaggaaattttgaagttttgcttttcacattttagtcttcaaccaacctggctttgatttttgtgtgtggtatcaggtagggtgtgtgtgtggtatcaatttattttttccataatgataactactgccataagaacaattctaaaggtccataaatttcctatttatctagaaaatcatcagtgttatataacaatcttttatattgtctcctaattaagtmtctgcacataattagtgctttataataagtcttgaattagcttggaatgtccaataataacaaaacctgcggggttttgactaggattgcatataatcaatatgggaagaatggatagcttacaatattgagacttctatgaacaaggaatatcacttcatttatttattttactcttgagtagctgggactacaggtgtgtgccatcacgcctggctaattttttgtatttttagcagagacagggtttcaccatgttggcc

SEQ ID NO: 705969 - DNA, 626 bp, Homo sapiens
ggcttgtctctttgctcttttatattatatttttgtgaacactcttaactttgtattctttattgattatgctttttgtgtctttgtgtttaaatcagtccctaccttcaggtcataaggatattctacgttatcttctaaaggaaattttgaagttttgcttttcacattttagtcttcaaccaacctggctttgatttttgtgtgtggtatcaggtagggtgtgtgtgtggtatcaatttattttttccataatgataactactgccataagaacaattctaaaggtccataaatttcctatttatctagaaaatcatcagtgttatataacaatcttttatattgtctcctaattaagtctctgcacataattagtgctttataataagtcttgaattagcttggaatgtccaataataacaaaacctgcggggttttgactaggattgcatataatcaatatgggaagaatggatagcttacaatattgagacttctatgaacaaggaatatcacttcatttatttattttactcttgagtagctgggactacaggtgtgtgccaycacgcctggctaattttttgtatttttagcagagacagggtttcaccatgttggcc

SEQ ID NO: 705970 - DNA, 626 bp, Homo sapiens
ggcttgtctctttgctcttttatattatatttttgtgaacactcttaactttgtattctttattgattatgctttttgtgtctttgtgtttaaatcagtccctaccttcaggtcataaggatattctacgttatcttctaaaggaaattttgaagttttgcttttcacattttagtcttcaaccaacctggctttgatttttgtgtgtggtatcaggtagggtgtgtgtgtggtatcaatttattttttccataatgataactactgccataagaacaattctaaaggtccataaatttcctatttatctagaaaatcatcagtgttatataacaatcttttatattgtctcctaattaagtctctgcacataattagtgctttataataagtcttgaattagcttggaatgtccaataataacaaaacctgcggggttttgactaggattgcatataatcaatatgggaagaatggatagcttacaatattgagacttctatgaacaaggaatatcacttcatttatttattttactcttgagtagctgggactacaggtgtgtgccatcacgccyggctaattttttgtatttttagcagagacagggtttcaccatgttggcc

SEQ ID NO: 705971 - DNA, 1340 bp, Homo sapiens
tcttgagaaaaattgctaacagacatgttaaaaggtctttagaagtgtcagraaaattgagaaatgtccagaaaatagagcaaaagtaaaaacagacaggactttgagaatttttatgttcagaaagactgtcaatggagtgtgaagatttaaaaaaattttctaaacacaaagtctcaaaatattggcctatgaagcatatttccttagaaattaactagggaattttcatcacaataaaggagtaaaccagaaagttgacatgggatccaggaaacaagggtccaggcattgataagacaccaagggaattcccaggatgaaagtgataggaacccaagggatcaccgacacacatgctgctggcccagtccggatgatcagtctggagagaaacaaaaggcttcagtagttatctctctaagaaagataaggacatgcagggattacctgatatgtttcaatctgtaagggaaatttacattttgcactgtgggtttagagatgaattaatgaaaagagatttttcctttcctgaagaatgtttttaagaaggaaacacctcatttgctattatatgaaaactaaaatctccaatcaatctcttgcctaaggtttaaagtcaaaacaaatcagtaaaatatttattttgaaaaagtaattcttaagatggtatctttggttaaaatatgaaggtcctaggtgagagagaaaggaacatgtggcagaacttattaacttgattctattgtgattctacattggctctaatagtaccctagaattttttttagtgccataatgtgttaagtcttatgaaaataaaatggctttgataatcatttgtatgttgtttaatgcaagaaatgagacccacgttcttgtttatgttctaatatcaatgagctctatttcctaacatatctaagccttggtttctttgtattttttttttccagacagggctctctagtaacaaatgctgtcattgctacctcatatgcagaccatgtacttcctaatccatattaagttgaagggtctctggcattattatattggaaaacagtcaaggctcattttcctctgtttattttggaattggttgtctgtgttaggaatggggtgactaaaattttttcgttcagaacctcagaatgaaatactaaatcttttcaaagaagaaaaaaatcctcttattctttacgtgttccatcagagttggtacagttgactttcattcctctttgtatgagggttgcaatagtgagtaagaaagatctaaggccaactgatttctaaacatggctgtgctgtgcttatgtttcctttaagtagaa

SEQ ID NO: 705972 - DNA, 1340 bp, Homo sapiens
tcttgagaaaaattgctaacagacatgttaaaaggtctttagaagtgtcagaaaaattgagaaatgtccagaaaatagagcaaaagtaaaaacagacaggastttgagaatttttatgttcagaaagactgtcaatggagtgtgaagatttaaaaaaattttctaaacacaaagtctcaaaatattggcctatgaagcatatttccttagaaattaactagggaattttcatcacaataaaggagtaaaccagaaagttgacatgggatccaggaaacaagggtccaggcattgataagacaccaagggaattcccaggatgaaagtgataggaacccaagggatcaccgacacacatgctgctggcccagtccggatgatcagtctggagagaaacaaaaggcttcagtagttatctctctaagaaagataaggacatgcagggattacctgatatgtttcaatctgtaagggaaatttacattttgcactgtgggtttagagatgaattaatgaaaagagatttttcctttcctgaagaatgtttttaagaaggaaacacctcatttgctattatatgaaaactaaaatctccaatcaatctcttgcctaaggtttaaagtcaaaacaaatcagtaaaatatttattttgaaaaagtaattcttaagatggtatctttggttaaaatatgaaggtcctaggtgagagagaaaggaacatgtggcagaacttattaacttgattctattgtgattctacattggctctaatagtaccctagaattttttttagtgccataatgtgttaagtcttatgaaaataaaatggctttgataatcatttgtatgttgtttaatgcaagaaatgagacccacgttcttgtttatgttctaatatcaatgagctctatttcctaacatatctaagccttggtttctttgtattttttttttccagacagggctctctagtaacaaatgctgtcattgctacctcatatgcagaccatgtacttcctaatccatattaagttgaagggtctctggcattattatattggaaaacagtcaaggctcattttcctctgtttattttggaattggttgtctgtgttaggaatggggtgactaaaattttttcgttcagaacctcagaatgaaatactaaatcttttcaaagaagaaaaaaatcctcttattctttacgtgttccatcagagttggtacagttgactttcattcctctttgtatgagggttgcaatagtgagtaagaaagatctaaggccaactgatttctaaacatggctgtgctgtgcttatgtttcctttaagtagaa

SEQ ID NO: 705973 - DNA, 1340 bp, Homo sapiens
tcttgagaaaaattgctaacagacatgttaaaaggtctttagaagtgtcagaaaaattgagaaatgtccagaaaatagagcaaaagtaaaaacagacaggactttgagaatttttatgttcagaaagactgtcaatggagtgtgaagatttaaaaamattttctaaacacaaagtctcaaaatattggcctatgaagcatatttccttagaaattaactagggaattttcatcacaataaaggagtaaaccagaaagttgacatgggatccaggaaacaagggtccaggcattgataagacaccaagggaattcccaggatgaaagtgataggaacccaagggatcaccgacacacatgctgctggcccagtccggatgatcagtctggagagaaacaaaaggcttcagtagttatctctctaagaaagataaggacatgcagggattacctgatatgtttcaatctgtaagggaaatttacattttgcactgtgggtttagagatgaattaatgaaaagagatttttcctttcctgaagaatgtttttaagaaggaaacacctcatttgctattatatgaaaactaaaatctccaatcaatctcttgcctaaggtttaaagtcaaaacaaatcagtaaaatatttattttgaaaaagtaattcttaagatggtatctttggttaaaatatgaaggtcctaggtgagagagaaaggaacatgtggcagaacttattaacttgattctattgtgattctacattggctctaatagtaccctagaattttttttagtgccataatgtgttaagtcttatgaaaataaaatggctttgataatcatttgtatgttgtttaatgcaagaaatgagacccacgttcttgtttatgttctaatatcaatgagctctatttcctaacatatctaagccttggtttctttgtattttttttttccagacagggctctctagtaacaaatgctgtcattgctacctcatatgcagaccatgtacttcctaatccatattaagttgaagggtctctggcattattatattggaaaacagtcaaggctcattttcctctgtttattttggaattggttgtctgtgttaggaatggggtgactaaaattttttcgttcagaacctcagaatgaaatactaaatcttttcaaagaagaaaaaaatcctcttattctttacgtgttccatcagagttggtacagttgactttcattcctctttgtatgagggttgcaatagtgagtaagaaagatctaaggccaactgatttctaaacatggctgtgctgtgcttatgtttcctttaagtagaa

SEQ ID NO: 705974 - DNA, 1340 bp, Homo sapiens
tcttgagaaaaattgctaacagacatgttaaaaggtctttagaagtgtcagaaaaattgagaaatgtccagaaaatagagcaaaagtaaaaacagacaggactttgagaatttttatgttcagaaagactgtcaatggagtgtgaagatttaaaaaaattttctaaacacaaagtctcaaaatattggcctatgaagcatatttccttagaaattaactagggaattttcatcacaataaaggagtaaaccagaaagttgacatgggatccaggaaacaagggtccaggcattgataagacaccaagggaattcccaggatgaaagtgataggaacccaagggatcaccgacacacatgctgctggcccagtccggatgatcagtctggagagaaacaaaaggcttcagtagttatctctctaagaaagataaggacatgcagggattacctgatatgtttcaatctgtaagggaaatttacattttgcactgtgggtttagagatgaattaatgaaaagagatttttcctttcctgaagaatgtttttaagaaggaaacacctcatttgctattatatgaaaactaaaatctccaatcaatctcttgcctaaggtttaaagtcaaaacaaatcagtaaaatatttattttgaaaaagtaattcttaagatggtatctttggttaaaatatgaaggtcctaggtgagagagaaaggaacatgtggcagaacttattaacttgattctattgtgattctacattggctctaatagtaccctagaattttttttagtgccataatgtgttaagtcttatgaaaataaaatggctttgataatcatttgtatgttgtttaatgcaagaaatgagacccaygttcttgtttatgttctaatatcaatgagctctatttcctaacatatctaagccttggtttctttgtattttttttttccagacagggctctctagtaacaaatgctgtcattgctacctcatatgcagaccatgtacttcctaatccatattaagttgaagggtctctggcattattatattggaaaacagtcaaggctcattttcctctgtttattttggaattggttgtctgtgttaggaatggggtgactaaaattttttcgttcagaacctcagaatgaaatactaaatcttttcaaagaagaaaaaaatcctcttattctttacgtgttccatcagagttggtacagttgactttcattcctctttgtatgagggttgcaatagtgagtaagaaagatctaaggccaactgatttctaaacatggctgtgctgtgcttatgtttcctttaagtagaa

SEQ ID NO: 705975 - DNA, 565 bp, Homo sapiens
aaatgtttgctgttattatgtggactagattaggaggctgcttaatagtttgagtagcgagagcctgctgtatagcagtgcagtgtgtggaagagaatgggtaaggaagtcttatgcggcttccatggtgtcttgctcatactagcgacatagtaaatatggtgtgatttaattatgcctaaatatttttggtccaaataatttttgcttaaataaaaacagcatttctccttcagtagataattaaaattactgaaaacatctataaaattttcctggagaaagattgtatatcatttattaaatgcttaccatgggccaagtctgttggaagtatcaaaaatttattgtcacaacatccatatgagacattttttaactattttatttttatttcaatagtttttggggatacaagtggttttgggctacatggatgaattacatagtggtgaattctgagactttagtgcacccatcacctgagtagtatacattgtacacaatatgtagtktttttttttatcactcatccacctcccaatgactcccttctgagtctcca

SEQ ID NO: 705976 - DNA, 863 bp, Homo sapiens
ctccttgagaataccctgtattttccaaacttttattggcttcagatgctatttcctctaccaagactggcctctcctcctgtctttagaaattctaagccacttttcaaggactctttcaaatgttaactataagtaggaatcttttctcaagctccaggctgaaactgctttgtccctccttccccctatcctagcatttgaactgtgcttgtggtatgaatcatactgtattttacacttagttatttgtatacatatgggcacacttggactggtgtgcttatataatatccatagggaatattgcattaaagtctatttagggaggttttaagattaggctgggttttgataagtgaatgaattttttttagaaggtgggggggcggagaaaaattaaggcatgagacaactagaagagaaaatttctataagggaacaggtaaaaaatgggtccagaccattgaagacatttaattacttattaaataatttagatttaatcttatatggaatggaagacatctaaaggtttcacagttaggaatggagtacaggttaagcggtgtcctgggaagattaaacaagtgtagaktgaggatggatttgcagatgggaagacttgaggcaaggggagagccaacggtggagccaggatgaaaattcaattatccttctggttaaacttgaatcaatcctgagatgtgattggccagagaatattactgtatcaaagaaattgtcccaaagcagctacttaacagcaagatctttcgggtcaaaaggacaatatcccccttggcaaactattttataatcaagttttctctaacagcaaggagaatttccaggctgttatc

SEQ ID NO: 705977 - DNA, 612 bp, Homo sapiens
ggagaaaccctgtttctacaaaacaaaacaaaaattagcagggtgtggcagcacatgcttgtagtaccagctactcgggaggcttagttgggaggatggctcgaacctgggatgttgaggctgcagtgagcagcctgctgaagtcttgtcaagaagtacattcaatgagtatttattgagcactttttctgtgcccaacacatggcaaggcaaccagaatattaatataacaccatccagcctacacctgagaagctcacacctttatcccagtccatttgtrtgtattgcctattcatatgcagcatagtcagtcatttatttaacaggtaccaatgacatagtaacaagtgccaggaactgtgctggttcagagttagaaatataaatacaacatacattcagtcttctaggtactcacagactagtaggagaaagagagagtacctaatgggaaatctctgtgaaaaatgcttaagggaaatacatcaaaggcactgtagtagcaaaggtaattagctttatccaggtgcatcaaggaaatccacacaaccattgggcatgctcaaagcaatactgctagatacacaaagagagtccttagttttctca

SEQ ID NO: 705978 - DNA, 1895 bp, Homo sapiens
ttccttttacttcacttaagctttaactccagcctcttttctttggttatctttgtatttcttgacattaagtcctgctgcttttcttttgccctaaattctgtcagtcctctgacctttcttatctacctgccaatgatacggtctagcctctttggatgacatccatgatttattttttctttccagagattctcttttatagacaaatcactcagcccagtgtcctgccagtaatgaaaattggcagatgatagggtttgatggamattagaaagcaatgctgatttggtccttcttcaatttacactgtatgacagctattttgacttttcttgctgttcaccaatgcttttattcttatgtgttgtctggactttcttaagcaacagtttcatcaagtttaaggatctgtgataagctctgttctaatttaagctcaatgtttttgtcttttttatttatctcttctttttttacagctgtctcttaggaaatgaccttctttaaagatgatcattttgtttcctctcacttttctcctgccataagaaccttgctccctttacttcatttagcttcattgtatgccactgttggaatttcatgtctacttttgtgtatactcaaatattcatcactttcattgatcagtagtatagtttgctgaggagtcaatttgattagtagtcaagagcctgatcttagaagccaaatagacctggattttactcctctcccctcttaaattatctttagttatagcctgtctttttgctttttcaactgtttaaagaaaaatttcttagttgattattgctttaaacttaatgtctctggcttacagacatgtgtgtctaaatattcatatttaatttctgtgatgacaccaaacctatccagtagtatcgataatcttcttatacatgacctccataaggttgtttcagtattcccacacatcttctccctgactgggagggttggaaccaacctcatttctttgtgtagtgcttttaaaaataatattgtttttcacataaggcatattaagtgtttttgcaccagatgtattacatggatgtttttctttgactaatttattaccaatgatccatagtaatcagataacacagcaaggttgtcagtaaggcattggtggagatcatcatagtctaaaaagtgatttttgtgacaatgacagttgtcttgttgcagagtgaactttgttgtatataacagtgctgtgcagtataaatataatgtgagcaacataagtaatttttctagtgggtatgttaaaaatttgaggaaaaggaaacatttgggaacaattgtagtaaattttatttaattcagtaatccaaaatagtaatatttcaaattttgagatactttttccccattaagattttggaatccagtgtgcattttatgcttactgcatacctcgatttgaactaattacatttcacttgttcagaaaccacatgtcgctagtagctaccatggcaacttgaagtgtcaggggagcaaactctagaaagtttcacagaagcattttagtgttcctaggaaagtataatagaaaaatgaattgattatctgataattagtttctgataattagttgagtattcccccaatttttaaaagttttacagtgagcaaaaagagatcaatttttcaatgtacatattttgaaagataaatactagtactctcttaatattaagaaacataacatcccagttatgtcctttctatcaaaaatgaaccaatttatgatgcttccattgttagattaatgatttattttaaatgcctatcacttaaagagccatttaaaagttattttagcagtaagtccttcacttaaaatatgttcaataaga

SEQ ID NO: 705979 - DNA, 1895 bp, Homo sapiens
ttccttttacttcacttaagctttaactccagcctcttttctttggttatctttgtatttcttgacattaagtcctgctgcttttcttttgccctaaattctgtcagtcctctgacctttcttatctacctgccaatgatacggtctagcctctttggatgacatccatgatttattttttctttccagagattctcttttatagacaaatcactcagcccagtgtcctgccagtaatgaaaattggcagatgatagggtttgatggaaattagaaagcaatgctgatttggtccttcttcaatttacactgtatgacagctattttgacttttcttgctgttcaccaatgcttttattcttatgtgttgtctggactttcttaagcaayagtttcatcaagtttaaggatctgtgataagctctgttctaatttaagctcaatgtttttgtcttttttatttatctcttctttttttacagctgtctcttaggaaatgaccttctttaaagatgatcattttgtttcctctcacttttctcctgccataagaaccttgctccctttacttcatttagcttcattgtatgccactgttggaatttcatgtctacttttgtgtatactcaaatattcatcactttcattgatcagtagtatagtttgctgaggagtcaatttgattagtagtcaagagcctgatcttagaagccaaatagacctggattttactcctctcccctcttaaattatctttagttatagcctgtctttttgctttttcaactgtttaaagaaaaatttcttagttgattattgctttaaacttaatgtctctggcttacagacatgtgtgtctaaatattcatatttaatttctgtgatgacaccaaacctatccagtagtatcgataatcttcttatacatgacctccataaggttgtttcagtattcccacacatcttctccctgactgggagggttggaaccaacctcatttctttgtgtagtgcttttaaaaataatattgtttttcacataaggcatattaagtgtttttgcaccagatgtattacatggatgtttttctttgactaatttattaccaatgatccatagtaatcagataacacagcaaggttgtcagtaaggcattggtggagatcatcatagtctaaaaagtgatttttgtgacaatgacagttgtcttgttgcagagtgaactttgttgtatataacagtgctgtgcagtataaatataatgtgagcaacataagtaatttttctagtgggtatgttaaaaatttgaggaaaaggaaacatttgggaacaattgtagtaaattttatttaattcagtaatccaaaatagtaatatttcaaattttgagatactttttccccattaagattttggaatccagtgtgcattttatgcttactgcatacctcgatttgaactaattacatttcacttgttcagaaaccacatgtcgctagtagctaccatggcaacttgaagtgtcaggggagcaaactctagaaagtttcacagaagcattttagtgttcctaggaaagtataatagaaaaatgaattgattatctgataattagtttctgataattagttgagtattcccccaatttttaaaagttttacagtgagcaaaaagagatcaatttttcaatgtacatattttgaaagataaatactagtactctcttaatattaagaaacataacatcccagttatgtcctttctatcaaaaatgaaccaatttatgatgcttccattgttagattaatgatttattttaaatgcctatcacttaaagagccatttaaaagttattttagcagtaagtccttcacttaaaatatgttcaataaga

SEQ ID NO: 705980 - DNA, 722 bp, Homo sapiens
tgattctaatgagcatgataatttggggatgttaccagcatcttcayttacaggctgagaatttttgttgtaaccagcaagaattatgcccaactgccatgatcagtctgtttttattatttagttttataagaaataagcgtcaatatcttagagttacgtgacataaataggactatgtaccttcatattttggtaaaaattagataaaatattcagtaaacatttactcgataccttgtatctgcactcagtttcttgggaaggattaaaagaacttgaaggaagagtacttgtcctccaagatctttgcatgtagctgaagagataaaacatgtgactttttatggagaggttgaactgaataataattggaggccaactgacccatcttcctgttgacttctgtttatcccccagatttcattcagagattcctctctcagctcttcttgctttccctgttttttctcttcccctcctcttgaatttaaaatcatagtatctgaaagtaattatagtcaaaaatctcaacagagataacgctgtaggaaaggggcccaatctttgggggcagaagagtgtttaaagaaaggttttaggttttcaattataattcttaataattatgacaaggttcatcttttgaaataattattcagcatttaattgcttaatagacattataagcacttgaacctgcattacatttaattctcaca

SEQ ID NO: 705981 - DNA, 722 bp, Homo sapiens
tgattctaatgagcatgataatttggggatgttaccagcatcttcatttacaggctgagaatttttgttgtaaccagcaagaattatgcccaactgccatgatcagtctrtttttattatttagttttataagaaataagcgtcaatatcttagagttacgtgacataaataggactatgtaccttcatattttggtaaaaattagataaaatattcagtaaacatttactcgataccttgtatctgcactcagtttcttgggaaggattaaaagaacttgaaggaagagtacttgtcctccaagatctttgcatgtagctgaagagataaaacatgtgactttttatggagaggttgaactgaataataattggaggccaactgacccatcttcctgttgacttctgtttatcccccagatttcattcagagattcctctctcagctcttcttgctttccctgttttttctcttcccctcctcttgaatttaaaatcatagtatctgaaagtaattatagtcaaaaatctcaacagagataacgctgtaggaaaggggcccaatctttgggggcagaagagtgtttaaagaaaggttttaggttttcaattataattcttaataattatgacaaggttcatcttttgaaataattattcagcatttaattgcttaatagacattataagcacttgaacctgcattacatttaattctcaca

SEQ ID NO: 705982 - DNA, 722 bp, Homo sapiens
tgattctaatgagcatgataatttggggatgttaccagcatcttcatttacaggctgagaatttttgttgtaaccagcaagaattatgcccaactgccatgatcagtctgtttttattatttagttttataagaaataagcgtcaatatcttagagttacgtgacataaataggactatgtaccttcatattttggtaaaaattagataaaatattcagtaaacatttaytcgataccttgtatctgcactcagtttcttgggaaggattaaaagaacttgaaggaagagtacttgtcctccaagatctttgcatgtagctgaagagataaaacatgtgactttttatggagaggttgaactgaataataattggaggccaactgacccatcttcctgttgacttctgtttatcccccagatttcattcagagattcctctctcagctcttcttgctttccctgttttttctcttcccctcctcttgaatttaaaatcatagtatctgaaagtaattatagtcaaaaatctcaacagagataacgctgtaggaaaggggcccaatctttgggggcagaagagtgtttaaagaaaggttttaggttttcaattataattcttaataattatgacaaggttcatcttttgaaataattattcagcatttaattgcttaatagacattataagcacttgaacctgcattacatttaattctcaca

SEQ ID NO: 705983 - DNA, 1274 bp, Homo sapiens
aaataaatgaaaagtattacaacaattaatgccttatttgatgtaaaatggaataagatttcctttctgtatcctcccattactccacagacctgcattaacaagagaagaattaatgaaaaaactgtatagagcatgtagttctatttcctgtaagagtatttcattaagtacattttatacataaggaaactgagagacagagagactaagagacttgtctaatgtcatgcaaccatagtagcgaagtagaatttggtctaggttgtctggctatggactatacactcttgtctccctgaagaagtgaacatggtccctcaccaactagtcatggaaagtgctttacaggaaataaacagagcaatatgacagtgaataaatggaggagaggcacccttaaataggggaccaggaactccagacgcacaaaacagaccaagaattaaataaaacccagatattcagaggccaaagggcagagtctctaggtagaagaaatacaaaatgcaaagtctctgacatggaaataacctgacattttcttgcaatagagtggaggccagcccaggatgcttgaagcacaaagagcaggaaagtcaaacaaatgaggttagagaaacaggcagaagccagatcatgtctgtctcattgggccacagtaagctgtgtggcttttattctaagtgcaggtgaaggatcatttttaatgctccacgagggctgcaaaatgtatggcccatctcttgatggtatattgcaacatgctttttctcttcaaatgtccaatctgacttaaccttatcttttataatgttatccaatgtcttccctcatccaaaatcaaaaaagagcaacagtttattgaattgctcccttcttgaaaaacaattctgggaaaaatttaacacaaacaaataactttaatattctttttctggttagagtagamaaacttcaggttctaaacttgacattgccgttacatatgcagctagtcctcagaaaaccacttgaccatataatacctctatttcttcaacttttagagaggaaaagcacaaggtttagagggattgtataagattatgaatagtattttaaaaattgtataccagtacacacgattattatgttatgaaaaaagcatgcaatatggagtcaaataatttttttgatgaatacacaagtttgaaaataaagttttattatttatggttttgtgaaaaggaagtcaaattattagtcaaagttatctgagtgtacatctttta

SEQ ID NO: 705984 - DNA, 1228 bp, Homo sapiens
taaatgatgtctttactggttataaagtcattttaacaattttccacaattatttgcttactttccccagacattaattttattctgcggtctcacttataatagcaagtatttccacaagagaagtagaatattgttagttctaaacagtcttgtctgtggcttccttaatactgtcttgttgctttactctgctatgataaactaacacatttggttcctaatctcctatgcctaagtttttctaatgtaaaaatccctaccaaatcccaaagtaccccatcaagtctataataatactgacgtgagccagtgaaaaagtgtgttctgccagcatgttctataagatagccttccaacaacacaaagtctcaggcattcttttctggaactcgcaaggaaaataagctggctttggcagttgatcacagactgttctaattcaatgaagccattttctacaggctttacttggcaagcttctttccactgcctgcaaactgactgtttctttgtaaaccttgttgcaattcaacccaaacacctctacaccccagttatctgttactgaaaaatctattttaaagaagactttcagtggaatacctgattttggagcctttccttaacctttacaaactgttatgcataggtcattatctacagaagtgtgttctggaaaaaggacgccaatggtgtagtgatgtataacactggagaagtcagaaagcccaggctgagttacctgctctaaaatgtgcccctcttgatctgcttggcttatcaaatgatctgcctatggaagttcatagtacaatgacgttagtttgatggcacctctgaactctacttctaacaatcattctgtatatttttagaattcttaaaagcacatagttgtagattggggaaaatgtcatcaataaatcctccaaggagacacaaagtatttttttttttttgtaatatcatagtccttcattattaatcttatttttaacatggctaagttcttgattcccaagaattcaattaaacatctatggataaatcgaaaaatcttaaagttgcatgaaacaagcctgacacaaaaaagtgcatactatatagttamatttatatgaagttctagaaaaggcaaaaataagctataatgatcatcagaacagtggctgtgaggaattgacagaaatgtagcaagagggaactttctggaataatgaaaaaa

SEQ ID NO: 705985 - DNA, 609 bp, Homo sapiens
gatgacgagttagwgggtgcagcgcaccagcatggcacatgtatacatatgtaactaacctgcacattgtgcacatgtaccctaaaacttaaagtgtaataataataataaataaataaataaataaagttaggaacaatggatactggggaccaacagatgtggagggaggaagtgggctattggctgaagaaccacctgttgtatatcatgctcacttcctgggatggaatcactgggaccccaagccttagtgtcatgcattttacacgtcatgccttttacccatgtaacaaacctgtacttgttccctttaatgtatgataaaagttgaaatgattagttattagaatggtgagttttttgttgtgtatattttatcactttatattttattttacatatatgcttatatacatataatttaataaatattttaccactacatatacttttttttttttgatatggagtctccctctgtcacccaggctggagtgcaatggcacaatcttggctcactgcaagctccgcctcccgggttcacgccattctgctgcctcagcctccagagtagctggaactacaggcgcctgccaccacgccccg

SEQ ID NO: 705986 - DNA, 609 bp, Homo sapiens
gatgacgagttagagggtgcagcgcaccagcatggcacatgtatacatatgtaactaacctgcacattgtgcacatgtaccctaaaacttaaagtrtaataataataataaataaataaataaataaagttaggaacaatggatactggggaccaacagatgtggagggaggaagtgggctattggctgaagaaccacctgttgtatatcatgctcacttcctgggatggaatcactgggaccccaagccttagtgtcatgcattttacacgtcatgccttttacccatgtaacaaacctgtacttgttccctttaatgtatgataaaagttgaaatgattagttattagaatggtgagttttttgttgtgtatattttatcactttatattttattttacatatatgcttatatacatataatttaataaatattttaccactacatatacttttttttttttgatatggagtctccctctgtcacccaggctggagtgcaatggcacaatcttggctcactgcaagctccgcctcccgggttcacgccattctgctgcctcagcctccagagtagctggaactacaggcgcctgccaccacgccccg

SEQ ID NO: 705987 - DNA, 609 bp, Homo sapiens
gatgacgagttagagggtgcagcgcaccagcatggcacatgtatacatatgtaactaacctgcacattgtgcacatgtaccctaaaacttaaagtgtaataataataataaataaataaataaataaagttaggaacaatggatactggggaccaacagatgtggagggaggragtgggctattggctgaagaaccacctgttgtatatcatgctcacttcctgggatggaatcactgggaccccaagccttagtgtcatgcattttacacgtcatgccttttacccatgtaacaaacctgtacttgttccctttaatgtatgataaaagttgaaatgattagttattagaatggtgagttttttgttgtgtatattttatcactttatattttattttacatatatgcttatatacatataatttaataaatattttaccactacatatacttttttttttttgatatggagtctccctctgtcacccaggctggagtgcaatggcacaatcttggctcactgcaagctccgcctcccgggttcacgccattctgctgcctcagcctccagagtagctggaactacaggcgcctgccaccacgccccg

SEQ ID NO: 705988 - DNA, 609 bp, Homo sapiens
gatgacgagttagagggtgcagcgcaccagcatggcacatgtatacatatgtaactaacctgcacattgtgcacatgtaccctaaaacttaaagtgtaataataataataaataaataaataaataaagttaggaacaatggatactggggaccaacagatgtggagggaggaagtgggctattggctgaagaaccacctgttgtatatcatgctcacttcctgggatggaatcactgggaccccaagccttagtgtcatgcattttacacgtcatgccttttacccatgtaacaaacctgtacttgttccctttaatgtatrataaaagttgaaatgattagttattagaatggtgagttttttgttgtgtatattttatcactttatattttattttacatatatgcttatatacatataatttaataaatattttaccactacatatacttttttttttttgatatggagtctccctctgtcacccaggctggagtgcaatggcacaatcttggctcactgcaagctccgcctcccgggttcacgccattctgctgcctcagcctccagagtagctggaactacaggcgcctgccaccacgccccg

SEQ ID NO: 705989 - DNA, 609 bp, Homo sapiens
gatgacgagttagagggtgcagcgcaccagcatggcacatgtatacatatgtaactaacctgcacattgtgcacatgtaccctaaaacttaaagtgtaataataataataaataaataaataaataaagttaggaacaatggatactggggaccaacagatgtggagggaggaagtgggctattggctgaagaaccacctgttgtatatcatgctcacttcctgggatggaatcactgggaccccaagccttagtgtcatgcattttacacgtcatgccttttacccatgtaacaaacctgtacttgttccctttaatgtatgataaaagttgaaatgattagttattaraatggtgagttttttgttgtgtatattttatcactttatattttattttacatatatgcttatatacatataatttaataaatattttaccactacatatacttttttttttttgatatggagtctccctctgtcacccaggctggagtgcaatggcacaatcttggctcactgcaagctccgcctcccgggttcacgccattctgctgcctcagcctccagagtagctggaactacaggcgcctgccaccacgccccg

SEQ ID NO: 705990 - DNA, 1069 bp, Homo sapiens
  misc_feature 280, 282: n = A,T,C or G
gtcaggcatttagcttcaggacctgattctagttccctgccctgtggcaacaagtagaaacagatccctggtaccctgcttaagtattacaccagctagatgtgagcagatgagaaaatcaacatcctctctcattttcgccagcggcattaagtctcatctcctcacgcgatctgctcaaatcagttagcagttctcagccgttgtcagccgtgcacgagcaagcttggtaggacatctcagcgagcggtgacgcattgcggcagccgtgccagcacgnancatctatgcatgtatacaatacagtgcactactaaggatgtgtctttaaaggcatttacagcacacagttttttttttccttataattttgctgctctttatttgtagtagtagataaggaattaagaaagcaaaaatgagtgctttgactaggtcttttgcctttgaaagtagcattagtaaaatcccctcttcttttttattcttataaaatttacccaattcactctgtcccccagcccatctgtgttcacttgctgttcttgctgctctcagtttttaaaagcttattctaaaattacatsaaagcaaccccattttgacaaaattagaattctggtaggaaacgcttgccatgaggctgtggagagaggcccagcaagacttttgtattttatttcaacctctgtcggttaaacctacaattcggcagatgatataattacctccctggggcaggtctctatctctgccttggagaaatagcaaagtccaaagtagtctcctcattcaaagatgttgcaaacgaaggctgttttgatctttatgtattagcatttgggtgttaatctttctggagctcctgacagaaaattcctttaaatttattatataattctaaaatattggacatatttgtttcaagcatctgtcagtatccttactctttccatttcactccccactgccttaattagtcatcaggtcctactgatttttaactcctaagcatttctcaaatctgtctcctcagtatgtattgttggttatataactccatctccat

SEQ ID NO: 705991 - DNA, 1846 bp, Homo sapiens
ttttagagatgggggtcttgctgtgttgcccaggctggtcttgaacttctggtctcaagggatcctccctgccttgcctttcctaaagcaatgggattacaggcatgagtcattgttcctgaccacatgatgttttgatatacacagtggaatggttactgcagtcaagcaagttaatatacacatcttctcacatagttacctttccctcgttgtgtgttaaaagcacctgaaatctattctctcagcaaatttccagcatgcagtgcaatactattaactatagtcctcatgctatacattggatctttagtcttactctctagacttattcatcctacatacaactacagctttgcacccttttacctccatctccccatcccctttgtgtgttcccaatccccacctctagtaaccaccattctactctctgtttctatgtatttgtcttttttttggagattccaaatgcagttttaatttacttcaccatgtaattcaaatcactaccatttgaaagtgaccatatcattcaaatcactaccatttgaaagtgtgcaggggccttattaattattatgctaagacaacaggcatacattgggactttctcagacaaactgagatgtgtgatatgtggccacccttcttacacttcagtaatttctacaaaaacaggaggacagatcaacaacccggtagaaaaatggataaaggatatgaacaaatgatgatgatggcaataagagtaaccgcttacatggtgcttattatgttctaggcactgttcttgatatttctgcatacgaattattttatctttacaacaaccctatgaggaaactgaggtacaaatgaagaaactaaagtaagaacatttaagtagttcatacaaagaaatataaattgttcttaaatatatcaaaatatactcacctcattcatagtaaaagaaataaaaaactgtgctctgatgacatttttcatctatgagatttacaaagatctaaaaattgagaatatacattttctattgcctttggatggcaatttggcagtaactatcaaaagtataaatatctataccctttgaggtgtcaatctcattttaaagaatttattcttcagctatgtacatacatgtaggaaattatgattgtacaaggttatttattgtggaatttttgtagtggcaaagaattggaaataatctaaatgtccctcactaagacactgattaaataaattatggaacatccttacaagccattttatggccctacatccagggccataaaaatgaatggggaaacttttaatgtgcagatcatggaggatgagaattgggttcctgggaggcaagagtgggagggatgctctgtattcttctataattttggarttttgaaccatatgaatactatctacatttttaaactatgcatttttattttatctctttttaaaatttcaatagcttttggtgaacaggtggtttttggttacagtgataaactctttagtggtgatttctgagattttggtgcacctgtcacctgagcagtgtacactgtacccaatgtgtagtcttttatctctcacccccctcccatccttccccacaagtctccaaagcccatgatatcattcttaagcctttgcattctcacagcttagctcctacttataagtgagaacatacattatttggtttttcattcctgagggttacttcatgtagaataatggcctccagctccatccaagttggtgcaacatacattatctcatttctttttatgactgagtgcatatataccacattcgatggtgtatatatacc

SEQ ID NO: 705992 - DNA, 972 bp, Homo sapiens
tcagccccaaggctgcgttttgtgtttctttcctctttctttaacacttacactcctgattgtgtccagctgacttctgcagtgcctcacctaaacattccttcaatggctgggcttacactccactgatccctccacattttcactgtggtcacccctctgtcctccctcccccctcccaggtattatggtgggcaccaaacattctcagcagcatatgccagttcctccaagtcttctcttcattagaccaacrtccccaggcccccagttttccccaacaggatatggaccacagatcagccatgtcctagcatcttcacctggtgcttctatccatgtcttcttgtccctggaaagcatgttctctgagagcagagattgtgtttcctgcatctctgtctcctgttgcccagcacagaattggtgctcaatgaagatttgtccatccagatgaagaatggatgggtggctggatgggtaggcagatggatgatgagtgggtagatgggtaggtggatgggtggggacagatggatggatggagatagatggatgatgagtggatggatggatgagtggggggatagatggatggggatggatggataatgaatgaattggtaagtggatgggtgggtggatggatggatgggtggatgggtggttgagtgggtggatggatggatgggaatagatggatgctgaatgggtgggtgggttgatggatggatggggatagatggatgatgaatggatgggtgggtgggtggatagatggataatgaatgcattggtaggtggatgggtggatggatggatgggtagatggggtggatagatggatgggtagatggggtggatggatggatgggtaagtggatggatggatggaatagatgatgaatggatgagtgggtggatggctagatggatggggatgcattgataatgaatgaattgataggtggg

SEQ ID NO: 705993 - DNA, 601 bp, Homo sapiens
tatatgtgcagactataaaatgatacaaaatcagatatggaaatttggcattttgcacaattgattcaaaaaataaaagtaaaaatgtacgaagacaatattacttttccatkagattgctaagatctcagttgcttctccagatatagcaagaggtcaagtagctgacctgaggatataaagctgcatcactaagactcccgttaatttctccatagctacagctgatgttgaacttagacttgaagggattactaagttttgttactattcttccaaggcatcgcctactttcctgtaatggtggataagatcaataaaattatggagaataatcacagaagaataattttttactgagagaaatggaggtttgggagagctgatcatgggggctcaccttgcattgagaaactgatatgaattatgagggcatgtagttgccaaaagactaaatatgcctccagctaaaagcagtgagcttttgtatagtgttataacaaaaattaaaaacaaataaaatgtttcacttctgggaaagtgaagtagatatactttttcttattttctttcagctaatcacaactaaaaacactggata

SEQ ID NO: 705994 - DNA, 624 bp, Homo sapiens
cttattttaatgaaggctatagaaaaaaacgctttttgttaaaaaatgcagctttctgaaatcagtttttataggctgggattttaggcttctggataaaactaaattctttatggttttaataataatataatgcacttctatctgaatataaaatctccttttttatctcatttatcacatataaattaaattaacctttgactatcctaaggaagatagaaacttatttgtacacatatctgacactaaaataaagtgaaatgcaatgccaagtcgcttgtattggctcctcttctaatttcccatattgctytaggaaaaaagaaagctatgtactacacatttatgtaacataaaatccgacttaaccatgcatattcctcagttgttctgatattacaattccggatggaaacctttgaattttagcttgctaaattgtgtaaattattctctatccagcattctctgttttttagagataagatattactcttgtcatccaggctggaatgtagtggcatgatcatagctcactggaacctcgaactctgggctcaagtgatcctcttacctcagcttaccaagtagttaagactatagtgtgcttgcccctaagcc

SEQ ID NO: 705995 - DNA, 624 bp, Homo sapiens
cttattttaatgaaggctatagaaaaaaacgctttttgttaaaaaatgcagctttctgaaatcagtttttataggctgggattttaggcttctggataaaactaaattctttatggttttaataataatataatgcacttctatctgaatataaaatctccttttttatctcatttatcacatataaattaaattaacctttgactatcctaaggaagatagaaacttatttgtacacatatctgacactaaaataaagtgaaatgcaatgccaagtcgcttgtattggctcctcttctaatttcccatattgctttaggaaaaaagaaagctatgtactacacatttatgtaacataaaatccgacttaaccrtgcatattcctcagttgttctgatattacaattccggatggaaacctttgaattttagcttgctaaattgtgtaaattattctctatccagcattctctgttttttagagataagatattactcttgtcatccaggctggaatgtagtggcatgatcatagctcactggaacctcgaactctgggctcaagtgatcctcttacctcagcttaccaagtagttaagactatagtgtgcttgcccctaagcc

SEQ ID NO: 705996 - DNA, 731 bp, Homo sapiens
tcttttaatctgttacattcacctaccacactttattataaacacacttagaatcatctataaatactcaatgtaaattgttttgagtcttaaagaaaagaatccaaagtgtgggaaaaaaaaaaamaacacacaaccatctaattcattaccttaaaagatattctgtttgtctgatgaggaactatggtgctggttgtatttttgccaatgaagtttagcatggaggtaatccttggtgtagcttaaaaaacgagtacagccattctttaaaatgaagaaggcactgttgtttatatttcctgtaggcagctggagagatctgtgtgacacaagatgcttctgcatgggttcccatgaatcttctgttcttgtttatataatgtggaacaaataactcttctttgccaccactgtgccttaggtaactgtgtgtgccagtcagaagtctgacaccacgttttccttctaggctatcatgccctatctgatcatctttccttgcttcactctgtgctttagtgaagcctagttgcacattggcctttctgtgcggttttcaatttgcttaatgatagcggttaccccaattgtaacttatataactttaaacagaatcacactattccccgccttagttgagcacagaacaaaggcaatataaaatctggggttcacgcacaagttgggatgagaaggggagtgagccataatatcatggaaaattatac

SEQ ID NO: 705997 - DNA, 2277 bp, Homo sapiens
gtaatatccttgaaagttattcttttataaatctcatattgtttattccccaatttgtcatgatattttaagagccatccagataaatattaatctagaacattatttctgagtgctgaatataactttattatgtgtctatcccttattttatttcccattcctctgtcaatggacatctagactttctccattcttactaccacaaacattgctgtgaaaaatattcctagggacatgtgcaagagacctagaagtgtaattgctacatcattgagaaagtataaagatagttaatttaccaagtactttcaggttgctccctggaatggttgcaacagcttactttcccttaagttgaatgggaggtctcttatttcccaacatcctcatcactgcatgatattgtcagactttccaattgttttaatttgcagttctctgattacagagtaagggtaagtcactcttcgtttgcttatgaaccatttgggattcccagtttatttgtgtattttctgtttcaatagtagaatgcaaacttcataggtgctgttgtttatttgcatctccattcctttcctgattagttttaacataaatttgtctagtcaatcttttaaaagaaaagccagttttgagtttttatagttcatagttatatgtttagaatacgttgaatgaatgatgaataagtaaaaaaggaatgtcatttgctgtgtaacaaacaactgcacaactcaatgacttataacaacaaactttttatcctcactcaccaagtgcccacctacctgtgggtagttgtggctctgaagaggcatattgggcatggctccagcctgcaatttgaatgaggtctgcaatgagaggaaactgttgtttagattttttaaaacttagatttatagtttacatgttccaaattccttttctttaaaatataggaaaaaaaatgataccgaatatttatgacccagtaagcctaggaaaacatcttgcaagctgagttgtcatgaaaatatcttgagtaagattatatttgattattctctctgctttagtacaacttaatatgttttacttatattttctgactttcattgtaaagatgataagcctctccaatatggcaaattattttactacagagactgtcttaacataacatctgcccaaggtttattttaaaaaaaaaaagagcatgtttcagaaaattgcatgaagtcatcaaacatgtcttatgtctcatagcagagttgctattcagtcagtatacatgaccatacaagttgttaaaatattgaaacaatcctatatacatggtaaatagaagccactttgagaccctgccccatgcctctgccccagcccamcagaggtgtactcataatccggacatgaagggcacagcatccaggaagctgctctagcagtttggctggtgtctgttctgattggtcagtgccctatgttgtactaattgttatatattttaaatatcacgtctgaagataggaaatagcgcaaattctcatgtacaatgtgtaaataaactcatgggattttgtcgggggtgggggttgggctttgttcctccaacaaatacgcacatatacatacgacatgcatgacacctatgtatacgctccaaaatctctgggataaagaaagcaatacagtgtgtctctcttcctgaagctgtttatattaaagatgcctctggcagtttttcatctaaacacgttacaaagcttcacttgttccacacttttcacatctcttggttaacttctggattgattccttgtcttacttgagcacatcctcccaaagtgttttcaaacagaatttttgtcagccttctgaggccttgtgtaccttacaataacttatttcagccttacattgaattaattggatatagcatcctagcttcaaatttctcttatttcaacaatttctctgtcctctttctatcaaatacactcagccctatgtactcttcaggtctgcatttacagattcaaacaacctgggaccgcaaagattcacgaaaaaaccaaattaacaattaaaaaaatacaaataaaacccaacgccgcataacactatttacatagcattcgtattgtattaggtatcatatgtaatatagagataattgaatgtatacaggaggatgtatgtagattatgagcaaacaggccattttatataagggaattgagcattcctggattttactatgaaggcagtgggtccttgaaccaatcc

SEQ ID NO: 705998 - DNA, 656 bp, Homo sapiens
attccctttaaggagtggagagtgatctccactctgctttcatggtcatcgtgtgaccttgggcaaggcactgctcctctgggcttctggtttcccatgggtaaagcgaggccagtgtagacatttcaagagataacgtcaggcaaaggtacaaatggccagtaatgcctgaaagatgcttcagctcaggcaccaattacatggtaacagatgctgtcaatgtaacttatcagcaaagctatccctagcttagctctgagtgtggggtttacagatctgtctaaaatacgcttctcaaacttaaaagtgcacacaaatcaccccagggratattgttaaaacgcagattcacattctgtagttctgggtggggcccaagattctgcatttctagctagctcctagatgatgcaatgctgctggccgctggaccacactttcagtagtaaggtactagaatacagtgggtcccacctttgaaggaattctcagtgcagcccagggacagagtgctggcaagttgccaatatccaagataatagatgttagcacctaaatgggagatgctggcagtgaagattacgggacctctggacaaggacaaggttggcggggtcgggggctggtccaggattcctagagaacatggaaataga

SEQ ID NO: 705999 - DNA, 319 bp, Homo sapiens
gcctccccggttcaagcgattcttgtgtctcagcctcccgagaagctgggattacagacgtgtaccaccatacccagctagtttttgtatkttaagtagaaatggggttttgccatattggccaggctggtctcgaaatcctggtctcaagtgatcttcccaccttggcctcccaaagtgctgggaatgcaggtatgatctactgtgcccagcctaagaagctaatttctgataataagtgctttagggaaatgcaaaataagatgatgttcctgggatcagggtgggtacaccagccatgatgctcaaggagttgtcc

SEQ ID NO: 706000 - DNA, 319 bp, Homo sapiens
gcctccccggttcaagcgattcttgtgtctcagcctcccgagaagctgggattacagacgtgtaccaccatacccagctagtttttgtattttaagtagaaatggggttttgccatattggccaggctggtctcgaaatcctggtctcaagtgatcttcccaccttggcctcccaaagtgctgggaatgcaggtatgatctactgtgcccagcctaagaagctaatttctgataataagtgctttagggaaatgcaaaataagatgatgttcctgggatcagggtgggtacaccagccatgatgctcarggagttgtcc

SEQ ID NO: 706001 - DNA, 613 bp, Homo sapiens
actttccatgtattatctcattgattgaaacaatgcttttgtgctggggatttttgcttccatttcacagatattagtggaggcacacaaaggttaactggctgggcttggtggttcatgcctgtaatcctagcactttgggaggccaaagtgggcggattccttgagctcaggaattcragaccagcctgggcaatacagtgaaagcaggtctgtataaaaaaatacaaacatacaaaaatcagctatgagtggcagcatacgtctgtagtcccagctactcaggcggcggagggaggatggcttgagaaccgagattgtgccactgtgccactgtactccagcctgggtgacaaagtgagagcctgtctcaaaaaaaaaaaaaaagttaactgactgctctaatagcatacagggagtactgctaccctgataagcccctacatcttgctgattgccaagtccacgcttttctcactccttaaccattcctactttctatatcatgtctttagacctgtactattgaaaataaatataggctgggcatggtggctcacgcctgtaatcccagcactttgggaagccaaggcgggtggatcatttgatgtca

SEQ ID NO: 706002 - DNA, 613 bp, Homo sapiens
actttccatgtattatctcattgattgaaacaatgcttttgtgctggggatttttgcttccatttcacagatattagtggaggcacacaaaggttaactggctgggcttggtggttcatgcctgtaatcctagcactttgggaggccaaagtgggcggattccttgagctcaggaattcgagaccagcctgggcaatacagtgaaagcaggtctgtataaaaaaatacaaacatacaaaaatcagctatgagtggcagcatacgtctgtagtcccagctactcaggcggcggagggaggatggcttgagaaccgagattgtgcyactgtgccactgtactccagcctgggtgacaaagtgagagcctgtctcaaaaaaaaaaaaaaagttaactgactgctctaatagcatacagggagtactgctaccctgataagcccctacatcttgctgattgccaagtccacgcttttctcactccttaaccattcctactttctatatcatgtctttagacctgtactattgaaaataaatataggctgggcatggtggctcacgcctgtaatcccagcactttgggaagccaaggcgggtggatcatttgatgtca

SEQ ID NO: 706003 - DNA, 613 bp, Homo sapiens
actttccatgtattatctcattgattgaaacaatgcttttgtgctggggatttttgcttccatttcacagatattagtggaggcacacaaaggttaactggctgggcttggtggttcatgcctgtaatcctagcactttgggaggccaaagtgggcggattccttgagctcaggaattcgagaccagcctgggcaatacagtgaaagcaggtctgtataaaaaaatacaaacatacaaaaatcagctatgagtggcagcatacgtctgtagtcccagctactcaggcggcggagggaggatggcttgagaaccgagattgtgccacygtgccactgtactccagcctgggtgacaaagtgagagcctgtctcaaaaaaaaaaaaaaagttaactgactgctctaatagcatacagggagtactgctaccctgataagcccctacatcttgctgattgccaagtccacgcttttctcactccttaaccattcctactttctatatcatgtctttagacctgtactattgaaaataaatataggctgggcatggtggctcacgcctgtaatcccagcactttgggaagccaaggcgggtggatcatttgatgtca

SEQ ID NO: 706004 - DNA, 613 bp, Homo sapiens
actttccatgtattatctcattgattgaaacaatgcttttgtgctggggatttttgcttccatttcacagatattagtggaggcacacaaaggttaactggctgggcttggtggttcatgcctgtaatcctagcactttgggaggccaaagtgggcggattccttgagctcaggaattcgagaccagcctgggcaatacagtgaaagcaggtctgtataaaaaaatacaaacatacaaaaatcagctatgagtggcagcatacgtctgtagtcccagctactcaggcggcggagggaggatggcttgagaaccgagattgtgccactgtgccactgtactccagcctgggtgacaaagtgagagcctgtctcaaaaaaaaaaaaaaagttaactgactgctctaatagcatacagggagtactgctaccctgataagcccctacatcttkctgattgccaagtccacgcttttctcactccttaaccattcctactttctatatcatgtctttagacctgtactattgaaaataaatataggctgggcatggtggctcacgcctgtaatcccagcactttgggaagccaaggcgggtggatcatttgatgtca

SEQ ID NO: 706005 - DNA, 997 bp, Homo sapiens
gacagaaacatgccaaggatatgactgaggaatgtcagggatgccttcagttggaaaccacaaaagacactggattttatttttaataatagttacatcatcacattaaaaatagatttactacttattcaacagcattttaaaagtgttttattgagatttctaaaaatgttttacccatagtttatatttaatcatcacaagtactctgaaaggtaagtagcatcgtttgcgttatcaaatgaagacagtgaaatgaagacaggttaactgtcttgcccagggatcattcctagggtcagggagcaggattaagcagagctcyaaccaactcccaaactgagaacctttccacagccctgtgctaattcattgccttcctgtggcatcacatggcatttcacttatcaggaattcaagctatttccaaaagggcagcattttccaatctccatgctccaaatctctccatctaactgtacaaatagatgaattaaaaatactgggctagctgaattactgtcatagagaccttcaaccattttctcaccaaataagaaacagtggatggactgtcttcgaaattaggaagtaggcaatttctttttatctttgtagaatttaccatgctgtctatttctgctctaagatttcatacttcaagcaccatggtctacctttgcttactaaatagattaactgttaaaccctgcatatcatagactaaaccttattgttaagcattagtggtagatggttgccactttctttttacctttgtgtaaatacaaatcttttgccttcctcaaggtataggtattagttagagatatagaattccttccttcagtctggccatgtttattaagatactgagatgcttttctttcctaagtaaactgttttattttatataccaactccataatcagttccatttaatgcctctatgattctgtaagagcagcaacaaaaaagcaatctatttatttgtaaa

SEQ ID NO: 706006 - DNA, 997 bp, Homo sapiens
gacagaaacatgccaaggatatgactgaggaatgtcagggatgccttcagttggaaaccacaaaagacactggattttatttttaataatagttacatcatcacattaaaaatagatttactacttattcaacagcattttaaaagtgttttattgagatttctaaaaatgttttacccatagtttatatttaatcatcacaagtactctgaaaggtaagtagcatcgtttgcgttatcaaatgaagacagtgaaatgaagacaggttaactgtcttgcccagggatcattcctagggtcagggagcaggattaagcagagctccaaccaactcccaaactgagaacctttccacagccctgtgctaattcattgccttcctgtggcatcacatggcatttcacttatcaggaattcaagctatttccaaaagggcagcattttccaatctccatgctccaaatctctccatctaactgtacaaatagatgaattaaaaatactgggctagctgaattactgtcatagagaccttcaaccattttctcaccaaataagaaacagtggatggactgtcttcgaaattaggaagtaggcaatttctttttatctttgtagaatttaccatgctgtctatttctgctctaagatttcatacttcaagcaccatggtctacctttgcttactaaatagattaactgttaaaccctgcatatcatagactaaaccttattgytaagcattagtggtagatggttgccactttctttttacctttgtgtaaatacaaatcttttgccttcctcaaggtataggtattagttagagatatagaattccttccttcagtctggccatgtttattaagatactgagatgcttttctttcctaagtaaactgttttattttatataccaactccataatcagttccatttaatgcctctatgattctgtaagagcagcaacaaaaaagcaatctatttatttgtaaa

SEQ ID NO: 706007 - DNA, 997 bp, Homo sapiens
gacagaaacatgccaaggatatgactgaggaatgtcagggatgccttcagttggaaaccacaaaagacactggattttatttttaataatagttacatcatcacattaaaaatagatttactacttattcaacagcattttaaaagtgttttattgagatttctaaaaatgttttacccatagtttatatttaatcatcacaagtactctgaaaggtaagtagcatcgtttgcgttatcaaatgaagacagtgaaatgaagacaggttaactgtcttgcccagggatcattcctagggtcagggagcaggattaagcagagctccaaccaactcccaaactgagaacctttccacagccctgtgctaattcattgccttcctgtggcatcacatggcatttcacttatcaggaattcaagctatttccaaaagggcagcattttccaatctccatgctccaaatctctccatctaactgtacaaatagatgaattaaaaatactgggctagctgaattactgtcatagagaccttcaaccattttctcaccaaataagaaacagtggatggactgtcttcgaaattaggaagtaggcaatttctttttatctttgtagaatttaccatgctgtctatttctgctctaagatttcatacttcaagcaccatggtctacctttgcttactaaatagattaactgttaaaccctgcatatcatagactaaaccttattgttaagcattagtggtagatggttgccacttwctttttacctttgtgtaaatacaaatcttttgccttcctcaaggtataggtattagttagagatatagaattccttccttcagtctggccatgtttattaagatactgagatgcttttctttcctaagtaaactgttttattttatataccaactccataatcagttccatttaatgcctctatgattctgtaagagcagcaacaaaaaagcaatctatttatttgtaaa

SEQ ID NO: 706008 - DNA, 1055 bp, Homo sapiens
tgtgactttatgccatgtaatcaccctggtatctcatgtgtgccactgtgcattaggaatatgttagagacttattcagaaaatatgcatttccagccataaaaagaacaagatcatgtcctttcagggacatagatgaactggaggtcattatccttggcaaactaatgcaggaacagaaaaacaaatatggcgtgttctctcttacaagtgggaagctaaatgataagaacacatggacgcagaggacagcaacatacattggggcttatctgacagtggaaggtgggagaaggaagaggatcagaaaaaattagtaatgaatacttggcttaatacctgagtgataaaataatctgtataacaagcccccatgacacacatttacctgtgtaacaaacctacacatcctgcccatgtgcccctgaacttaaaagttaaacaaaaagaaaatatgcatttccttattgaacatatattatgtccctggacactattctaagctcttgataggcattttccaatttaatccacaactgacctaatgaagtagaccgtattataatccccacaacacttgcggaatctgaggcagaaggacattaaataatatacctgaggtcggcagcctaggggtagagccaggagtcacactcagactctcaaatatgcagtgagcctctgcttgtgtgaatatacatctcaacaaactgttcaccatgataacaaaccatacggcttctcctctgcattccatgtaccaggatttatctgtaaaggatgatcagtctaatggaacattttgttaagaaactgatcaactgtaactattctccatgcaagagccagaagccagaaagcagagtagcatagagtgaatgagtatgttccaccaagcagatgtgggcccacatgctgagctttaatgagccttccccaccatattatttctttcaccaccagatgcattatgcaaaaagttcattttacagctctagaagccctgaattgcagtttcctacagsagtccttggttcattatcaagaagcaagcc

SEQ ID NO: 706009 - DNA, 1055 bp, Homo sapiens
tgtgactttatgccatgtaatcaccctggtatctcatgtgtgccactgtgcattaggaatatgttagagacttattcagaaaatatgcatttccagccataaaaagaacaagatcatgtcctttcagggacatagatgaactggaggtcattatccttggcaaactaatgcaggaacagaaaaacaaatatggcgtgttctctcttacaagtgggaagctaaatgataagaacacatggacgcagaggacagcaacatacattggggcttatctgacagtggaaggtgggagaaggaagaggatcagaaaaaattagtaatgaatacttggcttaatacctgagtgataaaataatctgtataacaagcccccatgacacacatttacctgtgtaacaaacctacacatcctgcccatgtgcccctgaacttaaaagttaaacaaaaagaaaatatgcatttccttattgaacatatattatgtccctggacactattctaagctcttgataggcattttccaatttaatccacaactgacctaatgaagtagaccgtattataatccccacaacacttgcggaatctgaggcagaaggacattaaataatatacctgaggtcggcagcctaggggtagagccaggagtcacactcagactctcaaatatgcagtgagcctctgcttgtgtgaatatacatctcaacaaactgttcaccatgataacaaaccatacggcttctcctctgcattccatgtaccaggatttatctgtaaaggatgatcagtctaatggaacattttgttaagaaactgatcaactgtaactattctccatgcaagagccagaagccagaaagcagagtagcatagagtgaatgagtatgttccaccaagcagatgtgggcccacatgctgagctttaatgagccttccccaccatattatttctttcaccaccagatgcattatgcaaaaagttcattttacagctctagaagccctgaattgcagtttcctacagcagtccytggttcattatcaagaagcaagcc

SEQ ID NO: 706010 - DNA, 1055 bp, Homo sapiens
tgtgactttatgccatgtaatcaccctggtatctcatgtgtgccactgtgcattaggaatatgttagagacttattcagaaaatatgcatttccagccataaaaagaacaagatcatgtcctttcagggacatagatgaactggaggtcattatccttggcaaactaatgcaggaacagaaaaacaaatatggcgtgttctctcttacaagtgggaagctaaatgataagaacacatggacgcagaggacagcaacatacattggggcttatctgacagtggaaggtgggagaaggaagaggatcagaaaaaattagtaatgaatacttggcttaatacctgagtgataaaataatctgtataacaagcccccatgacacacatttacctgtgtaacaaacctacacatcctgcccatgtgcccctgaacttaaaagttaaacaaaaagaaaatatgcatttccttattgaacatatattatgtccctggacactattctaagctcttgataggcattttccaatttaatccacaactgacctaatgaagtagaccgtattataatccccacaacacttgcggaatctgaggcagaaggacattaaataatatacctgaggtcggcagcctaggggtagagccaggagtcacactcagactctcaaatatgcagtgagcctctgcttgtgtgaatatacatctcaacaaactgttcaccatgataacaaaccatacggcttctcctctgcattccatgtaccaggatttatctgtaaaggatgatcagtctaatggaacattttgttaagaaactgatcaactgtaactattctccatgcaagagccagaagccagaaagcagagtagcatagagtgaatgagtatgttccaccaagcagatgtgggcccacatgctgagctttaatgagccttccccaccatattatttctttcaccaccagatgcattatgcaaaaagttcattttacagctctagaagccctgaattgcagtttcctacagcagtccttrgttcattatcaagaagcaagcc

SEQ ID NO: 706011 - DNA, 643 bp, Homo sapiens
gaaagaatagtattctttatgagtatttaatttaaagtatttatttaagtctgttatctaactatgtggaatattgtaaaatacaggtatctttcaatatgccaaaacaacaacaacaacaattccaaatccagataarttaaggaccattttctaattttggaaaaaactaaatttctcctaactttattttctcaggaaatggagtctttcctatataaattttataaaggtaaaggcaataatgttcttttgagcttttggagataagcattatatagtagcaaataaagtgaagatttatgctagaacctaggaggtagaggtcgcagtgagctgagattgcgccattgcactccagcttgggtgaagggacaagactgtctcaaaaaaaaaaaaaaaagtgaagatttatatttcatgagatttaaatttattaatacagcacagacatagattataagcaataattaagcttttaaatggccacattaatgtcagaaattgaggctacatttatttttcccttcagcttttgtctgcttccaattccttttgctacctatattccatatataaactggtactttttaactctgtatcccctctctccctcccaccctacaagcccatctaagttttg

SEQ ID NO: 706012 - DNA, 588 bp, Homo sapiens
tataagttagcagtaccattgtcttctgacattattgtctaaagagattagtcatatattgggtcctttttgttaaataacttgtttatgagaactgtagattaacttatttatttatttatttttgagacacggtctcactctgtgacstaggctggagtacagtggcatgatcacagctcactgcagtcatgacgtcatgagctcaagcactcctcccacctcagcctcctgagtagctaggactacaggcgtgcaccacatacccagctaattttttattttttgtagaggtggggtctccctatgttgtccaggctggtctcaaacttgtggcctcaagtgatcctcctgcctcggcttcccagagtgctgagatgataggaatgagccactgtgcccagccattaaccttattttcataaatgtaaattctttagtttttccttagatttttcatctttaattatagaaccatgtgtgcatttttaaaagttaaaacctcacagtttggtttaaaaatgtcagtccccattaaccatatatatatatatatatatatatatatatgttttttttttctttttt

SEQ ID NO: 706013 - DNA, 637 bp, Homo sapiens
cccaatcaaaatgcttgggtctcaaatgccctttactgaaacacagacatcttcatttttaacaaatatttactttcctggtaatatatttgttatgcagtaattaaggtcttttctccttggtggtgtttctttttttttttctttctatttcacttgtaatatacatttaatcagttagttttaaagacatctgaaaatgtaggcttgggaaaacagccagagaaacatggtggggttcaccttcgttttttcccacattgcgtagtgtatagtaatacacagaaacagatatttttgccctgccctactataagctctacataatgttatatgttagatgtatattattgttcctcctatatatatttaaattgtcattccatgttgcttctcttttgtaataatttgttccaagattgattccttctagaatcttatttttaagatcatgccatttaattgaatataggtaaattaaagaacgtttacactgagcatttgygtgtgattatacattaaaaaataacttgaacttttttaatagtcctagttcttgggggcaactgagacttttgagctctcagttttacagtgatagctgctttggggtccatggaaagaaacgtccatggca

SEQ ID NO: 706014 - DNA, 864 bp, Homo sapiens
taagccaagattgtgccactgcactccagccttgtgacagagtgagattctgtctccaaaaacaaaaacaaaaaaagtcagctctacatacatgagaaaatgagtatgtaatatataaattttttttggtattattgtaaaagtaattttaacttcatggatcccctgaaggggtttttgagcaccctcagagatctttagacctcacttgctctggttgctttattgtaagccactttaaaatcatgcttcacgtttaagtgtttgctttttgcttttacttttcttccaaagtgaggatttggagaaacattaggatttagaagaactaatttagaatatagattacaaatagtaggccagacatagtggctcatgcctgtaatcccagcacattggtaaactgaggcgggcggatcstgaggtcaggagttcgagaccagcctggccaacatagtgaaaccctgtctctactaaaaatataaaaaaagtttagcggggcatggtgcaggtgcctgtaatcccagctactcaggaggctgagtcgggagaatcacttgaacctgggaggtggaggttgcagtgagcttagatcgtgccattgcactccagcccaggcgatagtgagagactccgtctcaaaaaaaaaaaaaaaagacaatttatttaacgctgtaatgatctatatagtaaaaagagcaattgctgtattgatactcaaatacctgtcagttatttacttataatttggaaatggtatgtctaatttgagaaattacaactgttaattaaataatgaaattatatgatcaggaagaaactacaaaatagtctcccaactttatcctggtttattttgaaatg

SEQ ID NO: 706015 - DNA, 864 bp, Homo sapiens
taagccaagattgtgccactgcactccagccttgtgacagagtgagattctgtctccaaaaacaaaaacaaaaaaagtcagctctacatacatgagaaaatgagtatgtaatatataaattttttttggtattattgtaaaagtaattttaacttcatggatcccctgaaggggtttttgagcaccctcagagatctttagacctcacttgctctggttgctttattgtaagccactttaaaatcatgcttcacgtttaagtgtttgctttttgcttttacttttcttccaaagtgaggatttggagaaacattaggatttagaagaactaatttagaatatagattacaaatagtaggccagacatagtggctcatgcctgtaatcccagcacattggtaaactgaggcgggcggatcctgaggtcaggagttcgagaccagcctggccaacatagtgaaaccctgtctctactaaaaatataaaaaaagtttagcggggcatggtgcaggtgcctgtaatcccagctactcaggaggctgagtcgggagaatcacttgaacctgggaggtggaggttgcagtgagcttagatcgtgccattgcactccagcccaggcgrtagtgagagactccgtctcaaaaaaaaaaaaaaaagacaatttatttaacgctgtaatgatctatatagtaaaaagagcaattgctgtattgatactcaaatacctgtcagttatttacttataatttggaaatggtatgtctaatttgagaaattacaactgttaattaaataatgaaattatatgatcaggaagaaactacaaaatagtctcccaactttatcctggtttattttgaaatg

SEQ ID NO: 706016 - DNA, 620 bp, Homo sapiens
tgctgactgaacaagccaacctcaaaaggtcacatgcttggctggccgcggtcgctcacgcctgtaatcctagcactttgggaggctggggtgggcagatcacaggaggtcaggagttcgagaccagccagtttctactaaaaatacaaaaataagcgggacatggtaacatgtgcctgctagtcccagctacccggcaagccgaggcagcgagaatcgcttgaacctgggaggyggaggtggcagtgagcgcagcattgcgccagtgaactccaacctgggcaacagagcgagactccgtctcaaaaacaatgaaaaaagaaaaaaaaagtcacacatttcatgatgacatttacataacattttgaaatcaccaaagtataaagatggagaacagattaatggttgccagaggtcaggcatagtgaagagaagtaaatagcatgactacaaaaggggcagcatgaggaagatctctgtggtaacagagtagttctgtatcttgacggcagtggtggtatgaatctacacgtgataaaatgaaagaaaactatacatacacattgtaccaatgtcaaaattcctgattttgatactgtgctttggtcaggttaaacagg

SEQ ID NO: 706017 - DNA, 3802 bp, Homo sapiens
cacaatgcaacctcgtcattttgcagattttcaaggctcacttcaaaaacatgttccttgaggcctattaacatttctttcctaaattgtctattcatatggtgctttaaaaaattagattacttttagtagatttattagagccgcacagtttagagtcagtagtcaattaaagtccctacttaaacttcagactaagatttttttttatttaatattttattttttctttttgctttcatgcagacagacatcttgcaagactttaagattcttgggccatttctgtcaggttgttctgtgttctgtgcctgcttcctccccatagtaatttcaaaatagctatcctcacctctgtaaggtttccgaaatcaaacttgggcttctggctagccttttctaggtcttgatttttcagtgctttccagaggcaattgtttggaacctcttggcacagtttctgtttctycttccatgtacaggcataaaaggtcttttggttgttttctggtaaaactatcataaaacagttcaagcaaatgactattggtagttttgtcattaacatgggtgccttctagtcattttgtttcctggtaaaacagaccaaacagagggagcagacagtttgtacatctgtatgagtgttgatgtgctttttattttaagccagggaacacattttatgttatttatgacatcctttccatgaatttgtcaggtgatttttgagctgaacattctgagtaatagctttagtttacaaaatacaacctagtctttctgcagattttctaggcccacttcaaatgcattgactatcagatggcatcttggttccttacgtcctttctgtgactgaatgtccataattccacatcatactgatctttcttagaaaaggcaacagttactatcttctttattccttttttaatgcttgcgaggtagttcttgttgatcacagcgatgctattctctcattcttcatgtcatatttagcaatttttttctagtttgtcatttgataatcttgattggtgtattttgatgtacagaaatttaaaatttatgtagttaaatctttctttaacttctattgcttttgtatttatagctcttgcctagatagtcttaactgtagtatagactttaacagtgttttcttttcttttttttttttcagttgcaactactggcccttcagtatattatagtcagtcaccagcatataattcccagtatcttctcagaccagcagctaatgttactcccacaaaggtaacaaaggaataatttatacatttataattattttctttttaaattgtttagggttccttcaaataaattcaagagagcagttcactattaaaacttttatgtcccttaaaatgtagatattttaaatttatctccaaatacagaaattatccttcttagtcaccttatttttgtgttagtaagtgtgaatatttagaatattttaaaaatcgggagtggctggtggctggatccttcatcgcttctagttttaacagaacatagaacgtgtaatgccctctgctgacccactatgtgttaagtactttcaggcctgatacagctatatatataacaattgattgaagactcaatattacagtggtagttgaatgtgacagctttgaggacagagtgttggggtgcatttagacccttgctcttctgcttattttgaccacaggcaagtttcttaacctctcaatgcatcagttgcctcatatgtaaaatgaggataataataataccttaactcatagggtttttgaggatattaaaatgagataataatgtaaagtgcttagaacagtgcccagctggcacattaatgaatgctcaataaatgttatcatcatcatcatcatcattattgttaacatcatttgataaattgtttaggaatgaagaaggtatttatttcatgactattttgggcatgtggatcaagaaaattcaccttcatttatgtttcagggttcttctaatacagaatttaagtcaaccaaagaaggattttccatccctgtgtctgctgatggatttaaatttggcatttcggaaccaggaaatcaagaaaagaaaagggaaaagcctcttgaaaatgatactggcttccaggctcaggatattagtggccggaagaagggccgtggtgtgatttttggccaaacaagtagcacttttacatttgcagatgttgcaaaatcaacttcaggagaaggatttcagtttggcaaaaaagacctcaatttcaagggattttcaggtgctggagaaaaattattctcatcacgatacggtaaaatggccaataaagcaaacacttccggtgactttgagaaagatgatgatgcctataagactgaggacagcgatgacatccattttgaaccagtagttcaaatgcgtgaaaaagtagaacttgtaacaggagaagaaggtgaaaaagttctgtattcacagggggtaaaactatttagatttgatgctgaggtaaggcagtggaaagaaaggggcttggggaacttaaaaattctcaaaaacgaggtcaatggcaaactaagaatgctgatgcgaagagaacaagtactaaaagtgtgtgctaatcattggataacgactacaatgaacctgaagcccctctctggatcagatagagcatggatgtggtcagccagtgatttctctgacggtgatgccaaactagagcggttggcagcaaaatttaaaacaccagagctggctgaagaattcaagcagaaatttgaggaatgccagcggcttctgttagacataccacttcaaactccccataaacttgtagatactggcagagctgccaagttaatacagagagctgaagaaatgaagagtggactgaaagatttcaaaacatttttgacaaatgatcaaacaaaagtcactgaggaagaaaataagggttcaggtacaggtgcggccggtgcctcagacacaacaataaaacccaatgctgaaaacactgggcccacattagaatgggataactatgacttaagggaagatgctttggatgatagtgtcagtagtagctcagtacatgcttctccattggcaagtagccctgtgagaaaaaatcttttccgctttgatgagtcaacaacaggatctaacttcagttttaaatctgctttgagtctatctaagtctcctgccaagttgaatcagagtgggacttcagttggcactgatgaagaatctgttgttactcaagaagaagagagagatggacagtactttgaacctgttgttcctttacctgatctagttgaagtatccagtggtgaggaaaatgaacaagttgtttttagtcacagggcagaaatctacagatatgataaagatgttggtcaatggaaagaaaggggcattggtgatataaagattttacagaattatgataataagcaagttcgtatagtgatgagaagggaccaagtattaaaactttgtgccaatcacagaataactccagacatgagtttgcaaaatatgaaagggacagaaagagtatgggtgtggactgcatgtgattttgcagatggagaaagaaaagtagagcatttagctgttcgttttaaactacaggatgttgcagactcgtttaagaaaatttttgatgaagcaaaaacagcccaggaaaaagattctttgataacacctcatgtttctcggtcaagcactcccagagagtcaccatgtggcaaaattgctgtagctg

SEQ ID NO: 706018 - DNA, 3802 bp, Homo sapiens
cacaatgcaacctcgtcattttgcagattttcaaggctcacttcaaaaacatgttccttgaggcctattaacatttctttcctaaattgtctattcatatggtgctttaaaaaattagattacttttagtagatttattagagccgcacagtttagagtcagtagtcaattaaagtccctacttaaacttcagactaagatttttttttatttaatattttattttttctttttgctttcatgcagacagacatcttgcaagactttaagattcttgggccatttctgtcaggttgttctgtgttctgtgcctgcttcctccccatagtaatttcaaaatagctatcctcacctctgtaaggtttccgaaatcaaacttgggcttctggctagccttttctaggtcttgatttttcagtgctttccagaggcaattgtttggaacctcttggcacagtttctgtttctccttccatgtacaggcataaaaggtcttttggttgttttctggtaaaactatcataaaacagttcaagcaaatgactattggtagttttgtcattaacatgggtgccttctagtcattttgtttcctggtaaaacagaccaaacagagggagcagacagtttgtacatctgtatgagtgttgatgtgctttttattttaagccagggaacacattttatgttatttatgacatcctttccatgaatttgtcaggtgatttttgagctgaacattctgagtaatagctttagtttacaaaatacaacctagtctttctgcagattttctaggcccacttcaaatgcattgactatcagatggcatcttggttccttacgtcctttctgtgactgaatgtccataattccacatcatactgatctttcttagaaaaggcaacagttactatcttctttattccttttttaatgcttgcgaggtagttcttgttgatcacagcgatgctattctctcattcttcatgtcatatttagcaatttttttctagtttgtcatttgataatcttgattggtgtattttgatgtacagaaatttaaaatttatgtagttaaatctttctttaacttctattgcttttgtatttatagctcttgcctagatagtcttaactgtagtatagactttaacagtgttttcttttcttttttttttttcagttgcaactactggcccttcagtatattatagtcagtcaccagcatataattcccagtatcttctcagaccagcagctaatgttactcccacaaaggtaacaaaggaataatttatacatttataattattttctttttaaattgtttagggttccttcaaataaattcaagagagcagttcactattaaaacttttatgtcccttaaaatgtagatattttaaatttatctccaaatacagaaattatccttcttagtcaccttatttttgtgttagtaagtgtgaatatttagaatattttaaaaatcgggagtggctggtggctggatccttcatcgcttctagttttaacagaacatagaacgtgtaatgccctctgctgacccactatgtgttaagtactttcaggcctgatacagctatatatataacaattgattgaagactcaatattacagtggtagttgaatgtgacagctttgaggacagagtgttggggtgcatttagacccttgctcttctgcttattttgaccacaggcaagtttcttaacctctcaatgcatcagttgcctcatatgtaaaatgaggataataataataccttaactcatagggtttttgaggatattaaaatgagataataatgtaaagtgcttagaacagtgcccagctggcacattaatgaatgctcaataaatgttatcatcatcatcatcatcattattgttaacatcatttgataaattgtttaggaatgaagaaggtatttatttcatgactattttgggcatgtggatcaagaaaattcaccttcatttatgtttcagggttcttctaatacagaatttaagtcaaccaaagaaggattttccatccctgtgtctgctgatggatttaaatttggcatttcggaaccaggaaatcaagaaaagaaaagggaaaagcctcttgaaaatgatactggcttmcaggctcaggatattagtggccggaagaagggccgtggtgtgatttttggccaaacaagtagcacttttacatttgcagatgttgcaaaatcaacttcaggagaaggatttcagtttggcaaaaaagacctcaatttcaagggattttcaggtgctggagaaaaattattctcatcacgatacggtaaaatggccaataaagcaaacacttccggtgactttgagaaagatgatgatgcctataagactgaggacagcgatgacatccattttgaaccagtagttcaaatgcgtgaaaaagtagaacttgtaacaggagaagaaggtgaaaaagttctgtattcacagggggtaaaactatttagatttgatgctgaggtaaggcagtggaaagaaaggggcttggggaacttaaaaattctcaaaaacgaggtcaatggcaaactaagaatgctgatgcgaagagaacaagtactaaaagtgtgtgctaatcattggataacgactacaatgaacctgaagcccctctctggatcagatagagcatggatgtggtcagccagtgatttctctgacggtgatgccaaactagagcggttggcagcaaaatttaaaacaccagagctggctgaagaattcaagcagaaatttgaggaatgccagcggcttctgttagacataccacttcaaactccccataaacttgtagatactggcagagctgccaagttaatacagagagctgaagaaatgaagagtggactgaaagatttcaaaacatttttgacaaatgatcaaacaaaagtcactgaggaagaaaataagggttcaggtacaggtgcggccggtgcctcagacacaacaataaaacccaatgctgaaaacactgggcccacattagaatgggataactatgacttaagggaagatgctttggatgatagtgtcagtagtagctcagtacatgcttctccattggcaagtagccctgtgagaaaaaatcttttccgctttgatgagtcaacaacaggatctaacttcagttttaaatctgctttgagtctatctaagtctcctgccaagttgaatcagagtgggacttcagttggcactgatgaagaatctgttgttactcaagaagaagagagagatggacagtactttgaacctgttgttcctttacctgatctagttgaagtatccagtggtgaggaaaatgaacaagttgtttttagtcacagggcagaaatctacagatatgataaagatgttggtcaatggaaagaaaggggcattggtgatataaagattttacagaattatgataataagcaagttcgtatagtgatgagaagggaccaagtattaaaactttgtgccaatcacagaataactccagacatgagtttgcaaaatatgaaagggacagaaagagtatgggtgtggactgcatgtgattttgcagatggagaaagaaaagtagagcatttagctgttcgttttaaactacaggatgttgcagactcgtttaagaaaatttttgatgaagcaaaaacagcccaggaaaaagattctttgataacacctcatgtttctcggtcaagcactcccagagagtcaccatgtggcaaaattgctgtagctg

SEQ ID NO: 706019 - DNA, 3802 bp, Homo sapiens
cacaatgcaacctcgtcattttgcagattttcaaggctcacttcaaaaacatgttccttgaggcctattaacatttctttcctaaattgtctattcatatggtgctttaaaaaattagattacttttagtagatttattagagccgcacagtttagagtcagtagtcaattaaagtccctacttaaacttcagactaagatttttttttatttaatattttattttttctttttgctttcatgcagacagacatcttgcaagactttaagattcttgggccatttctgtcaggttgttctgtgttctgtgcctgcttcctccccatagtaatttcaaaatagctatcctcacctctgtaaggtttccgaaatcaaacttgggcttctggctagccttttctaggtcttgatttttcagtgctttccagaggcaattgtttggaacctcttggcacagtttctgtttctccttccatgtacaggcataaaaggtcttttggttgttttctggtaaaactatcataaaacagttcaagcaaatgactattggtagttttgtcattaacatgggtgccttctagtcattttgtttcctggtaaaacagaccaaacagagggagcagacagtttgtacatctgtatgagtgttgatgtgctttttattttaagccagggaacacattttatgttatttatgacatcctttccatgaatttgtcaggtgatttttgagctgaacattctgagtaatagctttagtttacaaaatacaacctagtctttctgcagattttctaggcccacttcaaatgcattgactatcagatggcatcttggttccttacgtcctttctgtgactgaatgtccataattccacatcatactgatctttcttagaaaaggcaacagttactatcttctttattccttttttaatgcttgcgaggtagttcttgttgatcacagcgatgctattctctcattcttcatgtcatatttagcaatttttttctagtttgtcatttgataatcttgattggtgtattttgatgtacagaaatttaaaatttatgtagttaaatctttctttaacttctattgcttttgtatttatagctcttgcctagatagtcttaactgtagtatagactttaacagtgttttcttttcttttttttttttcagttgcaactactggcccttcagtatattatagtcagtcaccagcatataattcccagtatcttctcagaccagcagctaatgttactcccacaaaggtaacaaaggaataatttatacatttataattattttctttttaaattgtttagggttccttcaaataaattcaagagagcagttcactattaaaacttttatgtcccttaaaatgtagatattttaaatttatctccaaatacagaaattatccttcttagtcaccttatttttgtgttagtaagtgtgaatatttagaatattttaaaaatcgggagtggctggtggctggatccttcatcgcttctagttttaacagaacatagaacgtgtaatgccctctgctgacccactatgtgttaagtactttcaggcctgatacagctatatatataacaattgattgaagactcaatattacagtggtagttgaatgtgacagctttgaggacagagtgttggggtgcatttagacccttgctcttctgcttattttgaccacaggcaagtttcttaacctctcaatgcatcagttgcctcatatgtaaaatgaggataataataataccttaactcatagggtttttgaggatattaaaatgagataataatgtaaagtgcttagaacagtgcccagctggcacattaatgaatgctcaataaatgttatcatcatcatcatcatcattattgttaacatcatttgataaattgtttaggaatgaagaaggtatttatttcatgactattttgggcatgtggatcaagaaaattcaccttcatttatgtttcagggttcttctaatacagaatttaagtcaaccaaagaaggattttccatccctgtgtctgctgatggatttaaatttggcatttcggaaccaggaaatcaagaaaagaaaagggaaaagcctcttgaaaatgatactggcttccaggctcaggatattagkggccggaagaagggccgtggtgtgatttttggccaaacaagtagcacttttacatttgcagatgttgcaaaatcaacttcaggagaaggatttcagtttggcaaaaaagacctcaatttcaagggattttcaggtgctggagaaaaattattctcatcacgatacggtaaaatggccaataaagcaaacacttccggtgactttgagaaagatgatgatgcctataagactgaggacagcgatgacatccattttgaaccagtagttcaaatgcgtgaaaaagtagaacttgtaacaggagaagaaggtgaaaaagttctgtattcacagggggtaaaactatttagatttgatgctgaggtaaggcagtggaaagaaaggggcttggggaacttaaaaattctcaaaaacgaggtcaatggcaaactaagaatgctgatgcgaagagaacaagtactaaaagtgtgtgctaatcattggataacgactacaatgaacctgaagcccctctctggatcagatagagcatggatgtggtcagccagtgatttctctgacggtgatgccaaactagagcggttggcagcaaaatttaaaacaccagagctggctgaagaattcaagcagaaatttgaggaatgccagcggcttctgttagacataccacttcaaactccccataaacttgtagatactggcagagctgccaagttaatacagagagctgaagaaatgaagagtggactgaaagatttcaaaacatttttgacaaatgatcaaacaaaagtcactgaggaagaaaataagggttcaggtacaggtgcggccggtgcctcagacacaacaataaaacccaatgctgaaaacactgggcccacattagaatgggataactatgacttaagggaagatgctttggatgatagtgtcagtagtagctcagtacatgcttctccattggcaagtagccctgtgagaaaaaatcttttccgctttgatgagtcaacaacaggatctaacttcagttttaaatctgctttgagtctatctaagtctcctgccaagttgaatcagagtgggacttcagttggcactgatgaagaatctgttgttactcaagaagaagagagagatggacagtactttgaacctgttgttcctttacctgatctagttgaagtatccagtggtgaggaaaatgaacaagttgtttttagtcacagggcagaaatctacagatatgataaagatgttggtcaatggaaagaaaggggcattggtgatataaagattttacagaattatgataataagcaagttcgtatagtgatgagaagggaccaagtattaaaactttgtgccaatcacagaataactccagacatgagtttgcaaaatatgaaagggacagaaagagtatgggtgtggactgcatgtgattttgcagatggagaaagaaaagtagagcatttagctgttcgttttaaactacaggatgttgcagactcgtttaagaaaatttttgatgaagcaaaaacagcccaggaaaaagattctttgataacacctcatgtttctcggtcaagcactcccagagagtcaccatgtggcaaaattgctgtagctg

SEQ ID NO: 706020 - DNA, 3802 bp, Homo sapiens
cacaatgcaacctcgtcattttgcagattttcaaggctcacttcaaaaacatgttccttgaggcctattaacatttctttcctaaattgtctattcatatggtgctttaaaaaattagattacttttagtagatttattagagccgcacagtttagagtcagtagtcaattaaagtccctacttaaacttcagactaagatttttttttatttaatattttattttttctttttgctttcatgcagacagacatcttgcaagactttaagattcttgggccatttctgtcaggttgttctgtgttctgtgcctgcttcctccccatagtaatttcaaaatagctatcctcacctctgtaaggtttccgaaatcaaacttgggcttctggctagccttttctaggtcttgatttttcagtgctttccagaggcaattgtttggaacctcttggcacagtttctgtttctccttccatgtacaggcataaaaggtcttttggttgttttctggtaaaactatcataaaacagttcaagcaaatgactattggtagttttgtcattaacatgggtgccttctagtcattttgtttcctggtaaaacagaccaaacagagggagcagacagtttgtacatctgtatgagtgttgatgtgctttttattttaagccagggaacacattttatgttatttatgacatcctttccatgaatttgtcaggtgatttttgagctgaacattctgagtaatagctttagtttacaaaatacaacctagtctttctgcagattttctaggcccacttcaaatgcattgactatcagatggcatcttggttccttacgtcctttctgtgactgaatgtccataattccacatcatactgatctttcttagaaaaggcaacagttactatcttctttattccttttttaatgcttgcgaggtagttcttgttgatcacagcgatgctattctctcattcttcatgtcatatttagcaatttttttctagtttgtcatttgataatcttgattggtgtattttgatgtacagaaatttaaaatttatgtagttaaatctttctttaacttctattgcttttgtatttatagctcttgcctagatagtcttaactgtagtatagactttaacagtgttttcttttcttttttttttttcagttgcaactactggcccttcagtatattatagtcagtcaccagcatataattcccagtatcttctcagaccagcagctaatgttactcccacaaaggtaacaaaggaataatttatacatttataattattttctttttaaattgtttagggttccttcaaataaattcaagagagcagttcactattaaaacttttatgtcccttaaaatgtagatattttaaatttatctccaaatacagaaattatccttcttagtcaccttatttttgtgttagtaagtgtgaatatttagaatattttaaaaatcgggagtggctggtggctggatccttcatcgcttctagttttaacagaacatagaacgtgtaatgccctctgctgacccactatgtgttaagtactttcaggcctgatacagctatatatataacaattgattgaagactcaatattacagtggtagttgaatgtgacagctttgaggacagagtgttggggtgcatttagacccttgctcttctgcttattttgaccacaggcaagtttcttaacctctcaatgcatcagttgcctcatatgtaaaatgaggataataataataccttaactcatagggtttttgaggatattaaaatgagataataatgtaaagtgcttagaacagtgcccagctggcacattaatgaatgctcaataaatgttatcatcatcatcatcatcattattgttaacatcatttgataaattgtttaggaatgaagaaggtatttatttcatgactattttgggcatgtggatcaagaaaattcaccttcatttatgtttcagggttcttctaatacagaatttaagtcaaccaaagaaggattttccatccctgtgtctgctgatggatttaaatttggcatttcggaaccaggaaatcaagaaaagaaaagggaaaagcctcttgaaaatgatactggcttccaggctcaggatattagtggccggaagaagggccgtggtgtgatttttggccaaacaagtagcacttttacatttgcagatgttgcaaaatcaacttcaggagaaggatttcagtttggcaaaaaagacctcaatttcaagggattttcaggtgctggagaaaaattattctcatcacgatacggtaaaatggccaataaagcaaacacttccggtgactttgagaaagatgatgatgcctataagactgaggacagcgatgacatccattttgaaccagtagttcaaatgcgtgaaaaagtagaacttgtaacaggagaagaaggtgaaaaagttctgtattcacagggggtaaaactatttagatttgatgctgaggtaaggcagtggaaagaaaggggcttggggaacttaaaaattctcaaaaacgaggtcaatggcaaactaagaatgctgatgcgaagagaacaagtactaaaagtgtgtgctaatcattggataacgactacaatgaacctgaagcccctctctggatcagatagagcatggatgtggtcagccagtgatttctctgayggtgatgccaaactagagcggttggcagcaaaatttaaaacaccagagctggctgaagaattcaagcagaaatttgaggaatgccagcggcttctgttagacataccacttcaaactccccataaacttgtagatactggcagagctgccaagttaatacagagagctgaagaaatgaagagtggactgaaagatttcaaaacatttttgacaaatgatcaaacaaaagtcactgaggaagaaaataagggttcaggtacaggtgcggccggtgcctcagacacaacaataaaacccaatgctgaaaacactgggcccacattagaatgggataactatgacttaagggaagatgctttggatgatagtgtcagtagtagctcagtacatgcttctccattggcaagtagccctgtgagaaaaaatcttttccgctttgatgagtcaacaacaggatctaacttcagttttaaatctgctttgagtctatctaagtctcctgccaagttgaatcagagtgggacttcagttggcactgatgaagaatctgttgttactcaagaagaagagagagatggacagtactttgaacctgttgttcctttacctgatctagttgaagtatccagtggtgaggaaaatgaacaagttgtttttagtcacagggcagaaatctacagatatgataaagatgttggtcaatggaaagaaaggggcattggtgatataaagattttacagaattatgataataagcaagttcgtatagtgatgagaagggaccaagtattaaaactttgtgccaatcacagaataactccagacatgagtttgcaaaatatgaaagggacagaaagagtatgggtgtggactgcatgtgattttgcagatggagaaagaaaagtagagcatttagctgttcgttttaaactacaggatgttgcagactcgtttaagaaaatttttgatgaagcaaaaacagcccaggaaaaagattctttgataacacctcatgtttctcggtcaagcactcccagagagtcaccatgtggcaaaattgctgtagctg

SEQ ID NO: 706021 - DNA, 3146 bp, Homo sapiens
acatttggttaaaaacctatccacacattaaggtgcacactccctgggttcctcctccctggtatcctctggggccccagcccagctggagtccccaagttctcggcgccctgaactaaccagtctctccacccagctttctccaaaacacgccccacacaagggctgagctcctccacagcggatgcaacactccactgcttcccatcgaggccccctgcctcctccaggctgatgagcagccccttccccactgctgcccacagccctagccctggaagccactcttctgagaaggctttgcctcctcgtacctgccgaggcccctccaggcccatgctgagggccaatgagagccacgcagtcaactacacggtgaccttcggccagtgtgagtacacgcagctctgcagagctgctgtctaccaatcagctccaggacacctggggctcagacaggtgcactctccttctgccctttctttgtactctgttttgacccataaggactgaccaaaaggataggaataggccttaaaatgtttgctttactgcagctggaggaaagggtagaggcacctgaaggtcaagatcagggatctgtagcattttctggcaccatgaagtaaagtctaaaaaggcctggaggaagccgcccactggcctgcgcatgtcccctggcagttgatttgaagacaagcaaaagcatcagcgggcactactgggcagcatccttagggagactaaactgctagtgcctctgcatccctccctgcctgtgttagcctaccttcaccaaacaagatccacactttattccctccatgtttctattcacagtcttcccaccacgtgtctttcctcctttccatttcctcctgaaattctactccaggacccatttcaaatgccaccccaccatgaatatcttactttcaacaggatgtgcccatgccccctcaagcgggcagtgtcagccttggattgcaggtatttatgggtatggcttattctcctattaagttcccaaaaaacacactgtcctttgcatcctgtacagcagggtttcctaaactgcaggtttcagcctatgaatgggaaattttaaaaaaaagaaagagaaagaaagaggacaggaaatatccaagtgtatcacacatagtaataagcgttatttcatgatgctcttgtttcacttacgtgtatgcatgttcaaggggtggtgggtggcagtgttaaacgtgtatttgttactgggggtcatggtctgaagcatttgaaagtcactgccctgatggtacctctcctctgtctaatattctgtgaatgcttattgaattgaacaggttgatgagtatgaaatgatccatgtattataacttcaaaggctccaacttaaaggaatataaagaataatgcctatctgaacaaaagtgtgtggattctggcttatatgaagctgtggaggaatggggtgagtggtagggaagatcagaatatttattatactattgtatgttgatagactttctctccaatgattaaaatgtgttaacatttaaggaagatgaaatacaagttcattttggaaaacttttctcattcactgaaactacctcatgactacaaagttctgcatctttaaaagagacagtataggtaattccaccatgatgcataaaatgatcttttagagacaccatgaaagcccttgttcaagttttctttgcccaagatgtctccctgtactctcaatacccccacccacaccatctgtcttccaagacttagttcaaaggccacctatttcatggaagcctttgttttttaattcaatttttcctctttccatcctccacccaagtcccaaatatggtctcttttctgaatcaccagtgttgaaaacttcctttttcatgtgtgttcttgtcttaatttcctcatttgacaataacactaatatgtacaacctacgccttactcatccttgcatctcccacagaaaccagcacaaggtcttctacttaagagatgatcaataaatatttgttaaacgaattaaatgaaagcaacagttagcctgttaaaagggatggtcattattttaaaggccctgaggaatggcttatatgtctagcacctaatcaaaagctggtggaccacagaaggaagaccagggagtggagggggcagccttgcgcctctgcatatctgctgcccctgtaaactcacggaatgcccaactcttcaagactctacagaacaaagctacagtgtcgggtgctgaatgaacaccttcacctttttctaagttctccagtcttgcttcaaaccagaaaytggaagtggaattagaggtggaaattagggccatccttttcaactttaaggtatggctgaaaaagttgaaacagccatctggataattcaggctcaaaaaacccatcctgaagagtaagtatggatgtttctgagtggcaggaagagcgtgcaagaaggcaaaggaggtagttgtgaattatcaattgattgtgtatattgattatattcaacagaactgagcttttccctttatattttctatacagtcatttgaggacactctctgtgactgcaagaataaactagctcagattcaaagccacagtcaccactaataaattccaatttgttcaattggaaaatgatgtccatcaattagaaaaagttcttagggattaaaataagattctcttttgccattaatctgtacctcctccttcctccttcaaaaaagtttttctatgatcaatcaaaggaagaagctttcaatggtctttaaaatgtatattgctctaatacaataattcataattaacaggtatactttcctaactatggtagtttattttcaaatttttaattttaataccatttagggctctctctctttgttattttagtaggaccttaacttccagtccatcgaggttttgttttgtaattaatttcggagctgtccttataagctgagagatatgtgaagtactctagaaaatggcaattgtctgactggatttgaagtcagatcactgggctttgaagctaatttctggttgaaatatggctgccccatttttagatgtgtgactctgggcaggttaccc

SEQ ID NO: 706022 - DNA, 656 bp, Homo sapiens
ggcttagcttttatgagtctgccactttggaaacaaatcacacgtccygtgttccatcagcctgtggcgcagtgtggaatttctggtataacagcatttagctgctgaggaaacatgtctggctttgcttccttgggagagggtgcaaaggaagaaagccgcagcgtgtacacaaaagaaagttcgtgttccgagggaggtttttaatgtccttgtaaatactaaccagtgtctactcagaagtcttcaagaaggaacttgtagtaatgatatgaattaatatttctggcagttccagaaatgcagttgccccatcttgttttggggcagctcacatcctgatcacagcggcacattctgtgtgatcttagtgatgctgcaccagccctcttggtggcatctgtgacttgataggcattcatctcaggtgagcaaggctgctgagctgggtgaggagaggcctagctagaaaggtgcccacatctggcattgtgctagaagggccgccttcccctgaagctgggccagtgacaatcaggagagggagggcttttgccagaaagcagtgccctgctgtgaggtcccagcctgaaggggctctcagatcttctggggagaagagcaaatcaggtaaccttggcaactcacatctttgg

SEQ ID NO: 706023 - DNA, 644 bp, Homo sapiens
agtatgatattatctgttggtttttcatagatgccctttatcaggttaaggaagtttccttctgttcctagtttgttgagtgtttttaagcacaaaaggatgtgtgatttttgtcaaaggcttttctacatgtattgagatggtcatatgggttttaatctattaatactttaatatactttaatagactttaatctattaatatacttttatatactttaatacattgactgatttttatatgttgaaccaaccttgcattcctggactatgtcacttggttatggtatataatccttttatatatcactggatttgttttgctagtattttgttgaatgacttcctttttcagaaacagttgcctattttcttctttgataatgaaagttcatgaacacttgagataaaaataaaggaatatgactttctcaggacatgcccatggaaacatgaaagcattgtttctgcatattctctgaatgatagtcctgtaagtaagaataatcaaatctcaaaagagatttgagtacttgagtactcaagttcagaaacttttatgtaatgattttctgaagaattttaacttgacacctgcttaagaaattctcacataatgtaatttcttatrtgacacatttaga

SEQ ID NO: 706024 - DNA, 825 bp, Homo sapiens
gtgtagaggtggcaccaggggttccatgaaaaagaaggcttgtccggagtggaaactaatcctgaaagagattgacaaaagatgaggtttctgagtttcctatatatgtttttaaactgtatgcactcccctacccattcccatatcaagcagcagaacattaaacattattggcttcaggtgtcaaaagattgaaacgttcaaggcttgcagaacaactggtaatttaaataagtatccaaacaagaaatagataggtaatcctccttccaaaatctaatcataaaacctccccaaattattgggtaattatcaaaccaaatagtcacagcaacgatccacagggccaggataaaacagcagcagctggaatctatctgtactaagtaaaagtagctgctgtactctgggagagaagaaattcaagtgcaagcaagttaactgactatggatcaaacaacaacaacaacaaaaagtcatcaaaatcatataacaaaatccagggtcgacacgatgtattatctaaaatgtcatgttttcaaacaaaaattactayggatgaaagacatgaaagtaggacccatactcagaaaaatatatcagttaagagaaattgatgataagcagttgaatttaatgtactatgactttaaaacaactactgtaaataatcttcaagaatattaaaagttgttttcaaacaactaaaaaaaatcctactgtgaatagataagatatattaatagatgatttacaactatacaaaatggaaattctagaactaaaaactaatactgaaattaaaaattcagtaggtgccataaa

SEQ ID NO: 706025 - DNA, 825 bp, Homo sapiens
gtgtagaggtggcaccaggggttccatgaaaaagaaggcttgtccggagtggaaactaatcctgaaagagattgacaaaagatgaggtttctgagtttcctatatatgtttttaaactgtatgcactcccctacccattcccatatcaagcagcagaacattaaacattattggcttcaggtgtcaaaagattgaaacgttcaaggcttgcagaacaactggtaatttaaataagtatccaaacaagaaatagataggtaatcctccttccaaaatctaatcataaaacctccccaaattattgggtaattatcaaaccaaatagtcacagcaacgatccacagggccaggataaaacagcagcagctggaatctatctgtactaagtaaaagtagctgctgtactctgggagagaagaaattcaagtgcaagcaagttaactgactatggatcaaacaacaacaacaacaaaaagtcatcaaaatcatataacaaaatccagggtcgacacgatgtattatctaaaatgtcatgttttcaaacaaaaattactacggatgaaagacatgaaagtaggacccmtactcagaaaaatatatcagttaagagaaattgatgataagcagttgaatttaatgtactatgactttaaaacaactactgtaaataatcttcaagaatattaaaagttgttttcaaacaactaaaaaaaatcctactgtgaatagataagatatattaatagatgatttacaactatacaaaatggaaattctagaactaaaaactaatactgaaattaaaaattcagtaggtgccataaa

SEQ ID NO: 706026 - DNA, 825 bp, Homo sapiens
gtgtagaggtggcaccaggggttccatgaaaaagaaggcttgtccggagtggaaactaatcctgaaagagattgacaaaagatgaggtttctgagtttcctatatatgtttttaaactgtatgcactcccctacccattcccatatcaagcagcagaacattaaacattattggcttcaggtgtcaaaagattgaaacgttcaaggcttgcagaacaactggtaatttaaataagtatccaaacaagaaatagataggtaatcctccttccaaaatctaatcataaaacctccccaaattattgggtaattatcaaaccaaatagtcacagcaacgatccacagggccaggataaaacagcagcagctggaatctatctgtactaagtaaaagtagctgctgtactctgggagagaagaaattcaagtgcaagcaagttaactgactatggatcaaacaacaacaacaacaaaaagtcatcaaaatcatataacaaaatccagggtcgacacgatgtattatctaaaatgtcatgttttcaaacaaaaattactacggatgaaagacatgaaagtaggacccatactcagaaaaatatatcagttaagagaaattgatgataagcagttgaatttaatgtactatgactttaaaacaactactgtaaataatcttcaagaatattaaaagttgttttcaaacaactaaaamaaatcctactgtgaatagataagatatattaatagatgatttacaactatacaaaatggaaattctagaactaaaaactaatactgaaattaaaaattcagtaggtgccataaa

SEQ ID NO: 706027 - DNA, 623 bp, Homo sapiens
  misc_feature 568: n = A,T,C or G
cttcaggttgtttttagatgtgcaatatattgtttgctctccctgtcctcagtttttttatttgaaaaatgaggtctaatcccactttcatctggttcattcattttagaaaagttttgtttattaattgagagattggttgatatactcaacaagtgtttatacatgcaacaaacacctgtgctaggtagatatggagaagcatgataatattcacctggaactcaaaaagcttgcagcccaggtggtaaaggagcttttaaaaaggaagggcaggccaggcgtggtggctcacacctgtaatcccagcactttgggagaccgaggcaggcggatcmcttgaggtcaggagtttgagaccagcctggccaacatggtgaaccccatgtctactaaaaatacaaaaattagctgggcatggtggcacacacctgtaatcccagctgctccagaggctgaggcaggataatcgcttgaacccaggaggcagagctgcagtgagccgagattgtgccactgtactccagcctgggtgacagagcaagactctgtctcaaaaaataaaaanaataaaaagaacggcatgggtgtggccatgcctgaatgttaatatgttgaaatcc

SEQ ID NO: 706028 - DNA, 1807 bp, Homo sapiens
taaattttttcatatttgtatgtaaatgaaaatattatacataaagaatacatttgctgtgacattgcattagtgagaattgtgttatagcatagctcataacataagtatattcaagaaggaagttaaaccacagggtgattttcatattgccccaacatactgatgtattcaacaagacttagaaaatacagttgctctccccctttgacaccctttactgcctatgttaattcactcactagatacaaatataacaggctttcatctctgtttataataggcttctccagctcacacaactccacagacccaaagtacaagtggtcgtcggagaagagcagctaacgaagatcctgatgaaaaaaggagaaagtttttagagcgaaatagagcagcagcttcaagatgccgacaaaaaaggaaagtctgggttcagtctttagagaagaaagctgaagacttgagttcattaaatggtcagctgcaggtatggtgcatatatgtgaattttgttttatttcttttttaataattgtgaacatagattttttttttcctagttgggcctccaaacattttaggacatgatattgggtgtgtatggaatctatagtaaatcatagttttgtaaacctgtttgtttggatgctgagatgaaataatataaaactttcaacactgatacagtgaagaaatttaaaatgtgtttacctgtgtacaaaagtagctaaactatccggtttgaactttataaagttgtgatataaagtgcagagaattttaaaatttaaaaatatcactgttatttcacttttcttgtctatttttttggtttatagcacaactataagtttcttcagtagcagtttttatttttaaattatttcattctttgaattataaattttgttctgttttgttttatttaaagtgaatatattgctcgtgaaaggtgccagattgacagctttggaaactgaaggactctaattatccacagaccaggtacaatatggccagtggcagtacagatcatttcatactgccctgccaatgtgcctcagatacatttcttaaaacctcatggagtataaagttttaaggcagcaccgaatctgtttcctttgtttttcttccttccttttgtttttgttgtgttttttaacgtaaatattctcctatataatcttaaactgccaactgataagtatcaaccagaaaattgatgttaatgaattgcagttattagtctagctcaatcttctgaattatccatacccagttaaaagtgaatctttctgtataatcataattgatggtaagagacctgctgtcttcttaaatctgtctttaagatatcaccaatatagttgtctgtttaaatggttaggaaacagtttttagcatcagacatagcatttaaccaaatgtaagttttataatttaaatttttttaatgtgaagcagacatctttaagtctttattttgctttgaatattgacatgatagaacaaatagattgtcttgcagaacttatttttaacgattttattttaatgatttagaagaaaattttaatacaacttaccacatcacatagacttaaaatatgtgcttatcttctagggtttattaagaaatatattttatcatttatcatctgataaattgtttttttgtttttgagacggagtctcactctatcacctgggctgaagtrcagtggtgcaatctcggctcactgcaacctccagctcccgggtgccagtgattctcctgcctcagcctcccaggtagctggga

SEQ ID NO: 706029 - DNA, 647 bp, Homo sapiens
cctccactctccctcccctcctccactcccctacctctccctccccctacctccaccccctctgccccaatgccccccaccccagactcctcaggagaatcccatctttgtcagactagttcctaagctatggctgcaaaagttggaattcgagtggggaggagccgagagggccagggactgccgtgtcagatttactctgagagctactgggagaacagtgaggaacagatctggagggttaaagaaaagggggagaaagacaagagccagtgtgggctgggtctggaaaatcagaaagaggctaaagttgtcaggagtttgaaagaagctgaagaggaatgggatagagagagatacgttgttatgtgctgcatagtaacatctcagtcaacaacagactgcrtgtgcgactgttgtcccatgagtatcatggagctgccctctacaggtgtaccattttttatcttttatacagtattttaaatgtaccttttctatgtttagaccacatatattcaccattgtgttacaactgcctgcagcgttcagtacagtaacatgctatagaggtttgtagcctaagagcactaggctgtagccagagtgtttagtaggctatgccgtctaggtttgtgtaagtaaat

SEQ ID NO: 706030 - DNA, 640 bp, Homo sapiens
cacccgcagtagctgggggatggrtgcacagacctggtgaaagggaacctgggaatctgaacagggcaccaagggagtccctgctggtattccataggagccatttgaattgtagaattgcctcccatctatctggtgtctgccaaggctttaagctgttgtactttggggacatacaaatctgaccgcaccttccttccgcttgcaaacctggcttatttgttttcttgcccaggcatgcccctggatctgccatgccaggcagctgccttacagatctcataagatttttgatgttactttttcctgtccactgaaagagttgtgttatatttttcaactctcatttgaaacaagggaagggaaaaaaatgtttactgaacagaaaataaaagttaatgggaagccaaattatttctgcagccttttatgggagagttacaagaaatgtcacagtaacacaaataactcgaccacatcttttgtaactccttggaaagccgtaaggccacaaccacagaaaaagtttcctgcagatcagatatttgatttctggagtgggggccttcgtgacacatactgttttcacctgggaaaggtgaaagaggcaacacagacccttgtgttgataatgtgacat

SEQ ID NO: 706031 - DNA, 653 bp, Homo sapiens
tcccccaatccctacattcgcccgcggctgcacccaggacgtggtgctcccagacagccgagtcatccccaaaggtgccctccatggcaggggaggagggtcytgggcagggcggtggtcccagcaggcagctcggaccttgttcttactgtcctctcctgcacgacagggaatgtctgtaacatcaacatcttcgcaatccatcacaacccctcagtctggccagaccctgaggtgctgcccctccctgtttctccatcccccgggcctggtcgggggaggggtcttgtcccggaaaaccagatactccctctctactccacccacatctgttttatgtgggggtggctgggtgtcctgagaggccccatcagcagccttaacttgcctccaccccaggtctatgaccccttccgcttcgacccagaaaacgcccagaagaggtcacctatggcttttattcctttctcggcggggcccaggtgaggccagggggtgtctgaggtgggcatgggctgagggtggcacagatggctgccttgtcagatgcctgacttgtaggaccacgtgtttctgtgataggggttttaaagaagatcctaggaaaaagggtgtgctcagagcctcctgccccgtctggtttcagttggggc

SEQ ID NO: 706032 - DNA, 653 bp, Homo sapiens
tcccccaatccctacattcgcccgcggctgcacccaggacgtggtgctcccagacagccgagtcatccccaaaggtgccctccatggcaggggaggagggtcctgggcagggcggtggtcccagcaggcagctcggaccttgtycttactgtcctctcctgcacgacagggaatgtctgtaacatcaacatcttcgcaatccatcacaacccctcagtctggccagaccctgaggtgctgcccctccctgtttctccatcccccgggcctggtcgggggaggggtcttgtcccggaaaaccagatactccctctctactccacccacatctgttttatgtgggggtggctgggtgtcctgagaggccccatcagcagccttaacttgcctccaccccaggtctatgaccccttccgcttcgacccagaaaacgcccagaagaggtcacctatggcttttattcctttctcggcggggcccaggtgaggccagggggtgtctgaggtgggcatgggctgagggtggcacagatggctgccttgtcagatgcctgacttgtaggaccacgtgtttctgtgataggggttttaaagaagatcctaggaaaaagggtgtgctcagagcctcctgccccgtctggtttcagttggggc

SEQ ID NO: 706033 - DNA, 653 bp, Homo sapiens
tcccccaatccctacattcgcccgcggctgcacccaggacgtggtgctcccagacagccgagtcatccccaaaggtgccctccatggcaggggaggagggtcctgggcagggcggtggtcccagcaggcagctcggaccttgttcttactgtcctctcctgcacgacagggaatgtctgtaacatcaacatcttcgcaatccatcacaacccctcagtctggccagaccctgaggtgctgcccctccctgtttctccatcccccgggcctggtcgggggaggggtcttgtcccggaaaaccagatactccctctctactccacccacatctgttttatgtgggggtggctgggtgtcctgagaggccccatcagcagccttaacttgcctccaccccaggtctatgaccccttccgcttcgacccmgaaaacgcccagaagaggtcacctatggcttttattcctttctcggcggggcccaggtgaggccagggggtgtctgaggtgggcatgggctgagggtggcacagatggctgccttgtcagatgcctgacttgtaggaccacgtgtttctgtgataggggttttaaagaagatcctaggaaaaagggtgtgctcagagcctcctgccccgtctggtttcagttggggc

SEQ ID NO: 706034 - DNA, 630 bp, Homo sapiens
tatgtttagtagagatggggtttcaccgtgttagccacgatggtttcgatgtaagaaggacccttttgagaaggcatttctctaagcgccgaacctgtgacttttgggaccctggacctcaacttgcagatgccttgtgtgctggtggaaaagtgtgtgtcaacccggctgggacacagtacctaggttatttggccaaacactgatgtagatgttgtttgtttttatataaacccaaactttatgagggtatcattaacaaataaaaattgtatccgtttacagtgtaccatgtgatattttgatacatgtatgmcaaatgatattgttgcaaagctaacattttttcaattttttttttgtttttttgagacggagtcttgctctgttgccaggctggagtgcaggggtgtgatctcggttcactgcaacctccgcctcccgggttcgagtgattctcctgcctcagcctcctgagtagctgagactacaggcacccgtcaccatgcccagctaattttttatttttagtagagatggggtttcaccatgttggccaggagggtctccatctcttgacctcatgatcctcccacctcagcctcccaaagtctgggattacaggtgtga

SEQ ID NO: 706035 - DNA, 630 bp, Homo sapiens
tatgtttagtagagatggggtttcaccgtgttagccacgatggtttcgatgtaagaaggacccttttgagaaggcatttctctaagcgccgaacctgtgacttttgggaccctggacctcaacttgcagatgccttgtgtgctggtggaaaagtgtgtgtcaacccggctgggacacagtacctaggttatttggccaaacactgatgtagatgttgtttgtttttatataaacccaaactttatgagggtatcattaacaaataaaaattgtatccgtttacagtgtaccatgtgatattttgatacatgtatgacaaatgatwttgttgcaaagctaacattttttcaattttttttttgtttttttgagacggagtcttgctctgttgccaggctggagtgcaggggtgtgatctcggttcactgcaacctccgcctcccgggttcgagtgattctcctgcctcagcctcctgagtagctgagactacaggcacccgtcaccatgcccagctaattttttatttttagtagagatggggtttcaccatgttggccaggagggtctccatctcttgacctcatgatcctcccacctcagcctcccaaagtctgggattacaggtgtga

SEQ ID NO: 706036 - DNA, 630 bp, Homo sapiens
tatgtttagtagagatggggtttcaccgtgttagccacgatggtttcgatgtaagaaggacccttttgagaaggcatttctctaagcgccgaacctgtgacttttgggaccctggacctcaacttgcagatgccttgtgtgctggtggaaaagtgtgtgtcaacccggctgggacacagtacctaggttatttggccaaacactgatgtagatgttgtttgtttttatataaacccaaactttatgagggtatcattaacaaataaaaattgtatccgtttacagtgtaccatgtgatattttgatacatgtatgacaaatgatattgttgcaaagctaacattttttcaattttttttttgtttttttgagayggagtcttgctctgttgccaggctggagtgcaggggtgtgatctcggttcactgcaacctccgcctcccgggttcgagtgattctcctgcctcagcctcctgagtagctgagactacaggcacccgtcaccatgcccagctaattttttatttttagtagagatggggtttcaccatgttggccaggagggtctccatctcttgacctcatgatcctcccacctcagcctcccaaagtctgggattacaggtgtga

SEQ ID NO: 706037 - DNA, 630 bp, Homo sapiens
tatgtttagtagagatggggtttcaccgtgttagccacgatggtttcgatgtaagaaggacccttttgagaaggcatttctctaagcgccgaacctgtgacttttgggaccctggacctcaacttgcagatgccttgtgtgctggtggaaaagtgtgtgtcaacccggctgggacacagtacctaggttatttggccaaacactgatgtagatgttgtttgtttttatataaacccaaactttatgagggtatcattaacaaataaaaattgtatccgtttacagtgtaccatgtgatattttgatacatgtatgacaaatgatattgttgcaaagctaacattttttcaattttttttttgtttttttgagacggagtctygctctgttgccaggctggagtgcaggggtgtgatctcggttcactgcaacctccgcctcccgggttcgagtgattctcctgcctcagcctcctgagtagctgagactacaggcacccgtcaccatgcccagctaattttttatttttagtagagatggggtttcaccatgttggccaggagggtctccatctcttgacctcatgatcctcccacctcagcctcccaaagtctgggattacaggtgtga

SEQ ID NO: 706038 - DNA, 630 bp, Homo sapiens
tatgtttagtagagatggggtttcaccgtgttagccacgatggtttcgatgtaagaaggacccttttgagaaggcatttctctaagcgccgaacctgtgacttttgggaccctggacctcaacttgcagatgccttgtgtgctggtggaaaagtgtgtgtcaacccggctgggacacagtacctaggttatttggccaaacactgatgtagatgttgtttgtttttatataaacccaaactttatgagggtatcattaacaaataaaaattgtatccgtttacagtgtaccatgtgatattttgatacatgtatgacaaatgatattgttgcaaagctaacattttttcaattttttttttgtttttttgagacggagtcttgctctgttgccaggctggagtgcaggggtgtgatctcggttcactgcaacctccgcctcccgggttcragtgattctcctgcctcagcctcctgagtagctgagactacaggcacccgtcaccatgcccagctaattttttatttttagtagagatggggtttcaccatgttggccaggagggtctccatctcttgacctcatgatcctcccacctcagcctcccaaagtctgggattacaggtgtga

SEQ ID NO: 706039 - DNA, 630 bp, Homo sapiens
tatgtttagtagagatggggtttcaccgtgttagccacgatggtttcgatgtaagaaggacccttttgagaaggcatttctctaagcgccgaacctgtgacttttgggaccctggacctcaacttgcagatgccttgtgtgctggtggaaaagtgtgtgtcaacccggctgggacacagtacctaggttatttggccaaacactgatgtagatgttgtttgtttttatataaacccaaactttatgagggtatcattaacaaataaaaattgtatccgtttacagtgtaccatgtgatattttgatacatgtatgacaaatgatattgttgcaaagctaacattttttcaattttttttttgtttttttgagacggagtcttgctctgttgccaggctggagtgcaggggtgtgatctcggttcactgcaacctccgcctcccgggttcgagtgattctcctgcctcagcctcctgagtagctgrgactacaggcacccgtcaccatgcccagctaattttttatttttagtagagatggggtttcaccatgttggccaggagggtctccatctcttgacctcatgatcctcccacctcagcctcccaaagtctgggattacaggtgtga

SEQ ID NO: 706040 - DNA, 2066 bp, Homo sapiens
tggaggatcctcttctaagatggttcactcacatggttgtggcagaaagcctcagctatttgctggctattggtaggaggtctcaattctagagctctccacaggctgcttgagtgcccttaggatatgacagctggcttccctcagtacaaatatccaagaaagagcaaggtggaagactcaatgtatttttatgacctagccttggaattcacattccatcatgtccacaatgccctattcattctgggtgagaaaacgacaagggtgttaatatcaaaaatcagagattcttgagggccctaccactctaaacccaaaaaagagtttcataacttcttgagcgaatagatttgagcaaggccaaaggctgacctattaaccctggcgaaagaaacacagaagtgctatgtaaagttgctaattgtccttcctcattaggatgccaagtatctgacagataaagcctttacaggtaaggctgaagctataatcagtcactgggagacaaaagtatgtcaaagagaagaataactatccacaaaatccacaaatgaatagagaccaatttcactgatttcccaattagccaaatatatgaaaaatgtatctaagaatcagatagatctctgtgttataaagaccatcactaaaaccaactgtaacaaaactagatgtgaaaggttatccacaattaaactaccatataagcaaaatctgtttcaaattaaagatgtaaactgaaaatgttttttctccttcaactatgtagagctaccctaatatatgaacatgcttgaatatgtctggagtttctaagggaataactatagttgaatacactctgcacgctattttatgagtcccatgaaaagccaagtttacgaggttaccaactggtgacaattacttatyttcctttccctcatttccttcttctcaactcatcaagactttaactacacattccacaagaatcaaatttaagcctgaagaggagaaatgtacttacgctgaggtcactcctgggaaaaaatgagtggaactgggctgtagctgatgccaattatatcaggtggtggtgggaaagaactcattggtcatcattacagcaggtttcgtcatactcatttcatgccatttttatataggattgaataaattatgcttgtgggactttggagacaaaagcagatgtggagtgttctaaacaaatgtctgcagagagaaaacatatgcaagtgatggccaaagtttgcagagatccaacctaaaactgttgagggatggggccccacattgcagaatttgttctactaggaccaggaggcttgtgacaatttggtgggctgacacattttttccaatgcttctcaaagctgaagtttaagggatagacacacatcatctaagagtattgggtagttctgccaaggcagagaaaacccatcatgcttgggggcataactcttcatcaaaaattcaaacagcttgatctctactagaagatcaacactacagcagccttaggaaaacttccttatttcccacaacttctaaatgggctaattaaaagtctatttggattattcagaagtcaaaaaatagtgataccaatcaatatgttttttcagagcctgtctttcaaaggctatgagatgatttgagtttttctcatcctctcttcaaatttctcatctcaactgggtcaaaattgggccagaggtcttgatgcctaagaaccataaaaggctagattaaaaattcgctgtagtctacatttctttctcattatattttacttctcccacccccttttttcttcttcaagggagttgtcccatttatactgtgctttatttaatgaagtcttttttttttttttttttgagacagagtcttgctctgtcgcccaggctggagtgcagtggcgcgatctcggctcactgcaagctctgcctcctgggtgcacgccattctcctgcctccgcctcccgagtagctggaactacaggcccccgccaccacgctcggctaattttttgtatttttaatagagacggggt

SEQ ID NO: 706041 - DNA, 1097 bp, Homo sapiens
cccaatgaccacatgcagaaggataatcatatctactccaaactttcccaaatttagaaccatgggacccccacagtttaatatcaatcaatgagctcacaattaaaattacacaagaaggtaagacattataagagagggtcaactaggaacaaggaaatacaaaagagttctagctacctaagaaaaaagatactgaaattgttagatacagattatagaacaaaggataataaaaagctgaacaagcaataaggtactattaggaataaacaggtagattttggaaaaatagaatttcttaaaatcaaaactaaattaaaaaaaaaaaaaactcaggagttcgacaccagcctgggcaacatagagagagcctgtctctacaaaaataaataactaaataaaaacttattagaataggtgctttgatggtctttctgaggtgcaagaagtggtgagtatatgaaatggcaatcacatgtaaacctaaataaatactagttgtataaaataaaaataataatgatgtctaatttgtggggttataaaaaggacagaaataaaatatggggcaaaaatagcatgcaagtcagaaaaaagaaggtgattggatttaaagcactctaaagcccttgtattgtttagaaaaaaattatacgtattcacataagactaatatgcatagtaaaatttcaagggtaatctgtataaattctaaacccacagagagaaaaacaggaaataggaaaaaaaccaaagaacaataacccaaaagtttacaataaaaaagacacaaagagaaagtgagatgaggctgggcgtggtggttcacacccgtaatcccagcactttgggaggccgaggcgggcagatcacgaggtcaggagatcgagaccgtcttggctaacacggtgaraccccgtctctactaaaaatacaaaaattagctgggcatggttgcaagcgcctgtagtcccagctactcaggagactgaggcaggagaatggcctgaacccagaaggcggagcttgcaatgagccgagatctcaccactgtactccagcctgggcaacagagcaagactccgtctcaaaaa

SEQ ID NO: 706042 - DNA, 736 bp, Homo sapiens
ttttgacatacttctccccaccactcagccaagccctcaggagcgggcaatcccatcccgttctgtcccacacccctcagtagagcacactgtcctgtacacagcggccacgcactacatgtcattgatgagaacaatcacagtggcttcttttttcttgggaaaataagacaatgaagctacaaatactagtattctcatggaaaaaaatgatgccctcagtgtccactcacagaggratacctaaataagttaagactgaaccccgcatggggccatctggagccacacaaaagaatgaggctgatctagatatgttcatgtgtgtggacatcacggacttcagtggggacagctgcaggatggcacatatatacgcatatacacaaacatggatatatatatatatatagcacagaaaaaggtttggaggattcccccaaaaccatgaaccgtggctacctctgcagtgtcaggatttagtgagacaaggggaggtgagggaactgcacttattatacatacttcggtattattttaactttttacattgagtacgtattgcttttgtaattgaagaatatatatatatatatatattcttggctggctgtggtggatcacacctgtaatctcagtgctttgggaggctgagcaagaggattgcttgaggccgggtgcggtggctcatgcctgtaatcccaacactttgggaggccgaggcaggtgaatcacc

SEQ ID NO: 706043 - DNA, 736 bp, Homo sapiens
ttttgacatacttctccccaccactcagccaagccctcaggagcgggcaatcccatcccgttctgtcccacacccctcagtagagcacactgtcctgtacacagcggccacgcactacatgtcattgatgagaacaatcacagtggcttcttttttcttgggaaaataagacaatgaagctacaaatactagtattctcatggaaaaaaatgatgccctcagtgtccactcacagagggatacctaaataagttaagactgaacccmgcatggggccatctggagccacacaaaagaatgaggctgatctagatatgttcatgtgtgtggacatcacggacttcagtggggacagctgcaggatggcacatatatacgcatatacacaaacatggatatatatatatatatagcacagaaaaaggtttggaggattcccccaaaaccatgaaccgtggctacctctgcagtgtcaggatttagtgagacaaggggaggtgagggaactgcacttattatacatacttcggtattattttaactttttacattgagtacgtattgcttttgtaattgaagaatatatatatatatatatattcttggctggctgtggtggatcacacctgtaatctcagtgctttgggaggctgagcaagaggattgcttgaggccgggtgcggtggctcatgcctgtaatcccaacactttgggaggccgaggcaggtgaatcacc

SEQ ID NO: 706044 - DNA, 736 bp, Homo sapiens
ttttgacatacttctccccaccactcagccaagccctcaggagcgggcaatcccatcccgttctgtcccacacccctcagtagagcacactgtcctgtacacagcggccacgcactacatgtcattgatgagaacaatcacagtggcttcttttttcttgggaaaataagacaatgaagctacaaatactagtattctcatggaaaaaaatgatgccctcagtgtccactcacagagggatacctaaataagttaagactgaaccccgcatggggccatctggagccacacaaaagaatgaggctgatctagatatgttcatgtgtgtggacatcacggacttcagtggggacagctgcaggatggcacatatatacgcatatacacaaacatggatatatatatatatatagcacagaaaaaggtytggaggattcccccaaaaccatgaaccgtggctacctctgcagtgtcaggatttagtgagacaaggggaggtgagggaactgcacttattatacatacttcggtattattttaactttttacattgagtacgtattgcttttgtaattgaagaatatatatatatatatatattcttggctggctgtggtggatcacacctgtaatctcagtgctttgggaggctgagcaagaggattgcttgaggccgggtgcggtggctcatgcctgtaatcccaacactttgggaggccgaggcaggtgaatcacc

SEQ ID NO: 706045 - DNA, 644 bp, Homo sapiens
aggagcatctgtattgcatcaatgataataagctggttttgataattttactatggttatataagatgttaatatttgagggaactggatgaagggcgtatgagaatgctatgcattcttttttgaatttttgtaaatctgaaattattttaaaatcaaaagttaaataaatatttaaaaatgaaaaataatgtaaaamtaaattatagtgcaccttatacaatgcaattttatgcaaatattaaaattaggattttctcaaaatagtagagtgccaatgaggaaattctcacactatattaaattatcatactatatttaaattatattaaatcctacatatattacattatatatgtgcattgtgtgaattttatgttctatataatcccaaatttatagaatatatttataaacatgcatatagcaaatcaagaagaagaaattaggtaatattggaaattagaagacaaaatcatctttgcagatgctgtcgcactctacttaagacatgtaagagaatcaactataagaactactaagacaattcagtaggtggttacaaaataaatgtataggatttacagtactctatatgcccacaataacatgttagaaaatacaattttaaaaggagatcccat

SEQ ID NO: 706046 - DNA, 1259 bp, Homo sapiens
agggatttgaattgcaataatttgccttctctctgtcactcacagtgccctgacttggttgccaagcttttgagaaaaatcacagttatacacacactttctgtgctgatacctgccacccctctatttgctttctgataaatatgccctttccctggaattctactcaaatgccagtctgtgactgactctggtgcctgtctttcccgtgtgttatatgacagcccttcctgcataagaagccctgccccttcagagaaaygtgctcggaactcagtctcctcactcttcccccagccagcactcagctgctgagcagaaatgtgttttgggaatgccagtgtgacaattacacaggtacctaggagaaccaaaagctctggtctcagctgcatgatggcttcagggaaattaagtgcaagctgtttggtgaatatttctccttaggacatcatgaaatcccagaggtggggatgcgtggacagtgcctgcctgtttctttccccctcctcccccaagcttctagaaagaagaaagaaaaaactacagcttagtatttgatattttgaattaattagagccccaaatcccacaccagccagcaggcttcttaatgaggccaatgtattcatcttgttcagggatcattacagtgcctcacaatgccctatgggtttcaaagcactactgcgcgccactgcttcatctgggatccacaatcaccttggtaggtggtcaagacagaagtcatcctttccattcctagatgagctttcagggatgtagagtcactttttcaaggtcacataactaataagcagtagaaactggatttgaactcagctggtctgctaccaggttccatgcagttaaccactgctgttctacactgcctctccagaaagatgcacggctgcctcatgacagagttatttagggatgcagaaaaaaatacagaggttcagtaaaatttgaatttcagataaacaattaatacgtttttttgtataagtatgtcccatagttatgcttatctcacaaatcacatggaaaatacttacatgtactaaacatttatttgatgtttacctgaaatgtaaatttaattggatattctgttttgtatttgctacatcagccaataccatagtcagcactatcctaacaaggctggccaaccacctggcctgaccagctctactccagccatacccatgcctgcctaatgccactttcttttactgaccctggcttgaagc

SEQ ID NO: 706047 - DNA, 469 bp, Homo sapiens
ttccctgacccagaggaatagacccttcagcaacccaaacgtctcaccttgccggctctcaaagacttctgctctctgcttgctctcctgtactatccaaatcatgatgcaagatccttctcccttggaatctttctgaagtcctcacctcagctagtctcagttatttccagcccaagcctgtgctgatgaatgactatgtgtttgtgtgtgtgtgcgtgtgcccatgtgcrtatgtgcagctgtgtgcgtgcaaatggtgtgggtgagtgtgaagtaagattcccagtggggaggctcagaatatttctaccacagaaagagggagcagagctcaggggttattcttggcagcagcagagaaaactgatattcctgtgctgaggtgagagtgctgcctcactctcctgttggcaccaggtcagaatccagggtatggagagaagcctttagctccaagaaaactcag

SEQ ID NO: 706048 - DNA, 1333 bp, Homo sapiens
tgaatctatgcctgaaaactgtaaaagtgagatgaattgagatgagacaaaagcagaccagattaaaccagacaagatgagatgtgatgctaaggaaggttaggagaacagaaagtgatgaaatataaggccctcagcctcctttctcagggatgtatgtgtcacttcaaaaatgttgcttctgcctatgactctatctgtgaaagaggctcaaccaactctgcatgatccccctacatcctcaggwctggaatctcaagtgtgcttcagggtggaagtgggttgacggggttaagagaacctttgcagtggaaaaatatgctcacgaatgcctcactgatgtgtcccctgctttcaagaaggtcccctagatggtcagccatcctaatgactggctcttccatcattgatggctgtgttggtcacagacaccaagtctcagctttcatgtggtgttggaaccatatcatgtcagtctactagtaaatgtcttaccttctgtaacctgagagttgcgaaaatccaactggtatttcataaaagtcctttacaagttccatgtttggaagaaaatggattacaatggcatatataggagaaaaacaacaattaaaaaaaaaaaaacttggctatatgggtgcttgctttttttaaaatcttgaccagtgacaatctcacatggcttcaatgatcatctgtatagtattcattcccaaatccttttggcagccccaatatctctaaagagctccaactgcctgctgagcagaaaatgccacccaagggtttacctataactctcaaactcaatgtacccaaattgaaactcattcttctcctgtctatcacatcttcctgaccaaccttccccccttccctgaaatatctttattttcgttgtagttaaatcagcctcaaagctgaatattatcttttttaaaaaatatttatggggtacatgagatctccaaatctctctatgccttattccctacatgcaattggtagacacctcctatcaatctcacttccctaatatctctcttctcaattcttggtgcatggctattgtgcagatcttattgccaatcacctgaaataataattttgattgccaagtctttgctcaaaatcttcaattgttatctatgtcctagaataaaatagtcttaattcttagcttccactcataagtgagaacatgtggtatttggttttgtttcttcgctaatttgcttaggataatggcctcgagctgtatccatgtaactacaaaggaaataattttattcttttttgtggctgcctagtattccatgatgtatatgtacca

SEQ ID NO: 706049 - DNA, 1231 bp, Homo sapiens
gagttaaaagtaaaaggaatacaaatatatgttatagaaataatttttagaaagccaatgtggctacatcaattacacaaagtaaactttaagacaagaaggtttaccaaagataaagagggacatatcataatgataaaggggtcaattaagaacaaataataattccaatttttttttcaagacagagttttgctcttgttgcccaggatggagtgcaatggcatggtctcagctccctgcaatcttcttctcctggtttcaagtgattctgctgcctcagcctgccaagtagctgggattacaggtgcctgccactacacccggctaatttttgtgttttttttttttttttagtagagatggggtttcaccatgttggtcaggctggtcacgaactcctgacctcagctgatccacttgcctcagcctcccaaaatgctgggattacaggcatgagccactgcacccggccaataattctaaatgtttactcaactaaaactttaagaactttcagatataggaatcaagagcgggatttttttttcaatattgtattatgaaaaaattaaacgtatatgaaaactgaagtaattttatagtgaacaccctgtgtaaccaccgcttggtgtctaacattaacattctactgtgtttattatattacatttgtacctatctgttaccccttctttctatttgtcaattcatcagctgyagtgattttgaaactctactctgtaaagttccaggaattgtgtgtgtgtgtgtatgtgtgtattttggaagtggggtagtgttttgagaacactagtagtcctcatttgaccaaataatttatacttttatctattattctatcttatatattggacttctgtttaggttacctgaaaacatggttttgtgagtaaaggaaaattttgaaagcttttatcaagggtattctgagggtaatccactctcccaatctagttaagcataatctagaaacctgaccatgtgttccttgaagacactgagtgagtgtacccaatttggcagcttttgtgagagcaaggaccatccttcatttttaattcccttcaggttcatgcctacagtgaaaagtcagtacatcttgctggatgaatgaaggtgggcaatgtatttattctatataatattgtattttgtgggcacacctgtgagaatatgacacaggttggacagttctacctggctctta

SEQ ID NO: 706050 - DNA, 2030 bp, Homo sapiens
gggattctcctcacctgagatccaaggcgcaccacttgtgtttatctgagctcagaggtccatcaggcagccccagagagattagagtgttgtaaattaggtcctttctgctctctccaactcatggaagggaacttaggaccaggccactgtttgctccaaatcatatagcatcaggaatgtggtgagataaagcaagtaaaaacaacacaaattttaccaccattctgattgtggctcttccttgatggggtgtttgcttggttgccttagatgtttggcagatttccagagttcatttactgttaatttagacagtctctaaatgttcatgtaatatttctctggggaaatgagggcctggagcttcctagtctgccttcctgctgacatcactccactagacactgtttattatgttgagttagcatatgattaaaaaatcacttttaaaacatggaaaattacatatttacccattcattcaactttaatttcttgaatacttggaaagttccaggtactgctctagataatagagacccagtaatgaatacaatagacatttttgaaaatccctgtatttgtaaagattacattttagaggacaaatataaaaattttaaaaataagtaaatgatatcagaatgcagtaagtacactggagaaaaatcaaatagagaaggaaaatgggagagtgtacaatttttacaaaagatgtggaaggttggtctcaccctatacccagtacctatgttccaagttctgaccctatatccactaccaatactctaagattctgaccatatacccagcacctatgctccaagattctgactctatactcactttctgtgctccaagattccgaccctatacccagtacctatgcgccaagattctgatcctatacccagtacctattctccaagattctgaccctatacccattaccaattctccaagattctgaccmtatacccagcacctatgctccaagattctgactctatactcactttctgtgctacaagattctgaccctatacccagtacctattctccaagattctgaccctatacccagtacctattctccaagattctgaccctatatccagtacctatgcaccaagattctgaccctatacccagtacctattctccaagattctgaccctatatccagtacctatgcaccaagattctgacactgtaccattacatatcctctgtgcaacagtgcagagattaaactccttactctgaatcccagatctgccactctgcagctgaacaattccagacagttctcttattctcacacatcaatctctatgtttgtaaagtggcagttataaacgttcttactcatgagaactaaataagttatcagatgcaacgcccttagaacactgcctgtcacattcaaagttctaagcaggtgtccactgaagctgtattatcgtcccctaagttctactgatactgttcaggaggctgagatgttgggaataaggaggataaggggcatgagttttatctccaggtaatataattaatgtttaccatgggggtttctataagctcaaaagattatgaatttctttttatattattcactctagcttgtatttttatagtaatatttttcctagaacataaaacaaaattggaagctatgcatgtaataaatacttatacctaataaaaatgcaaaatattttgtatgaataaaaaataaactaatggccagacatggtggttcacccctgtaatcccagcactttgggaggctgaggcggatggatcaacctgaggtcaggagtttgacaccagcctggccaacatggcgaaaccccatgtctactaaaaatacaaaaattagctgggcatggtggtgggcacctgtaattccagctactcaggaggctgaagcaggagaatagcctgagcccgggaggcagaggttgcagtgaaccaagatcgtgccactgcactccagcctgggcaacaagagtgagactcca

SEQ ID NO: 706051 - DNA, 2030 bp, Homo sapiens
gggattctcctcacctgagatccaaggcgcaccacttgtgtttatctgagctcagaggtccatcaggcagccccagagagattagagtgttgtaaattaggtcctttctgctctctccaactcatggaagggaacttaggaccaggccactgtttgctccaaatcatatagcatcaggaatgtggtgagataaagcaagtaaaaacaacacaaattttaccaccattctgattgtggctcttccttgatggggtgtttgcttggttgccttagatgtttggcagatttccagagttcatttactgttaatttagacagtctctaaatgttcatgtaatatttctctggggaaatgagggcctggagcttcctagtctgccttcctgctgacatcactccactagacactgtttattatgttgagttagcatatgattaaaaaatcacttttaaaacatggaaaattacatatttacccattcattcaactttaatttcttgaatacttggaaagttccaggtactgctctagataatagagacccagtaatgaatacaatagacatttttgaaaatccctgtatttgtaaagattacattttagaggacaaatataaaaattttaaaaataagtaaatgatatcagaatgcagtaagtacactggagaaaaatcaaatagagaaggaaaatgggagagtgtacaatttttacaaaagatgtggaaggttggtctcaccctatacccagtacctatgttccaagttctgaccctatatccactaccaatactctaagattctgaccatatacccagcacctatgctccaagattctgactctatactcactttctgtgctccaagattccgaccctatacccagtacctatgcgccaagattctgatcctatacccagtacctattctccaagattctgaccctatacccattaccaattctccaagattctgaccatatacccagyacctatgctccaagattctgactctatactcactttctgtgctacaagattctgaccctatacccagtacctattctccaagattctgaccctatacccagtacctattctccaagattctgaccctatatccagtacctatgcaccaagattctgaccctatacccagtacctattctccaagattctgaccctatatccagtacctatgcaccaagattctgacactgtaccattacatatcctctgtgcaacagtgcagagattaaactccttactctgaatcccagatctgccactctgcagctgaacaattccagacagttctcttattctcacacatcaatctctatgtttgtaaagtggcagttataaacgttcttactcatgagaactaaataagttatcagatgcaacgcccttagaacactgcctgtcacattcaaagttctaagcaggtgtccactgaagctgtattatcgtcccctaagttctactgatactgttcaggaggctgagatgttgggaataaggaggataaggggcatgagttttatctccaggtaatataattaatgtttaccatgggggtttctataagctcaaaagattatgaatttctttttatattattcactctagcttgtatttttatagtaatatttttcctagaacataaaacaaaattggaagctatgcatgtaataaatacttatacctaataaaaatgcaaaatattttgtatgaataaaaaataaactaatggccagacatggtggttcacccctgtaatcccagcactttgggaggctgaggcggatggatcaacctgaggtcaggagtttgacaccagcctggccaacatggcgaaaccccatgtctactaaaaatacaaaaattagctgggcatggtggtgggcacctgtaattccagctactcaggaggctgaagcaggagaatagcctgagcccgggaggcagaggttgcagtgaaccaagatcgtgccactgcactccagcctgggcaacaagagtgagactcca

SEQ ID NO: 706052 - DNA, 2030 bp, Homo sapiens
gggattctcctcacctgagatccaaggcgcaccacttgtgtttatctgagctcagaggtccatcaggcagccccagagagattagagtgttgtaaattaggtcctttctgctctctccaactcatggaagggaacttaggaccaggccactgtttgctccaaatcatatagcatcaggaatgtggtgagataaagcaagtaaaaacaacacaaattttaccaccattctgattgtggctcttccttgatggggtgtttgcttggttgccttagatgtttggcagatttccagagttcatttactgttaatttagacagtctctaaatgttcatgtaatatttctctggggaaatgagggcctggagcttcctagtctgccttcctgctgacatcactccactagacactgtttattatgttgagttagcatatgattaaaaaatcacttttaaaacatggaaaattacatatttacccattcattcaactttaatttcttgaatacttggaaagttccaggtactgctctagataatagagacccagtaatgaatacaatagacatttttgaaaatccctgtatttgtaaagattacattttagaggacaaatataaaaattttaaaaataagtaaatgatatcagaatgcagtaagtacactggagaaaaatcaaatagagaaggaaaatgggagagtgtacaatttttacaaaagatgtggaaggttggtctcaccctatacccagtacctatgttccaagttctgaccctatatccactaccaatactctaagattctgaccatatacccagcacctatgctccaagattctgactctatactcactttctgtgctccaagattccgaccctatacccagtacctatgcgccaagattctgatcctatacccagtacctattctccaagattctgaccctatacccattaccaattctccaagattctgaccatatacccagcacctatgctccaagattctgactctatactcactttctgtgctacaagattctgaccctatacccagtacctattctccaagattctgaccctatacccagtacctattctccaagattctgaccctatatccagtacctatgcaccaagattctgaccctatacccagtacctattctccaagattctgaccctatatccagtacctatgcaccaagattctgacactgtaccattacatatcctctgtgcaacagtgcagagattaaactccttactctgaatcccagatctgccactctgcagctgaacaattccagacagttctcttattctcacacatcaatctctatgtttgtaaagtggcagttataaacgttcttactcatgagaactaaataagttatcagatgcaacgcccttagaacactgcctgtcacattcaaagttctaagcaggtgtccactgaagctgtattatcgtcccctaagttctactgatactgttcaggaggctgagatgttgggaataaggaggataaggggcatgagttttatctccaggtaatataattaatgtttaccatgggggtttctataagctcaaaagattatgaatttctttttatattattcactctagcttgtatttttatagtaatatttttcctagaacataaaacaaaattggaagctatgcatgtaataaatacttatacctaataaaaatgcaaaatattttgtatgaataaaaaataaactaatggccagacatggtggttcacccctgtaatcccagcactttgggaggctgaggcggatggatcaacctgaggtcaggagtttgacaccagcctggccaacatggcgaaaccccatgtctactaaaaatacaaaaattagctgggcatggtggtgggcacctgtaattccagctactcaggaggctgaagcaggagaatagcctgagcccgggaggcagaggttgcagtgaaccaagatygtgccactgcactccagcctgggcaacaagagtgagactcca

SEQ ID NO: 706053 - DNA, 2697 bp, Homo sapiens
agaccaggcccttccccaataatatgaaggtcaaatccccttgaggatgcccaatcatatatcctgccccaggaaagggtgaagtgtggaggcaccaccagattctgtcatcactggggacacagggaggagcacctaaaatactcctacagtgtggagcattaaagcccctacaatgtggccaccattttagagaagtgatcttgtcttcccacagcttcttcaacacctttttgtcatagtcttaccaatcaacacttgacctgttttaaagagtatgctcaggggggtgttggtccccccttctccccacttagctgtttttcttaaggaaagagaaagcattctgtcacaagtatgagggcacagagacagagggaaacttaaggaatgagtgggtagaagtgcaatgcacttgaccagcctgagaagacgagagtcaatgccaggatggaggatagacagtggtaagctcatgatgggccatgaaccatcggcttgaaaagtttgggccatccagtaacatcaatggaagtcaccaaagaactttaggttkccagatagtttaaagtctcagtaactattaataaacataactggaagttaaggaactgtcttagagatactggaaagaatatcgtcaggaaaactaagtttcatttcttattttgcttgcaattttcatggctatatccttaaagctctctcctttgtggattgtgggacagtcttgctgccagtttatgtgatgctttattatgtaaactagggtttctctgattctaaaacacctgacaagtattttctttccctgattaattttctgttttaaaatttttcctgatgtttacctgacagcttcacactctcaaaggatgagcaataatattcttgctaaaccaaatccccagtcaaaagagcaagccaaaatttttgttttcccagtaaagaaatgttattaacataaaattttcctggaatcttaacattttaaggttgggtggaaccttagaaatcatctgctgtgattttttttttcacaaatgagcaaactgatacatggagagctgtgttctatccaacaccccaattaatagcagcaggacttgaacctgggcttattcacccttacacagtgttcttttcactgttttttattatagaaaacaaatgaccccagaacaggagtttataaatatttggagtttttaaatacattttaagatatgaagtttttgtatattagaaaataacatcttttttctacaaatttatgttgatgcagtagattttcaagaatatttgataaattccaggaaaattggttatggtaggtagaagtcagtggaaatctcagtgtttagtgatgaaagggatggatttgactactctgttgaatccaggtacacttaaacaaataaccgataacagatagtaaaataattgcatggctacttcctgcttgtctctgctcagcacctcataacttcgtcttcctaagatcctgtcagccacattctgctgtgttttctccggccccaccactcttctgtgcctcatcttacacattctccattttggtgacaaagctggattctgtctattggcctcagcaggctattctctgcctcggtatctaagtggcttcttgtcacttagataattaatttcagcttccttttctctgacagtgataacctcaataccaaatctgaaaatatctctaactgcatgtctcttttcccctcaagtcacaaatcgaatcggccagatattttagcacttaccgtaatttagcagcctcccaatatctgagttctttagtaactgagaaactttggatgctattcacagaaatttattttatttataaacaaaatgtggccccaatttgtcaacgttttaattgcctttgcaacattgttcctcactccaacccaccatggaaataagtgctggcttaaagagaaaccaaggaggacctgcagaattagaagcaggcaacaagaagactgatgagtattaaatgggactcccaagagaagttttgcatgggtcaaccgtcctccatgtctgcatctagctagggcttagctggcttttagatgaatggaattctgagcctaacaaccaacagatacctttctctgtcccttaatgtcagcagaaggaagtggaaatgtttaggtgaatgagaaaataaaaatagcacatttgaaagaaatgatcaaaattaagaccagatcagtatattttttttcaagccacaccaagtgtcagatgactggattagtttgcatctggttttgaaaattctgtctcaacattcaacagccagcacctgtcgtgagcagtctgaggctttttcaagtaagcttcaaatatctgctgttgaatgcatttggttaaaccttgtttctcttgaatgcacgtgtacagtatacactgggcagagtccacagtgtgacacacattgttgagtatgtctcctttaagtgaagagtcaaccatgtgccacttggtggaggaagatacactctgcacagtccatgcttatgcaaagccactgaccccactctggaactttttttttttgccttggggtgaatatgctaagcttggttacgatgagaacacagttactggttttctagtctccctaaccacaaaaatcaataccagcttagtttgcaaatt

SEQ ID NO: 706054 - DNA, 589 bp, Homo sapiens
gaggaggaggargagaacagtggagtggaaacataagatttttactggccccagtaatttttcgaaaggctgtggtggctcatgcctgtaattccagcactttgggaggccaaggcaggcagatcaactgaggtcaggagtttgagaccagcttggccaacatggtgaaaccccatctatactgaaaaaatataaaaataagccaggtgtagtgatgggcatctataataatcccagctactcgggaagctgaggcaggagaacctccctcaccaggtactgagctccctgctgtaagccaccatatgtgcccaggtccgagtgctgccatccaccttcagctatcctcccacggagctgttctgccccagcccaaagcatgcactgcaaatccctatagcttctcaatccagatctaactcctcattcccccagagccatttatttcagcaggattaccgaggggaacactgtggctgaatcgcactccatgaattggagatgctgctctctccttagctaattagtttggatgcctccagctgcaaatgcaaaaaccctgacccacattggcctagacagcaaaggc

SEQ ID NO: 706055 - DNA, 804 bp, Homo sapiens
tttgatttttgttatagatatgaaaccgctactcccgcgattaaatgtctctcagcctaacacctatgggacctggggagagggaagagaaaggctccaaccttgaccctgtcaaataaatatctctaactttttctgtcctcaggcttcccagccaaacctgtstgtgggttttttttttttcttcccttaacctgactttaaataacaaagctatggggacgggagatgaagagaggaaagactgtctgttctattagagggtgctcagcgcgtgcacgccccgacacctagcccaaaccccgtgcgatggcgaagcttcgcggagctaatagccttctcggcgacggccaccccggagccggtcccctcctgccgcaagttcagctcagaccaggacgattccttccgtccgggctcctgcccgaccgagggagggctgccaggtacctggctccccagtgacccctgcccactcctgacctcttgctgtcttggcgaattttctccagaccatggcgtcctggggtcaccacgttccaggatggtgggaccagaagggacagcagggtggagccccagagaaggtcaggcctgccccagtccagcccctggaccggctcacagcgctttctgctgagggcaggggtctgcatggcagacactggaggtgtcctcacgcccccagtctccagctctctcagaggcagggtccatcctgaacacccctcatgtggtcaggcgcccccttccccggcctctgccggcccccacgctccccaggccggccccctcggaagagca

SEQ ID NO: 706056 - DNA, 804 bp, Homo sapiens
tttgatttttgttatagatatgaaaccgctactcccgcgattaaatgtctctcagcctaacacctatgggacctggggagagggaagagaaaggctccaaccttgaccctgtcaaataaatatctctaactttttctgtcctcaggcttcccagccaaacctgtgtgtgggttttttttttttcttcccttaacctgactttaaataacaaagctatggggacgggagatgaagagaggaaagactgtctgttctattagagggtgctcagcgcgtgcacgccccgacacctagcccaaaccccgtgcgatggcgaagcttcgcggagctaatagccttctcggcgacggccaccccggagccggtcccctcctgccgcaagttcagctcagaccaggacgattccttccgtccgggctcctgcccgaccgagggagggctgccrggtacctggctccccagtgacccctgcccactcctgacctcttgctgtcttggcgaattttctccagaccatggcgtcctggggtcaccacgttccaggatggtgggaccagaagggacagcagggtggagccccagagaaggtcaggcctgccccagtccagcccctggaccggctcacagcgctttctgctgagggcaggggtctgcatggcagacactggaggtgtcctcacgcccccagtctccagctctctcagaggcagggtccatcctgaacacccctcatgtggtcaggcgcccccttccccggcctctgccggcccccacgctccccaggccggccccctcggaagagca

SEQ ID NO: 706057 - DNA, 1466 bp, Homo sapiens
atgtaacattataatgatggaaacaagaccaggattctcccttcgtctctccgtggtgtcttttatacacttgagaccttgtttccgcatcttccctgatagccttccctgtcctcactggatgaaaacctctgtatgccggccctgcctgggggctgcccggggcccagcagggagagtggagggggcaggagatgtgggctggggccttctatgtgcagtgaaggtccaggcaccgtttagagctgggagtgaagaggggtgtgggtgcttctgggggccccatctactgtggcagggagcccctggctctgtgaaggatctgggtccagatccagagccgggcgcagtggctcaygcctgtgatcccaggactttgggaggccgaggcgggcagatcagctgaggtcaggagttcgagaccagcctgaacaacatggcaaaaccccatctgtactaaaaatacaaaaattagcctggtgtggtggctcacgcctgtaatcccagctacttgggaggttgaagcaggagaatctcttgagtccaggagatggaggttgcagtgagccgggatcgcaccactacactccagcctgggtgacagagtgaaactccatctcacagaataaaaaaagaaggacctgggccctctctggggaggctatggggccccagggcttgggaattctggaaagtccccagggctaatggcctcttggggagtcaccccaacatctgctttcaggggcctaggcgggatctggctgcagctggtgtcacccttggctggccagatgggcagggtctgcagaagtcccggggactggctgtggagctcagagccgttgctggtatctgcgggtggcctagaggccgtggggctgaggagcgggtgctgggctggctgcccttctgacctagtctctgcacctgaaggttgtggggacctttgtggggagagggcacctcttcaacctgaaccagcccgcagggcgggagtgagcggtgtaacggcactgagcctggagttccgcggggacccctgccgtctgtgaggcttggtgcagatcccgagtagccctgcgcccctcctgagcccctgccctgctcagggctgcccctggcagctgcagcctgcagccactgggcacccacctggccagtgtcgtgacccagagtggtcttgacctggccagggagcctcctctgggaagtggggtccagggctgaggcccctccctcctccagacctcagattctctggttgtcaaatgagcacatccggcagtgcatgggcttctcacagacacacaggacggtggctggaatggtcctggggccgccagggctccctgcaggcagaagccacagggttcacttcagatgagctagaaagctggggaggggggtccagcgtctccacactccatcgctgctcctcagggggcccttcccactctaaggca

SEQ ID NO: 706058 - DNA, 1739 bp, Homo sapiens
taccaaaagttcccattcattgggaactatatgtaggtccccagtgaatgaatatattaattattcaccttgcccatggacactagtcacattttatttgcgaccattgccacatctcatagaataggaatttcttgattattgctatattcactcatatcaaagtgttgccttccatttctcttagctaagataggcagaaaactttttactaagccagataaataatggctcatgtactaatccttgtgaaattaaacaaaaaaatctgtgaaattaaaaaaaattatgaaattaaaaaaaaatggaaagaaattcctgccatgtcacttactatccctaatcttaatttcagtgttgtatagawgtgtgcttctaaaatgtcgtgtttttcacacttcgtttcaatccttgaactctattgaaaagcttcattatatattctccattactgatctcgttataaaaatttgatgttgcttaaaataaccatttgctttattaagccaagctttgtttacttctgtatctgttgagattaacctcccatcaccatccttatacatgtaccctttgattattctcagtattgatatcttggtcttccaagagctgtaagtttttaattcacaaaaggaaggaggttctaggattcaactaatgtgatgactagatttgtatatggtattaaagtattaaaggagagaatttcttcgcccatagcttatcatttatttgaatgcagagaaaatttactggggagattcaaaatgataaatttgtctatgtggaattcaataagcaaaatgctgaaatagagtctaaatcttccatcatcactaaagctgtttgataagaaatttatctcctcttgtctgctttagcttgatctaagttaagtactaatgaatcatgacccagtctgtgttcctttgtcctcacattttacttgctgtggcaaggattcaaaagtgattgattaatgtcaaataggttttcgctctctattggaaatcttgctgcagtaacacatgctttttttgttttaaatttatataaggcaactttctctatggtgggtaccgtagaagactagaagtttctattataacacattcatcattttgaaaaatgaaggtggctggctgcagtggctcacgcctgtaatcccagcactttgggaggccgaggcgggtggatcacctgaggtcaggagttcgagaccagcctggacaacatggtgaaaccctgtctctactaaaaatacaaaattagctgggtgtggtggcgggtgcctgtaatcccagctacttgggaggctgaggcaggagaatagcttgcacccaggaggcgaaggttgcagtgagtcgagatcatgccacggcactctagcctggacaacagaacgagactccgtctcaaaaaaaaaaaaaaaaagtgtgaagctatctgaagattgactcaattgacctgatgcaatgaggaagtccactagaggatttaagcaataggccaagttttcaatcaaatcttaaaataattaagtgaccttaaaattcttgactaaatttctgagtgatcacttgtgtattctcatcaaatgaggtagttaagagacctgaggaagagaatacttttggatctgagtttctgtctgttaagtaaaaatggatttgttgtataatctgagtaagctgtttaccatctcaagagtctccattaagaaaaaaaatgttaga

SEQ ID NO: 706059 - DNA, 1739 bp, Homo sapiens
taccaaaagttcccattcattgggaactatatgtaggtccccagtgaatgaatatattaattattcaccttgcccatggacactagtcacattttatttgcgaccattgccacatctcatagaataggaatttcttgattattgctatattcactcatatcaaagtgttgccttccatttctcttagctaagataggcagaaaactttttactaagccagataaataatggctcatgtactaatccttgtgaaattaaacaaaaaaatctgtgaaattaaaaaaaattatgaaattaaaaaaaaatggaaagaaattcctgccatgtcacttactatccctaatcttaatttcagtgttgtatagatgtgtgcttctaaaatgtcgtgtttttcacacttygtttcaatccttgaactctattgaaaagcttcattatatattctccattactgatctcgttataaaaatttgatgttgcttaaaataaccatttgctttattaagccaagctttgtttacttctgtatctgttgagattaacctcccatcaccatccttatacatgtaccctttgattattctcagtattgatatcttggtcttccaagagctgtaagtttttaattcacaaaaggaaggaggttctaggattcaactaatgtgatgactagatttgtatatggtattaaagtattaaaggagagaatttcttcgcccatagcttatcatttatttgaatgcagagaaaatttactggggagattcaaaatgataaatttgtctatgtggaattcaataagcaaaatgctgaaatagagtctaaatcttccatcatcactaaagctgtttgataagaaatttatctcctcttgtctgctttagcttgatctaagttaagtactaatgaatcatgacccagtctgtgttcctttgtcctcacattttacttgctgtggcaaggattcaaaagtgattgattaatgtcaaataggttttcgctctctattggaaatcttgctgcagtaacacatgctttttttgttttaaatttatataaggcaactttctctatggtgggtaccgtagaagactagaagtttctattataacacattcatcattttgaaaaatgaaggtggctggctgcagtggctcacgcctgtaatcccagcactttgggaggccgaggcgggtggatcacctgaggtcaggagttcgagaccagcctggacaacatggtgaaaccctgtctctactaaaaatacaaaattagctgggtgtggtggcgggtgcctgtaatcccagctacttgggaggctgaggcaggagaatagcttgcacccaggaggcgaaggttgcagtgagtcgagatcatgccacggcactctagcctggacaacagaacgagactccgtctcaaaaaaaaaaaaaaaaagtgtgaagctatctgaagattgactcaattgacctgatgcaatgaggaagtccactagaggatttaagcaataggccaagttttcaatcaaatcttaaaataattaagtgaccttaaaattcttgactaaatttctgagtgatcacttgtgtattctcatcaaatgaggtagttaagagacctgaggaagagaatacttttggatctgagtttctgtctgttaagtaaaaatggatttgttgtataatctgagtaagctgtttaccatctcaagagtctccattaagaaaaaaaatgttaga

SEQ ID NO: 706060 - DNA, 1038 bp, Homo sapiens
atgctgtgctgctccagggcactattgtgcctctttgagcccaggagctccacaacccatctctgacagagatctggagtcccagagagcagcctggtatatcccaggcagcccaccctcacgtcctgttctccacagaaacccccagcaccagaggcacagccgacgtctgtaggcaccggtccccctgccaaacccgtgctcctgcgtgccactccaaagcccttggccccagcccctctggccaaggctccaaggctccccatcaagcctgtggctgcccctgttctagctcaggatcaggcttctccagaaaccagtgagtgccctatcccagcctctggggcttcccaggacaggcctggtggtgtggttgtgccccttgtggcctcaccctgttcccaccrcgccccttgcccacagcttcaccctccccagagctggtccggtactctacgctcaactctgagcacttcccacagcccacacagcagatcaagaatattgtcaggcagtaccagcagccgttccggggaggccggcctgaggccctcaggtcagcactgcccctgcccccagcccgccagccccctcactgtacctgagtgtccatcatggcccaccagcttactgggttgaagcgccctgcccagctcctgttagggagggagtttctttatactgatgagtccagatgaggccctgctgttgtctaggttgtgctgtaggacttcaggccagtctctgcttctccctggattctcatttataatgatagggggtggtggaggaggaggaagtttcctactgtcaaactatgtgatgggaaagggagactcagtgtcaacccaccacagtactccaatgcccacaggaaggatggcgggaaagtgttcatgaagcggccagaccctcatgaggaggccctgatgatcctgaaagggcagatgacccacctggcagctgcacctggcacccaggtgaggggggaaggtggggctgagcccaggtggaacagaagacaaagaggggcctcag

SEQ ID NO: 706061 - DNA, 562 bp, Homo sapiens
gtatcctggaggcaagggatgctgtagacccagctgtccctgcagccccttaggacagtggtggcagggcctgtaatctggtctcatgcattcattcattccgcaagcccagccccaggtctctgagtgccaccctagaggtgttaaacaaaggaggccaggcaaagtcccatctccctcagggcctaggcttgagatcacagcaggaggagccaaggagactcacgattaccctcctgaatcccttcagtcactcacaagtggcaatgctgggcaagctgagtaaaacaaaacccatctgcagaccagagtcagccaccttcccatctgtgtcaaggaagtgttcctgcaggcctggcgcyggcctccgccccagggacgctgggctgaggtgttgggtctcccaccagggcctggaagacctgtgggcatgtgggaggaggagtcacattgcacaattgcagagtcccctccccaccgccctccactgtgccaccatcagcgtggcaaccagaggtctacactctcagggcaattgctggctgcctcctccagggtctcc

SEQ ID NO: 706062 - DNA, 680 bp, Homo sapiens
gcagcacggttggttcctctgagacctctctcctttgcttgtagatgccatcttctccctgtatcctcacagcgttgtccctctgcgagtgcctgtgccctaatctattcttcttataaggacaccagtctattggattcgggcccaccctagtgaccttgttttaacttaatcacctctttaaagaccttttctccaaataaggtcacattttgagatattgagggttaggacttgaatgtatgaattctggaggaaggcaatcagctcagaccataacccattctccccaatagtcttcatagtcccttggttggtcccaaagaattgctgagtctacccagcaaagcctcagcccagccctgcacctccaatcctgcccctctacttggagcctcagcactaaytgctgtgctgccaacctcaggctgctgcagcccttgatgtgtctttgtgttgttagaaaatgcaggtctgctccagagccagccagcagagcacaggctgattctccacatgccctctgcacagcctggaggaccacagcagggaccccatggaggctcacactgggagaccccttctacacctccaggctgtgggggtccagcccccaacagggcaggaggcccctggggagggtgtggtttttgcccctgagaaatcacaggtgtctccta

SEQ ID NO: 706063 - DNA, 998 bp, Homo sapiens
aataatccatcgaacccagagaaaatagatttcaacccacacaaagacatgcatatggctcagagtctcaacttggctgctgaggttttgtccaagggtgtttctttttttccctccctttccaggctttctggtacagcttgcaagtccagcatgtattgtttgggcagcaaatcaagagaggcccaagatgaaatgaatcagcgttactgtttcttcccctaccccatctgccttcccggaaagtttgagatgtggatggtaagaacagttgactgtatcaatatattatctttatttttttgcccatttttagcccattttgaaaagctttattgatatataattgatatacaaaaattgcatataatgtgtacatttggatgagtttggacaaatscatgtacccaggatatcatcaccacaatcaaggtactaagcatatccatcacctccagaaatctctctgtggtgttgtgtgtgcatgtgtgtgtgtgtgtgttaacacttaacctgaggtctgtccttttaatatattgtaacgtgtgcaatacagtattgttaactctaggtgctatgctgtatagcaggtctccagaacatattcatcttgtgtaactaaaaattttacctgttgatgttggctatttttgcaattgggttttacatccttttcttatttgtttgcaagatagctttacattttctgaatatgtcctttcttggatatatgaatttcaaaatcttccagtttgtggcttgccttttgtttctcttaatagttttttttatgtatatgtcatctctctctatttaagtcttctttgatttttctcagcaatgtttatgagttgaggaggttttacacatcttttattagatttattcctagacgtgatagtttacttatttttaaatttcacggatggtttgtgcctctaggttaatgtacattgtcaatccttgaggcggcaccagttgtgtattgcaataatgca

SEQ ID NO: 706064 - DNA, 653 bp, Homo sapiens
tttatagttacattatcacctttcttccacaatgcttacattacttcacaattataataattattaggctattaatacaaagcagaacacttcttcaaattaaggtaccttttgctgtacgtagcaaagactgccttcctgcaccaagtaaagaagtgactcttgaaatactgggtggaatttctttatccaacataggaccgatgcgctsgcagatttgcaaaagatgatcaggagccacatgcttattggacaagacctagttggagagcaagttttaatgacaacagcttaataatatcaaaaactattaaatacttagggataagtctggcaaaatgtgaaaaacatacactgaaaactgtaaaacatgctgagagaaattaaagacgacttaaataaacaataagctgatctacagatttgagctacagattcaaacctgtaacactcaaaacttcagcaacatttttttttgtagaaattgacaattttgttctaaaatttatatgcaaatgacctggaaaagcacctctgaaaaagaaaaaaggttgcagagctaacaaaacttaatctcaagacttgaaatcaagactttactcaaaattgcactaactgggccagggatggtgactcacacctgtaatctcagc

SEQ ID NO: 706065 - DNA, 633 bp, Homo sapiens
ttttattttgctttctaaaacgagtgtcatgccatgctgacaggttaaagcttgttgtatcctgtatattttaatgtaatgcccrctaaccacagtattccacatcgagaattctgttctcagtgacaggtggactgttctcccgagggagggctgaggcaggaggaagtactcagacttagagaaggcatggagaacagggaaggcagggacagctgtgtgccccgtggccatcaccattgctgggacctgattcttgatgccctcctggctgaggagtcggccaacatccctggtacagacttggtgttattgagtgataaacaaatcctcttcctcctctctcctcgccccactcttttcttcctcttttctcttcttttctcctcccctcttctttcctcttctcttctctttcctttccttcaatgttctaagcctcagactgttcatttctagagctggccagatagaacagtgagtcacggtgagatattgtgtcccatggatttgttctaccagaaacgtttatgagccactgttggggagctctggtgctcttttgaaatatccaatagcatctttctgatgaaagcctggaagagaggttccactagtcagtgaactagcaga

SEQ ID NO: 706066 - DNA, 657 bp, Homo sapiens
gctgatgaatttgcattctgaatgcacccttacattttttctggattaaatggtcacacaggtaaaaatctttaggttatagtatttctgagctgagccatgggatgctttgagaactgatgtgtagcattaagtaaaacagaggcaggggccacccctggatattccagaagacagcttcctaacccaaatgaggaaacatctggcttatgaagcacatgtttaaggggacagtgaattagcacatgtgaattatagactgtcctgaaaaatccagtacagcacayagacttcctccatggaatccccacaaagaagcagctggggacagttcataccaagctttaagtatcttctctgtctggggccatgtgctcgggaccaagaacgtagaggcaatcactgtgcagaagcaggtaagagggatgaaatgagaacaggcctggagctgggcaaatttaaatcccaattcttcactttactagctgggtgaccttcagcaggtgaattcagctttccgggactctttcttctgcagaatggagacaatgattgtgtctctctcaaagcactactgaaagaattgatctctgacaaacagtatgtggaagcttttaataatttttgttatgatttataattcctgcttttgaagac

SEQ ID NO: 706067 - DNA, 657 bp, Homo sapiens
gctgatgaatttgcattctgaatgcacccttacattttttctggattaaatggtcacacaggtaaaaatctttaggttatagtatttctgagctgagccatgggatgctttgagaactgatgtgtagcattaagtaaaacagaggcaggggccacccctggatattccagaagacagcttcctaacccaaatgaggaaacatctggcttatgaagcacatgtttaaggggacagtgaattagcacatgtgaattatagactgtcctgaaaaatccagtacagcacacagacttcctccatggaatccccacaaagaagcagctggggacagttcataccaagctttaagtatcttctctgtctggggccatgtgctcgggaccaagaasgtagaggcaatcactgtgcagaagcaggtaagagggatgaaatgagaacaggcctggagctgggcaaatttaaatcccaattcttcactttactagctgggtgaccttcagcaggtgaattcagctttccgggactctttcttctgcagaatggagacaatgattgtgtctctctcaaagcactactgaaagaattgatctctgacaaacagtatgtggaagcttttaataatttttgttatgatttataattcctgcttttgaagac

SEQ ID NO: 706068 - DNA, 989 bp, Homo sapiens
  misc_feature 286, 510, 511: n = A,T,C or G
ttcatagctatgtttgaagagcaagtgaaaacaattttgtataccataaagtgtgtattcactagacaatattatgaacacctattatgtaccaagtatcatgttaagyatcagaagaaccaagaataataagacagatgaaataaagtaaaatagagaaaagaaaatatacagaatactctataaaatatggaataaaataaaatgtgaactgagactagagaatgaagaagaataagtttcaaagacagattagcagaagggatactaaattatagtataaccnggaaagccttctcagaagaggagatatttaagcttgctaagaatacaggaaagcgctggagcaagagtgatcctagcagaaggaacacacagggaagatgagattgagctcattctcagatgaccctgaaagtcaacaagcctagagtcacaggatgtgactggagagacagaaggagcctcatctcacagaaggaccttctagtattatgattgccatgaagnncttaagaatcttcctgtccaagttattttctttttctttttttccttccttctttccttcattcattgttcttttgtttgtttggtttgttttcagacagagtttcactccctcaccaaggctggagtgcagtggaatgatctttgctcactgcaacctctgcctcccaagttgaagcagttctcatgcctcagcttcccaaatagctggaattacaggcattcaacaccatgcccagctaatttttatacttttagtagagacagggttttgctatgttggccaggctggtctcgaactcctggcctcaagtggtccacccgccttggcctccccaagtgctgggattacaggcgtgagccacttcgccagccccaagttattttcacgcattatttttcgtatacactgggctcaggttcaccaaaaccactattgccttgggtcctacattccaaagcttgattttattttaatc

SEQ ID NO: 706069 - DNA, 989 bp, Homo sapiens
  misc_feature 286, 510, 511: n = A,T,C or G
ttcatagctatgtttgaagagcaagtgaaaacaattttgtataccataaagtgtgtattcactagacaatattatgaacacctattatgtaccaagtatcatgttaagtatcagaagaaccaagaataataagacagatgaaataaagtaaaatagagaaaagaaaatatacagaatactctataaaatatggaataaaataaaatgtgaactgagactagagaatgaagaaraataagtttcaaagacagattagcagaagggatactaaattatagtataaccnggaaagccttctcagaagaggagatatttaagcttgctaagaatacaggaaagcgctggagcaagagtgatcctagcagaaggaacacacagggaagatgagattgagctcattctcagatgaccctgaaagtcaacaagcctagagtcacaggatgtgactggagagacagaaggagcctcatctcacagaaggaccttctagtattatgattgccatgaagnncttaagaatcttcctgtccaagttattttctttttctttttttccttccttctttccttcattcattgttcttttgtttgtttggtttgttttcagacagagtttcactccctcaccaaggctggagtgcagtggaatgatctttgctcactgcaacctctgcctcccaagttgaagcagttctcatgcctcagcttcccaaatagctggaattacaggcattcaacaccatgcccagctaatttttatacttttagtagagacagggttttgctatgttggccaggctggtctcgaactcctggcctcaagtggtccacccgccttggcctccccaagtgctgggattacaggcgtgagccacttcgccagccccaagttattttcacgcattatttttcgtatacactgggctcaggttcaccaaaaccactattgccttgggtcctacattccaaagcttgattttattttaatc

SEQ ID NO: 706070 - DNA, 989 bp, Homo sapiens
  misc_feature 286, 510, 511: n = A,T,C or G
ttcatagctatgtttgaagagcaagtgaaaacaattttgtataccataaagtgtgtattcactagacaatattatgaacacctattatgtaccaagtatcatgttaagtatcagaagaaccaagaataataagacagatgaaataaagtaaaatagagaaaagaaaatatacagaatactctataaaatatggaataaaataaaatgtgaactgagactagagaatgaagaagaataagtttcaaagacagattagcagaagggatactaaattatagtataaccnggaaagccttctcagaagaggagatatttaagcttgctaagaatacaggaaagcgctggagcaagagtgatcctagcagaaggaacacacagggaagatgagattgagctcattctcagatgaccctgaaagtcaacaagcctagagtcacaggatgtgactggagagacagaaggagcctcatctcacagaaggaccttctagtattatgattgccatgaagnncttaagaatcttcctgtccaagttattttctttttctttttttccttccttctttccttcattcattgttyttttgtttgtttggtttgttttcagacagagtttcactccctcaccaaggctggagtgcagtggaatgatctttgctcactgcaacctctgcctcccaagttgaagcagttctcatgcctcagcttcccaaatagctggaattacaggcattcaacaccatgcccagctaatttttatacttttagtagagacagggttttgctatgttggccaggctggtctcgaactcctggcctcaagtggtccacccgccttggcctccccaagtgctgggattacaggcgtgagccacttcgccagccccaagttattttcacgcattatttttcgtatacactgggctcaggttcaccaaaaccactattgccttgggtcctacattccaaagcttgattttattttaatc

SEQ ID NO: 706071 - DNA, 612 bp, Homo sapiens
gcatcactgacttgaatcattggctagatgggccttggtccgttgccacttaggggaaaaccttggtttggattgatgagggttttgcttttgggacgttgttttactttgctgcctgcccgcagcctgtggaatgtttctgctgatgggctggtttcctgcttgcctctgtccttgtatcaagataattcattgcacgttgccccggttgcccagtcctggttgtcaractttttggtcctgggagcgttttcatgccttggttcccagacggtgctgatgcagcctgcaggtccacaggctcagacatgagcccactgtgtgctgctttctcagggagccatgagtgcagttgaaataaccttgcacttaaaacctgtcttaccattttgaaaactgttctttggaaatcttgccttgggatttgaacgtctttgcctttaggttttgctcttttgtttctgtttcttttactcattggttttctgcttttgagttttggttgccttgcttcaaaaatcttatatcacgaccatggtttgggactatttctgtcatctccttgttcttctctgggcaagttcattccagataacttgcccctctcctgca

SEQ ID NO: 706072 - DNA, 625 bp, Homo sapiens
tgttgaaactgccctactggcactaaccattaatcctgaaggcaattgattatgaaggtttatgtagtatattagtccattttcaaactgctgataaagacataccagagactgggaagaaaaagaagtttaattggacttacagttccacatggctggggaggcctcagaatcatggtgggaggtgaaaaacacttcttacatggtggtggcaagggaaaatgaggaagaagcaaaagcagaaacccctggataaatccatcagatctcgtgagacttattcattaccatgagwatagcactggaaagatgggtctcatgattcagttacctccccctgggtccctcccacaacacatgagaatcctgggagatacagtcaaagttgagatttggatggagacacagtcaaaccatatcattccaccctggtccctctaaatctcatgtcctcacatttcaaaaccaatcatgccttcccaacagtcccccaaagtcctaactcatttcagcactaacctaaaagtccacagtccaaattctcatctgacacaagtcaagtcccttccacctatgagcctgtaaaatcaaaagcaagctagttacttcctaaatgcaatggggg

SEQ ID NO: 706073 - DNA, 626 bp, Homo sapiens
tccttttaaaaattaagatgactagtagggttattattttgctctgtcatatagtacttttgataagctatgctttatgttgcataaaggaatcatgagtgactaggacacatatgtcagtagtttattaaaattaaataggtcaggtgcagtggctcacatctgtagtctcagcactttgggaagatgaggcaggtggatcatttgaggtcaggagttcaagaccagcctggccaacatggtgaaaccctgtctctagtaaaaatacaaaaattagctgggcgtggtggtgcacacctgtagtcccagctacttgggaggctgaggtaggagaattgcttgaacctgggaggtggaggttgcagtgagctgagattgtgccactgcactccagcytgggtgatagaacgaaactccgtctcaaaaaaaaaaaaaggaaaaaaatttagcacagtcttaagagatttggcttccttagtttttactcctttttattatgaaagatattattggtttagtgggattgcgatcatctgaaggcacctaaaactgcctcattttcccctatggctttagctagagtaaaataaatatcatattcctttttttctttagcaaaacttaga

SEQ ID NO: 706074 - DNA, 579 bp, Homo sapiens
gtagccttgacctcctggacttaagtgattcttctgcctcagccctcccatgtagctcagactataggcctgtgccaccacacccagctaatttttatattttttgtagaggcgggggtctcactttcttgcctaggctgatctcaaactcctaggctcaagcaatctacctgccttggcctcccaaagtgttgggattatgggtgttagccactgcacctcgcctaggttgttcttaaaacaaaaacaaaaactacctggaataacaaaactctccctaattggctggatgcagtggctcctgccagtaatcccagcactttgggaggctgaggtgggctgatcgtgtaagctcacaagttcaagaccacgagttcaagctcacgagttcaacatgacgcaaccccatctccacaaaaaatacaaaaattaaccgggtgtggtggcgaacgcctgtagtttcagcttctctggaggctgaggtgggaggatggcttgagcycggtaggcaggaggttgcagtgagccgagattataccactgcactccagcctgggcggtagagctagaacttgtctc

SEQ ID NO: 706075 - DNA, 1578 bp, Homo sapiens
tggtaaattggcttcaatagataaactggcttcaggtgattgcccagtgttgttttggaaagacccatgaggacttccctgagctcagcaaaaaagagtgctttgataggttagtagcatccgccacacatagggaagatgctgagagtcgtgaataggccgcatatttgtcataactgaagtaagcttttatcacatgaagttagaaaaggaaccataaaacaaagctaagaaaaacagatttaaggaaattaagaagaaaagtaatataaagtgaaaagcaagcagtaaaattagttaagttcaaaaccttatttagtttgggtcaggggaacccagaagaagaaaataaacatacttctgccagaagaataagagcagtaaacataagaaaaatactttaaaagtagatatagaagagactgaaaaattaggagaacacggcacactatgtacaattttaaaaactagatgaaagataatattttgaaaaatatcaagtataaattggttcttcttgaagaaaaagaagatttaactagaacatagaacaagtggaaattttcaaactgcctaaattggttcttcttaaacacatgagtaggcccaggaaccatttttaaaaatcgtctccaaaatagttcttcaaactatttttctgaaatcttttttgtttttgtttttgtttttttgagatggagtctcgccgtgtcacccaggctggagtgcagtggcgcgatcttggctcactgcagcctctgtctcccaggttcaagcgatactcctgcctcagcctccagagtagctgggactacaggcatgcaccaccaagcccagctaattttttgtatttttagtagagacggggtttcaccgtgttgcccagggtggtcttgatctcctgacctcatgacctgcccacctcagcctcccaaagtgctgggattacaggcgtgagccgctgcacctggcccatttttctgaaatctttggaggcttccaggtgcgcacaagataaagttgagagtcctgactstgacattcaagccttctgcaatatgacctctctcctgtctcctgccttcttcatactctatcaccgctttgcacacagactgttccacacacatgcttcccattctttgttcctacatatccatgtcatctctgcagagtgcccttaggcctcttgaacctaagtcctgcctttaattcaagattgggttttagtgtctcaccttggtgcatccttcccagctgccccttcgtcacctcctcatctgactctgccatctacctcctggttttatttttccttttttcatatgttctgctttctatagctctctcaaagacagataccctgtcttcaccctttcatcacatatatattgaatgtctgttttgctcaacattgccctagacagcagtgtccaatggtgataacaccagtggacaagacagatcagatctctgcttgcatggtttgtttttgagagaagggataaactcattcccagtgcctgagatagcttatattcgtaagttctcagcaaatggcagtggtgatggtggaga

SEQ ID NO: 706076 - DNA, 697 bp, Homo sapiens
tgagaattaacgaaatattatgcttggggttattgtgatcattatacctgttccaaactatttgacaaggacagtgatggatgaagacatcaaaaaatcagaaactgcaatgaggtctctcaggcaaaattccatacaagcaaattactgtgtctacaaagcattcctgccacacttaattcaccattccctgaacagaatatgccatcttcgttgttcaggtctgtacagtgctggtttcccttcccggacagtttgcgctatcccatcccggcccattccccatccctccacctcccccttccctccccactctcatacaactcttcctcatctttcaggacttggcttcaatgtcaccttaactggaagcttctctcactctccagaagagcttcccattgcacctgatgcatgggaaacataatttgatcatttttaagttacagtccaaatctttttgtacctgaataacatgttgcccagtcagtctctcttcctggattcacaagtctttcatggtagatccagctggaagtgacaaaaagacatcttttgacataaagggatgacacagacagacataagttcttaaatgtcttaaatgttatgtgaraattaaacagaattcaaagacttgtggggagcacttaggaagttactgggaatgtcatgaagggttaatttgtattttatt

SEQ ID NO: 706077 - DNA, 697 bp, Homo sapiens
tgagaattaacgaaatattatgcttggggttattgtgatcattatacctgttccaaactatttgacaaggacagtgatggatgaagacatcaaaaaatcagaaactgcaatgaggtctctcaggcaaaattccatacaagcaaattactgtgtctacaaagcattcctgccacacttaattcaccattccctgaacagaatatgccatcttcgttgttcaggtctgtacagtgctggtttcccttcccggacagtttgcgctatcccatcccggcccattccccatccctccacctcccccttccctccccactctcatacaactcttcctcatctttcaggacttggcttcaatgtcaccttaactggaagcttctctcactctccagaagagcttcccattgcacctgatgcatgggaaacataatttgatcatttttaagttacagtccaaatctttttgtacctgaataacatgttgcccagtcagtctctcttcctggattcacaagtctttcatggtagatccagctggaagtgacaaaaagacatcttttgacataaagggatgacacagacagacataagttcttaaatgtcttaaatgttatgtgagaattaaacagaattcaaagacttgtggggagcacttaggaagttactgggaatgtcatraagggttaatttgtattttatt

SEQ ID NO: 706078 - DNA, 950 bp, Homo sapiens
catcaattctgtatttgtaggagtccaatcaggagacacaaaccactcaaaagtttaaactagaatgagcaagatggctcacacctgtaatcccagaactctgggaggccaaggtgggtggactgctttgagctcaggagtttgagaacagtctgggaaacatggcgaaacctcgtctctacaaaaaacacaaaaatcagctgggtgtggtggcacttacctgtaatcccagctactcgggaggctgaggcaggagaattgcttgagcctggcaggtggaggctgcagtgagcagaggttgtgccactgtactccagcctgggtgacagtgtgagacccggtatcaaaaagaaaaaacgtgtatatatatatatatatatatatatatatatatatatatatatatatatatatatatatgtaaatttaatataaaaagtattaattttggccaggcaaaatggctcatgcctgtaatcccagcactttgggaggccaaggcagacagatcacctgaggtcaggagttcgaraccagcctgaccagcacagagaaaccccatctctactaaaaatacaaaattagctgggcatggtggcacatgcctgtaatcccaactactcgggaggctgaggcaggagaattgcttgaacccagaaggtggaggttgcgctgagccgagatagcgccattgcactccagcctgggcaacaagagtgaaactccatctcaaaaaaaaaaaaaggtattaatttttacagaggatcagcacaatgagggacacactagcacaaagtaaagacaactctagagaatacggaactagcagaggccaggcattgtggctcatgcctgtaatcccagcaatttgggaagcctaggcaggaggatcgcttgaggccaggagttggagaccaatcagtgctaaatagtgagactctgtgtctacc

SEQ ID NO: 706079 - DNA, 950 bp, Homo sapiens
catcaattctgtatttgtaggagtccaatcaggagacacaaaccactcaaaagtttaaactagaatgagcaagatggctcacacctgtaatcccagaactctgggaggccaaggtgggtggactgctttgagctcaggagtttgagaacagtctgggaaacatggcgaaacctcgtctctacaaaaaacacaaaaatcagctgggtgtggtggcacttacctgtaatcccagctactcgggaggctgaggcaggagaattgcttgagcctggcaggtggaggctgcagtgagcagaggttgtgccactgtactccagcctgggtgacagtgtgagacccggtatcaaaaagaaaaaacgtgtatatatatatatatatatatatatatatatatatatatatatatatatatatatatatgtaaatttaatataaaaagtattaattttggccaggcaaaatggctcatgcctgtaatcccagcactttgggaggccaaggcagacagatcacctgaggtcaggagttcgagaccagcctgaccagcacagagaaaccccatctctactaaaaatacaaaattagctgggcatggtggcacatgcctgtaatcccaactactcgggaggctgaggcaggagaattgcttgaacccagaaggtggaggttgcgctgagccgagatagcrccattgcactccagcctgggcaacaagagtgaaactccatctcaaaaaaaaaaaaaggtattaatttttacagaggatcagcacaatgagggacacactagcacaaagtaaagacaactctagagaatacggaactagcagaggccaggcattgtggctcatgcctgtaatcccagcaatttgggaagcctaggcaggaggatcgcttgaggccaggagttggagaccaatcagtgctaaatagtgagactctgtgtctacc

SEQ ID NO: 706080 - DNA, 1145 bp, Homo sapiens
tgtttttctgtgaatgagaaacaaggggaagatggatatgtgacattatcttaagacaactccagttgcaattactctgcagatgagaggcactaattataagccatattacctttcttctgacaaccacttgtcagcccacgtggtttctgtggcagaatctggttctataacaagttcctaataagctgtagccaaaaaaatttgatgaggtattataattatttcaatataaagcacccactagatggagccagtgtctgcttcacatgttaagtccttctttccatatgttagacattttctttgaagcaattttagagtgtagctgtttttctcaggttaaaaattcttagctagattggtgagttggggaaaagtgacttataagatacgaattgaattaagaaaaagaaaattctgtgttggaggtggtaatgtggttggtgatctccattaacactgacctagggcttttgtgtttgttttattgtagaatctataccccattcacagaagataccgagactgtgggccagagagccctgcactcaattctgaatgctgccatcatgatcagtgtcattgttgtcatgactatcctcctggtggttctgtataaatacaggtgctataaggtgagcatgagacacagatctttgctttccaccctgttcttcttatggttgggtattcttgtcacagtaacttaactgatctaggaaagaaaaaatgttttgtcttctagagataagttaatttttagttttcttcctcctcactgtggaacattcaaaaaatacaaaaaggaagccaggtgcatgtgtaatgccaggctcagaggctgaggcaggaggatcrcttgggcccaggagttcacaagcagcttgggcaacgtagcaagaccctgcctctattaaagaaaacaaaaaacaaatattggaagtattttatatgcatggaatctatatgtcatgaaaaaattagtgtaaaatatatatattatgattagttatcaagatttagtgataatttatgttattttggatttcaatgcctttttaggccattgtctcaaaaaataaaagcagaaaacaaaaaaagttgtaactgaaaaataaacatttccatataatagcacaatc

SEQ ID NO: 706081 - DNA, 1312 bp, Homo sapiens
tgtcttttatgtttttctttttctagatttagtggctgttttgtgtccgaaaggtccacttcgtatgctggttgaaacagctcaggagagaaatgaaacgctttttccagctctcatttactcctgtaagtatttgagaatgatattgaattagtaatcagtgtagaatttatcggaactgaagcacatgtaactatggtcattttcatggtacttgttctcatcttaaatgcacagcattcctggaactcctgcagatctctttgtttccttgcaagcaattgtcttctacctgatgttgattcaagagagttttcaatatgaatagaaagaaagaaaatgtttagatattggggaaccagcattcccattttaaaacctgttaggagttgttgattagggcaagctcaaggattcctttgagtgactggtttagatgtctttctgctattcggtgaccactggggaactgagattgttgagcagaagggtaatgtgagcagagccgtgcctttgtaagctggcagcactgtgtgagatgaattggtgggttggatactgagatcatgagaggcatactaagcataattaagatgatattgccatgatctaggtggaaagtaatgggggtttgaattatgatagtggcagtagcaatcaagggaaagagttgatcagaggattcagaggtagaatcaatagttstagcaactgaggagagaagttgtaagcttgaaggaaaggtgatgaagaaaaaatgctttcctgtgttttcttgttgttgttgttgagatagggtctcactcccatccaggatggagtacagtagtgtgatcatggctcactgcagcctcgacctcccaggctcaggtgatccacccacctcagcctcccgagtagctgtgactacaggcacgcactaccaggcctggctaatttttttgtgttgtgtgtagagactgggttttgccatgtgcccaggctggtcttgaactcctcggcttaagcgatcctcctgccttgacttcacaaagtgcttgagttacaggtgtgagctaccacgcctggccatgttttcttgtgtgaaggatctgtttagttttatatctttctgtggctcatatctaatttagttgacagtacctgtgggtcactaggtagacattgctagcagacgtttagaaatgaaatactagagcttgggaaaaagttgatatttgagatagagacttgaagaacattagcagagagttggtagttaaggtctgtgagctggtgagcaattcaaataaaagcagaagagaagaggaag

SEQ ID NO: 706082 - DNA, 1153 bp, Homo sapiens
ggcccccaggggttagaatggaaaggtgcagtccccacttctgttagctggttttagcattgaccaactgtgtgttatttgaggctaggtttgtcgtcaataaagcaaggatgacagtcctttttataaggaaaatgacatgcaagcttttgaaagaagaaagaccattcacatgcaagcatgcttgtttctcgctgatgtggaggtctttccatattcactggtttgccattttgagaagtccactctgtcctagttgggctttttaaatgttggtgcctctctaagtctttggtgaagcttttttcatgactcacaaccttgtgatagtggcggtgaaactaaaagtgaaatgaagaytccatcaaccatcaaaagtcatccgcgtttggcctttcagaattgtccaaaggtgggcaagagggcttgggccttctatgtccttgatgaccagtcactggatgtggccaacctgggcaggtggggtgaagcccactgctcacttctaggaaagcttctggcctaaaaccatgggcctcatctcctacccaaagggaaacattcatctgggactttctggagttagagtctccctctcccaccatggactgacttcccagacaggagcaggcttcttagcacatacccacagggagagatcctctggcagaggacagtctagacatgagtgaatgtcactggggctagaggggagagaaggcaaaggtggaagagaaatcctacttcagcccatctttctctgcagatgatgagaaatttttcaccactggacaaaaggagctgtacctggaggcctgcaagctgatgggtgtagtgcctgtctcctacttcattcggaacatggaggagtcctacgtgaacctcaaccaccacggcctgggccccaggggtaccaaggctattgctatagccctggtggtgagcatgctagtgggagctcatgaaacctggaggaggtggagggttggcagagtggtaggcccaagattcagagggcccctcctatggagcctaaacccacactttatgcccttatgccacactgccctgggctctgcttggctgccagatgatttatttagctcctggtaggaggctactagcaacctgggccttggaagtctatgctcct

SEQ ID NO: 706083 - DNA, 1014 bp, Homo sapiens
tcactgttagaatgtaagttccttgtatgataaggataggcttatgtgctattcaagtgcctagcccccacttggcattgaatggtgtatttgtagaatacatggtcttatttttcctcactttccccaacacactcattctttcttaaacatataacagcatttgcgtttagcatttgtgtgcactttaagaagtgacacaaaatgtgagattgcactgttttccggggatgggaagaaaggagccgagaaagaacaaagccgtcttgagatttatcaagggtggaaaggctgattaatgaagtgttaggaacgcaccattacctcatgagcttcgtgggaaaaacatggatgataatgacatcctctcaggacttggaccacttgtttcgtagtaacagcggtttctgtttgaggggagtttcttcttcccccattctctgtatcattcatttgacaattaatcatcrtgacattctggtagactgaacttctatttgctctttgtactgattaacttttcacatgtttgtgtttccctggcctagattaggagcacgctaatagcaggcatcgtatttcatccttgtgtgtatccctcgacagcctagcactgtacccttgcatgtgggggcagcaggtggtgtgagaatgggaatgttctctgttaatccttgttccccagcagtgaacacagatagtgacaaatagacaatggcccgtgtgaaataaatgtggatggatttggggactgggcctcctgcttccccctggaatgtgctggtccccagtatgaatctggcagtggtgattcgactcatgtttctagacactcctaaatagcacctagacgggaggccccctgagccatctccctcacctttgagcacaactcaaggcaattgaattttgctcagcccagagagctgagaccagaagacatttcaggaagccccagggtgaaccatcctgcattgcaatagcttggactatcacattttcctttttcagggg

SEQ ID NO: 706084 - DNA, 1014 bp, Homo sapiens
tcactgttagaatgtaagttccttgtatgataaggataggcttatgtgctattcaagtgcctagcccccacttggcattgaatggtgtatttgtagaatacatggtcttatttttcctcactttccccaacacactcattctttcttaaacatataacagcatttgcgtttagcatttgtgtgcactttaagaagtgacacaaaatgtgagattgcactgttttccggggatgggaagaaaggagccgagaaagaacaaagccgtcttgagatttatcaagggtggaaaggctgattaatgaagtgttaggaacgcaccattacctcatgagcttcgtgggaaaaacatggatgataatgacatcctctcaggacttggaccacttgtttcgtagtaacagcggtttctgtttgaggggagtttcttcttcccccattctctgtatcattcatttgacaattaatcatcatgacattctggtagactgaacttctatttgctctttgtactgattaacttttcacatgtttgtgtttccctggcctagattaggagcaygctaatagcaggcatcgtatttcatccttgtgtgtatccctcgacagcctagcactgtacccttgcatgtgggggcagcaggtggtgtgagaatgggaatgttctctgttaatccttgttccccagcagtgaacacagatagtgacaaatagacaatggcccgtgtgaaataaatgtggatggatttggggactgggcctcctgcttccccctggaatgtgctggtccccagtatgaatctggcagtggtgattcgactcatgtttctagacactcctaaatagcacctagacgggaggccccctgagccatctccctcacctttgagcacaactcaaggcaattgaattttgctcagcccagagagctgagaccagaagacatttcaggaagccccagggtgaaccatcctgcattgcaatagcttggactatcacattttcctttttcagggg

SEQ ID NO: 706085 - DNA, 2077 bp, Homo sapiens
ttttttttttgagatggagtttcgctcttgttgcccaggctggagagcagtggtgtgatctcggctcaccgcaacctccgcctcccaggttcaagtgattctcctgcctcagcctcccgagtagctgggattacaagcacctgccaccatgcctggctaattttgtatttttagtagagacagggtttctccgtgttggccaggctggtctcaaactcccgacctcaggtgatctgcccacctcrgcctcccaaagtgttgggattacaggtgtgagccactgcgcccagcccagtcttgctgtcttctttactcaaccagggcaggtgacagggaccttagacagctcacgatgctgggctttcttgcctccttccctagtcttccacctgcaatccggcaacttctccctttgccaggaaaggatgctgaacgggaacattcaccattggttggacacaaagctggctttcctttcatcacctaagatgccatcagcggcctgctgtctggcctagtcttccccaacccatccccaggctggcccttcaaccccagctaagttctgagggccccaggttgggtcatagcctccatccctagaggatggaagcaggctcgaggccacctcctctgaggctccccagctgcctgcttcagtgaccccgcatggcttccctgtgggatgcagaccaaaggttctggatggggcccaacggtgctgggtaggctgtcaggattactgagctgtagtgctctgttgtgcagtcacttactcatcatatttattcttttttttttttcttctgaggcagagtctggctctttcgcccagactgtagtgcaacagcacaatctcggctcactgcaacctccctcccgggttccagtgattcttgtacctcagcctcctgaatagcagggattacaggtatgtgccaccacgcccagctaatttttgtatttttagtagagatggggttttgccatgttggccaggatggtcccaaactcctgacttcaagtgatccaccagccttgtcctcttaaagtgctgggattacaggcgtgagccaccgtgcccagcccacatctattctttcaacagctcttcgaggcaggggatatttatcccctcttcacagataaagaaacaaaagctcagagaggttagcacgagcaaggtcacacagccagcaaacggcagggctcagattctctaacaactccggcacaaggggtctcttccatcagcgctccccacctgacccccagtcctccctgccacctttcccagggccggtgcagggggctgagggtgccacgcccagctggctggagatgcagcagctctgcctgcccctgaaggacccaactgcgaatcagcagcctggtatccaggcaaccagtctccctggcttcagataagcagaaacagctgggagctgctgaggctggaacaccatcagggaagggaggaggagcccaccagccagtcagcgtgttattttaacacgttgttattcttaccctctcagaccttggcttgactgggccctttcccccaagcttatccttgccactgccacaggggaggggtctccaggggttccacctagccctgagcctggcacaattgaggtgacgtaaggggagaaatgttggcagtccctctttccgtgagcaagggagaaaaggaaagttggccaaaggctgccaagattaagaggctctggggtgacttcataagcagaagtagttgagtttcaccttttggagcctccaggcctcaatgagaggttttccacccccctataccaggctagctgagtacaggttcagctggataaccccatccaacacccatgatggcagcagcaactgggctgggggtgaaggaagccatggggacacgtggactgtcagacaagcgaggtctggctcagccccaactctgctgacgacaagtttggccacgcctctctgagcctcagtttcctcatccataaaatggagacaatcatgcataccctgctggctggaggtggaaagtaagtgaggaaggcctgtgaaatgc

SEQ ID NO: 706086 - DNA, 2077 bp, Homo sapiens
ttttttttttgagatggagtttcgctcttgttgcccaggctggagagcagtggtgtgatctcggctcaccgcaacctccgcctcccaggttcaagtgattctcctgcctcagcctcccgagtagctgggattacaagcacctgccaccatgcctggctaattttgtatttttagtagagacagggtttctccgtgttggccaggctggtctcaaactcccgacctcaggtgatctgcccacctcagcctcccaaagtgttgggattacaggtgtgagccactgcgcccagcccagtcttgctgtcttctttactcaaccagggcaggtgacagggaccttagacagctcacgatgctgggctttcttgcctccttccctagtcttccacctgcaatccggcaacttctccctttgccaggaaaggatgctgaacgggaacattcaccattggttggacacaaagctggctttcctttcatcacctaagatgccatcagcggcctgctgtctggcctagtcttccccaacccatccccaggctggcccttcaaccccagctaagttctgagggccccaggttgggtcatagcctccatccctagaggatggaagcaggctcgaggccacctcctctgaggctccccagctgcctgcttcagtgaccccgcatggcttccctgtgggatgcagaccaaaggttctggatggggcccaacggtgctgggtaggctgtcaggattactgagctgtagtgctctgttgtgcagtcacttactcatcatatttattcttttttttttttcttctgaggcagagtctggctctttcgcccagactgtagtgcaacagcacaatctcggctcactgcaacctccctcccgggttccagtgattcttgtacctcagcctcctgaatagcagggattacaggtatgtgccaccacgcccagctaatttttgtatttttagtagagatggggttttgccatgttggccaggatggtcccaaactcctgacttcaagtgatccaccagccttgtcctcttaaagtgctgggattacaggcgtgagccaccgtgcccagcccacatytattctttcaacagctcttcgaggcaggggatatttatcccctcttcacagataaagaaacaaaagctcagagaggttagcacgagcaaggtcacacagccagcaaacggcagggctcagattctctaacaactccggcacaaggggtctcttccatcagcgctccccacctgacccccagtcctccctgccacctttcccagggccggtgcagggggctgagggtgccacgcccagctggctggagatgcagcagctctgcctgcccctgaaggacccaactgcgaatcagcagcctggtatccaggcaaccagtctccctggcttcagataagcagaaacagctgggagctgctgaggctggaacaccatcagggaagggaggaggagcccaccagccagtcagcgtgttattttaacacgttgttattcttaccctctcagaccttggcttgactgggccctttcccccaagcttatccttgccactgccacaggggaggggtctccaggggttccacctagccctgagcctggcacaattgaggtgacgtaaggggagaaatgttggcagtccctctttccgtgagcaagggagaaaaggaaagttggccaaaggctgccaagattaagaggctctggggtgacttcataagcagaagtagttgagtttcaccttttggagcctccaggcctcaatgagaggttttccacccccctataccaggctagctgagtacaggttcagctggataaccccatccaacacccatgatggcagcagcaactgggctgggggtgaaggaagccatggggacacgtggactgtcagacaagcgaggtctggctcagccccaactctgctgacgacaagtttggccacgcctctctgagcctcagtttcctcatccataaaatggagacaatcatgcataccctgctggctggaggtggaaagtaagtgaggaaggcctgtgaaatgc

SEQ ID NO: 706087 - DNA, 1814 bp, Homo sapiens
tactttctcaggcacacatggaaggagctagctcacaggtgaaactgagggtttactaagacaaaaggaaaggatggggtcttcaggagagagtagacaagtctgtggaaagaaaagctggcaagcatcccagggagctgcattacccatcattcgcagagagggttccagctgctcccagtaatgatcttcctggacttcctggagacacaggatctgggaaattgacaagaaacccaatcactccagagtgctggaatgtgacccccaccctctaggagcaggtcctgaggccaggtgggaagctgctgggtcacactgaaacttcccagagtcaccaacagcaagaacaggcccagacttaagctgaagagattagagatgtgcaytggattttcctgctccttgaatccctcaagcctcccttcctgcataaaggtgctgggaagtgcacatctagggagattcttctcagcatctgccaacaactcactgacaccaggcaggcaagctccagccctagataggactccaatcatttgaacaactatgggttgaactcatcttctaagagcactgggcaacagcccaggtccagcaacaatgcaagatggcaattccccctcttcactcacatcagggtcccagtgctggaattcctgcatgaggttcacgaagcgatagttccaattgaggatgtctggatggcaatgtagatagagctctgagctctgctgcatcaggtcctgagccaggatgttataagacatcagagtgaactggaactgagggccatctcctgccttcaggccctgagcatctggctgggtggagaaatcctcccattctcgccacaaaatttctgcaaaggattgggagaagcactcaatggcaagtatgagtaatgcagaggtgctgccatctccactcctgactcagtaatattatgcctgaagttcctttttccatcttccctgtcacccatccctctctgtggggaattgatttctatggacattcttcagatgacatggttagctccacaaggccagagacaatcttggcctgctcaccactacatccccagcacctagcatctaatagatgctccatatatggaagctgacacactctcatttttgataaatccatgaatctccggagaatcactcagatgagtgtgcttaacagtcacctgaggttaaagacatttttagagtaattgcagccctgggtgttttctgacccctaaacctggaagagtctgtgggactagaaactatggtgtgtccccatctcccctatggcatgtggcagcatagtggatttcaaatctattgacgccattcttcaaattttaacggactctcaatatacaacacaaataaaactgaggtaattgtgactgagacagagactagaggccctgagacctctctatccctacctccagaaagccctagggttaccaccagagaaatgacattgtggagaatcagaactagagtatgctttcagttcttcccctacctggctttatgactttagtcatgttctactacctctctgcactctgattatttcacctttaaaaccatggggctggatgagatgatctgtaaggaccctctagatctgacatgccaagattcttagaaaaatagaatgcagtggcagagctccctaccatagaatcttctctttagcaatggctctgcccacacctgagacaccctgttcccttggctcactcaaccagttgtcagactcaccatgatatggtatttccactgcgggaggctgcaactgcccca

SEQ ID NO: 706088 - DNA, 1286 bp, Homo sapiens
acttacagagtcaaacggaaagggggagcacgggcacaacctagccaatcagacacctcacgtgatcatttcttcctagtgtttcagctaggagaaatccccttctcaagaaacagaagtcgcaaggaagaacttcccccttcatcaaggagtcgtagcaactatgtgtraataaatctcaagaccaccagctatgtgtgaggagagactcactcagtggtctttaaccactggggacccagagggactcaaagggcccatgctggtaccaaggcaccgggtcctggtgatgttttggacaactctgggcagttggcttggagttccctcatggtcgccatgattgttgactaaaggagaaaaaatcaagctttcaaataactaaagttagttttattctgaagtcttactgaggactacagattgaggcctatagcctgggagcagctctgtcaggctgctccaacacagtgtttcagctcactgcttgtgtacagagtgggggcttaatatgcacaagagcacatcaaacatgctcgggagtgacattgaagcagagtcccgtcgaggtctggtggtagagtacatctgcttatagatgacagcggcatcatcacgaaccccttcaggtgttggtcatcttatgtgtaggaagaggcaataattttttttttttttttttagagtcagagtcttgcactgtcatccaggctggagcgcagtgattgattttttttaatttaatcaacaatcatggtgaccatgaggggtctcagagccgattctccagggttgtctgatcatagctcactgtgtaacctcaaactcctgagctcaagtgatcctcctgcctcagactcccaagcagctaggcatgcaccaccacgcccagctacttaaaaaaaattttaaggccaagcactgtggctcatgcctgtaatcccagcacgttgggaggccgaggcaggtggatcacttgaggtcaggagtttgagatcaacctggccagtatggtgaaaccccatctctactaaaaatataaaaattagctgggtgtgatggggcatgcctgtaatcccagctactcaggagactgaggcaggagaatcacttgaacccaagatcgcttgaactgcagaggttgcagtgagccaagatcctgccactgcactccagcctgggtgacagagctagactctctcaaaaataaaaataaaaattttaaaatagagacagggtcttgccatgttgcccaggctggtctcaaacccttggcctcaaatgat

SEQ ID NO: 706089 - DNA, 997 bp, Homo sapiens
caagcaataaaaaggaaagcacttctaaaacattgagcaacatgaaagagtatcactgaagtggtttagaggaaagaaagctaaactcaaaagaggttacaatttatatgttgcccaagaacatagcacttacctgtggtactcaggtgtgagccagtgtacccggccttccttgttttttgatgtgtgtgttcattgctatggaattctctcttargaatgtgtttgctgtaactcttgttttctcagagattatgtagaattatgttcttaaagatatatggtagattatcttctatttttcataggattaggtagaattgatgttatttctttagatggtatcttttgagttttttttttaggagtcaacattttaaattatacatttaattctgtgaatagttatgggacaatttaaagtatctctatcgatgggtggaagtgctgtgtctgttggtttttgttttgttttgagacaaagtctcagtctgtcattcagtctggagtgtggtgacataatcatggctctcaatagactcaaactcctgagctcaggtgagcttcctgcctcagtatcccaagtagctgggaccacagccacacaccaccatgccagggtgctgagaccagttcagtcggggagaccctaacccagcgggcgctggaggaattaaagacacacacacacagatatagaggtgtgaaatgggaaatcaggggtctcagccttcagagctgagtgccccgaacagagatttactcacatatttattaacagcaaaccaggcattagcattgtttctatagatattaaattaactaaaagtatcccttaagggaaacaaagggatgggccaaattaaaggaataggtttggttagttaactgcagcaggaacacgcccttaagacacagatcgctcatgctattgtttgtggcttaaaaacgtcgttcagcggttttccgccctgggtgggccaggtgttccttgccc

SEQ ID NO: 706090 - DNA, 1188 bp, Homo sapiens
cgtggaccctttagggttgtaagcccttaaaagggccagtaatttctttttcgaggagctcagctcttaagacacaagtctgccaaagctcccagccaaataaaaccccttccttctttaacccagtgtctgagaagttttgtctgtggctcatcctgctacaataagatgagagttctccaggcactccaggcactctggcctttgggtgggaactgtctccaaaactcacccccaggttcctggctctcctcacttcaggagggggtgggtctgccacgtaaccaccgcccagacctcacaagtgatagcacttcacctttttgcttcagatattttaaagagaaataacaycttacagatgcagtctctttctaaacttcccagatccattccctttaaacaatcctccctcagcatggtttttagacttgatttgttttgtcttagaaatggagtcttgccatgttccccaggctggtctcaaattcctgaactgaagtggtcctcactctgcctctcaaatagctgggactataggttgccctcacctcctgctgtgaggtcagttcctaacaggccactgacctgtagcggtccacagcctgagggttggggacccctgctataggtgcacaccaccacacctgtttttttttttaattttgtaaaaatgaagccttgatatgtcgcccaggctggtcttgaactcctagcctcaagtggtcctcccacctagtcctcataaagtactgggattgtaggcatgagccactgcacccagtctccactcctatttattattgaacactattccattgtatggctgatgtggtttgcatctgtgtccccgcccaaacctcatgctgaaaggtaatacccaatgctggaggtggagactggtgggaagtgattggatcgtgggggtggcttttcatgaatggtttagtaccatgcccttaagttatggtctcatgatagagttctcctgagatctggttgtccacctccgcctcccaaagtgctgggattacaggcgtgagccaccgcacccaacctgtcatttttattataacccttctaatggtatgaaatggcacctccccgtggcttccattcgcatttctctaatagccaacaatgccgaaggcttcatgtacccattacccactttgtatcttccttgat

SEQ ID NO: 706091 - DNA, 1796 bp, Homo sapiens
taatatagtttataaagaaaatagatacattaaatatcaaaattaataccttttgttgatcaaaataaatatacccttaagaaaatgaataggcaaggcagaatttgtagaaaacaaatcaaacaaaacgtatatccacaatctatgtctatacctatacttcattttttatttttcataaataaaaataaaacaataaaaggtgggcagaataactggcaagaaactttatgaacatttatgaatgcccaaaaaaagacatacaagtctttatcctcatcatttattgaataaatacaaatggaaatcaaagtcaaataccactagatacttattagaatagataaaatctaaaaactgaaaacattgaatgttggccagcttgtggcacacctggaactctcatgtgttgttggtgggaatgtcaaagtctaccgcttgtcaaaatctttctttgaaagttcggagatcttagcttacttacaaataacaaattagtctgccaaggtttcatggatgctggtaggagacagtagactctgggtcataggacaataatgtgtttttactcacagcaatagcagtagcttgagtggcaacattttcccatggcttctcagaaggtgatgtgaacaggactagatgatatctgcacagacagtgggttgcatatgggmtaggaaccctgagcttagggaacttggatcttttataattgacagtaagctcgctctttgctctggagaaatacattgtctctatcttccaaggctgtgcgctatacaaacatcttgtaaaaatagcctggatcaaagagcagttaatgcctcagttgctctatttgtgtagaaatacaagagtcccacagacatttatctgtcaacatcacaactagctttggtatattcataaaatggaaacttttgttttgctttgttttgttttgagacagagtctccctctgttgccaggttggagtgcagtggtgtgatctcggctcactgcaatctccgcctcctggttcaagtgattctcctgcctcagcctccccagtagctgagactacagacgcacaccaccacgcccagctaattttttgtattttagtaaagatggggattcaccttgttggccaggatggtctcaatctcctgacctcatgatctgcccgccttggcctcccaaagtgctgggattacaggcctgagccaccgcgctggccagaaaagttacttagcaattaaaaaaaaagtagtacctactgatatgagcaatggcattaatgaatcttgacaatattacctttagtgaattatgccatacatccaaaaaatttatatctgtgattcagttttaatgataagctaaaacaggcaatattaatctatgctagaaaaaaatcagaaccgtccatttttttctaggtatgagtgcaggaatttattgggaagggaagagaaaatttttggaggtgaagttgtggctaaactcagaaaatatgtacccatgcatttcaatctattttgctttgcataaaaatactatgaacaaatgaagtgtctatttagtgacataaatgttaagtatttattaacataaatacttatgttgctttcaatttactttgaaatgcatttttaaaagctgatgaataaatgtatagaaaaatgaatactttgataggtataagataaagtaagtcaaatagaatccaggtggtgggtataaggcctttataaagttctttcaatttttctttttgttttaaatattttacaatgttggaaaaaattcta

SEQ ID NO: 706092 - DNA, 1796 bp, Homo sapiens
taatatagtttataaagaaaatagatacattaaatatcaaaattaataccttttgttgatcaaaataaatatacccttaagaaaatgaataggcaaggcagaatttgtagaaaacaaatcaaacaaaacgtatatccacaatctatgtctatacctatacttcattttttatttttcataaataaaaataaaacaataaaaggtgggcagaataactggcaagaaactttatgaacatttatgaatgcccaaaaaaagacatacaagtctttatcctcatcatttattgaataaatacaaatggaaatcaaagtcaaataccactagatacttattagaatagataaaatctaaaaactgaaaacattgaatgttggccagcttgtggcacacctggaactctcatgtgttgttggtgggaatgtcaaagtctaccgcttgtcaaaatctttctttgaaagttcggagatcttagcttacttacaaataacaaattagtctgccaaggtttcatggatgctggtaggagacagtagactctgggtcataggacaataatgtgtttttactcacagcaatagcagtagcttgagtggcaacattttcccatggcttctcagaaggtgatgtgaacaggactagatgatatctgcacagacagtgggttgcatatgggctaggaaccctgagcttagggaacttggatcttttataattgacagtaagctcgctctttgctctggagaaatacattgtctctatcttccaaggctgtgcgctatacaaacatcttgtaaaaatagcctggatcaaagagcagttaatgcctcagttgctctatttgtgtagaaatacaagagtcccacagacatttatctgtcaacatcacaactagctttggtatattcataaaatggaaacttttgttttgctttgttttgttttgagacagagtctccctctgttgccaggttggagtgcagtggtgtgatctcggctcactgcaatctccgcctcctggttcaagtgattctcctgcctcagcctccccagtagctgagactacagacgcacaccaccacgcccagctaattttttgtattttagtaaagatggggattcaccttgttggccaggatggtctcaatctcctgacctcatgatctgcccgccttggcctcccaaagtgctgggattacaggcctgagccaccgcgctggccagaaaagttacttagcaattaaaaaaaaagtagtacctactgatatgagcaatggcattaatgaatcttgacaatattacctttagtgaattatgccatacatccaaaaaatttatatctgtgattcagttttaatgataagctaaaacaggcaatattaatctatgctagaaaaaaatcagaaccgtccatttttttctaggtatgagtgcaggaatttattgggaagggaagagaaaatttttggaggtgaagttgtggctaaactcagaaaatatgtacccatgcakttcaatctattttgctttgcataaaaatactatgaacaaatgaagtgtctatttagtgacataaatgttaagtatttattaacataaatacttatgttgctttcaatttactttgaaatgcatttttaaaagctgatgaataaatgtatagaaaaatgaatactttgataggtataagataaagtaagtcaaatagaatccaggtggtgggtataaggcctttataaagttctttcaatttttctttttgttttaaatattttacaatgttggaaaaaattcta

SEQ ID NO: 706093 - DNA, 1428 bp, Homo sapiens
aggagaagaatgaataccatttggcactcaataggtgatatataacagggaggcaatgaggtgcttcacaagaagcagccactggcaatgactggaacctgcttcacttccaaggaagtgaaaaaacaaagtgatgcctcaagatctttcatgaggtggagtacaattttcaccatggctaggtttgtttttaaggtttatcatgtacatatctggggcctgttctgtgaagatttgaacagctggatatccttggatctctctctagcatgctaaatgtttcaagcattgcagtttcagggtagcaagactttttacatgttggttcagagttcctaaggtacatgttgagaaagaaagagaaagagcaaaagaaagagagaatagcaaatgaaagtcttatgatcagattatgacctaccctctgtaataatggagtgtcatgtttgctgcattctattggtcaaagcagctgcaaaggaccacctatgctcaaaagggaacatagacttgagcttttgatggaagaatctcaacttcacattataagaccatgtgggttgaaagttgtatcgatatggttacctttgaaaaatacaatctgccacagaaagctttcacagaatgatttcaatacaaagagaaaaagagatgatatagggatatggagaatcctattgcatttgtgttttggatgctggttgctcgtgaagcatagttgtattactgccattctctcattgggtcttaaactcacttctcttcctttcttcctcatctttgtggaattacctttatcaggactctagtagtagacagcactaattgacttatcatcctgatactactctcaatttccaggaagaccatttgttactattcttcctattccaaattcgtaggaggtgtcatgttttcatagtccatgttttggacacatttggttgggcccaggtaaatctgatttaaatttgacatagygtttttttttttctggaatttttaacatgggaaccaccacaacaaaatgaggcagttcttttaagatagtccatttgaatggctgatgaagaaaaaattttcagaagaaaattttgaaattagctttgaattcattgtgtttaggcatttgtataataactatgaggaaatatttatcagggaggggggcaaacaacaagaaaatatttatcagggaggaggggcaaatgagaaaaaatgtaaaacagaagagtggtatttaattcattggcaggagttagagtgatgtctaattgagcaatatcactttcagtaacacagcttctttttaattagttttccaagtgcagactaatattttcaatgtgatgctccagtagattcatagatgggcatcttaaaaacagttaaaattcaaagtacataaagataaatagacaaataact

SEQ ID NO: 706094 - DNA, 1339 bp, Homo sapiens
ggggtgggggaaagtcacagtcagacctggggaaagccgtctttatttagagggcgcccctagtgtagtgatggctttttgctttctttctgccacagtgcaaagcagggaaataaaaatgcacagcacgatagcgagagtttagaactctaagacagccaaaaaaaagtcatttataaaagaatgcaacatacgctaaaattagttccctagtgtatgcaaaaaagaaagtcaaactcagcacatttctttttgtgtagtcaggtactaaatgtctcttgcagcatatgaagtggataaagagaacagagacgaagaagaaaggagagagaggagtgcaaagaagaaaataagtgtggacataaattcgcttttcagtgtgtgtagtctagatactatcttagttccccaaamaatgtttgctttgtgatttcactgcataactctttcagatgttttctctctgaatggctagaagtcaacagctctagaccctaactctgtaaaagcaaaggactcaagtcctcttcaagtctttccacttataaaaaggggaataaatgagagttttatatcttgtgagctttttaaagcatttcacagaaattaaacatcagtgattacataaagttatatataacttctcaaactgaggggaaagaagccaagttgttgaggaaaccatagccaaagaaggatggctgtttagttccctgaaccacgcttttgaaatactataatcgagatcattcaatgaaacttgtttgcttaaattttttttactttattgaaaagaggggctgagaggaaggaaggcatgaactgctatttcacaaattagcataattacatccactgtatatgctattatggaaattcaatttaagaaattatagctaaaacacctagcacggcgtctggcacctgttaagggatcaataagactcaggtgtcacagtttttattattattgctgttattatcattgtgattattatagagggggatctgtgagttacaaggagattgctggtagttggataactgacccaaatcattccaaattctcatgttgtatttcatggaccatgtacagaaaatagaatgacagttccatttttgtgtcaaattgtaattagttaacgccatgccctcaaaagaaaccttgatttttatattattatccaaaatgaatttcattcccaaactcttgaatgtgaatatctttgacctgtaggagatgaaaatatgcctgtttggcataaggattattttgaggtattttgagaaattgcagacacaggagaagctctgaaaacagagtaaaagttaccctttt

SEQ ID NO: 706095 - DNA, 643 bp, Homo sapiens
caagtggcaagttggttgaaggctgctgccggggcagggggtgaagatggtgagtgttaattctctggcacttctggcctacctgctcctgggcagagcaagacagagaaattttcactgttctgcagagagaaaaaagactatgggccccaccatgcagatactgaaaagaacaaaggtaataaacagagcactcagggcatctattcaggtggcctgatcctacagagactcctccaaaaggctgggggcatcctctacatccttgtccactcacactcaccttggaggtgattctttcctggactaaagacccagatgtatctgagggtgaaaagcaggtattgttttagtactagttttggtagcaagtgaagagcacataaaattttcttrgttgttccaaaatgtccaccactttgtaataagaacaaagtctgcacagatctaaaaggaaaattctaattttagcagatttgaagcccctcaagttagtttccctggctctatgctattagccacataatccaactttgcctgcttcttgtccctcccagatttagcagtgaggctgaaattctgcagtgccatgagtgcctgcacagtttctgaactttccctcttctggcctcatatttcctga

SEQ ID NO: 706096 - DNA, 602 bp, Homo sapiens
tctgccagtgcacgaagatcatgctctgactagcccactgccccaaggagaatggaaaacatggggaaaagtccatctaacccacagacttgaggtctggaagcaaacccagctaagtctagcctagatctgctcaccctaagctggctggtagacatgtgagtgatttaaatgattcatattttaaacctcccaatgttagagcagatgttatgcagcaacagctgcctatacgttgctgaacatagctgtctgttgaaggaatacaaatatttttgaatttattatattttgcttcacagtatctgcaaatttgttgattacttttgtattaaagagaattctacaaaataaatcatatatataaaatattatttatgaagtgagaatgtctctaaaattatgtgttatatttcctcttaaacaattgtcagtcattaactttatcttcgtttgaatgaattttgttgtgtayacttaatgtataaaacatgatgttatgagatacatatagatagtaaaatagttattagagtgaagcaaattaacattatctcacataagtattcatttccccccacccacccatggcaagagcaact

SEQ ID NO: 706097 - DNA, 579 bp, Homo sapiens
tgctgcgagatccgagcttccaccaccacggtcctgggcacttacacagaatgtgccagaactattgctcccgagaactttctcatagagcactgttactcactaaaacaccctgggagacacatgttgcaagtcctgtcgtagagacagggaatccgagcttccggaagaggcaggctaggtctacctgccctccccctccctggcctctcttgggaacacaggacggtgagcttcgaggcagccctgtgggcagggggagggtggcatacctcatcgcagacatgcattgagaagatgacygagaggatgccggtagatgggtatcgcccgtgcccttgcagccagttgtcaaagacatacttgatgaaggctgggtggtagatcaggatctgcggggatgggaagacacggcccttagtgagttctggggggcaaaggacatggagcgcctgtcagatgtacatactgttgtggccatggaggcacagccatgagcctaatagatacgcctgcacttgtgggcttccatgctcgtaggaaagatggacactcatccacatcactaagagacagagg

SEQ ID NO: 706098 - DNA, 610 bp, Homo sapiens
atatctaaaatccaactacttctcaccatgtccactgctaccctcttgtccaagctactattaagtttctcctcaactattgcgacagtggcctaaactaactccctaaatgtagaggtgaaaggagagacagaaaatatgggaatatactgacccaataatgctatctaargaactagaggatgattaaatgtagcgtatataattataaggaagaaactcatatattaataatgctcaataatttttcaaaaaagatcccaagaaaatgcaacagcatggtcttttcaacgtattggcctaggacaattggatatctatatgcaacaaaaagaaagaacatatgccccactttcttatactgtcacaaaaattaacttaaaatgaaccagacttagatgtaaaagctaaaacaataaaagttctacaataaaccataggagaaacattttatgacctcaggttaggtaaggcattcctatatatgacaccaaaagcatgatcaataaaagaaaaaagatggtaaattggcctttactaaagcaaatgtttatacttcaaaagatgctactaggaaaattaaaagtccagccacaagtttcttacaaac

SEQ ID NO: 706099 - DNA, 3117 bp, Homo sapiens
aaatgctgagcatcaaacctagagtagagaaaggtctcaagtaagtactcattaccagtatttgttatttaatttcacttttgtctacattcccttgtgtgaaatggtttggataattaattaaggaaaastttccctcagggacattgctgatattgcaatcttcactagatacacttatctctacctccgcctccacctccaccttcacctccatctcttctctgtctctatctctatcttcctgttgtttatctatctaattatttataaatgaactggtgggtttgttgttgttgcagcctggctaatgttatccagacatatctgaaacctcatgagtggcatggaatggcagtccctgcttgaaccatttacctcctttcctaacaccaacaatcacacacacctgacactgacctgaagcctctggcctgtcctcggaggcaaagactgggtagacaagatgcctggttaccagcaatcttctgcaatttcctctgagctattgagattgcttttctctttgctcaaattatgtgagaaacttttaaaaaagaatttaatgtgctcttttgatatttcaggtgttcattcaaaagcctatgttattctctgtctctctctctcttttcctagttgggtaatcaaaatggcacaatcagaaatatttatatctgcaacagaaaagaagaataaatttattcatgcacaagtacattatgtacatatatatgtttgtgtatacatatatctgtataattgatatattggggagaaataaaaggtttcattaagcacacaagttctagagttagaccctctgtcgcaaattactgtcctgtcacttaactcctgccagaacaaagtgcatacttgaacaaaatgcctgctctgtaaaaatgccttgatcttgaataaaatgcctgctaggtcaaagcttctattttcccacctagaaaatgggaacaataataagaatcctcacttaatagataatggaaaaagttgcttgcagcacagagcctgctacagacaatgccttcaattaatgcaaactattaatattatgaaaagtgagtatctgttttctgacaatgttttcaataatataaattctgcctttgttcactttatttgtttgaaaaaacaaataaaaaaccaaacaaaaaagtgtcttaaaagtgtccatttgtctttcttcttgactcctagtaacgctttcctgtgtttagggaattttcacctcatgggttttggtgagtgaatgaattcatctccctctacagaaaagaagaatgcctgatgcattttctcagcctttattccaggtagtcaggtagactatggactccagcaattagatacactcctcacaacccctccattacacacacacacacacacacacacacacacacacacacggctgctggagttgcagggtctggaaggaactgtctggcagggatggagtgtgcagggtgcctagtgagttccagcgtggccgtggctgccctggctgtggcagcaccagggctctaagccgggccctgcagactggctcaatctgcagcatgggcgctctctcttacttcccattcccaggacacatcctgtgcaggggaagagtgagtccttctagttgtagccacaggcccattggtctgctgacctccacctcctcaatattcgactccccagcattgagtgtctcaaaaacagtatttttcagaaaagagggtgaacagggcaactgctttaggaggagccatccgagccagctgcttcctctcctgtctcctagggaggacccaagctgtcggagttcatacctgtcccacaaaacacgagccagagctggacaaaagtgacagggacaaccactgtccaaggttaagggagccctgaggcaccagaagatctccaagaaagccacatggaaatcataaaatggagctgaatggaggaaaagagaagttctgtaatgtggaaaaatgaagtactaacaatatttgactgttttcccttgatttagccaggttactacttcaaaacagtcagcaaagcattttaacaatgaaagctgttggggaaattaaatggctggaagtggagggaaactgtgcattgtggtgcatgcctgttgtcctagctactcaagaggctgaggcaggagggtggcttgagcccaggaattcaaggctgcagtgagccatgatcacaccactgcactccagcctggccaacatagcaagaccctatctctacaaaaataaaaataagaagtagaggggagataaaaatgtagtggtaggagtagtagtaataatatctaataattactgaaaatttactatatgtcaggaactatactaggtgtacttagctatttagtctgcataaaattttaataccagtgttattattgtatccattttcagatgagagatttgaggcacaaagagattaagaagtttgcacagggtcagacagcccctatgtgataaagatgaacagttagacattaaaacatgttttggttgggtgcagtggctcacgcctgtaatcccagcactttgggaagctgaggtgggtggactgcttgagctcagaagtcggaggccagcctgggcaacatggagaaaccccgtctctacaaaaaatacaaaattagccaggcatggtggtgtgcacctgtattcccagttactcaagaggctggggatgaaaggattgcttgagcctcagaggttgaggctgcagtgagccatgagtgtgccactgcactccagggtgggtgacagaacaagatcttgtctcaaaaaatatatgtaaagaaaaaattctccaatgacatgggaagttgctcagaatataagctgaactgaaagaatacagaacactatacatgtaaatatatctatagtccataaaatcatattaatattcatgtatccaaaatgaaaatatctacaagtgagcatatgataatgtgaatagtagtgggcctttgtgatatgaccgtagatgtttttattgttatctttccccattgctctgagtttcttcaatgagcactgttaccagcatgttctacctatcagctgtgtgact

SEQ ID NO: 706100 - DNA, 1281 bp, Homo sapiens
tgccgtagggtttttgtgcatgttctttaagtttagaaagtcttctatatttctagtctgctgaaagtttttattatgactaggtgttggattttgtaaaatgctctttctgtatctaacaatatgatcatatggtttatcttctttagcttgttgatgtgatggttacattagattttcaaatactgaattagctttgcatatctgaaataaatcccatttgctcatggtgtacaattttctttgccaactcttttcctgtagagcaaatacacattttgattgcttcaaacaagtctgctctgccccctcatggcacaccctgytcagcaaagctgaagccctgtagttaaacagtcacccccttaaacagacagttcagtgacaatccattattagttgagcaaaacccttcagggcctttcctctcactacaagcattttagcaaattctttgtcccctaaaagcagattgctctatgaaagagatacgagaaggggattctagtgccaagaggaaaagagtctatatttcagattttacataaatgtgacaatgtattcaaggaaacagtaatatttgaatagtctagaagtactttaattctttaaaactccaaagtgtatttttagctaaattgatttcccttgaccacaggtttaaattaggctgttgcggtgtgcttagtatatggacttagcttggcagaatgagaaaaaaaaaaaagccaaagttttaaaaatatacctttttgacacaactgttataatactaattcaagataaccattcatttttctgtatttttccacattaatagaaactatggtgaaaatagaacaattaatttttttctatttcctgttttttaagtcaacggttctagaggaaacaccatttctcattttcattcagcttttaatctgaaaatatatcgtgtttgtcaataactcaatgcacctgttattgaaataaatgaactagcatcttcttcaattgagggcaaagaagaaaacaaatgggaactagcattttttgaacaggaactgggcttaatgcgatatataaatataaatgcatatgtgtttcaaaacagaacagtgagataagaaataatagaaaaggcaatgaaggatcatttagattaagtagttttcccaaagccatgaaactggagagtggtagagattcaagttcaaatcaaggtacagataaccctcataaattagtatagctgaaaccacatgtctccagcgctactttttggaagtaatttcataa

SEQ ID NO: 706101 - DNA, 699 bp, Homo sapiens
tgagggagagagcttttgaccatttgttgagtgtcactacataggttagcattggtatatctaatttatagctgctaaaatggagacttctagctgggcatggtggcatgcatctgtagttccagctattcaggaggctgaggcaggaggaatgctttagctcagaagtttgaggcttcagtgagctatgactgtgccactatacttcagactgagtgacagagggacaccccatctctaaacaaataaacaaatacataaattatttttaatggaggattctaaagtctgaattgacaattgtctaacaactggtaaatagtaaagctgggatcccaactttgtctggcactggaattaatgttaaccacacygaaattcttgaggtagagaagacttgaatttttacttactttattacatgtctgcctttcttcttcactctacaacccacatgcctctcttaatttttttgaggtgaagagtaccgccatgcaaaacacagtcacacagctcacagataaagctcactgagaggggatttggggaaatgaggcaggaaagagaggtcacaatctctaagacaaacagtcccaccagactactgagatgccaccatggattagaatgcagcatttttattgtaaaagtccacatgttaggcaattccctttgtgaaaaggtttccaaatacataga

SEQ ID NO: 706102 - DNA, 614 bp, Homo sapiens
gtagggacatggatgaaattggaaatcatcattctcagcaaactwttgcaagaacaaaaaaccaaacactgcatattctcactcataggtgggaattgaacaatgagatcacatggacacaggaaggggaacatcacactctggggactgttgtggggtggggggaggggggagggatagcattgagagatatacctaatgctagatgacgagttagtgggtgcagcacaccagcatggcacatgtatatgtatgtaactaacctgcgcaatgtgcacatgtaccctaaaacttaaagtataataataaaaaataaataaataaattaaaaaaaaaacattacttacctcttctaatgttggtggtcatgcactatttatttaattacaagctgttattttatatataattttaaatatcttagagttccctggagggacagaacaaatagaatatatatatttatttatatataaatatatttatatataaaggggagtttatttagtattaactcacactatcacaatgtcctacagtaggctgtctgcaagatgaggagcaaggaaagccagttcaagtttcaaagctgaagaatgtagagtctgatgttt

SEQ ID NO: 706103 - DNA, 614 bp, Homo sapiens
gtagggacatggatgaaattggaaatcatcattctcagcaaacttttgcaagaacaaaaaaccaaacactgcatattctcactcataggtgggaattgaacaatgagatcacatggacacaggaaggggaacatcacactctggggactgttgtggggtggggggaggggggagggatagcaytgagagatatacctaatgctagatgacgagttagtgggtgcagcacaccagcatggcacatgtatatgtatgtaactaacctgcgcaatgtgcacatgtaccctaaaacttaaagtataataataaaaaataaataaataaattaaaaaaaaaacattacttacctcttctaatgttggtggtcatgcactatttatttaattacaagctgttattttatatataattttaaatatcttagagttccctggagggacagaacaaatagaatatatatatttatttatatataaatatatttatatataaaggggagtttatttagtattaactcacactatcacaatgtcctacagtaggctgtctgcaagatgaggagcaaggaaagccagttcaagtttcaaagctgaagaatgtagagtctgatgttt

SEQ ID NO: 706104 - DNA, 1424 bp, Homo sapiens
caacaacaacaaaacaaaagcctgatagaattagttttggctgtaacaaaaacccaaaataaagtcaggactgacatatgtctaagacaatcaggaccacagcttgttgccctcataaattcaacaagtctaggtgatggtccaaaaggctgctgtggtttccagacagcagggaaaaaaaaaaaaaaggaggatacatctcttcccattaattttcctctcaaaagttgtccatattcttgcacttacatttcactgtccagaactaagccacagagccatacctagcaacaggaaaagctcggaaatgtatctttttcttttatgagacggagtttcactcttgttgcccagactggagtgcagtggcacgatctcagctcactgaaacctccacctcccaggttcagtctcctgagtagctgggattacaggcgcgcgccaccacgcccagctattttttgtatttttagcagagacggagtttcatcaggttggccaggctggtctcgaactcctgacctcaggtgatcctcaagcgatccacccacctcgccctcccaaagtgcatggattactggtgtgagccaccatgcccagctgggaaatgtatcttttatcctgaacagttacatactgagaatcctattaggaataaaaagagaaatgtatgtgtgcaagcatgtgtgcatgtgtttatgcatgtgtgtgtacatgtacatgtatgtacatatacacgtctatgtgtgcatgtgtataagaatcaatgaaatgacgtgtttctttttttttttattttttatttttgagatggagtctcgctctttcgcccaggccggactgcagtggagctatctccgctcagtgcaagctccgcctcccgggttcatgccattctcctccctcagcctcctgagtagctaggattacaggcgcccgccaccacgcccagctaattttttgtatttttagtagagacggggtttcaccgtgttagccaagatggtctcgatctcctgacctcgtgatccgcccgcctcagcctcccaaagtgttgggattataggcgtgagccaccgcgcccagccaacgtgtttctttttaaagagttcaaaaatctagataaagctgagcgtggtagcctgtaattctaaaactttcagagaccaaggcaggaatatcacttgagcccatgagtttgagaccaacctgggcaatacagcgaaaccccatctctaaaaamaatttaaaaattagctgggcatggttgtgcacacccgtattcccagctactcgggagactgaggtgggatcatttgagcctggaaggtcaaggctacagtgagccgtgactgtattccagtctggcaagagagaccccatctcaaaaaaaaaaaaaagaacctagattaggctttaaggca

SEQ ID NO: 706105 - DNA, 1799 bp, Homo sapiens
cacaatcttccttttggtttccatgacacttattaccctgatttaccttctacctccttcttggccacctgtgcaggatcttccttctctatctgtccctcggggttctgtcctaggctttctgctcatcttgttcattgtcagagcttcaatagccatacatatgctgatgactctaaaatctataatcccaggctatatgtctctcaacaacaaacctatatttctagcagtcatcaggatgctttgcctggatgtctcagaaatacctcaacttaattgtccaaaactgaatttacaatcttccctatcactcagcctccaaactctgctcatcctgctttctatctcagcaactactgccactatctaccagctacaaaactaataatcttgatgagtccctctcaccacacttatataatcaattaccaagtcatttccattcttcctaaaaagcatctttcaaattatgccattactcaaaaatcatgctcaaaatcattataattatagacaaactaaggcttagggggaaaaaagaaaaaaaacagcataaaaggaaaagcctttacaattgcctacaggtcctcctgttagtgttctgatgtcagtcatctcctccttctctccctcttgttcattctgttccagccatactcacctaagagcttttttcatgaacgtgccaggcacattactgccttagggcctttacactagctgttccttatgcctgcaccattctcccagatatctacatggtcaacttcctaatctctttcaagtcttctcaaaggtcatcttctgaaggaggcctaacttgaccgccctattttaaattacaacctgtctcccagttagcacttctgatccatgttatcgtgctctacatgttccctttccctatagcacttacagctttctattgtttatatttatcttctttgttgtttttttgagatagggtctcactctgtcacccaagctggagtgcagaggcacaatcatggctcactcactgcagtctcaactgccccagacttagatgatccttccaccttagccgcctgagtggctgggaccacaggcctgcatgaccacgcacagctaatttttctattttttgtagagacagggttttgccatgttgcacaggctattcttgaactcctgggctcaagtgagccccacccaccttggcctcccaaagtgctgggattacaggcgtgagccaccgcacccagcctttattatctatttytccctattagaatgcaagttccataaaagcaagattttttttgtctgttttgttctctgatgtatctaggtacctagaacaatgttcagcttatagtaggcacatataaaaaaatacttttttgacaaaaagctggaaaaaattacaaattaaatataactataaaacaaataaaatgttaattcacatcaacgcaaagttaatttgatgagtgatattctgttgaaactacactgttggttgggcatggtgactcatgcctgtaatcccagtactttgggaggtgaggcagaaggactgctcgagtccaggagtccaagtccagcttgggcaacagagcaagactccgtctctacaaaaacgaaaataaaaaaattagccgggcatggtggtgcgcacttgtagtttcagctactcagcaagcagaggtggaaggatcacttgagcctggaagcttaaggctacagtgagccgtgatcacgccactgtactccagcctgggcaacagagcaagaccctgtcccttaaaaaaaaa

SEQ ID NO: 706106 - DNA, 1799 bp, Homo sapiens
cacaatcttccttttggtttccatgacacttattaccctgatttaccttctacctccttcttggccacctgtgcaggatcttccttctctatctgtccctcggggttctgtcctaggctttctgctcatcttgttcattgtcagagcttcaatagccatacatatgctgatgactctaaaatctataatcccaggctatatgtctctcaacaacaaacctatatttctagcagtcatcaggatgctttgcctggatgtctcagaaatacctcaacttaattgtccaaaactgaatttacaatcttccctatcactcagcctccaaactctgctcatcctgctttctatctcagcaactactgccactatctaccagctacaaaactaataatcttgatgagtccctctcaccacacttatataatcaattaccaagtcatttccattcttcctaaaaagcatctttcaaattatgccattactcaaaaatcatgctcaaaatcattataattatagacaaactaaggcttagggggaaaaaagaaaaaaaacagcataaaaggaaaagcctttacaattgcctacaggtcctcctgttagtgttctgatgtcagtcatctcctccttctctccctcttgttcattctgttccagccatactcacctaagagcttttttcatgaacgtgccaggcacattactgccttagggcctttacactagctgttccttatgcctgcaccattctcccagatatctacatggtcaacttcctaatctctttcaagtcttctcaaaggtcatcttctgaaggaggcctaacttgaccgccctattttaaattacaacctgtctcccagttagcacttctgatccatgttatcgtgctctacatgttccctttccctatagcacttacagctttctattgtttatatttatcttctttgttgtttttttgagatagggtctcactctgtcacccaagctggagtgcagaggcacaatcatggctcactcactgcagtctcaactgccccagacttagatgatccttccaccttagccgcctgagtggctgggaccacaggcctgcatgaccacgcacagctaatttttctattttttgtagagacagggttttgccatgttgcacaggctattcttgaactcctgggctcaagtgagccccacccaccttggcctcccaaagtgctgggattacaggcgtgagccaccgcacccagcctttattatctatttctccctattagaatgcaagttccataaaagcaagattttttttgtctgttttgttctctgatgtatctaggtacctagaacaatgttcagcttatagtaggcacatataaaaaaatacttttttgacaaaaagctggaaaaaattacaaattaaatataactataaaacaaataaaatgttaattcacatcaacrcaaagttaatttgatgagtgatattctgttgaaactacactgttggttgggcatggtgactcatgcctgtaatcccagtactttgggaggtgaggcagaaggactgctcgagtccaggagtccaagtccagcttgggcaacagagcaagactccgtctctacaaaaacgaaaataaaaaaattagccgggcatggtggtgcgcacttgtagtttcagctactcagcaagcagaggtggaaggatcacttgagcctggaagcttaaggctacagtgagccgtgatcacgccactgtactccagcctgggcaacagagcaagaccctgtcccttaaaaaaaaa

SEQ ID NO: 706107 - DNA, 622 bp, Homo sapiens
ttttaaatatatttgagagaatttttctgcattcttcttcagagaaaaaaaagtaattattccaacactaatctcaatctcaaactcacttgttccagtctgtagaagacattatttataaaagattcttttttttccttccactatagacaggcaaagggaaaaactggatgcttgccaaagagcttctattgccccctagtgcccattttcacacattagcagtttcgaaaccctaaggaacatagtcactgggttttggaacacagcttctagcatcctctgctgacataaccttgcaggygtaattaaattactctgttttaaaggacattaattctactttgaagttaaaatagttaagttttctcataccaattttttaaaacttttcttctttaattgaagtcaacttcaattaaatttaaattggttattgatcaaatattggtattgatgatgaaaacaatgataaaacccagccattctgagtgcctagtatgagtcctatgttgcgtgtttacatgaatcaccttattcttacatcaactcctgggaactaaaagatagttttctcccgctttgaattcttcagcctctccccatgtatcagggaaagaga

SEQ ID NO: 706108 - DNA, 1782 bp, Homo sapiens
ccctgtctctaaataaataaataaatacacacacacacaaagaacaaaaaacaaaacaaaacaaaaaacttgaggaacatagaatctgtatcactttaaattgtgtcccaaatcccctttgttattctgtggaaatgtatgtggaagttccctactgtcatcatttcaattaaaataagatacaaaaggtcacttgttgtttcattttactaatattttccgatctgttcatttataacttataaaacaaatataactagaaaactgaataagcatattactttttagttaatgtaattcattcactcatccagtaaaccatttttagggaccactccatgatttacatttgagttgtccaaataaataagaagctgatattaaatacattaaaagataaacaacatgtgagggaaagattgtaaggccatccttgaaaattagcttccctttagcttccattataatgtgggtattaatgatttaacctgttacaaatattactcagtttttgcatgtcataaaagctaaggaatttaggtatcactctaattagattgaggaatcagatatcactctaacaagctttttaatttgttgttgaagtgttcgtcacaaaaggattatgtgattcttgccactagaacgccacccaaagaggagcaaagtgagaacctcaaacatcccaaagctaagttggataacttggatgaagaatgggccacagaacatgcctgccaggttatcttatttttttgtttatatgtttaagttttatttcaaaaaagagctagaatcaagaagatttagtgaatgagtagagagaagagacatagggagaaagtagctaaagatgactgagatttttagtctgggtgtctaggaggatactgttggcattacacgaggaagaaacagatttgggatgggtgagtgggaataatgactaaattaattcacttacaagtatttattgaatgaattatatatcatcaaataaataatgttagaataaggtaaaaatagaattatttccttttctggggttgggggtgaggggagggaacttagaggacaggtcaataggtgcagcaagccaccatggcacacgtaaacctatgtgacagacttgcacattctgcgtttttgtttgtttgttttaagaaaaagaattttctttaataaataaaagatttatttccttttccaatcaactttaaatctttaaatcttttaaactcaaacgtgtttctgtgtatgtagatatatatatatatatatatggacatatatttgtgtctgtgtatgtgtttgattatggagcagtgtgtagttatatttaaaaaaaaaataaaatcttgcctgtaatcccagcactttgggaggccaaggtgggtggatcacctgaggtcaggagttcaagaccagcctggccaacatggtgaaaccccgtctctagtaaaaatatgaaaaactagccaggtgtggtggcaggtgcctgtaatcccagctacttgggaggctgaggcaggagaattgcttgaaccygggaggcggaggttgcaatgagccaagatcacaccattgcactccagactgggcgacaaagcgagactctgtctcaacaaaacaaaacgaagaaatccagtatttaattattattgttttagtctgtttgggtggctattaaggaatacctaagactgagtaatttataaagaaaaaaaggcctgtttggctcatgattctgctggctgcaagattgagcatctggtcaaagcc

SEQ ID NO: 706109 - DNA, 1895 bp, Homo sapiens
tttttgtatttgactacccagagatagacgtttaaggctacgtaatgaattggttgagggcagaaggtattaattatgaaagaccttgattcctgtcctgacaccagactagtgttggccttgggtaagttgcttaacttcgtagggcatttgctactttacatgtaaaatttagctacttcatagatttattttggggattaaatgactcaattaacatagtgtaaaaggtgggagatagagtctgatatttaataagcactcatttaagggtagtcgttatttttagtgaacatgcaatgagctacttatggataaaacacacatacacacacacacacacccaaaaatcataggggataccaagctaaaaatgacatgcttacagtgtttggacttacaatttagtaagaaaacaatatgcatgtgtgagaagggtcctcttttagggatataaacagggctttgtaagagtgtaggaagcagtgataaatttttagtttggggtgcagcttgaatgaaaagaggtggagaaaatagtacctgaactggatttttaaaaataaatgcatgctagtatttagagaagggagtgaggattttctagatgcagggaatgatataactaaaagcccagaactatgaagtacagtattcagggaagggtgactattatagtgtgtggtggaactagggaatagaatttgtggagacatcaatttagaaataagactaaaagatataccctagtttgttaactaccttgctaaagagttttaatcttactgccttattgtttagaagatttctatgtcaggaatgtggaaagtacatttggaaaggtgaaagagtcagtgaaaacagttaagacattgtacagatagtttagttgaaatatgatgaatccctggacaagggtagtggcaaaagcaatggaacagaggaatgaatgaatacaaaagacacttcagagatagaagccaaagggatgaattaattaatgacagtggtgggagaggggtgaggaaggagtcaaagatgatgatattagtcactgagcatcactgagtgatactattcactgagatcaaaccctcatgagggaggttcgggaacaaagaggattctgaacataatgatatgaagtacatttgggtagcccagggagagatgccctaaatacaaatggaaatttgggcctgaagcataaatgaagaatctaatattgtatgtaaaagaatattattataattgacaaatataatttacatcgagatacccttgaaaacctcagattgccttttgaattcttagtattagcaattttcaaaatctaggtatatagaacacatatattctctgtataacccacagagcattttaggtggaatctatcctttaataccaggctcttattttttcttctaacctaaatctgtctatttaatatcagctcttattttttgttctcttytctccttaaataaagaatacggtatgggagggtcagtgattgtggaattcacttttgcaagtgctttgccagaacctgttttatcagctcacataaaccccacctgctggggcttcgtcttaattggcagtcttgtaatcctcttgtgagatttaactgggcagctttatctataaataacattaattttcaaggatgaagtgcaaagctgcagtcatggtgatgagagattgttgagcccacctgcctttttaatccagtgttagtccctaaaccatttgtcaagttttacattgttatcacacatctagtaccttaaagaatagttcataaagaaaacttttcttagagggaatctgaaactgtcttaggatttagcttaataatattattgttattttaatgcttaattaggtaatat

SEQ ID NO: 706110 - DNA, 1895 bp, Homo sapiens
tttttgtatttgactacccagagatagacgtttaaggctacgtaatgaattggttgagggcagaaggtattaattatgaaagaccttgattcctgtcctgacaccagactagtgttggccttgggtaagttgcttaacttcgtagggcatttgctactttacatgtaaaatttagctacttcatagatttattttggggattaaatgactcaattaacatagtgtaaaaggtgggagatagagtctgatatttaataagcactcatttaagggtagtcgttatttttagtgaacatgcaatgagctacttatggataaaacacacatacacacacacacacacccaaaaatcataggggataccaagctaaaaatgacatgcttacagtgtttggacttacaatttagtaagaaaacaatatgcatgtgtgagaagggtcctcttttagggatataaacagggctttgtaagagtgtaggaagcagtgataaatttttagtttggggtgcagcttgaatgaaaagaggtggagaaaatagtacctgaactggatttttaaaaataaatgcatgctagtatttagagaagggagtgaggattttctagatgcagggaatgatataactaaaagcccagaactatgaagtacagtattcagggaagggtgactattatagtgtgtggtggaactagggaatagaatttgtggagacatcaatttagaaataagactaaaagatataccctagtttgttaactaccttgctaaagagttttaatcttactgccttattgtttagaagatttctatgtcaggaatgtggaaagtacatttggaaaggtgaaagagtcagtgaaaacagttaagacattgtacagatagtttagttgaaatatgatgaatccctggacaagggtagtggcaaaagcaatggaacagaggaatgaatgaatacaaaagacacttcagagatagaagccaaagggatgaattaattaatgacagtggtgggagaggggtgaggaaggagtcaaagatgatgatattagtcactgagcatcactgagtgatactattcactgagatcaaaccctcatgagggaggttcgggaacaaagaggattctgaacataatgatatgaagtacatttgggtagcccagggagagatgccctaaatacaaatggaaatttgggcctgaagcataaatgaagaatctaatattgtatgtaaaagaatattattataattgacaaatataatttacatcgagatacccttgaaaacctcagattgccttttgaattcttagtattagcaattttcaaaatctaggtatatagaacacatatattctctgtataacccacagagcattttaggtggaatctatcctttaataccaggctcttattttttcttctaacctaaatctgtctatttaatatcagctcttattttttgttctcttctytccttaaataaagaatacggtatgggagggtcagtgattgtggaattcacttttgcaagtgctttgccagaacctgttttatcagctcacataaaccccacctgctggggcttcgtcttaattggcagtcttgtaatcctcttgtgagatttaactgggcagctttatctataaataacattaattttcaaggatgaagtgcaaagctgcagtcatggtgatgagagattgttgagcccacctgcctttttaatccagtgttagtccctaaaccatttgtcaagttttacattgttatcacacatctagtaccttaaagaatagttcataaagaaaacttttcttagagggaatctgaaactgtcttaggatttagcttaataatattattgttattttaatgcttaattaggtaatat

SEQ ID NO: 706111 - DNA, 1895 bp, Homo sapiens
tttttgtatttgactacccagagatagacgtttaaggctacgtaatgaattggttgagggcagaaggtattaattatgaaagaccttgattcctgtcctgacaccagactagtgttggccttgggtaagttgcttaacttcgtagggcatttgctactttacatgtaaaatttagctacttcatagatttattttggggattaaatgactcaattaacatagtgtaaaaggtgggagatagagtctgatatttaataagcactcatttaagggtagtcgttatttttagtgaacatgcaatgagctacttatggataaaacacacatacacacacacacacacccaaaaatcataggggataccaagctaaaaatgacatgcttacagtgtttggacttacaatttagtaagaaaacaatatgcatgtgtgagaagggtcctcttttagggatataaacagggctttgtaagagtgtaggaagcagtgataaatttttagtttggggtgcagcttgaatgaaaagaggtggagaaaatagtacctgaactggatttttaaaaataaatgcatgctagtatttagagaagggagtgaggattttctagatgcagggaatgatataactaaaagcccagaactatgaagtacagtattcagggaagggtgactattatagtgtgtggtggaactagggaatagaatttgtggagacatcaatttagaaataagactaaaagatataccctagtttgttaactaccttgctaaagagttttaatcttactgccttattgtttagaagatttctatgtcaggaatgtggaaagtacatttggaaaggtgaaagagtcagtgaaaacagttaagacattgtacagatagtttagttgaaatatgatgaatccctggacaagggtagtggcaaaagcaatggaacagaggaatgaatgaatacaaaagacacttcagagatagaagccaaagggatgaattaattaatgacagtggtgggagaggggtgaggaaggagtcaaagatgatgatattagtcactgagcatcactgagtgatactattcactgagatcaaaccctcatgagggaggttcgggaacaaagaggattctgaacataatgatatgaagtacatttgggtagcccagggagagatgccctaaatacaaatggaaatttgggcctgaagcataaatgaagaatctaatattgtatgtaaaagaatattattataattgacaaatataatttacatcgagatacccttgaaaacctcagattgccttttgaattcttagtattagcaattttcaaaatctaggtatatagaacacatatattctctgtataacccacagagcattttaggtggaatctatcctttaataccaggctcttattttttcttctaacctaaatctgtctatttaatatcagctcttattttttgttctcttctctccttaaataaagaatacggtatgggagggtcagtgattgtggaattcacttttgcaagtgctttgccagaacctgttttatcagctcacataaaccccacctgctggggcttcgtcttaattggcagtcttgtaatcctcttgtgagatttaactgggcagctttatctataaataacattaattttcaaggatgaagtgcaaagctgcagtcatggtgatgagagattgttgagcccacctgcctttttaatccagtgttagtccctaaaccatttgtcaagttttacattgttatcacacatctagtaccttaaagaatagttcataaagaaaacttttcttagagggaatctgaaactgtcttaggatttagcttaawaatattattgttattttaatgcttaattaggtaatat

SEQ ID NO: 706112 - DNA, 619 bp, Homo sapiens
gatgttccctccaatacaagctgatgccgtcctgcttggccaaatcgacctgaacagcccagaaagctgcacggccgtacctgtcagccccaatcggtgctgcagaaattttgttaggaaaatagaggtactgagattcaatttttcgattgtctgaaggcttaatttagtgaccttggaaaatatctcctagaggtgaaagaagatgctgggaatctgctgggaggaaggaggcttccctggtaatgggtaatttgtttactctaattttgaggcctcttcaggcagccaagaaaatagtcagataggtactaccacttcttagaaaaagtgggggaggggagagccatagaaaccagtgagmgaaacccccagccatacggcactactttctcaagagcaggtaggcattatgataatatgtacatatatgttttatgtgtatatatatataaatatgcttattatgaaaattttaaacatacacaaagggaggacaataaccccatataaatatcattcagatgcaaatattactagaatgttaacactgcttctttccttcatcctgtccctccttttctttcttctttcattgcggcagctcttgctgctgctg

SEQ ID NO: 706113 - DNA, 619 bp, Homo sapiens
gatgttccctccaatacaagctgatgccgtcctgcttggccaaatcgacctgaacagcccagaaagctgcacggccgtacctgtcagccccaatcggtgctgcagaaattttgttaggaaaatagaggtactgagattcaatttttcgattgtctgaaggcttaatttagtgaccttggaaaatatctcctagaggtgaaagaagatgctgggaatctgctgggaggaaggaggcttccctggtaatgggtaatttgtttactctaattttgaggcctcttcaggcagccaagaaaatagtcagataggtactaccacttcttagaaaaagtgggggaggggagagccatagaaaccagtgagagaaacccccagccatacggcactactttctcaagagcaggtaggcattatgataatatgtacatatatgttttatgtgtatatatatataaatatgcttattatgaaaattttaaacatacacaaagggaggacaataaccccatataaatatcattcagatgcaaatattactagaatgttaayactgcttctttccttcatcctgtccctccttttctttcttctttcattgcggcagctcttgctgctgctg

SEQ ID NO: 706114 - DNA, 600 bp, Homo sapiens
tttgtagaaatgtggatctcttacttggaatagaaagaattctgactcgaaaaagtgcagttaatgtatgcttttctgggtaagatttgtgatagattttgattgagatttaaaaccatgatatataaatttagcttttttgtcaaagtaatttgccaccctagaatttgtgttggtaatttttaatgcaacttggacaatttctgaaagatgtaactttcttttttttgagacgagtctcgctttgttgcccaggctggagkgcagtgacatgatctcaggtcactgcaagctccgcctcccgggttcacaccattatcctgcctcagcctcccgagtagctgggactaccggcgcccgccaccccacctggctaattttttttttatttttagtagagacggggtttcaccgtgttagccaggatcgtctcgatctccggacctcgtgatctgcccgcctcagcctcccaaagtgctgggattacaggcgttagccaccgcgcccagcctgaaagatgaactttaaaatggggaaggatactagtaaagccatttcttactcatgtatacattttcccctccatgaaattaaagcagc

SEQ ID NO: 706115 - DNA, 1681 bp, Homo sapiens
tttattcaacttgtatgtagatttatattcattcatgtttgcaatttgaattttaaaacggtaaaacaaaaaggatgatatacacagaagaaatggaataatgatcttagtgtcacatagcagtatagagataatgttggtcaaatctttaattttaaaatggggaacaaatcttaaaaatatctcacccctctgttttttacttgtttacattttataaaatggtagtgttattaagatgcaagaatgcctgggaagacttgtatgtacttggagtggggagggtatgggtgtgccttgctttatataaacaaagctaaattctttatatatgatgatttgttactataagtaccaatacaactattttttatcctgtttttctgaaagtctcactttattctttacatttttggattgttccaataacttaccctatttctttttaccatgtgcctatccaatgcctctgctattattttccagctgcccaaaattaaacatgtcaaggcttgcttttattataaatttagtggcaaaaatcatggtatagaatactaaataatcggaaaaagtgctcatttattcaatctaatcttgtgttcctttgtaggaggatgtcaaaaatgaatatttgaaaaaggaacaacaaaaagaatggaaagatttcaaggtataataatatataccaacaaaataaataggataattattctttccttatagtagaatatattaaattagtgataacttcagaaaatataaacattaagggaaattaaacttttataatgaatgaatgttaaagaaaatatttctactgaaaacatattctttagtcctttatatcttaaaagagcctgaaaataaatttgtagtaagtccatattttttcttccaaatttagagggaagaaaaaatgcattaattactacagtatgctaagcagtttatgtatgttgtctcatttaacacctttaactataattgttgcctttcttattttatggaagaggccactaaggcctggagaaattaaggaacttgtctgagtaacacaagtagttaataaaactgccagtaatctgactcaggtttgcccaattcaaactataatgagttcttcacaatttgttgtgctttctgctatagaatgcagttggcaagcgagaataataaactattttataatatgtatgtcaaaggaagaaaatattgactatggtgattttaatactgctatgggattaatccaaatttttggcactttgaaaatctgactaccagaatcatcatcaccattgacattatgtctcatgtcttcaccattgcttatccaacaccttcagtaaggtatgcacagtgggtgaaactctttaaagatctcagttaactacatytttaaatgtattgagaaacaaaataaagataacttggagactttgaagcagctgagaaatacagtctcttcctgtagtagaatatacaaaaggaatacaacataaagagctaagataatgtattgtcttttaaagaagcaccttctcttttatttgtttcgctaacacagtagcttaatatgctatgagataccagaccataaatagaaattaaaaatggcaggcagagattttaaatagggcattcttttaaacaaatatactctggtggactccttaga

SEQ ID NO: 706116 - DNA, 1989 bp, Homo sapiens
tgaaagccaccaggattgacaaattytggaaggggacctaggatgatggtgttgttccagtatcatcagaaaactttccccacggacagtgtctcctcctcaatgcaggccatggtctggtgtggtgggaagagcagaggccctgaagtagcccaggtctcatcaacgcctgaccagctcttaaagaagaaacaggttctgggggagagtgacttgcccacggccacatcgagcttgtgcccagctcagtccatcagtttccagaactggctctttccagcacatcaagctgtcctgaccctgtgtctctatatgggcaaaaaagcaattttcaaaggaaggtgaacaagcactccagcagccaagcaagacacttagctatcacagcctgatactggaagtcagaagaaacgctgaggatttgggctgggaccagaataccagggcagccatttgatcatctccctggggaaagagcttctcaacctctgtttcaggggaacctctgttttctcaagtagcctgggagccaatgtggccttcaaccctctggcagggacccaggggagcgaaggccagcagaacaggctcagtggccagctagaccacagcatggcttcctgcaagggcgaggggccctgcagctgacccgctagggcccaccaagcctgccagaccatccctgctgagaatgatggggcccaagctgtgccagaggcaggtcatgagccagcctgcaccccaggccagcacgctccctggtgccctgggcacatttaacaagccgtcagcagtggagtggggcagagccaggagccaggaggcagcgccgcttcagacttcaaagctggcgagtgctcctgatggcgtctgcatgtttacacttggttgggccaatgctgccagctcctgtggcccagccctaaggccttccctgaccggcgccagtgggtgccagacccaggatggctggcacacctggccttatcccaccactgtggaagggggatggtgtctgctatcaccctagctgggaacccaggcatctgcatttccagaggaaagtccaaataaatagtactgatgatacccactgtttacccagggcccattctgtgccaggtggagtactcagcatgttacatatagcacatatacctgccatgtcctgggacccaactgccagccagctaacatgctaaggttgggtattgtctttgtcctgcaggtggtgtggacctaaaagagatttctgagtaagagctggcaggaccccctttgttttgcagaaaattactggggtggagctatgcatgctgccaggggcaaagaaggctatggtgagacccatgaaaaggtggtggcttggggaggtgaggaaggcatcctggggcgtggtaacagtgagaagtctgctgtggaagccagcaggtattgcagagcactcactgtcctaagcaccagaccctcacctcctccttcatgttcacacagtcctgaaaagtcatgatttgttactagtggagaagcctggctccatagggtgagtggctcccagaccattgagctctgcggctccagacgaccaggtgcccagagcctcagggcgagactgggatacagaagggtaggtgagagaggctgagcctcccctctctaggctgcctgggccggccctgctccaaggatttctctagcacaggtgacctagaacaccccccatagcccccaacctgcattactcccccctgcagggtgaagggcctaggttcgatggctggccctgcctgcctctttaagctccctgtccctgccctcccagatgcccagggccaggcattatttggcctctatgctttacagaagcagtccctggacctggaatgcccctcctccaccttcctgtttccccacatggcccctagtgtctgtgcagtgaaccttccagtcttacaagatacacttaaaaggtcaccattttgtgctttt

SEQ ID NO: 706117 - DNA, 1989 bp, Homo sapiens
tgaaagccaccaggattgacaaattttggaaggggacctaggatgatggtgttgttccagtatcatcagaaaactttccccacggacagtgtctcctcctcaatgcaggccatggtctggtgtggtgggaagagcagaggccctgaagtagcccaggtctcatcaacgcctgaccagctcttaaagaagaaacaggttctgggggagagtgacttgcccacggccacatcgagcttgtgcccagctcagtccatcagtttccagaactggctctttccagcacatcaagctgtcctgaccctgtgtctctatatgggcaaaaaagcaattttcaaaggaaggtgaacaagcactccagcagccaagcaagacacttagctatcacagcctgatactggaagtcagaagaaacgctgaggatttgggctgggaccagaataccagggcagccatttgatcatctccctggggaaagagcttctcaacctctgtttcaggggaacctctgttttctcaagtagcctgggagccaatgtggccttcaaccctctggcagggacccaggggagcgarggccagcagaacaggctcagtggccagctagaccacagcatggcttcctgcaagggcgaggggccctgcagctgacccgctagggcccaccaagcctgccagaccatccctgctgagaatgatggggcccaagctgtgccagaggcaggtcatgagccagcctgcaccccaggccagcacgctccctggtgccctgggcacatttaacaagccgtcagcagtggagtggggcagagccaggagccaggaggcagcgccgcttcagacttcaaagctggcgagtgctcctgatggcgtctgcatgtttacacttggttgggccaatgctgccagctcctgtggcccagccctaaggccttccctgaccggcgccagtgggtgccagacccaggatggctggcacacctggccttatcccaccactgtggaagggggatggtgtctgctatcaccctagctgggaacccaggcatctgcatttccagaggaaagtccaaataaatagtactgatgatacccactgtttacccagggcccattctgtgccaggtggagtactcagcatgttacatatagcacatatacctgccatgtcctgggacccaactgccagccagctaacatgctaaggttgggtattgtctttgtcctgcaggtggtgtggacctaaaagagatttctgagtaagagctggcaggaccccctttgttttgcagaaaattactggggtggagctatgcatgctgccaggggcaaagaaggctatggtgagacccatgaaaaggtggtggcttggggaggtgaggaaggcatcctggggcgtggtaacagtgagaagtctgctgtggaagccagcaggtattgcagagcactcactgtcctaagcaccagaccctcacctcctccttcatgttcacacagtcctgaaaagtcatgatttgttactagtggagaagcctggctccatagggtgagtggctcccagaccattgagctctgcggctccagacgaccaggtgcccagagcctcagggcgagactgggatacagaagggtaggtgagagaggctgagcctcccctctctaggctgcctgggccggccctgctccaaggatttctctagcacaggtgacctagaacaccccccatagcccccaacctgcattactcccccctgcagggtgaagggcctaggttcgatggctggccctgcctgcctctttaagctccctgtccctgccctcccagatgcccagggccaggcattatttggcctctatgctttacagaagcagtccctggacctggaatgcccctcctccaccttcctgtttccccacatggcccctagtgtctgtgcagtgaaccttccagtcttacaagatacacttaaaaggtcaccattttgtgctttt

SEQ ID NO: 706118 - DNA, 1079 bp, Homo sapiens
gttgtctttccttttagtataggaaggagatcttttacatgggaatttcatcttttgcttttaagaaacactacaaaggtcagtgattttattttatttgtatctgatgtctttcaactgtctttattttaatagtcagtatgccagagtagctgaggagttttggaaaaagagttttgcttaaagaaggataaagaggaagaggtaaacraaggagaggggaaggtgttggagaagaaaatctcagctagctttagacaatatcttgcagtgaggcagcctttgagtcttgaatgtgttctggagcctcaagataccaactgagataggagtcccatttggactgtattattttagttcagtttgaggaaaacagactgcgtgaatgatccccgtaatgttggcacatattaccagctggcgtcccagaaagagggaactatgttggcatgcctttgaactttgagagcctgtgtgtaaataaattaatctaggtgattcggtttaatgcctaatacacaaaagccaaattaaactctaagcatgcaaacgactcagaaaataaagtacaaacttaccaggaagcatgagaagccttctctaacagaaaaatctctgtaacccggcctcataaccaggagggagaaaatccctcttaaacaggccgtctctggctgggtgtagtggctcacgcctgtaatcccagcactttgggaggccgaggcgggcagatcacttgagctcaggacttcaagaccagcctggctaacagggtgaaaccacatgtctactaaaaaacacaaaaattatccaggcgtagtggcgcacacctgtaatcccagttactcgggaggacgatgcacgagaatcacttgagcctgggaggtgaaggttgcagtgagcccagatcacaccactgcactgcagcctgtgcgacagagcaaaacactgtctcaaaaaaaaaaaaaaaaaaagaaagaaaagagaaagacaagataaaaaagacaagacaagaaaagaaaggaaaagaaaagaggaggtttcataaccaggagacagagaaagacccttcctaacaa

SEQ ID NO: 706119 - DNA, 1079 bp, Homo sapiens
gttgtctttccttttagtataggaaggagatcttttacatgggaatttcatcttttgcttttaagaaacactacaaaggtcagtgattttattttatttgtatctgatgtctttcaactgtctttattttaatagtcagtatgccagagtagctgaggagttttggaaaaagagttttgcttaaagaaggataaagaggaagaggtaaacgaaggagaggggaaggygttggagaagaaaatctcagctagctttagacaatatcttgcagtgaggcagcctttgagtcttgaatgtgttctggagcctcaagataccaactgagataggagtcccatttggactgtattattttagttcagtttgaggaaaacagactgcgtgaatgatccccgtaatgttggcacatattaccagctggcgtcccagaaagagggaactatgttggcatgcctttgaactttgagagcctgtgtgtaaataaattaatctaggtgattcggtttaatgcctaatacacaaaagccaaattaaactctaagcatgcaaacgactcagaaaataaagtacaaacttaccaggaagcatgagaagccttctctaacagaaaaatctctgtaacccggcctcataaccaggagggagaaaatccctcttaaacaggccgtctctggctgggtgtagtggctcacgcctgtaatcccagcactttgggaggccgaggcgggcagatcacttgagctcaggacttcaagaccagcctggctaacagggtgaaaccacatgtctactaaaaaacacaaaaattatccaggcgtagtggcgcacacctgtaatcccagttactcgggaggacgatgcacgagaatcacttgagcctgggaggtgaaggttgcagtgagcccagatcacaccactgcactgcagcctgtgcgacagagcaaaacactgtctcaaaaaaaaaaaaaaaaaaagaaagaaaagagaaagacaagataaaaaagacaagacaagaaaagaaaggaaaagaaaagaggaggtttcataaccaggagacagagaaagacccttcctaacaa

SEQ ID NO: 706120 - DNA, 1079 bp, Homo sapiens
gttgtctttccttttagtataggaaggagatcttttacatgggaatttcatcttttgcttttaagaaacactacaaaggtcagtgattttattttatttgtatctgatgtctttcaactgtctttattttaatagtcagtatgccagagtagctgaggagttttggaaaaagagttttgcttaaagaaggataaagaggaagaggtaaacgaaggagaggggaaggtkttggagaagaaaatctcagctagctttagacaatatcttgcagtgaggcagcctttgagtcttgaatgtgttctggagcctcaagataccaactgagataggagtcccatttggactgtattattttagttcagtttgaggaaaacagactgcgtgaatgatccccgtaatgttggcacatattaccagctggcgtcccagaaagagggaactatgttggcatgcctttgaactttgagagcctgtgtgtaaataaattaatctaggtgattcggtttaatgcctaatacacaaaagccaaattaaactctaagcatgcaaacgactcagaaaataaagtacaaacttaccaggaagcatgagaagccttctctaacagaaaaatctctgtaacccggcctcataaccaggagggagaaaatccctcttaaacaggccgtctctggctgggtgtagtggctcacgcctgtaatcccagcactttgggaggccgaggcgggcagatcacttgagctcaggacttcaagaccagcctggctaacagggtgaaaccacatgtctactaaaaaacacaaaaattatccaggcgtagtggcgcacacctgtaatcccagttactcgggaggacgatgcacgagaatcacttgagcctgggaggtgaaggttgcagtgagcccagatcacaccactgcactgcagcctgtgcgacagagcaaaacactgtctcaaaaaaaaaaaaaaaaaaagaaagaaaagagaaagacaagataaaaaagacaagacaagaaaagaaaggaaaagaaaagaggaggtttcataaccaggagacagagaaagacccttcctaacaa

SEQ ID NO: 706121 - DNA, 1079 bp, Homo sapiens
gttgtctttccttttagtataggaaggagatcttttacatgggaatttcatcttttgcttttaagaaacactacaaaggtcagtgattttattttatttgtatctgatgtctttcaactgtctttattttaatagtcagtatgccagagtagctgaggagttttggaaaaagagttttgcttaaagaaggataaagaggaagaggtaaacgaaggagaggggaaggtgttggagaagaaaatctcagctagctttagacartatcttgcagtgaggcagcctttgagtcttgaatgtgttctggagcctcaagataccaactgagataggagtcccatttggactgtattattttagttcagtttgaggaaaacagactgcgtgaatgatccccgtaatgttggcacatattaccagctggcgtcccagaaagagggaactatgttggcatgcctttgaactttgagagcctgtgtgtaaataaattaatctaggtgattcggtttaatgcctaatacacaaaagccaaattaaactctaagcatgcaaacgactcagaaaataaagtacaaacttaccaggaagcatgagaagccttctctaacagaaaaatctctgtaacccggcctcataaccaggagggagaaaatccctcttaaacaggccgtctctggctgggtgtagtggctcacgcctgtaatcccagcactttgggaggccgaggcgggcagatcacttgagctcaggacttcaagaccagcctggctaacagggtgaaaccacatgtctactaaaaaacacaaaaattatccaggcgtagtggcgcacacctgtaatcccagttactcgggaggacgatgcacgagaatcacttgagcctgggaggtgaaggttgcagtgagcccagatcacaccactgcactgcagcctgtgcgacagagcaaaacactgtctcaaaaaaaaaaaaaaaaaaagaaagaaaagagaaagacaagataaaaaagacaagacaagaaaagaaaggaaaagaaaagaggaggtttcataaccaggagacagagaaagacccttcctaacaa

SEQ ID NO: 706122 - DNA, 1079 bp, Homo sapiens
gttgtctttccttttagtataggaaggagatcttttacatgggaatttcatcttttgcttttaagaaacactacaaaggtcagtgattttattttatttgtatctgatgtctttcaactgtctttattttaatagtcagtatgccagagtagctgaggagttttggaaaaagagttttgcttaaagaaggataaagaggaagaggtaaacgaaggagaggggaaggtgttggagaagaaaatctcagctagctttagacaatatcttgcagtgaggcagcctttgagtcttgaatgtgttctggagcctcaagataccaactgagataggagtcccatttggactgtattattttagttcagtttgaggaaaacagactgcgtgaatgatccccrtaatgttggcacatattaccagctggcgtcccagaaagagggaactatgttggcatgcctttgaactttgagagcctgtgtgtaaataaattaatctaggtgattcggtttaatgcctaatacacaaaagccaaattaaactctaagcatgcaaacgactcagaaaataaagtacaaacttaccaggaagcatgagaagccttctctaacagaaaaatctctgtaacccggcctcataaccaggagggagaaaatccctcttaaacaggccgtctctggctgggtgtagtggctcacgcctgtaatcccagcactttgggaggccgaggcgggcagatcacttgagctcaggacttcaagaccagcctggctaacagggtgaaaccacatgtctactaaaaaacacaaaaattatccaggcgtagtggcgcacacctgtaatcccagttactcgggaggacgatgcacgagaatcacttgagcctgggaggtgaaggttgcagtgagcccagatcacaccactgcactgcagcctgtgcgacagagcaaaacactgtctcaaaaaaaaaaaaaaaaaaagaaagaaaagagaaagacaagataaaaaagacaagacaagaaaagaaaggaaaagaaaagaggaggtttcataaccaggagacagagaaagacccttcctaacaa

SEQ ID NO: 706123 - DNA, 1256 bp, Homo sapiens
attgactagagaaaacaagatatttgttcataatcttgtgcaatgataagagcagtatttgtgaaacctaaaatggtcatcaataaatcagcaaccaggttgggtgctgtggctcacgcctgtaatcccagcactttgggaggctgaggcggatggatcatctgaggtcaggagtttgagaccaccctggccaacatgctgaaaccccgtctctactaaaaatacaaaaattagctgggcatggtggcatacccctgtaatcccagctactcgggggactgaggcacaagaataacttgaacccaggaagtggaggttgcagtgagccaagattataccactgcactccagcctaggcgacagagcgagactcatctcaaaaataaataaataaataacataaaataaatcagcaatcagcaaagcctaacatttcctttggaagctgatgaggaaggtgccaaacacttgggccttgcactaaagacaaaattgaatgaactccagcctaccttttaaacgttgctaaatggctacctgcaagttcttgttttagcagccatctttaattttaagtagcatgaaagcattcttaattgtgaggttgtaggaaagctcagtctttcagcatggagatacttaccctgctctaggtcagctttgctagacttgattttgaaagacaggaaatctcgcaggggcaggtagtaaaatactgaagggcacattagaaaaaaatccacgttgtgaattacaattaaagggtaaaaaacaaaacaaagcagaaaaactgggtatattagtttgctaaggctcctgtaatgaaataccacagactggatggcttaaaaaggatagatttattttcccacagttcttgaggctagatgtccaaatcaaggtgttggcaggtttagtttcttctggggcaactctccttggcttggagatggcagcctttttgctygcaaacggtagccttttcactgtgcttcctcattcttggtatttctgcttattcaaatttattgtttttttccgatttttgtaacagctttattgagacgtaatttagatgccatacaattcactcattaattaatttttttactttatatttaagttttgtgggtccatagtaggtgcatatatttatggggtacatgggatactttgaaataagcatacaatgcataacagtcacatcagggtaaatagggtatctatcacctaaagcatttattctttctgttaca

SEQ ID NO: 706124 - DNA, 1256 bp, Homo sapiens
attgactagagaaaacaagatatttgttcataatcttgtgcaatgataagagcagtatttgtgaaacctaaaatggtcatcaataaatcagcaaccaggttgggtgctgtggctcacgcctgtaatcccagcactttgggaggctgaggcggatggatcatctgaggtcaggagtttgagaccaccctggccaacatgctgaaaccccgtctctactaaaaatacaaaaattagctgggcatggtggcatacccctgtaatcccagctactcgggggactgaggcacaagaataacttgaacccaggaagtggaggttgcagtgagccaagattataccactgcactccagcctaggcgacagagcgagactcatctcaaaaataaataaataaataacataaaataaatcagcaatcagcaaagcctaacatttcctttggaagctgatgaggaaggtgccaaacacttgggccttgcactaaagacaaaattgaatgaactccagcctaccttttaaacgttgctaaatggctacctgcaagttcttgttttagcagccatctttaattttaagtagcatgaaagcattcttaattgtgaggttgtaggaaagctcagtctttcagcatggagatacttaccctgctctaggtcagctttgctagacttgattttgaaagacaggaaatctcgcaggggcaggtagtaaaatactgaagggcacattagaaaaaaatccacgttgtgaattacaattaaagggtaaaaaacaaaacaaagcagaaaaactgggtatattagtttgctaaggctcctgtaatgaaataccacagactggatggcttaaaaaggatagatttattttcccacagttcttgaggctagatgtccaaatcaaggtgttggcaggtttagtttcttctggggcaactctccttggcttggagatggcagcctttttgctcgcaaacggtagccttttcactgtgcttcctcattcttggtatttctgcttattcaaatttattgtttttttccgatttttgtaacagctttattgagacgtaatttakatgccatacaattcactcattaattaatttttttactttatatttaagttttgtgggtccatagtaggtgcatatatttatggggtacatgggatactttgaaataagcatacaatgcataacagtcacatcagggtaaatagggtatctatcacctaaagcatttattctttctgttaca

SEQ ID NO: 706125 - DNA, 608 bp, Homo sapiens
gcttacgcctgtaatcccagcactttgggaggctgaggcgggcagatcacctgaggtcaggagttcgagactggccaatatggagaaaccccatctctactaaaaatacaaaattagctgggcgtggtggcacatgcctgtaatcacagctactcaggaggctgaggcaggagaatcgcttgaacccgggaggcagaggctgcagtgagccaagattgtgccactgcactccaggctgggcaacaagagtgaaactccatctcaaaaaaaaaaaaaaaaaaagaaaagaaaagaaatctttcttttgccctgtttaccttccagtttatttttaactcttcacaaggctgttgtgtcagggcccttgtgtcagsgccctcagagtagtgctccgggttatgaagaaaatgtacagagacagaaagccagtctaacggtgtgagcaaagcaagaatttgacactaaaagtgactacagaggcagcaaaaaggagcacagccagcaggcccagttctttcaagaaagaatacttatctcaggaaaacttggcgctgctcttccattttattttttcctttttctgtaaaatatgctaaaagatacctacc

SEQ ID NO: 706126 - DNA, 1445 bp, Homo sapiens
aggcaaagttggaaaaaaattgtgagggaggctcctaggmagaggaaacagcatgcaaagtctcagagatgacttgataagtttttaaaactagaaaaactttggctgcagtattgcgaggttgaggtggcggggggagcggcaaggagagaatgagaagacagaaaagatgaggagacaagatagatttgaaagacatgactggagatcttgagggccttttattttgaaggggatgggatagaatggagaaattgaatttttaacaaaaatggcctgatcagatttgatggcaaaaaggtaactgtgatagcaatgttgaagcatgtgcccaaagtatgtattgggatggagactagaggcaagaaaaacaggatgttaatgaaataatcctgaagaaatgggagaaagatctgaaatagttgcactaataagagagagtacaggaagtaaacttagtttatttactgggtcaagcttgcctaaaaaatatttgggggcggggggaattctccctccagttacctttattagaatgttacaataaaatcaagccaggcacagtggcttatgcctgtaattccagcactttgggaggccaaagcaggaggattgcttgagtccaagagtttgagatcagcctgtgcaacatgatgaaactgtgtctctacaaaaaaattaggcatagtggcatgtgcctgtggtcccagctgctctggaagctgaggtgggaggatcccttgagcccagaaggtcaaggttgcagtgagccatgttgcagcagtgcactctagcctaggtgacagagtgagaccctgtctctcaaaaaaaaaaaaaaaaagtttatagaaaaacaaaatatgatattctaataaaataacttgaaacaatagtatgaacttcctatgtttttagctcttaaagaactacgaaactaaagtttacataacattggaaacatgtgctacatgtttttttttttttgcaaatcaaatctcctcttgaaactcaaatgtaggactaactgccacaatttcatttcttttaaatttggccatgtctgtactaactgctgtgatccatgtctcagttctcttaccactttactagaacctttgggagacttttgttcattctttgactgatatcatttggctttcaagtggccagaaaaaagaattcattatctatttctgttccatctgcctcagacaaaatactattatgtgttgccaacaagatcataaacctaaataaaacacaggttctaaaatcacatggcagtacttagtataagtgggtatcaaggtgactgggactgtgcttacagtaattatagattactaaaatcacaaaatggaaaaaagttcatgtagagaattcaaagaatttagtttgatgtagatagagattataacaatccttttgtcacatacctaaagtgg

SEQ ID NO: 706127 - DNA, 1445 bp, Homo sapiens
aggcaaagttggaaaaaaattgtgagggaggctcctaggcagaggaaacagcatgcaaagtctcagagatgacttgataagtttttaaaactagaaaaactttggctgcagtattgcgaggttgaggtggcggggggagcggcaaggagagaatgagaagacagaaaagatgaggagacaagatagatttgaaagacatgactggagatcttgagggccttttattttgaaggggatgggatagaatggagaaattgaatttttaacaaaaatggcctgatcagatttgatggcaaaaaggtaactgtgatagcaatgttgaagcatgtgcccaaagtatgtattgggatggagactagaggcaagaaaaacaggatgttaatgaaataatcctgaagaaatgkgagaaagatctgaaatagttgcactaataagagagagtacaggaagtaaacttagtttatttactgggtcaagcttgcctaaaaaatatttgggggcggggggaattctccctccagttacctttattagaatgttacaataaaatcaagccaggcacagtggcttatgcctgtaattccagcactttgggaggccaaagcaggaggattgcttgagtccaagagtttgagatcagcctgtgcaacatgatgaaactgtgtctctacaaaaaaattaggcatagtggcatgtgcctgtggtcccagctgctctggaagctgaggtgggaggatcccttgagcccagaaggtcaaggttgcagtgagccatgttgcagcagtgcactctagcctaggtgacagagtgagaccctgtctctcaaaaaaaaaaaaaaaaagtttatagaaaaacaaaatatgatattctaataaaataacttgaaacaatagtatgaacttcctatgtttttagctcttaaagaactacgaaactaaagtttacataacattggaaacatgtgctacatgtttttttttttttgcaaatcaaatctcctcttgaaactcaaatgtaggactaactgccacaatttcatttcttttaaatttggccatgtctgtactaactgctgtgatccatgtctcagttctcttaccactttactagaacctttgggagacttttgttcattctttgactgatatcatttggctttcaagtggccagaaaaaagaattcattatctatttctgttccatctgcctcagacaaaatactattatgtgttgccaacaagatcataaacctaaataaaacacaggttctaaaatcacatggcagtacttagtataagtgggtatcaaggtgactgggactgtgcttacagtaattatagattactaaaatcacaaaatggaaaaaagttcatgtagagaattcaaagaatttagtttgatgtagatagagattataacaatccttttgtcacatacctaaagtgg

SEQ ID NO: 706128 - DNA, 1114 bp, Homo sapiens
attctcctgcctcagcctcccgagtagctgggattacaggcgcacaccactacgcccggctaattttttttttttttttttggkagagacggggtttcaccatgttggccagactggtctcaacctcctgacctcgtgatctgccaacctcagcctcccaaagtgctgggattacaggccattagccaccacgcccagcctgcagattttaatttacagaatctatagtttcagggatacatgtacagtagacattttcataactgactctcacttaattgacttgccagattaagaggttctccacatcctctttaatgcatcccgctgaggtccatggcactctgcacactctatgttagtaggctactcactgttataccctacgcttctgttctcttcagttttatgcttacttagagtaaacttggtttattcccaaatttatttataccagttgcatttgttactaagttattatttaatgaaataagaggtaagcatattaatgcaaaagaaaagaggattattgtttctacaaaacccaaattgaatgctttaagaaagagtcaacaagaaaagtcacaatttaaattaagaacagtcagagtgattctatgcttgttcccagccatgttcaaatacaggtacagaataggcagagcatgaaggaggtagagaaggtacagggaattaaaggtgtacctaataggttaatgagtatcatgatgaatattggactttaagctggttaaggagaaaaacaagaacatgaaggtcttgagaggtgatgataagatggtaggctttgtcaactggagggcattgggttatagtcagagtcatctgaaatattgcagattgtgattagaggatgaaatacttgaaattaagattatgaagggggttcagttaatggtaataatggtaatgacaagaagggattaggtgctaaagtgctgtaaaggacaactaaataggtgtaaataaaaagacagcagaggccaggttattggaaggatactgaaatcaccaagaattaccccaggaatgtaattggaggaagacaatgaaatggtcaaagaatagagtgtcatgtaattcagtaaatgat

SEQ ID NO: 706129 - DNA, 610 bp, Homo sapiens
ctccgaaagtgttaggattacaggcgtgagccactgtgcacggcagaagtttaagattggttctcccatgagttctttcctaaataaaatccattaatttctaacgcttggggaagttttaaagttgtggtgaatgaactcacacggaaggttcaaattagaatgtgtgtctagcagtggtcatttacaggtagtgagattggttggtttttcattgttttatcagtgttccttcatttaattgttcaaccgttaaagtttatgggaggccattgttttggaccagtctcctgtactaggtcccagcagacctgggkgtgtgtgtgtgtgtgtgtgtgtgtttgttgctctgtcacccaggctggagtgcagtggggtgatctcggctcactgcaacctccgtctcctgggttcaaggaattcatgtgcctcagcctcgtaagtagctgggactacaggcgcaggccaccacgcctggcaatttttttgtatttttagtagagatgaggtttcaccatgttggccaggctgatcccgaactcctgacctaaagtgatccacccgcctcggcctcccaaagtgctgggattacaagtatgagccaccgcgt

SEQ ID NO: 706130 - DNA, 673 bp, Homo sapiens
aaagcttatagatttgattctaattaagttgtcattcttatgaaaaacattatttttttatgctgaaaagatacacatatatttagagttagccagctggactcagtttaggtgatcccaattttgttacaacatcgaaagcatcataatcaggagcaagtcgaacatatgccttgttctctttatcaggacaaatcagggtggtgaccttggccacatcactgtcatagagcttcttcacagcctgtctgatctggtgcttgttggctttaacatccacagtgaacacaagcgtgttgttttcttctatcttcttcacggccgactcagtggtcagcggaaacttgatgatagcatagtggccaagcttgtttctcctgggggtgctcttccgaggatatctgggctgcctccggagtcgcagtgtcttgggccgcctgaaggtgggtgacatgcggatcttcttttttgcgtgtggctgcggacacctttcaacactgccttcttggcctttaaarccttcgctttggcttcggctttaggaggagcaggagcttccttcgctttcggtgccatcttgtgaaaagcgaaaaacattatttcaaaaataatttgtttacagtaaatctgcctatgaatagtttccaaagtacttttggtaatttttaacctt

SEQ ID NO: 706131 - DNA, 673 bp, Homo sapiens
aaagcttatagatttgattctaattaagttgtcattcttatgaaaaacattatttttttatgctgaaaagatacacatatatttagagttagccagctggactcagtttaggtgatcccaattttgttacaacatcgaaagcatcataatcaggagcaagtcgaacatatgccttgttctctttatcaggacaaatcagggtggtgaccttggccacatcactgtcatagagcttcttcacagcctgtctgatctggtgcttgttggctttaacatccacagtgaacacaagcgtgttgttttcttctatcttcttcacggccgactcagtggtcagcggaaacttgatgatagcatagtggccaagcttgtttctcctgggggtgctcttccgaggatatctgggctgcctccggagtcgcagtgtcttgggccgcctgaaggtgggtgacatgcggatcttcttttttgcgtgtggctgcggacacctttcaacactgccttcttggcctttaaagccttcgctttggcttcggctttaggaggagcaggagcttccttcgctttcggtgccrtcttgtgaaaagcgaaaaacattatttcaaaaataatttgtttacagtaaatctgcctatgaatagtttccaaagtacttttggtaatttttaacctt

SEQ ID NO: 706132 - DNA, 2572 bp, Homo sapiens
aaagactaaagttaatctgtgcctttgtgcgggtgggctaagagcatgatgacttttatcattctattgatttaaagaaaactatccttgacttaccagtgtgtaaggccatgaaagcataattctgttgaaagcatatattgttaatgggtgttgggaaccgtgcactttccgctgctgtgggagcatgtccttggaggtacctttcatctgttttctcaactccaaacatcttaggaccatgggttgtgactggtaggactatgtatcttgctgctttcaagacggagtatattttcacgtggtktcactctggctgtcctgtttccctaatactgtcacttcaccctctgtgattctgatgctacaaatgatagatatcgttttagcattttcttacgggtcctagcgattctattcatttttctttcagtctctttctctgacttgttcacaatgaacaatttccttttgggataggttgctatttctgttttcgcaggtggtttacctgtcttcccagccagtcacagtggtccttgtccccatggtgggtccggggcaagagagggccctgggttgggggtggggttcagttgaagatggggtgagttttgaggggagcactacttgagtcccagaggcataggaaacagcagagggaggtgggattcccttatcctcaatgaggatgggcatggagggtttggggcgtggcgctgggaacggcagccctccccagcccacagccgcgcatgctccctgggctcccgcctcagtgcgcatgttcactgggcgtcttctgcccggccccttcgcccacgtgaagaacgccagggagctgtgaggcagtgctgtgtggttcctgccgtccggactctttttcctctactgagattcatctggtaggtctgcaggccagtcatcccgggggctgaagtgtgagtgagggtggagagggccttgggtgggtcaggcgggtcccgcttcctggtctgtggcctccgagggagaagggccacgaggtcgtcctccttcccttcacaggctgcgaggccaccggcggcttcgtggtcgtgaaggggcctggacggggaggaaggtgggccgtggaggggaggcggtcaggggctcaggtgaagatggggtgagtgctgttggggggatggaagtcccgaggtgccgggaacccccgacgacacagggcagattccctgaatggggcctccggcgggggcgaggcgggcggtgaagaaggggcctggcacctgggaaggctgcggcctggtgagcgccccccccagcggtgtggagtgcggagcgcctgagtgagaagcactgcaaggtctcacctccgccatggaaggtccgaaaacagtgggaaggagtgggcgaggcagtgcggtccaaccaaacttgttgtgagggggggtgaatggctctaggaagtgggagtgtgcccaaagcagcaatcacgagaattgtgattcactagggttttcgtggggagtgcacttgtgaaactaaacctcatcagaaatgacctctgtctgcggggcgcagtggcgctcgcctacgtagtcccagttactcgggacactgaggtgggaggatcccttgagcgggaggtcgaggctgcagtgagctgtgatcacgccgctgcactccagcctgagcaacacagcgagaccgcgtgtccaaaagaaatttagaaaaaaatgtcctctgccttttgccacacgccttaagatgattgctctgccagcctggccagcagaagtggctttgtaggcactcagacagcgtacacacgtatgcttaactctgggacttatcttgagagtattttcaaaagtaaaacggcaagtttacatttatccatggaagtgatcgaatatagcagccctgtggagcgcacgttcccaatcacggttgtctgttttcagtgtgaaatatgagttggcgaggaagatcgacctatcggcctagaccaagacgctacgtagagcctcctgaaatgattgggcctatgcgggtgagtgcttaaacgttaattcgatgttttctattagtagaaattaatttttgtgatagcgttgttgcattagtgtggaaatgctgataaaggtctttcctgctcataaaaaatgatgatggcatctcatgaaggaaacattgattctggaggattttttttttcctctcgtgttcttcagcttttgcccatgacttctttctccggctttgtttgttaatgacagattgtacacatgtattccaacacagagtacaatagcctccaaagtcctcgtgcgtcacttttctcacagtaacctccctgtgggtggagtaaccttattgggcatagagcatagagttggagaaatgtctttaggcttagttatgaccagaaatagctatgtattctgtgtatatatgtaaaattttgtatcaataacgaaacttattttctatttgcacacccacacgtattccccagcccgagcagttcagtgatgaagtggaaccagcaacacctgaagaaggggaaccagcaactcaacgtcaggat

SEQ ID NO: 706133 - DNA, 2572 bp, Homo sapiens
aaagactaaagttaatctgtgcctttgtgcgggtgggctaagagcatgatgacttttatcattctattgatttaaagaaaactatccttgacttaccagtgtgtaaggccatgaaagcataattctgttgaaagcatatattgttaatgggtgttgggaaccgtgcactttccgctgctgtgggagcatgtccttggaggtacctttcatctgttttctcaactccaaacatcttaggaccatgggttgtgactggtaggactatgtatcttgctgctttcaagacggagtatattttcacgtggtttcactctggctgtcctgtttccctaatactgtcacttcaccctctgtgattctgatgctacaaatgatagatatcgttttagcattttcttacgggtcctagcgattctattcatttttctttcagtctctttctctgacttgttcacawtgaacaatttccttttgggataggttgctatttctgttttcgcaggtggtttacctgtcttcccagccagtcacagtggtccttgtccccatggtgggtccggggcaagagagggccctgggttgggggtggggttcagttgaagatggggtgagttttgaggggagcactacttgagtcccagaggcataggaaacagcagagggaggtgggattcccttatcctcaatgaggatgggcatggagggtttggggcgtggcgctgggaacggcagccctccccagcccacagccgcgcatgctccctgggctcccgcctcagtgcgcatgttcactgggcgtcttctgcccggccccttcgcccacgtgaagaacgccagggagctgtgaggcagtgctgtgtggttcctgccgtccggactctttttcctctactgagattcatctggtaggtctgcaggccagtcatcccgggggctgaagtgtgagtgagggtggagagggccttgggtgggtcaggcgggtcccgcttcctggtctgtggcctccgagggagaagggccacgaggtcgtcctccttcccttcacaggctgcgaggccaccggcggcttcgtggtcgtgaaggggcctggacggggaggaaggtgggccgtggaggggaggcggtcaggggctcaggtgaagatggggtgagtgctgttggggggatggaagtcccgaggtgccgggaacccccgacgacacagggcagattccctgaatggggcctccggcgggggcgaggcgggcggtgaagaaggggcctggcacctgggaaggctgcggcctggtgagcgccccccccagcggtgtggagtgcggagcgcctgagtgagaagcactgcaaggtctcacctccgccatggaaggtccgaaaacagtgggaaggagtgggcgaggcagtgcggtccaaccaaacttgttgtgagggggggtgaatggctctaggaagtgggagtgtgcccaaagcagcaatcacgagaattgtgattcactagggttttcgtggggagtgcacttgtgaaactaaacctcatcagaaatgacctctgtctgcggggcgcagtggcgctcgcctacgtagtcccagttactcgggacactgaggtgggaggatcccttgagcgggaggtcgaggctgcagtgagctgtgatcacgccgctgcactccagcctgagcaacacagcgagaccgcgtgtccaaaagaaatttagaaaaaaatgtcctctgccttttgccacacgccttaagatgattgctctgccagcctggccagcagaagtggctttgtaggcactcagacagcgtacacacgtatgcttaactctgggacttatcttgagagtattttcaaaagtaaaacggcaagtttacatttatccatggaagtgatcgaatatagcagccctgtggagcgcacgttcccaatcacggttgtctgttttcagtgtgaaatatgagttggcgaggaagatcgacctatcggcctagaccaagacgctacgtagagcctcctgaaatgattgggcctatgcgggtgagtgcttaaacgttaattcgatgttttctattagtagaaattaatttttgtgatagcgttgttgcattagtgtggaaatgctgataaaggtctttcctgctcataaaaaatgatgatggcatctcatgaaggaaacattgattctggaggattttttttttcctctcgtgttcttcagcttttgcccatgacttctttctccggctttgtttgttaatgacagattgtacacatgtattccaacacagagtacaatagcctccaaagtcctcgtgcgtcacttttctcacagtaacctccctgtgggtggagtaaccttattgggcatagagcatagagttggagaaatgtctttaggcttagttatgaccagaaatagctatgtattctgtgtatatatgtaaaattttgtatcaataacgaaacttattttctatttgcacacccacacgtattccccagcccgagcagttcagtgatgaagtggaaccagcaacacctgaagaaggggaaccagcaactcaacgtcaggat

SEQ ID NO: 706134 - DNA, 1412 bp, Homo sapiens
tttactgagaatgatgatttccagtttcatccatgtccctacaaaggacatgaactcatcattttttagggctgcatagtattccatggtgtatatgtgccacattttcttaatccagtctatcgttgttggacatttgggttggttccaagtctttgctatcgtgaataatgccgcaataaacatacgtgtgcatgtgtctttatagcagcatgatttatagtcctttgggtatatacccagtaatgggatggctgggtcaaatggtacaattgcttcttaaatctttccccacggaaaccttgagtgactgaaataaatatcaaatggcgagagaccgtttagttcgtatcatctgtggcatgtaggtcagtgatgctcagcatgggtgtgagtaagatgcctgtgctatgcatgctccctgccccactgtcagtcttcatgagccactatttctaataagactgtagacacacatacgatataatcatctctaatcatatcaaatgttacatgtaagtttcasctttagagacatgaattgataagatttgaagttgaaagaccatgactctagtacttcctgagtaatcaactgaagtatgctttacacatgtgttttccaaattgctgactgttaattgtaagtgcttgtgacttgaaaggaagcacttgatgttcagggaggaaattccttttaaattctgcaggtctacgctcaaagtttatgcagaggttcaattgcgtgtaagacacgggatcacccatagggttctgtttttagtccatttaataaaacccaaactgtagtgtgctttgtatgcctttagggtcatctgaataatctgttgctaagtcatgttcccaatcgttgtgtttctgttacaggtgaaaagcaatcacagtgttaaaagaagacacgttgaaatgatgcaggctgctcctatgttggaaatttgttcattaaaattctcccaataaagctttacagccttctgcaaagaagtcttgcgcatcttttgtgaagtttatttctagctttttgatgctgtgaaatatgtatcattctttgaaatcgtgtattgtaactctctgagctggtatgtagagacatcgttcttttttttttctttctttctttgtcctcttttgagacggagtcttgctctgtcgcccaggctggagtgcagtggcgcgatctctgctcactgcaaccccgcctcccggattcaagcaattgtctgcctcagcctcccgagtagctgggattataggcacccaccagcacgcctggctaagttttgtgtttttactagagatgggctttcgccatcttggccggggtgctcttgaactcctgacctcgtgattcacctgccttggcctcccaaagtgctgggattacaggcatg

SEQ ID NO: 706135 - DNA, 1412 bp, Homo sapiens
tttactgagaatgatgatttccagtttcatccatgtccctacaaaggacatgaactcatcattttttagggctgcatagtattccatggtgtatatgtgccacattttcttaatccagtctatcgttgttggacatttgggttggttccaagtctttgctatcgtgaataatgccgcaataaacatacgtgtgcatgtgtctttatagcagcatgatttatagtcctttgggtatatacccagtaatgggatggctgggtcaaatggtacaattgcttcttaaatctttccccacggaaaccttgagtgactgaaataaatatcaaatggcgagagaccgtttagttcgtatcatctgtggcatgtaggtcagtgatgctcagcatgggtgtgagtaagatgcctgtgctatgcatgctccctgccccactgtcagtcttcatgagccactatttctaataagactgtagacacacatacgatataatcatctctaatcatatcaaatgttacatgtaagtttcacctttagagacatgaattgataagatttgaagttgaaagaccatgactctagtacttcctgagtaatcaactgaagtatgctttacacatgtgttttccaaattgctgactgttaattgtaagtgcttgtgacttgaaaggaagcacttgatgttcagggaggaaattccttttaaattctgcaggtctacgctcaaagtttatgcagaggttcaattgcgtgtaagacacgggatcacccatagggttctgtttttagtccatttaataaaacccaaactgtagtgtgctttgtatgcctttagggtcatctgaataatctgttgctaagtcatgttcccaatcgttgtgtttctgttacaggtgaaaagcaatcacagtgttaaaagaagrcacgttgaaatgatgcaggctgctcctatgttggaaatttgttcattaaaattctcccaataaagctttacagccttctgcaaagaagtcttgcgcatcttttgtgaagtttatttctagctttttgatgctgtgaaatatgtatcattctttgaaatcgtgtattgtaactctctgagctggtatgtagagacatcgttcttttttttttctttctttctttgtcctcttttgagacggagtcttgctctgtcgcccaggctggagtgcagtggcgcgatctctgctcactgcaaccccgcctcccggattcaagcaattgtctgcctcagcctcccgagtagctgggattataggcacccaccagcacgcctggctaagttttgtgtttttactagagatgggctttcgccatcttggccggggtgctcttgaactcctgacctcgtgattcacctgccttggcctcccaaagtgctgggattacaggcatg

SEQ ID NO: 706136 - DNA, 602 bp, Homo sapiens
ggtgtggggccagacctcaggttaacaaagctctgtcttcccctccctctgttgggatgaggcactaggctgttgggattggacacacacacacacacacacacacacacacacgcacacacacacccatccacttttccctgcttacagtgttgtcctgtaaaaggcattctccctgccccctgtcccccgcaggcacacacaggtcctatctattcttttttttwaattttattattattatactttaagatttatggtacatgtgcacaacgtgcaggtttgttacataggtatacatgtgccatgttggtgtgctgcacccagtaacttgccatttagcattaggtatatctcctaatgctatacctccccgctccctccaccccacaacagtccccagtgtgtgatgttccccttcctgtgtccatgtgttctcattgttcaattcccacctatgagtgagaacatgcggtatttggttttttgtccttgcgatagtttgctgagaatgatggtttccagcttcatccatgtccctacaaaggacatgaacttatccttttttatggctgcatagtattccatggtgtatatgtgcc

SEQ ID NO: 706137 - DNA, 638 bp, Homo sapiens
ataaatagagactcatttttctcatgtaacaagaagtatgcagatagacagttcatggctggtacagcagcttgtacatataatctacacccaggtttcttatagattcatgctttattattaatatgtgttgctatctttcttatatgataaatggatgctgtacctgaggtatctagctgcttttctgacagtaaaaaaagaagaacaaatattatagaagaargcagaagacacataccagtgttgactgtccttttatataaagtttttccagacggccacagagaaattttttctttcatgtcattggccagaactgacctctcctagttgcaagggggcaggcataaaatatgatcatattcaggagatattttgaaaatcgagccactgtgatttcagtatgatgggttagatattgaatcagaagagatataaaggagccaaaatgagcaagcggaaaaaggtagctttccccaattgagaggaaatgtacaattacaaacaaattacacggaaaggttgtttttaaggaggaacaggaaaatgcctcagtgatgagatagtaagtgatgataagatgcagagaaagagctataagatgtgctggcagaactcaggaaatatggataaaa

SEQ ID NO: 706138 - DNA, 638 bp, Homo sapiens
ataaatagagactcatttttctcatgtaacaagaagtatgcagatagacagttcatggctggtacagcagcttgtacatataatctacacccaggtttcttatagattcatgctttattattaatatgtgttgctatctttcttatatgataaatggatgctgtacctgaggtatctagctgcttttctgacagtaaaaaaagaagaacaaatattatagaagaaagcagaagacacataccagtgttgactgtccttttatataaagtttttccagacggccacagagaaattttttctttcatgtcattggccagaactgacctctcctagttgcaagggggcaggcataaaatrtgatcatattcaggagatattttgaaaatcgagccactgtgatttcagtatgatgggttagatattgaatcagaagagatataaaggagccaaaatgagcaagcggaaaaaggtagctttccccaattgagaggaaatgtacaattacaaacaaattacacggaaaggttgtttttaaggaggaacaggaaaatgcctcagtgatgagatagtaagtgatgataagatgcagagaaagagctataagatgtgctggcagaactcaggaaatatggataaaa

SEQ ID NO: 706139 - DNA, 650 bp, Homo sapiens
ttatgaatggaaagaatatgttttccttaaaatgacttcatagaaggatttaggttattagtaaattaastctttttattattagaaaatgaaaatatatactgtggaagcattacggtgagtgctgcagtatccatactcagacatctaggttttaatataggttacaccggttactagcctctctgcctcaatttcctcatttgcaatataaggataagaatagcacctcccatttaagattctttatttatttattttttttgagatggagtcttgctctgtcaccaaacctggcatgcaatgggacaatcttggctcactgcaacctccacctcccggggtcaagcgattctcctgcctcagcctcccgagtagctgaaactacaggcatatgccaccatgcctggctaactttttgtattttttttagtagacatggggttttaccgtgttggccaggatggtctcaatctcctgactttgtgatccacccgccttggcctcccaaagtgctgggattacaggcatgagccaccacacttggcctaaaattcttatgataaataaatgatacaaatatccaaaagtgtttatgagtgtgcttaataaacactaaataatgttggttatcattataaaatttatat

SEQ ID NO: 706140 - DNA, 650 bp, Homo sapiens
ttatgaatggaaagaatatgttttccttaaaatgacttcatagaaggatttaggttattagtaaattaagtctttttattattagaaaatgaaaatatatactgtggaagcattacggtgagtgctgcagtatccatactcagacatctaggttttaatataggttacaccggttactagcctctctgcctcaatttcctcatttgcaatataaggataagaatagcacctcccatttaagattctttatttatttattttttttgagatggagtcttgctctgtcaccaaacctggcatgcaatgggacaatcttggctcactgcaacctccacctcccggggtcaagcgattctcctgcctcagcctcccgagtagctgaaactacaggcatatgccaccatgcctggctaaytttttgtattttttttagtagacatggggttttaccgtgttggccaggatggtctcaatctcctgactttgtgatccacccgccttggcctcccaaagtgctgggattacaggcatgagccaccacacttggcctaaaattcttatgataaataaatgatacaaatatccaaaagtgtttatgagtgtgcttaataaacactaaataatgttggttatcattataaaatttatat

SEQ ID NO: 706141 - DNA, 1832 bp, Homo sapiens
catcccctttctctcggttcagtcctgagtgcctcgcgtcgggaggtcctggtggatcacgtggtggagttcagtacagcctggctgcagggcaagttccaaggcagaccgcagcacacacaggtctaccagaaagaacagtgccctgctggccaccaggtcatgaaggaggcgtttgggcccgaagatgggttacagaggctcacctggtggtgcccgcagtgccagccccagttgtcagaggagccagagcagtgccagttctcctaaggagctggtggtgctcctcacggaaccttgccgcttggggaacctgacgtctaagtgtccagaaaggaggatgtgggcagggacggggtacagaggatagtgtgggtcagaggtgccagtagtataatattcatctccctggagttatgttgaaggcagagttttcatagggttagattttttttatccttttctagttcagttaattcatcctgttgaattgcaccatcgtgaaagatgggaaaaatcgtgatgatgggtaaggggaaaacttcccggaaggcaatggggcaaggaaaaagaaagcctatgggaaatggctgtgctcccaacatagctttgcagatgatgtgggttttttttttttttttggttgtttgttttgagagagagtcttgctctgtctccctggctagggtgtggtggtgtgatcttggctcacggcagccttgccctccctggctcaagcagtcttcatctcagcctccagagtagctgggactacaggcatgtgatatgatgctcggctgatttttgtttactttttagagagatggggtcttgccatatttgccaggctggtttgaactcctacaactcaagcattcctcccaccttggtctcccaaaatgttgggaccacgggtgtgagccaccgcgcccagctagctcctgtgttttgtttttgttttgtaactttggttgatgttaaggccctccattttggaaagcaggaaaacaggatttttttttttttatcttgttccctggaggatccagggatgaggatagagtggcctgagagcagtgcttggattcagcctcctgctgggtccttctgctggatacaggcaccaagaggcgggggtggagcagggagctgcgccttcctggggtgcccggtggtgtgtagagaaaagctgcttgtttactccttaagtcaatgtattggtgactgttgatttgttgracaattcaggaatcaagggctgtggagaaactccctcatgttgttggcaacaggtgaatgaacctagagcggtgacatgaaaataaagctcactgttactcgctgtttttgtctttatttggtagtaaaaggtctttaaatacccaactattcatggaggtggcctccagggcttactgggttagctgaggaatctacataaaagtagcagtgagaggaggtgagcgcacacctgctcctctgccccagctgaacagagatggacttgacctctgtcaccacgatgtctgcacagagatttgtgagagtgaagctgaaaacactggctgatatttctggctttcctttattcttctctttttttttttttttttttgagacagggtctcactctgttgcccaggctggagtacagtggtgtgaccatggctcactgcagccttgacctcccgggctcaggtgatccttccacctcagccgccctagtagctgggactacaggtgtgcaccactatgcctggctaatttttgtatttttgtatagagggagactcaccatgttgtcccaggtggtctcgaactgcaggcctgaa

SEQ ID NO: 706142 - DNA, 1254 bp, Homo sapiens
agtcgggcgcagtggcgggtgcctgtggtcccagctactcaggaggctgaggcaggagaatggcgtgaaacagggaggtagagcttgcaatgagccaagatcgygccactgcactccagcctgggcgacagagccagactccatctcaaaaaaaaaaaaaaaaaaatttagccagtcatggttgtgtatacctgtggtcctagctacctgggaggctgaggtgggaagattgcttgatcccaggaggttgaggctgcagtgcagtgagctgtgactgcaacattgcactccagcctaggcgacagtgccagcccgtctcaaaaaataaaaaatataaaataagtcatctatagccaccaggaggcactgacatcctcccccaacctcctcccaatctagggctgtggggcttccccttcctggtctggtagcccagtactacccatggggaacctccgaaatttcggccccacccacaggggactcagttcagccctgctcaactaattgaggctggatgatttaagcttttctgagcagagcagagcaggctcatatttttgtttgagtctcttttacattttatttcaggcaggggtcattttatagacatggaaatccaggctcctgccctctgctttctgcccttcctgttctctagcctcagggctacaagtgaacctctcctagagcctcccaccctccactcccagttggcaccccaggtagggggatgtgaagaaagcctgaagcaccactccactcacctgaatggcacagggcactgtccagcatgcagtggctggcacacagtaggcatccatgagcacgagctattactgttctcattgctgctgattacaacaccaagcaccgcagcaaacagtgactcacagttctgttgggcccatcactgacccattctacagccgaggacactaaggctcagcaaaaaggtaacccagtggccgagtgcagtggctcaggcctgtaatcccagcagtgtgggtggccgaggtggatggatcacctgaggtcaggagttcgagaccagcctgatcaatatggtgaaacccttgtctctactaaaattacaaaaattagccggacgtgatggcatgcgcctgtagtcccagctactcaggaggctgagagaggagaattgcttgaacctgggaggcggaggttgcagtgagacgagatcgtgccactgcactccagcctgggcgacagaattagactctgcctcaaaaa

SEQ ID NO: 706143 - DNA, 2027 bp, Homo sapiens
ccgggtgtggtggtgcaagcctgtaatcccagctactggagaggctgaggcaggagaatcagttgaatcctggaggcagaggttgcagtgagccgagatcgtgccactgcactccagcctgggcaacaagagcaaaactccatctcaaatatatatatatatatatgaatatccacacatacacactgagtgcctactagcacaagacaagacatacagagttccrctctccccaggtacacagggttgagatccaatgggaaagcagtgagccagctgagtcaggggtaagaggagccagtgaccagagaaatgacccgggacatatgaggccagaagccaaaactatggcatcagtagggagactgcagaaggcggcaggtcctggatcaccaaggaccttgaaagcatgtggaagactttgatcaatgggggaatcattaaggggttttgcattccggaactatcatcagcttcagcggggggcagggggtaggatagaggcagggaggcaggaagttctcgcagggtccaggcaagagatggtggagtgtggtcctggggaagggggcagtggacggatctgagggaggttcagttaggatgggcaaggattgagatctggctggatcctggtgacaggggagatgaggctggggcccttggaggatggcgtcctggtgctgttaatgcaggtgtgagagtgggaggaggaggagcaggctggcagaaggcaggcacaagtgcaggtctgggcgggagtctgcagcgctctgggctggccacaccggtggggcaagggaggtggaggatcctgccctagagcttggtctcctctgtctgaggtcaggttccccagaggtggggctccagagggaaattcttgtgcaagcagtttctcaggggccatgtgctgaggggaatggggagcaggaacagcctagaagctgagtgaggatgtggtctcagctggagaggaggctgatcgcatgggagctctgcagcagggatggcaatgccggggaggcggtcccgcctgaggccaggcccagctctttgcagccccatattaactacattggctgctggggagcctgagtgacgggggaagggggcagccagggagggtgcctaggccctgtggagggcttggtaaggcagaggctggggaggctgtgtgcctcaacattcacatatgggcttcggctgggcgtggtggcacatgcttgtagtcccagctactcaggaggctaaggcaggaggattgcttgagtcagggaggttgagactgcaatgagctgtgttcacaccactgcactgcggcctgggtgacaaagtgagaccctgtcacacacacagaaaaagagaatgtgggcttcaaagctgaattcaagtaagtcagggttcttccacttgtaatgaacaacttccttaacctcattgtctcaggttcctcgcctgagaaatgcgaggagaacggcgcctgctggtggcgtgggcttgccgatgaaatgagccattcacccatgcctctcagcacaggacctgccttgggccgcatagtgtgcattgtcagctgctgtcggtgctgggctagcggccgcgttgagacccagcagtcctcgggggttggcgagcttctgggaggaatgggtggaacgtgactgtcaggtacagagctacagagcaccccagcatgatggtgtatggtggcaggggagaacgactcaacagagatggagaaagactaagcccaaaggtgatcaacaacaagagtgaaggaggaagtggtcagctgtggctggggcaaaacaagcccagtaagttacattggcctgtgtttggtcatccagggacaaagtgacctttttagtgcctgtaggcccagcgcgttggggaagaatttagaatgcagtggggataggtgtgagaggagcgggggaagtgaagattgagttgagaccactggctggagaacttgaccgggaagggagggcagagagcagcatggggtgaggggagggaat

SEQ ID NO: 706144 - DNA, 603 bp, Homo sapiens
ccccatagcatggctgaccttcctctgagcccctcgtggatgcccacacacggcaagacgtttcctcaaagatgctcttctgcaaagctgcactttctcggttgccgctgccaccttggcacctctctggggtaccttgtactgccctgtcctccccacgccctgaggggccgtcctaggcagcactcaccctggtcatccctgtttccaccacaagactgtttgtagccgagcttgggagttgtgttgtgtagtgttgacttgagttgcatcgtgttgtgttgacttgagctgaactgtgctgagtgttactgagttgaggtgactgggttgattttagcttcacaggtgatmtgaacccagctgagtggcttccatggagctgatctgaacccagctgagtggcttccatggagctgatctgaacccagttgagtggcttccatgaagctgatccggactaagctaaactgagtttcattgagcagcttgtttagctggtgtgtgccaggtggtctctcggggggtccgatgggatacctagtgtcttaatctgttcagtctgctataaccaaataccttagacctggtgattcatactta

SEQ ID NO: 706145 - DNA, 1537 bp, Homo sapiens
cttgtatatattctaatgttctttgtcctcttggagtctccaactcagattaatattttattacagcagttactgtttttaaaatggacagcctgacttaatctcaatttgttaacagtgatttaaatgaaatatctttgaataattaatattaagtattcacgatatgtaaaagactagttagctaggttaactttgcttaataaaaatgaagtgactgaagtcaatgtacatgatgagctatatttcttgaatgcctttatacttgtatttgttgatttgttggaaagaaacctgaacatttattaaggtttcattatatggctaaagaattgtatgcttttcaaccacagtgcactctgttttttgttattaaagaagaaagctcaacttaactaaaaatggagatttgcttgttagatgattgtttttaagaataattgtgttttgtttctacatgcagaagctaattttaaatacttattgaattaaaaagaaaaaagtatgcaaaattataaaaattttggccagtatttttactgcttaaatagtgtaaatcatttttaaaagtcattaatttgtctatcaggaataatcaatggatgttacacagcatctttctgtctctgttaagaaaggttttagccaggcgcggtggctcacgcctgtaatcccagcactttgggaggcctaggtgggtggatcatgaggtcaggagatcgaaaccatcctggctaacacagtgaaaccccgtctctactaaaaatacaaaaaagttagccgggtgtggtggcgggcgcctgtaggcaggagaatggcatgaacccgggaggcggagcttgcagtgagctgagatcgcgccactgcactccagtctgggcgacagagcgagactccgtctcaaaaataaaaaaaaaagaagaaagttttttgacacaaacaaagcacttgataaaatatttgaaattaagatatttcaattaaaatcaaataataaaatgtgaatctgccaaagaaaatattttgtttatattgtgttaagacatactgtcaacttttcaaatgcatagtatagtattgttaactataggcacgatgttatgcagtagatctctaggtcttatttatcttgcgtaattgaaactttgtacacattaagtagcaacctctcatttccattctccacagtcgttgataaccactattctgctctgtttctgagtttgacgattttagatatttcgtataaatggagtcaagcagcatttgtccttctgtgactggcttgtttcacttagcataatgtccttcmggttaatccattttgtcacctataacaggatttctttcttttgtaagtctgtataatattccattgcacaggcagacacattttctttatccatttatctattgatggagattgaggtttttttatcttggctcatgtgaataatgctacagtgaacaggggagtgcagatacttactcaagatcttggttttaattatatataccccaaactgggaatgctggg

SEQ ID NO: 706146 - DNA, 1121 bp, Homo sapiens
cagttctttataacagtgtgaaaacgaattaatacaaaacttcaatttaacaattaaatcatgtgataaatacagtcctctcatcgtgttgcttaaaattagggatcagaatctcaacgagaggaatagaaatattgcctgatttcagacgaacacccccttgtattaatttccagaagtcagaaactatagtctataagccaaaattgggctcaccatgtgtttttatatggccagcaagccaagcatagtttctttatttttaagtgattgcattttaatgtattataaatgcttacatcatatcctcaattttgtctcctggaccacaaagcctaaaatatttactacatgaatctttaagaaaatagtttgctgatctcccgatttagtctaccaaactacaattagtgttgttttcatttttgttctctatatgcatgttgccatttttacacttcttcagaaaaacattgagaatttttctacactcactatttccatttgtgcctaaggacaactttttctttttcttctctttttttttgaagaaatttgtttatgaacttagataaaatttatagctttgcttgaaaatttggtacttactacctttgcaattctctttatttattattattacttttatttttccataagttattggggtacaggaggtatttggttatataagttctttagtggcgatttgtgtgattttggtgcacccattacccaaggagtatacactgcaccatactcggtcttttatccctcgcccctctcccacttttcccctcaagtcccaaaagtccattgtatcattcttatgccttgtaatgtttgtttttccattccagagttacttcacttagaattaaatagtctccaaacacatccaggtcactgcaaatgctgttaatttattcctttttatggctgcgtmgtatttcatagtatatataccacagtatgtttattcactcattgattgatgggcagttgattccatgattttgcaagtgtgaattgtgctgctataatcatgcgtgtacaagtatcttttttgaataatgacttattttcctctggagagatacccaatagtgggattgctggat

SEQ ID NO: 706147 - DNA, 1398 bp, Homo sapiens
gtaatatagaagtcagcagaagaaaagcttccagaaatgcctggaagagacattaacctctaattcaacagtagtttttgctccaataaaacaataatcttcatttttctctttttgttttttgtttgtttgtttgagacagagtcttactctgtcacccaggctggagtgcagtggcgtgatctcagctcactgcaacctctgcctctagggttcaagcgattgattctccttcctcagcctcctgagtagctggaaatacaggagtgtgccaccacgcctggctaatttttgtgtttttagtagagacagggtttcaccatgttggccaggctagtcttgaactcctgacctcaggtgatccacctgcctcagcctttcaaagtgctgggattacaggcttgagccaccgcacccagcctcatcttcatcttagggtccaagagttcaaacaagtctgcaatgcatccaactgacgaaggtgaactttccagagaagaggcatttctttcttcctttcttttttttcttttttgagatggagccttgctctgtccccaggctggagtgcagtggcatgatctcggctcactgcaacctcaacctcctgggttcaagcgattctcctgcctcagcctcccaagtagctgggaccacaggtgcacgccaccacgcccggctaatttttgtatttttagtagagacggggtttcaccatgttggccaggatagtctccatctcttgaccttgtgatccacccacctcggcctcctaagtcgctgagattacaggctttcacaacatgcttcccgacacgcatgatctgctcagggaaggtcagagaatcctttccatacttgccctttctcgaattccttaaatttaaaaaactcaagatgacaaactgtygtattttagggtgtattgtgttctaaatcccatcacctatttgatcaccttttaagggaacacttcaccagcaagaattctctgaattaaaagatgtcagaaaattctcttcatatcacagtgaatttaggaaaacaggtattcttcgtcccttgtctcaattttattcatattaatagagatctttcaaataaaaactatgaataaacatttaatatgccatttttctaagcctctaagacttcagtttgacccatttagggtcagtgtgaatccaggtgaccatatggaggcaccgtcaggccacagcccgctgtccgtccatcagaagtgtactgggagggaggttgtctttcagagatctagcatgtctggttactgagagcagaaattagtcatcttctgaatcaaagtaacttaagttggatataggaagtaattttcacattaatatacaatagtttatctacaggaggctattcttcata

SEQ ID NO: 706148 - DNA, 1398 bp, Homo sapiens
gtaatatagaagtcagcagaagaaaagcttccagaaatgcctggaagagacattaacctctaattcaacagtagtttttgctccaataaaacaataatcttcatttttctctttttgttttttgtttgtttgtttgagacagagtcttactctgtcacccaggctggagtgcagtggcgtgatctcagctcactgcaacctctgcctctagggttcaagcgattgattctccttcctcagcctcctgagtagctggaaatacaggagtgtgccaccacgcctggctaatttttgtgtttttagtagagacagggtttcaccatgttggccaggctagtcttgaactcctgacctcaggtgatccacctgcctcagcctttcaaagtgctgggattacaggcttgagccaccgcacccagcctcatcttcatcttagggtccaagagttcaaacaagtctgcaatgcatccaactgacgaaggtgaactttccagagaagaggcatttctttcttcctttcttttttttcttttttgagatggagccttgctctgtccccaggctggagtgcagtggcatgatctcggctcactgcaacctcaacctcctgggttcaagcgattctcctgcctcagcctcccaagtagctgggaccacaggtgcacgccaccacgcccggctaatttttgtatttttagtagagacggggtttcaccatgttggccaggatagtctccatctcttgaccttgtgatccacccacctcggcctcctaagtcgctgagattacaggctttcacaacatgcttcccgacacgcatgatctgctcagggaaggtcagagaatcctttccatacttgccctttctcgaattccttaaatttaaaaaactcaagatgacaaactgtcgtattttagggtgtattgtgttctaaatcccatcacctatttgatcaccttttaagggaacacttcaccagcaagaattctctgaattaaaagatgtcagaaaattctcttcatatcacagtgaatttaggaaaacaggtattcttcgtcccttgtctcaattttattcatattaatagagatctttcaaataaaaactatgaataaacatttaatatgccatttttctaagcctctaagacttcagtttgacccatttagggtcagtgtgaatccaggtgaccatatggaggcaccgtcaggccacagcccrctgtccgtccatcagaagtgtactgggagggaggttgtctttcagagatctagcatgtctggttactgagagcagaaattagtcatcttctgaatcaaagtaacttaagttggatataggaagtaattttcacattaatatacaatagtttatctacaggaggctattcttcata

SEQ ID NO: 706149 - DNA, 1398 bp, Homo sapiens
gtaatatagaagtcagcagaagaaaagcttccagaaatgcctggaagagacattaacctctaattcaacagtagtttttgctccaataaaacaataatcttcatttttctctttttgttttttgtttgtttgtttgagacagagtcttactctgtcacccaggctggagtgcagtggcgtgatctcagctcactgcaacctctgcctctagggttcaagcgattgattctccttcctcagcctcctgagtagctggaaatacaggagtgtgccaccacgcctggctaatttttgtgtttttagtagagacagggtttcaccatgttggccaggctagtcttgaactcctgacctcaggtgatccacctgcctcagcctttcaaagtgctgggattacaggcttgagccaccgcacccagcctcatcttcatcttagggtccaagagttcaaacaagtctgcaatgcatccaactgacgaaggtgaactttccagagaagaggcatttctttcttcctttcttttttttcttttttgagatggagccttgctctgtccccaggctggagtgcagtggcatgatctcggctcactgcaacctcaacctcctgggttcaagcgattctcctgcctcagcctcccaagtagctgggaccacaggtgcacgccaccacgcccggctaatttttgtatttttagtagagacggggtttcaccatgttggccaggatagtctccatctcttgaccttgtgatccacccacctcggcctcctaagtcgctgagattacaggctttcacaacatgcttcccgacacgcatgatctgctcagggaaggtcagagaatcctttccatacttgccctttctcgaattccttaaatttaaaaaactcaagatgacaaactgtcgtattttagggtgtattgtgttctaaatcccatcacctatttgatcaccttttaagggaacacttcaccagcaagaattctctgaattaaaagatgtcagaaaattctcttcatatcacagtgaatttaggaaaacaggtattcttcgtcccttgtctcaattttattcatattaatagagatctttcaaataaaaactatgaataaacatttaatatgccatttttctaagcctctaagacttcagtttgacccatttagggtcagtgtgaatccaggtgaccatatggaggcaccgtcaggccacagcccgctgtcygtccatcagaagtgtactgggagggaggttgtctttcagagatctagcatgtctggttactgagagcagaaattagtcatcttctgaatcaaagtaacttaagttggatataggaagtaattttcacattaatatacaatagtttatctacaggaggctattcttcata

SEQ ID NO: 706150 - DNA, 1398 bp, Homo sapiens
gtaatatagaagtcagcagaagaaaagcttccagaaatgcctggaagagacattaacctctaattcaacagtagtttttgctccaataaaacaataatcttcatttttctctttttgttttttgtttgtttgtttgagacagagtcttactctgtcacccaggctggagtgcagtggcgtgatctcagctcactgcaacctctgcctctagggttcaagcgattgattctccttcctcagcctcctgagtagctggaaatacaggagtgtgccaccacgcctggctaatttttgtgtttttagtagagacagggtttcaccatgttggccaggctagtcttgaactcctgacctcaggtgatccacctgcctcagcctttcaaagtgctgggattacaggcttgagccaccgcacccagcctcatcttcatcttagggtccaagagttcaaacaagtctgcaatgcatccaactgacgaaggtgaactttccagagaagaggcatttctttcttcctttcttttttttcttttttgagatggagccttgctctgtccccaggctggagtgcagtggcatgatctcggctcactgcaacctcaacctcctgggttcaagcgattctcctgcctcagcctcccaagtagctgggaccacaggtgcacgccaccacgcccggctaatttttgtatttttagtagagacggggtttcaccatgttggccaggatagtctccatctcttgaccttgtgatccacccacctcggcctcctaagtcgctgagattacaggctttcacaacatgcttcccgacacgcatgatctgctcagggaaggtcagagaatcctttccatacttgccctttctcgaattccttaaatttaaaaaactcaagatgacaaactgtcgtattttagggtgtattgtgttctaaatcccatcacctatttgatcaccttttaagggaacacttcaccagcaagaattctctgaattaaaagatgtcagaaaattctcttcatatcacagtgaatttaggaaaacaggtattcttcgtcccttgtctcaattttattcatattaatagagatctttcaaataaaaactatgaataaacatttaatatgccatttttctaagcctctaagacttcagtttgacccatttagggtcagtgtgaatccaggtgaccatatggaggcaccgtcaggccacagcccgctgtccgtccatcagaagtgtastgggagggaggttgtctttcagagatctagcatgtctggttactgagagcagaaattagtcatcttctgaatcaaagtaacttaagttggatataggaagtaattttcacattaatatacaatagtttatctacaggaggctattcttcata

SEQ ID NO: 706151 - DNA, 1398 bp, Homo sapiens
gtaatatagaagtcagcagaagaaaagcttccagaaatgcctggaagagacattaacctctaattcaacagtagtttttgctccaataaaacaataatcttcatttttctctttttgttttttgtttgtttgtttgagacagagtcttactctgtcacccaggctggagtgcagtggcgtgatctcagctcactgcaacctctgcctctagggttcaagcgattgattctccttcctcagcctcctgagtagctggaaatacaggagtgtgccaccacgcctggctaatttttgtgtttttagtagagacagggtttcaccatgttggccaggctagtcttgaactcctgacctcaggtgatccacctgcctcagcctttcaaagtgctgggattacaggcttgagccaccgcacccagcctcatcttcatcttagggtccaagagttcaaacaagtctgcaatgcatccaactgacgaaggtgaactttccagagaagaggcatttctttcttcctttcttttttttcttttttgagatggagccttgctctgtccccaggctggagtgcagtggcatgatctcggctcactgcaacctcaacctcctgggttcaagcgattctcctgcctcagcctcccaagtagctgggaccacaggtgcacgccaccacgcccggctaatttttgtatttttagtagagacggggtttcaccatgttggccaggatagtctccatctcttgaccttgtgatccacccacctcggcctcctaagtcgctgagattacaggctttcacaacatgcttcccgacacgcatgatctgctcagggaaggtcagagaatcctttccatacttgccctttctcgaattccttaaatttaaaaaactcaagatgacaaactgtcgtattttagggtgtattgtgttctaaatcccatcacctatttgatcaccttttaagggaacacttcaccagcaagaattctctgaattaaaagatgtcagaaaattctcttcatatcacagtgaatttaggaaaacaggtattcttcgtcccttgtctcaattttattcatattaatagagatctttcaaataaaaactatgaataaacatttaatatgccatttttctaagcctctaagacttcagtttgacccatttagggtcagtgtgaatccaggtgaccatatggaggcaccgtcaggccacagcccgctgtccgtccatcagaagtgtactgggagggaggttgtctttcagagatcwagcatgtctggttactgagagcagaaattagtcatcttctgaatcaaagtaacttaagttggatataggaagtaattttcacattaatatacaatagtttatctacaggaggctattcttcata

SEQ ID NO: 706152 - DNA, 1351 bp, Homo sapiens
taatgggggactcttcagtgttctgagagctgagctagttctgagggactagtaggacaccaactttagggcagaaagtttcagtgccaaagatagcttaaggggctagtatgggcactgtgttgtagagaaaacagggacttcaattcttttccattcatcaaaatgtgctgggcacagttgggtgagaaatcagagtcctgactggagatgatgctatctatggaaggtattgctctgagaacatagacctggtgttcatttccttcccagggtggcttaaatccatgcagaaacctggggccccaggccagagcctgggtgggtgacatcttggcctgtccatgctgccactgaagctgccattgcccaggccagccagcataggaagtcctactgtccaacaagattgcataygcctccagtcccttgtgctgaggttccaaagtgggaggagaagggccttgtgttcaccatgaatctctattcctatggtggggaacaaagtgtggatatgacctgatgcctgggtgttctcctaccttatacaactctggggaaccctctactctcacagcaatgacctgagagtgttgttccatgtgtctatgtctatggctgcctgtgggacacagggttgagagtggagttggtgagagtgtgtgctgtgagtgggtgtggggagaggagagagacatggactcaccagcatcactcgtacagagtctgccatgagccccacgtatggcttcaggatgtcattgtggaaggctggggtcagcatccgtcgatgctggaaccatgtctgcccattcaacaggagcaagccgtaccctaaggtagacacgaatatgtgtatgtgtgtgtatcagaggctgcacggacctagggatgactggtgacaatttgggagggagaaaggtggcttcctgggggaagaactatccagaagaagccacatcatgggcaaatgcaggaaaaggaggtatatttcaggcatgtgaattttctaattgagctgctacatccatgtgattatgacagctgtgagataaaggttgaaaagggttgtgggcagatgtaaaataaatgtgaagccaaggatgtctggagagaactgagacatgaaatggaagaagctgagcctcaggaaggtttgcaccagcattaggaaggggtgagggtcttgttagaagagggaaatgaggcttgatttggggatgaggtcatgatagtggtggcctctaatctgttgttctctgtgagccaaataaataactcaaacctaactagggagtgggctgcagtcctagtttgcacacataccaatccgtggagccaggaatttgta

SEQ ID NO: 706153 - DNA, 1351 bp, Homo sapiens
taatgggggactcttcagtgttctgagagctgagctagttctgagggactagtaggacaccaactttagggcagaaagtttcagtgccaaagatagcttaaggggctagtatgggcactgtgttgtagagaaaacagggacttcaattcttttccattcatcaaaatgtgctgggcacagttgggtgagaaatcagagtcctgactggagatgatgctatctatggaaggtattgctctgagaacatagacctggtgttcatttccttcccagggtggcttaaatccatgcagaaacctggggccccaggccagagcctgggtgggtgacatcttggcctgtccatgctgccactgaagctgccattgcccaggccagccagcataggaagtcctactgtccaacaagattgcatatgcctccagtcccttgtgctgaggttccaaagtgggaggagaagggccttgtgttcaccatgaatctctattcctatggtggggaacaaagtgtggatatgacctgatgcctgggtgttctcctaccttatacaactctggggaaccctctactctcacagcaatgacctgagagtgttgttccatgtgtctatgtctatggctgcctgtgggacacagggttgagagtggagttggtgagagtgtgtgctgtgagtgggtgtggggagaggagagagacatggactcaccagcatcactcgtacagagtctgccatgagccccacgtatggcttcaggatgtcatwgtggaaggctggggtcagcatccgtcgatgctggaaccatgtctgcccattcaacaggagcaagccgtaccctaaggtagacacgaatatgtgtatgtgtgtgtatcagaggctgcacggacctagggatgactggtgacaatttgggagggagaaaggtggcttcctgggggaagaactatccagaagaagccacatcatgggcaaatgcaggaaaaggaggtatatttcaggcatgtgaattttctaattgagctgctacatccatgtgattatgacagctgtgagataaaggttgaaaagggttgtgggcagatgtaaaataaatgtgaagccaaggatgtctggagagaactgagacatgaaatggaagaagctgagcctcaggaaggtttgcaccagcattaggaaggggtgagggtcttgttagaagagggaaatgaggcttgatttggggatgaggtcatgatagtggtggcctctaatctgttgttctctgtgagccaaataaataactcaaacctaactagggagtgggctgcagtcctagtttgcacacataccaatccgtggagccaggaatttgta

SEQ ID NO: 706154 - DNA, 1351 bp, Homo sapiens
taatgggggactcttcagtgttctgagagctgagctagttctgagggactagtaggacaccaactttagggcagaaagtttcagtgccaaagatagcttaaggggctagtatgggcactgtgttgtagagaaaacagggacttcaattcttttccattcatcaaaatgtgctgggcacagttgggtgagaaatcagagtcctgactggagatgatgctatctatggaaggtattgctctgagaacatagacctggtgttcatttccttcccagggtggcttaaatccatgcagaaacctggggccccaggccagagcctgggtgggtgacatcttggcctgtccatgctgccactgaagctgccattgcccaggccagccagcataggaagtcctactgtccaacaagattgcatatgcctccagtcccttgtgctgaggttccaaagtgggaggagaagggccttgtgttcaccatgaatctctattcctatggtggggaacaaagtgtggatatgacctgatgcctgggtgttctcctaccttatacaactctggggaaccctctactctcacagcaatgacctgagagtgttgttccatgtgtctatgtctatggctgcctgtgggacacagggttgagagtggagttggtgagagtgtgtgctgtgagtgggtgtggggagaggagagagacatggactcaccagcatcactcgtacagagtctgccatgagccccacgtatggcttcaggatgtcattgtggaaggctggggtcagcatccgtcgatgctggaaccatgtctgcccattcaacaggagcaagcygtaccctaaggtagacacgaatatgtgtatgtgtgtgtatcagaggctgcacggacctagggatgactggtgacaatttgggagggagaaaggtggcttcctgggggaagaactatccagaagaagccacatcatgggcaaatgcaggaaaaggaggtatatttcaggcatgtgaattttctaattgagctgctacatccatgtgattatgacagctgtgagataaaggttgaaaagggttgtgggcagatgtaaaataaatgtgaagccaaggatgtctggagagaactgagacatgaaatggaagaagctgagcctcaggaaggtttgcaccagcattaggaaggggtgagggtcttgttagaagagggaaatgaggcttgatttggggatgaggtcatgatagtggtggcctctaatctgttgttctctgtgagccaaataaataactcaaacctaactagggagtgggctgcagtcctagtttgcacacataccaatccgtggagccaggaatttgta

SEQ ID NO: 706155 - DNA, 1351 bp, Homo sapiens
taatgggggactcttcagtgttctgagagctgagctagttctgagggactagtaggacaccaactttagggcagaaagtttcagtgccaaagatagcttaaggggctagtatgggcactgtgttgtagagaaaacagggacttcaattcttttccattcatcaaaatgtgctgggcacagttgggtgagaaatcagagtcctgactggagatgatgctatctatggaaggtattgctctgagaacatagacctggtgttcatttccttcccagggtggcttaaatccatgcagaaacctggggccccaggccagagcctgggtgggtgacatcttggcctgtccatgctgccactgaagctgccattgcccaggccagccagcataggaagtcctactgtccaacaagattgcatatgcctccagtcccttgtgctgaggttccaaagtgggaggagaagggccttgtgttcaccatgaatctctattcctatggtggggaacaaagtgtggatatgacctgatgcctgggtgttctcctaccttatacaactctggggaaccctctactctcacagcaatgacctgagagtgttgttccatgtgtctatgtctatggctgcctgtgggacacagggttgagagtggagttggtgagagtgtgtgctgtgagtgggtgtggggagaggagagagacatggactcaccagcatcactcgtacagagtctgccatgagccccacgtatggcttcaggatgtcattgtggaaggctggggtcagcatccgtcgatgctggaaccatgtctgcccattcaacaggagcaagccgtaccctaaggtagacacgaatrtgtgtatgtgtgtgtatcagaggctgcacggacctagggatgactggtgacaatttgggagggagaaaggtggcttcctgggggaagaactatccagaagaagccacatcatgggcaaatgcaggaaaaggaggtatatttcaggcatgtgaattttctaattgagctgctacatccatgtgattatgacagctgtgagataaaggttgaaaagggttgtgggcagatgtaaaataaatgtgaagccaaggatgtctggagagaactgagacatgaaatggaagaagctgagcctcaggaaggtttgcaccagcattaggaaggggtgagggtcttgttagaagagggaaatgaggcttgatttggggatgaggtcatgatagtggtggcctctaatctgttgttctctgtgagccaaataaataactcaaacctaactagggagtgggctgcagtcctagtttgcacacataccaatccgtggagccaggaatttgta

SEQ ID NO: 706156 - DNA, 614 bp, Homo sapiens
ggctgatcacaaacacaacggaaagatgacatcaggtatccaagagtgtgagagcttgagggctttaagcaatcacttagtcctcctatgcgtgaggaccctggggtccaaagaagagatgggacctgctcaagttcacacaatgttgtaagcaagagctggggctggaattcaggactctagccttccaggttttactaccatatgccgtggcatgtgagtcagaaagttaggtactgagcaatcaaacccaggcctctctgttcgcctggacataccacaaaggacagaaaaggaaggcagcccccatgcacgcagacactcttcagccttcttacctttgcttacattactccctttgcctccaaactctctacaggttcaaagtcctgtggacccccgaaaacctctgcctcccctcccatcctaaaagaatcttcctggaatcctcatgtggaagtgatattatccttcttagagacttcatagcaggccaagcacggtggctcatgcattataatcccaacattttgagagggaggatcacttgarcccaggagtttgagaccatcctgggcaccatagggaggctctgtctctacaaaaaaataaaa

SEQ ID NO: 706157 - DNA, 2135 bp, Homo sapiens
tatcctttccaccccagcatgaataggggttgaatatttaaaaattcttatatgtaatttagaagacttgaatgattttccaaaggccacatagggtattcattctgctctattcttatgaactcatttaaaaaattcatccaaagcatgatcttaaaaagtaatgaaaactgagcagagtgacagaaagaatttgattaataaagacactattgcaataattacttctgctgatggacttattgcttccttgaagatgtaaggatagaatgtatggaccgtgagcatgaggctttcctagaattttagtgtgtgtatgtatgctcagtgtgtgtgtgttgcggggtggttccttggtcctatacaggttgttcggaaagaggcactagcagaccagttttagggtaccagtcctttcacattcctgtctttgggaatcactgtgcatacagtttttgctgaagtgttggcctagggcactccaaccttccctaccagctgcctggcccagcttgcctcaggtgccttccctgtagtgtcactcattgttgctgccccatctgtaacctctcagcttatccaggagagcatgtgcaacttccgtggacagttacttcttcctatactaccagaggcttcttaccttaagtacctgtatttctgtgacctaggacattctctggctatgagagtatgctacactcacttgtgaggcaagccaggaagggccaggcaatttaatgacctagaagtgactttcacaaatgaagaacagaatttggtgggtacctctccaatttccttccttctcttggagggataattctagggcatgatgtctcatgattagcagcatgagagatagcaaagcctctcagcaggtccctagtggattgagctccctcgtaataactcactcatgaatgtgccttttattgaatgtcttcccctttctcatttttcccctctatgcttcctggtattactccttgctatgcactgaatgcttgtaacccctcaaaatttacatgttgaaatgctaatcttcagtatgatggtatttggagatgaggcctttggaaggtaatcaggttactagggcggagccctcattatgtgattaatgcactgagaagacacgagagaggttgttttcctccttctctgctctccaccatatgaggatactgcgaaaagactaccagtttcaaaccagaaagagagctctcaccagcacccaaccatgctggcatcctgatttcagactgctggctttcaaaatagtgaaaaaaatattatttttctttcagctacccagtctatggtaatctgttttagcagcccaaactaagacatcccctaaataaactgcttgtatctaaacccttctcccaggatcatcttttcggagaactcaagctaagatactacccccgctcttaccagattttttggggaaattaaaagaaagggtgagggtaagaaaacagaaaggagcagacatgtggaatttagcggagttgcagaaactatggagatttggggtgaagaacaaggaactcctatggtgactttctccaaaaaggctttgagaaaacaacccctctctattaccaactcccaaggcacagtctcatatccatgagcaaccccacttctagtttatgtgtgattcagtttyttccaagctaaacctgcttgacttgacgagaaggccaaataaattcaagcttgctccaaacatgtctctttagatcaggttattctcatttgtaatgaagaaactgaggcagctagcaggttgatcattcgtaacactcttttttaactataacattctaaaatgtgggagcagctctcgtcccaatagcaatccatgattaaataactatgaagtttggaagttgggcctgtaaacatttctatagagagctacttcattcattttgttttattcgattcatgttagtttctaatcagttcccaaagagggtggagtatcctctttgaaggcccatagttttatatgacttcacctttctcagacaacccagtgatttgtaatcaagaatgaatatttctgccaagtaaaaaatgtttaacattatcccagcttagtaaggggaaaggcaggg

SEQ ID NO: 706158 - DNA, 1523 bp, Homo sapiens
tttmtttcttcatatttgacttcaggggacctaatgattttcatctttgcctcatttgttgcagatttatgtatttatcacttgtaccatcactattcattttccaattcctgctaatttacatttcatcataaaggtagaatgcaatctaaagtcagatgactacacaaacatgctgttatcaatgtagtagtatcttaggggttagctctcagaaaaatgtggggtgcaaatcacatgtaatcagaattgccagggacaatgatttcttactgtgtcttgagcaacccaacaaacccaagttttcctccagtcttgggatagatcacttttttaaaatttagttttatttattcttatttattttttatagggacaagtctcactatgttacccaggctggtctcgagctactgtgctcaagttatcctcagccttcagcctcccagagtgctgggactacagatgtgagccatcgtgctcagacaatcactgttttttatttttattttcatttatttttatttatttattttattttattttattttattttattttattttattttatttttattttttgagaccaagtcttgctctgtcacccaggctgaagtgcagtgccgcaatctcggctcactgcaagctccacctcccgggttctcgccattctcctgcctcagcctcctgagtagctgggactacaagcgcccgccaccaggcccagctaattttttgtatttttagtagagacggggtttcaccgacaatcactgttttttttaaattgaggactaggaaaagtagttgactgaaactagagattgtggtatatctaacatacacacttttaaacactaacatcatagtcttcccagagaattaatcacactgggggaggtacttagagactgaaaccagctgaggggacagcaggttcatctcctatttcatgggacatatgtgcattgattggaatggtagtcataatggcctgctgtatttaaattgctttctcttttcctctgccaagaacatatagttgaatatgcttaagttaaatgcatgtataatgagactccactctatagctagagataatgactctggtaaaattgaactcatggcaagcaaccagacccatggcatggcatagttggaaatttgtgtttattagcttgtttacaacaatctgactttagtacatgaaagacttttaaagacagtcaggatacactgaatgaaagtttgtattataggaaatacaatgtaaggaagtagaaaatctatggaaatcctgctgggtaacctgcatatgatcattgttaaaatgagtagtgagactgaaagtactacaggaatttggagaagaccaggcaggggtgataggggcagctgaggtaacctcaaggcctgtgtaaaagcaggagtaagaaaaagagccagtcagccaggaaaaaaaatgggagaaagtgtagaatcaactgtccattgtggagagtttgctgtgggcagccctga

SEQ ID NO: 706159 - DNA, 2485 bp, Homo sapiens
agatttacctgacagtattaaataatgagctccttgagagcaaagactgtgtctttctcatttctgagctctcagagctttgggtgacacttctgggatgaatgaagatgcagctgggtgctgtgggtgaaggaggggtctgtgcaagcatgtgcacatgtgtgcagcctctgtctttggtgccagacgtaggtatccagcatgccctgtacctactgatagctaattagaattttcttccttccttaaaaataaaatgtgggttgggtgcagtggctcatgcctgtagtcctagcactttgggaggacaaggccgggatagcttgagcctgagttccagaccagcctgggcagcatagaccttgtctccacaaaaaaaaatgaggaaaaaaaattagccaggcctgatggcacttgcatatggtcccagcttcttgggaggcttgagcccaggaggtgaagggcgcagtgagccatgatcgcaccactgcactccagcctgggcaacagagagagacctcatctcaaaataataataatttttttaaaagatgaataaaaaataaaatgtggtcttaaccagagagaaaagtgaaaaatatatgtctgtcttcatcaaagttctctgaaaaagggtcagatagtctctgcagagcaatgagctctgttccccctattttgagagacctagaagttctgtctcatgggttcttctggcacttggacttggtaaacaaaatactgaaagctaaatttatccttttgttcacaattacctgccctgaccgtgaacactttcgggctaatgagaaaacagtgcctcaggaactcagaggggtagactccttgtggggagctaatggtttggctcccacagggggccctctgggaaggacagactcattcccagatggtgtcattttcatgccccattcctgggtggcaacaggggtgctgcggggctcggcaagctagcggtggtcaggacagagatgacagtgtcgtgccataactcggggcatctcctttttcagacagaagatgtggaggggagctgggagatttcactgggtacattgaatccccaaactacccaggcaattacccagccaacaccgagtgtacgtggaccatcaacccaccccccaagcgccgcatcctgatcgtggtccctgagatcttcctgcccatagaggacgactgtggggactatctggtgatgcggaaaacctgtgcgtctcactccctccctccctttctcaggccagctgggaagcctgatgacctgctcctcaggctttcaatgtgaggaggcaggcctagaacgtcacctccatattagagcagaggtgaacatgagtttatagagttggtgagaaacaaaatttaaatgaaagccacacactgaagcgtcttgctgggccccagaggtagtgatcctgcaggtcagtcttcccctctgtgctcactggggcgttttggaccctcttccacaaggacccagagagccagtgaggatcatgcagtgttggccccagacaaggcctcatactgagttgcaactgatggcttggagactgaccgagcctggccaggtggggacctgtcctcctatcctgattcatggtcyagtgtccataaaggaagactgctgtcaacacagcttatgggcagtgtaatgaggggctctctgcagccagactgcctggatctctgtcccagttccacctcttactagttctatgatctcgggcacacattctgaatctttctgcacttgtcttctcatctgttaaaatggggctagtaacagttgctaccttataaggttataagggctaaaggagttcatagatgtgaaacacttagaataggccaggcacagtggctcacacctgtaatcccaggctgagggaggaggctgaaccaggattttgtgaccaggctcggtgagaccctgtctctatacatttttttttttttaattagctgggcatgatggtgcatgcctgtggttccggctactcgggaggctgagatgggtgaatcgcttaagcctgggaggtggaggatgcagtgagccgtgatcatgccactgcactccagcctggtagacagagccagaccttgtctcaaaaaacaaacaaacaaacaaacaaacaaacaaacaaagaatgatgatgacacatggagccactatataaacgtttgctcttcttattagtggttaaaatgtctgaagtcaagtataggtttaaatccttgttttaccacatactggctatatgaccctgggcaagtatttaatctctctattaaaaaggtaacggttgcaccaactttctgtggttttcagaagattaaatgagacaaagtccataaattgcctagcatgctgcctgatcttaggcagcaaatggtggtgatgacaattagatgacagcaggtcagttctggaatgggaggccctcacccagctcctaca

SEQ ID NO: 706160 - DNA, 595 bp, Homo sapiens
tgaagcagcaattcagctggctgacaaaactctcccttggaggactggttctcccagagtacaaaacactggaagccagagttaatggaaagattttatttagagccgaactgagcacaatcagtcttccaagggtagacttcactcatggctggtagattacatcaggtgtgcaggcagaggatgggtctcagttcaaatggtaaaaggacaaagtcacaaaycagaagagagcctgtaattaagggccagagtgacacctgggatgccattacaagcttgcttaatgctgagaaggggccataggcagaagttgtcgattccactaccacacacaggaaaagccaaactactggccagcaaattgcactcagaggaataaatgatcatgtttacatttttatgaaatttcccctcttcctcctaccttgcagatggatttgaagccaattttttccaaagctgttttatgttgtattctttcatgcctgtccagttactgcgaaattggaagtctaccatcctttaactgacgtaaatgtgtatgacaatgtcattaactatttattggttgtcaaccatgtaaataaaagtc

SEQ ID NO: 706161 - DNA, 691 bp, Homo sapiens
ttgatttcttccttttttacattgaatcacaatgctgcctttataaaccccatagaatttttacttaatatccaatgattactaaatattattgccatgaacctgaagtcaatgtttcaatgaataaatgcaatagggaagatttctggttttgaaggcatttagagtgtttatctttctgtgtcctcctcacgtttttcttcccctcccaggttctcagacaagcctgagacctgtgttgtggatcctctactcctggtgcctggccttaaaccaaagactaggatgtctataagtcaacatctgaatggcttttcagaacgctctataatgggtttacaaatgaactccttttctgtctttgcattttagagaaactaagtgactaaggaggaatgtcaaggatcatagtgacaayatgttcttcaaacgaagctaggagactgagagggaactgatggagggctgacagggctctgactccttctgttcctttgtagtataagggatgcttcattaaggactttcagtcacacaggattcctaagtaatccattgatcttccctctctctggtcacattctttggactgagattctttccctgattttaacttggctctgcttctcttactcactgagtcactgagtcaaacttaactgctaggtccatcctattgagagcccgcatc

SEQ ID NO: 706162 - DNA, 691 bp, Homo sapiens
ttgatttcttccttttttacattgaatcacaatgctgcctttataaaccccatagaatttttacttaatatccaatgattactaaatattattgccatgaacctgaagtcaatgtttcaatgaataaatgcaatagggaagatttctggttttgaaggcatttagagtgtttatctttctgtgtcctcctcacgtttttcttcccctcccaggttctcagacaagcctgagacctgtgttgtggatcctctactcctggtgcctggccttaaaccaaagactaggatgtctataagtcaacatctgaatggcttttcagaacgctctataatgggtttacaaatgaactccttttctgtctttgcattttagagaaactaagtgactaaggaggaatgtcaaggatcatagtgacaatatgttcttcaaacgaagctaggagactgagagggaactgatggagggctgacagggctctgactccttctgttcctttgtagtataagggatgcttcattaaggactttcagtcacacaggattcctaagtaatccattgatcttccctctctckggtcacattctttggactgagattctttccctgattttaacttggctctgcttctcttactcactgagtcactgagtcaaacttaactgctaggtccatcctattgagagcccgcatc

SEQ ID NO: 706163 - DNA, 691 bp, Homo sapiens
ttgatttcttccttttttacattgaatcacaatgctgcctttataaaccccatagaatttttacttaatatccaatgattactaaatattattgccatgaacctgaagtcaatgtttcaatgaataaatgcaatagggaagatttctggttttgaaggcatttagagtgtttatctttctgtgtcctcctcacgtttttcttcccctcccaggttctcagacaagcctgagacctgtgttgtggatcctctactcctggtgcctggccttaaaccaaagactaggatgtctataagtcaacatctgaatggcttttcagaacgctctataatgggtttacaaatgaactccttttctgtctttgcattttagagaaactaagtgactaaggaggaatgtcaaggatcatagtgacaatatgttcttcaaacgaagctaggagactgagagggaactgatggagggctgacagggctctgactccttctgttcctttgtagtataagggatgcttcattaaggactttcagtcacacaggattcctaagtaatccattgatcttccctctctctggtcacattctttggactgagattctttccctgattttaacttggctctgcttctcttactcactgagtcactgagtcaaacttaactgctaggtccatcctattgagagcccrcatc

SEQ ID NO: 706164 - DNA, 659 bp, Homo sapiens
ttgagcatttgagggattgctggactgttttccaaagtggcggtagcattttacattcccacctgcagtgtgtgagattccaccttctccctatctgttgagattttaagagaagattttaacaaatatttccaactagagcttctgaaagtaatgttggtgattactagaaagttccgaatcatttttgaaaatgcggctactttttatttagtagctgctaacatttactgagtgcttactgtatactatgcattaatctaagaattttacatgtagtcagacatttcatacttataacaactctgtaagatacatgtgaacagtattttacttttgaaggtattaaagcaagaaagttgagaagcagacatttaaactgaggtagtctggcttgagagcctctgtatttgccactggcttaaatctctgctgcgaagttaaaaatacgctcgtaaatgtaattttgtatttaaagattaaggrtaaaattgtattgtgaattttgatctgtgggccaaagacttccttttactgaccatctaactgacaatttcattaaatattaattaataatttttgctaagttaatataagatataaggtggtaatttcttgtactaatattagtaccatcatgtttttggattttaaatatt

SEQ ID NO: 706165 - DNA, 659 bp, Homo sapiens
ttgagcatttgagggattgctggactgttttccaaagtggcggtagcattttacattcccacctgcagtgtgtgagattccaccttctccctatctgttgagattttaagagaagattttaacaaatatttccaactagagcttctgaaagtaatgttggtgattactagaaagttccgaatcatttttgaaaatgcggctactttttatttagtagctgctaacatttactgagtgcttactgtatactatgcattaatctaagaattttacatgtagtcagacatttcatacttataacaactctgtaagatacatgtgaacagtattttacttttgaaggtattaaagcaagaaagttgagaagcagacatttaaactgaggtagtctggcttgagagcctctgtatttgccactggcttaaatctctgctgcgaagttaaaaatacgctcgtaaatgtaattttgtatttaaagattaaggataaaattgtattgtgaattttgatctrtgggccaaagacttccttttactgaccatctaactgacaatttcattaaatattaattaataatttttgctaagttaatataagatataaggtggtaatttcttgtactaatattagtaccatcatgtttttggattttaaatatt

SEQ ID NO: 706166 - DNA, 823 bp, Homo sapiens
aaagctaaaaaacaatcactcagatatgatggcattctagctactaaggaggctgaggcaggaagatcacttgaggccaagagtttgaggcttcaggcttcggtgagctgtgatcacaccactgtactccagcttgtgcaacagagaaagaccttgtcttaaaaaaaaaaaaaggaaataaaagaaatatatatatatatgacaaggaaagacacaaacccctactatttatgatttattgtatagtgctttagttaaaggaggctgagtggacacacatattttaacttttccttttttgggggtcagcctaaagtcttataccccgagacaatgaattaagctaagagccctcaagagtgagacttctgcatttgttttaccgtgagggagtaggggggcaactgtgagtgggaagtggaaagtgtgggaacggccttgtgttccgatagattccttttggagaaaagtacatatggctattaatttccttaactctccatgcctgagcatggttggcaaacgctggaataatactgcttatcggaatgacactatggtttgaaactttttttttttttttttgagacagagtctcactctgtcacccaggctggagtgcagtggtgcaatctcagctcactgcaacctctgctttctggkttcaagcgattctagtgccttagcctctcgagtagctggaattacaggtgtgtgccaccacacctgggtaatttttgttttttggtagagactgggttttgccatgtcggccaggctggtcttgaattcctggccttaggtgatcctcctgccttggcct

SEQ ID NO: 706167 - DNA, 663 bp, Homo sapiens
tatacgcttaatagactacagcattgtataaatgtaacatttctattcactaggaaaccmcaaaacttgtatgcctccctgtattgctatattcactttacacagtggtcagaaactgaacccttagtatctctgaggtatgcctgtacatgttcctcaagttttcattattatttaattattcaggaaatgtatttaattggatttccatttctagttaacagttgcttcttttgtgagattaatattatttgcctggttttaaggatttgttttggctgagatggatcatcagcatcattaggtgactaaatacgtcttgtactatttaaccttatttatgactctgagtgggggagaatactaccgattataggataaaataaaaatctagttttaattatcaaaaagtaaatgccagcaaaatcttgctactttctcagaaagcagatatccagaaatttttgaccaataaccccctaagtgtgacccacgagtctgggaggtctgcttgtgtgtctcctgatctgcaattgtgctgtgttataagggaaaaagaaaaacaattctactaatgaatgcagttttccttattctgttgaatttttacttggagttatgcctgaagtctaaggacgtaatgtggaaaagagaatgtatatt

SEQ ID NO: 706168 - DNA, 909 bp, Homo sapiens
aaaatcaatttgaaatgcatttgtactaatctgttgatgatatgcatagaaagtaatgctgtaaaagtcccctcatatgtaattggtatctcctttctcttcttcagaatgtctgaaagctattaaatgcaaagtttctaattaataaatagtttctggaatgttagtatgaggcaggtttatttgttttaaaagtgatcataaattagaataattaagagctgtaatgcattttgagatatctatgtgtttgttttaagtttatatgtgggtytacttggaaactaagtggctatttgtaggataatgtaccatcagtaagatgatatttatttaaacataaaatagcaaataaggcaaaactctttttgtgccagtagatgttgacgtttaagtgaaattgctttcaaaagtcagaatttattttgatgagaatgattacgacgctagtgttttcaaagatttaaaaaaggagaatagtgaacagaactgaaagcagagggtatcataacattcaatacgtaaagctctataactgataactgaagtacacaaggagtttactacttagggtaaatatatatatatatatatatatatatatgtgtatgtatttttttttttgagccaggttctcactctgtcacctaggctggagtgccatggcacaatcacaggccactgcagccttggcctcccaggctcaaacagtcctctcacctcagtctccaaagtaactggggactacaggcacacaccacatgcccaactaatttttatttttattttctgtagagatggtcacaatatgttgcccaggctaatcttgaactccagggctcaagcaatgcttccactttggcctcctaaaatgttgggattataggcatgagccactgagcctagtca

SEQ ID NO: 706169 - DNA, 651 bp, Homo sapiens
gaaagtgaggctgagatagtgaccatggatactcctgtggagggccataaaaaaaaaaagaaactgaccatgactaagatgcctaaagaaactctgccaatgagaactccaaggcctcttggtaatggctgctggaaactgccttagaagagcagtgacttccctcactggtcagcattttgaaggaaatcaagagctgcccagtttgtctatcagtgtgctggtctcctgaattactcgccatggtttgttctycttctttcttattactgcctttatgtgttaaatatatttgcatgattattggtgtgtgaaagcctcacaataaaccttaaatttgaaagcacttaattggccactgagccactttgaaacctttccccattcttggatttagaacaactaggctgattcaaacctgacacaaaaaatcaaaagtccaaagtcttatctgaatcagatatgagtgagacttaaggcatgattcattctgaggcaaattccttccagctatgaacctgtgaaatcaaaacaagttatctacttccagaatacaatgtgggacaggtataggatagacattttgattccaaaagggagaaataggcaaaaagaaagaagtaacaagccctaagtaagtccaaaacccaa

SEQ ID NO: 706170 - DNA, 2393 bp, Homo sapiens
ccgacgttgctcttttactctccctttatcctagatcctcaggcccccttgccctatgactttgggctctgaatctccgcttcctccttggtagaatgttactaacagcatctgcctcacagggtggttgctggaatgaaacaagatagtcctctgagagtgtctcgcacagtgtgagtgtatggaaacattagctcttcctgtcatcatcaccatcatcatttttattatttcttttttttttttttttttgagacagagtctcaaaaaaggctggaatgcagtggcacagcctcagctcactgcaacctctgccccccaggttcaagtgattctcctgcctcagcctcccgagtagctgggattagaggtgcacaccaccatgcccggctaatttttgtatttttagtagagatggggtttcaccatgttagccaagctggtcttgaactcctgacctcaagtgatccagccaccttagcctcccaaagtgctgggattgcaggtgtgagccaccacgcttggcttatttttattatttctaccctcattatactaatatgccaccgtcccactctgttagtggttgtgcatgtctgtctccacagctaggctgaacctcttgagagcaggaactgtgccttatttctccagaccctcagcacctagcacggtgcctggcacatagcaggaaggaggaagggagaaaaggaaagtaacattttgtgagcaaacaccataataactctgccaggtattctgctagcgtcctgggtattaatctcatggtgaccctgtgcggttttgctatttttttcccatttcaccaaaagtcagtctaagagaaagcatcgctttccagggttccacagccactcaaggtcagaatccagacccaggtcttcttttgtaccctcaccacactgcctcgagctgcccagtgcttcttttgaattgatgtctgtcccaccctccaagagccacaactcttattctaccctcagataaggacatgtacatgggtctcacacttgcaggcccctcccctcatcgatgagtaggggagcttcccaagggcagcacccgtagctgagaggattccagatcctttgtaccagctggtgttgtcacagccctcttctttcaaggatttcaaaccctttccagatattctctgcagacaaatcttactggatctgttttgttttttgttttttgttttttatgagacagagtctcactctgtcgcccaggcgggagtgcagtggcgcgatctcggctcactgcaagctccacctcccgggttcacgccattctcctgcctcagcctcccaagtagctgggactacaggcacccgccaccacacctggctaattttttgtatttttagtagagacggggtttcaccgtgttagccaggatggtctcgatctcctgacctcatgaaccacccacctcggcctcccaaagtgctgggattacaggcgtgagccactgcacccggcctactggctctgttttatagacagatatcaagaaacccattttccatttctggctgtcagcttacccctaagcacttggagtccaaatcctagctgattgccaacagtaagttgcaaacaacagagatggtaaatatgggcagtccctggggatgagcctcagtggttggggtggtgggagctgggtgtgaggggagaagagcccagagcctgaagactgagccctggaggggaaaagtgaaaaagtcagagagagctgtctttgaatccacaaaagccaagccgggggagccacaggaaggaatcacagaagtgagagaccacttcaggcccttgggggccagttggggaatgatgggctggaaagtggacacttaagcgatgttgaggagacaccaggctgggaggcgggacacctggttccagctctggttctgctcctaactatgtcacggtccctctccattgcccatctcccctattggcaacacagaggtgctgtcattctccctctgcttcccagaggattggtaaggaacgacagaggtcatatatagggacagggaagggttgatgccagagggaagaaagaaactgatggcgggccaggcacggtggctcacgcctgtaatcccagcacgttgggaggccgaggcgggtggatcacgaggtcaagaaatygagaccatcctggccaacatggtgaaaccctgtctctactaaaaatacaaaaattagctggacgtggtggcacacgcctgtagtcccagcaacttgggaggctgaggcaggaaaattacttgaacctgggaggcgaaggttgcagtgagccaagatcacgccgctgcactctagcctggtgacagagtgagactcaatctcaaaaa

SEQ ID NO: 706171 - DNA, 927 bp, Homo sapiens
ttttttcctatcctgcattaaagtaaataatgcaggagaggaaaaatttaatgtccctctaaaaatgtctttaagtttgcccatgagcccacctggcatgatcccaggtagctcattttgatcactgggacgtaagcagcctgaaatggggtcacagcttagtctccgcatcagaagagctgggttcaggtgccagctccgccccttcccggctgtgtcccccaggtctccwcctcaagggacacgggaaacttagaagttgatagagcactgcaaagtgcggtggagaaccactgtgcaagccctgaggaggggaactgggcctcgctcctgctggggaaggtagagaagggaaggacggagcctggagtcttcccagaagggaaggacggagccaggggagaagggagggggagagaagaaccagccagaccacaggggctgagacagacagagaatttagggacagacagaggggtctactgtttgaacttgtttgtgttggtgcagtataaaccctgtagtggttaactttatgtgtcaacttggctaggccaggggagaaagatagttggtcaaacattattttagatgtttctgtgaacgtatgccttagatgagattaacatttaaatcaccagacccgcgtaaagcgtattgccctcaataacatgggtgggcctcgtccaatcagttgaaggcctgaataggaaaaagactgacctccccagaacaagagggaacttggccagcaggctccccttgtccttgcacttggacagcatctgtttcctggatctccagcctgccagctcaccctacagattttcaacttgctaagccttcacacctgcataagccaattccttaagcgctcgctctttctcctgtgtgtgtgtgtgtgtctgtctctctctctctctcttt

SEQ ID NO: 706172 - DNA, 606 bp, Homo sapiens
ctactatttacatctgatttaaataaaccattccatctgaaaggggcaggctgcgggaaagagtgtctttcatggggagtaaaataccatttaatgagcatccacagggcgtcatttatatctggcaggggccctggctctgagacccctgtcctgccaccccatttccttgctctgtccctgtgttggggggaaacccgagggtccccaagccataccctttctccctcccactgctccccttttcctgggattggccacctgccccacagaagtgatctgctctgggtgccctctggggttccaccaatgccaagtcctcggctgtgtgatgagggtcagaagctctcctctgccttcctgtctctgctgctctgtggagsaggaaggcaggtctcggggttggttgtctccactgtaagtagacacagggggaggactctagtctcatccaggaggagggggacacaaagcaacgggatctccttctctgagctgaatctccttctatcctaatctaccaaaaattaaacaggtgtgactcccacaatggtggtgtgaggagcttggtggaccctctccccagggaaacagcagtttaactga

SEQ ID NO: 706173 - DNA, 619 bp, Homo sapiens
cagctgttcatttatgttttgtcctgttttctgtatgtatgctatacatcaacaaaaatttacatactcagaatagactaaaaatccattgaattgtacacttaaagtggtgaactgcatggtatgtgaattagatctcaatgaaactgtaagtaaatgaatggttgatgtaacttctgagttcagggtgaggagggttagcagccagcaaaggagccctggaatgttgtaatatacagaaatatacagtagattcattgactacttgagtagaaagagacttcaactttcaactttctacagccagcattgctctattgttatggagaaaagcttcctaaccaacctgatgcactgtaaagacatccatatcactrgacaaggtaatttccctggaaagggatgttcaatgtccatacttgctgtagtgactgacttcctctgagagagaaataagaggaaggggtttaaaaatcaagttcctttttggattccagtggcattggatttggagtggtcaccgtaataggtgacataggcattgctgatgtgctgtgccaggctggtggttgctaggctaccctgaggaaagagatccacatttctatgtttgatgcct

SEQ ID NO: 706174 - DNA, 1264 bp, Homo sapiens
catcttactcccttgggtgactcttttcattagtgctaatgggctcagggccccggtttagaggctgtttctgcaaatgctggaagaacagaaatcttgttctctttggtgaagcccattcttgtaaataagaaaagaattaaatctgtgtgctgatattaacacatgtacacatgcatatttgtctgtgtattacttctaatcacttctccttttaatttgaatttattagtctattagaaatattgccaaacattactagtgaatgaaacaatatagaaatagtaccaaaactgaatccagtgcacatttctaattaaatccttctcatagggawtaggaattttaaaaaaatgatgtgcaaaaagacagtagcattaaatgtcacttaccacaagttgcttaaaaccaacacaaaatatggtacatgtcaaatatttattaaacatctatttgcacatggctaagtgctaaatactatgtaaaactgaacacaaaaggaaagaacgtgctacaatttggcagcggttagctcaacaacttctttctttcttacatgtatgcatgttgaaaataccattctattttcctctatcatttactaactacatttaactatgtaaagaaacaaggccaaatttcaaataagaatcctgtgaagttgataaacccatggacaaacatgcaatcctatctaagatttcctatagcccatatgacattctgcccacaaaggcaaaccaaatctaacacaatatattttcttctcaacaagtttttctcttaaaatactcacttcttctgatttcctcttctctcaatcacccattcttttaacatttttcttacttagtgagttctagttactgggatacaaagatgaattagtcataatccttgtccctactttcttagatcatagcggttaggaaaaaaaagatatgcagataatcacaataaaaagtaataagtacttaatagaggtctgtctatagtgttacagtggtgacgagaaaacaaatgacaaaatggcaggagtaaatccctacttatcaataataatgctgaatgtaaatgaactaaactctccaatcaagacatagagaagctgaatggatgagaaaagcaagatgcaatgatctcttgcctacaagaaacacagttcacctataaagatacacatagactgaaaataaagagatggaaaaagacattccatgcgaacataaaaaagaccagggttagctacccttatatcagacaa

SEQ ID NO: 706175 - DNA, 664 bp, Homo sapiens
tgagacagagtctcactctgtcacccaggatggaatgcagtgacgtgatctcggctcattgcaacctccgcctcctgggttcaagtaattctcctgcctcaacctcccgagtagctgggactacaggcgcccgccaccatgcccggctaatttttgtgtttttagtagagaaggggtttcaccatgttggccaggctggtatcgaactcgtgacctcaagtgatccacccgccttggcctcccaaagtgctaggattacaggcgtgagccaccatgcccggccatatttacattgtaaatatgggaaaatttgcaaatctcaattttatttttatgtttattttattaagatggagtctstctgtcgtccaggctgtagtgcagtggcgtgatctcagctcactgcaacctccacctcccagtttcaagggattctcccacctcagcctcctaagtagctgggattacaggcacctgccaccatgcctggctaatttttgtatttttagtagagatggggtttcaccaagttggccaggctggtttcgaactcctgacctcaagtgatccaaccgccttggcctcccaaagtgctgtaattaccaggtgtgagccactgtgcctggccatcaattttgtttcttaaaatacagccccagtccga

SEQ ID NO: 706176 - DNA, 1310 bp, Homo sapiens
gtaacaaagatcacttcctctcacaactcattggccataactagtcacatggttacactcaactaaaaagggtggagaaatgtaattctcagtatatccaaaggaaatgagaactgggtaggggtagggagaaacctttgaggtctcgtccccattaaaaaatgacaatttataaacaaaagtgaggctgacaaaaaaatggaaacgggaagcagagaggaaagatggagagaaaagtaaaccatcttagaaaacaggattttattttatttatttatttgtttgtttgtttgttttgagacagggtctcgttctgtcgcccaggctggagtgcagtggcgtgatctcggctcactacaacttctgcctcccaggttcaggcgatcctcctgcctcagcgtcccaagtagctgggactataggcctgccccaccacacctggctaattttttgtatttttagtagagacagggtttcaccatgttggccaggctggtctcgaacccctgacctcaagtgatccacctgcctcagcctcccaaagtgctgggattacaggcgtgagccaaggcgcgcggccagaaagcagaatgttaagaggtgttgtccatgtgacgaaataagaaaataggagttatattaattgaatttatgaggagaaatgagagaactgcaaataagcatataaatgtcaaacaattggaggtggagagagcagagattgcaagtagactacagggaatggtccatttgcccagacattcatcctagtctgttcacgctgtgctatagtttggacatggtttctttgactcctccaaatctcaggctgaaatgtaatccccagtgttggagggatgctaatggaagttgtttgggttatgggtaggatctctcatgaatggcttggtgttgtcctagtgattgataatgagggcgttcttgctctattagttccctggttgttaaaaacagcctgtgaacctccccctctcttggttcatttctctccatatgatctctgcacacaccagctcccctttgccctctgccatgaatggaagcagcctgaagacctcaccagaaacagttactggtgccatgcttctcgggcagcctgcagaaccatgagccaaaataaacccagctccgagtattcttttacakcaacacagacagactaagacaggctgctataacaaaatatcataaactgggtggcttctaaacaatagaaatttatttctcacagttctggaggctgagaagtccaagatcaagatgcttgcagattcggtgtgtggtgaggg

SEQ ID NO: 706177 - DNA, 1664 bp, Homo sapiens
tgttacagaatttaccttgattgttcttgttttgcagttttttaattttaattttattatttgtatttgacactaactacaatgtatgcatatcccaaagcctccaactattctaaagtatgatggcatcttggtaatatagaagccagaaaggcatacacaacagaggaatgctctaaatttatagtcaggttgatggcacatacttgacttcttattattcccaaaaaattacatcagatcgtgattggaaaaccctgcttgagaatcccccatttcaaactcaaggtccacaaaaggtactgtttatacctcagtgtggttgccagtttctgtgctagtgcaaaaattgaggtcctgcataaaggaacastgtagtatgtgacagcctttgttctgtttttcatcaatacatcagttatacttcctgattttcaagttaagggaattatcctctcagaattttaacttttgttttagcagcttaattttaatatctccaccttattgagaagagttctacaaaaaaatattgtccacacagcttgggaagaaaggggtgtcttctcccatgttctgtttatgttgcaactaacacagagcaaatgcctcctttcctcacatttggcatgaagatttataatttaaatgatgctactaaatagagcagattagaataataataatagcatctatcaatggaaataggtaatgacacaaatgccaacaatttttccaaataaggagaatttttttcctcccccattgacatgttactccttgatctttaagctttaataagacctctttacttggactgctaaaggcttacttctgcactcctgtaaaccttgcaaagtagctattaggtatctcatgctggtgtaccctcattcaccttcccttttggcactctttttgtgttgaaacttttagttatgtggcattggaatcttacttggtagttaatttatgaaaagcttaagaataaatctattctcagttaatgcctagagtctctattgaagtaaaaggaggcttacatacataagaaaaatgcatgtatacttaggaatgacccaggaaatcaattcactttgaagaaaaatacattctatgaaattgtgaagaaactaggaacaggatataatgactgattaacaaagatatttgacaaatattatgatgaatgtgctgagattgtgggcaaagtgtgattatgccacctatacagcaatattttccaaagacacctctacaagaaaatcattagaattctaaatctgcatcgcaaatacactaaaaatatctcctcaacaactcaaaataatctataactgtttatatgtccatgttggaaattcaaagaagccaaaaaattcttccaccaaatcaactatgcacacgattttttctctctctgtctctctctctttcaatctctttctctctctttctctctttctgtgtgtgtgtttgtgtgtgtgttttaatgagcatattctcttgagtcctgtttctctaaatcacaccaacagattgagcatccaaagaaattttaactggaaccctccaaggcacatctattgtactttgtattgaaggtatatagcataggatagtacagttcttcccattatacactgcactttaaactaaaaaaa

SEQ ID NO: 706178 - DNA, 1664 bp, Homo sapiens
tgttacagaatttaccttgattgttcttgttttgcagttttttaattttaattttattatttgtatttgacactaactacaatgtatgcatatcccaaagcctccaactattctaaagtatgatggcatcttggtaatatagaagccagaaaggcatacacaacagaggaatgctctaaatttatagtcaggttgatggcacatacttgacttcttattattcccaaaaaattacatcagatcgtgattggaaaaccctgcttgagaatcccccatttcaaactcaaggtccacaaaaggtactgtttatacctcagtgtggttgccagtttctgtgctagtgcaaaaattgaggtcctgcataaaggaacactgtagtatgtgacagcctttgttctgtttttcatcaatacatcagttatacttcctgattttcaagttaagggaattatcctctcagaattttaacttttgttttagcagcttaattttaatatctccaccttattgagaagagttctacaaaaaaatattgtccacacagcttgggaagaaaggggtgtcttctcccatgttctgtttatgttgcaactaacacagagcaaatgcctcctttcctcacatttggcatgaagatttataatttaaatgatgctactaaatagagcagattagaataataataatagcatctatcaatggaaataggtaatgacacaaatgccaacaatttttccaaataaggagaatttttttcctcccccattgacatgttactccttgatctttaagctttaataagacctctttacttggactgctaaaggcttacttctgcactcctgtaaaccttgcaaagtagctattaggtatctcatgctggtgtaccctcattcaccttcccttttggcactctttttgtgttgaaacttttagttatgtggcattggaatcttacttggtagttaatttatgaaaagcttaagaataaatctattctcagttaatgcctagagtctctattgaagtaaaaggaggcttacatacataagaaaaatgcatgtatacttaggaatgacccaggaaatcaattcactttgaagaaaaatacattctatgaaattgtgaagaaactaggaacaggatataatgactgattaacaaagatatttgacaaatattatgatgaatgtgctgagattgtgggcaaagtgtgattatgccacctatacagcaatattttccaaagacacctctacaagaaaatcattagaattctaaatctscatcgcaaatacactaaaaatatctcctcaacaactcaaaataatctataactgtttatatgtccatgttggaaattcaaagaagccaaaaaattcttccaccaaatcaactatgcacacgattttttctctctctgtctctctctctttcaatctctttctctctctttctctctttctgtgtgtgtgtttgtgtgtgtgttttaatgagcatattctcttgagtcctgtttctctaaatcacaccaacagattgagcatccaaagaaattttaactggaaccctccaaggcacatctattgtactttgtattgaaggtatatagcataggatagtacagttcttcccattatacactgcactttaaactaaaaaaa

SEQ ID NO: 706179 - DNA, 1664 bp, Homo sapiens
tgttacagaatttaccttgattgttcttgttttgcagttttttaattttaattttattatttgtatttgacactaactacaatgtatgcatatcccaaagcctccaactattctaaagtatgatggcatcttggtaatatagaagccagaaaggcatacacaacagaggaatgctctaaatttatagtcaggttgatggcacatacttgacttcttattattcccaaaaaattacatcagatcgtgattggaaaaccctgcttgagaatcccccatttcaaactcaaggtccacaaaaggtactgtttatacctcagtgtggttgccagtttctgtgctagtgcaaaaattgaggtcctgcataaaggaacactgtagtatgtgacagcctttgttctgtttttcatcaatacatcagttatacttcctgattttcaagttaagggaattatcctctcagaattttaacttttgttttagcagcttaattttaatatctccaccttattgagaagagttctacaaaaaaatattgtccacacagcttgggaagaaaggggtgtcttctcccatgttctgtttatgttgcaactaacacagagcaaatgcctcctttcctcacatttggcatgaagatttataatttaaatgatgctactaaatagagcagattagaataataataatagcatctatcaatggaaataggtaatgacacaaatgccaacaatttttccaaataaggagaatttttttcctcccccattgacatgttactccttgatctttaagctttaataagacctctttacttggactgctaaaggcttacttctgcactcctgtaaaccttgcaaagtagctattaggtatctcatgctggtgtaccctcattcaccttcccttttggcactctttttgtgttgaaacttttagttatgtggcattggaatcttacttggtagttaatttatgaaaagcttaagaataaatctattctcagttaatgcctagagtctctattgaagtaaaaggaggcttacatacataagaaaaatgcatgtatacttaggaatgacccaggaaatcaattcactttgaagaaaaatacattctatgaaattgtgaagaaactaggaacaggatataatgactgattaacaaagatatttgacaaatattatgatgaatgtgctgagattgtgggcaaagtgtgattatgccacctatacagcaatattttccaaagacacctctacaagaaaatcattagaattctaaatctgcatcgcaaatacactaaaaatatctcctcaacaactcaaaataatctataactgtttatatgtccatgttggaaattcaaagaagccaaaaaattcttccaccaaatcaactatgcacacgattttttctctctctgtctctctctctttcaatctctttctctctctttctctctttctgtgtgtgtgtttgtgtgtgtgttttaatgagcatattctcttgagtcctgtttctctaaatcacaccaacagattgagcatccaaagaaattttaactggaaccctccaaggcacatctattgtactttgtatygaaggtatatagcataggatagtacagttcttcccattatacactgcactttaaactaaaaaaa

SEQ ID NO: 706180 - DNA, 890 bp, Homo sapiens
tacccaaagaaatataaatcattctattataaagatacatgcatatgcatattcattgcagcactgttcataatagcaaaaacgttgaatcaaacaaaatgtccatcaatgatatactggataaagaaaatatggtacatatacaccatggaatactatgcggccataaaaggaaacaagatcatgtcctttgcagggacatggatggaacatgaagtcattatccttagcaaactaatgcaggaagaaaaaaacaaacatcacatgttctcacttataagtgggaggtgaatgatgagaacaagaacacatggacacactgggaggaacaacccagactggggcctgtgggggattgggggatggagagcatcaggaagaataggcaacagatgctgggcttaatacctaggtgatgggatgacccgtgcagcaaaccaccatggcacatgtttacataggtaacaagcctgcatatctggcacaggtacacctgaacttaaaatgaragttgaaaaaaaaaggaatataaaagtgaaataacttatcaactgaaaaaaatacttttttatttttgaccttgaatcctccattccaaatgcagaaataaatctacctcctttgctttgtgattcatttaggaaataatactattttattagaaaattcatagcttttctccctttctatatgtttatcattagacagactctcccatcttcattcatatccaacccagcaagtacttgagagtgtgtggagggagcagttagccacaaagcttaatgaaatttcagtccactcctttttctccttttttctagacatatcccaaggaggaactattgtctgcacctcttttctttccagcttgtttctccttgacttcc

SEQ ID NO: 706181 - DNA, 602 bp, Homo sapiens
tgaatataaatcgatgtggaatttgcataaattccatatagatttgggtttcttggccttatgctgaaaccagcatttgagactgttggtgaaaagaatataaagaggtggtgtggtgtacatattactgtccgtattatggtctgattgtcaccacagtcctccatattagctttttatatgacccctgctttcccaatctagatctccagaatttttttggtgttttttgaatataatcaaaagtttgttttgctcaagattcatcttcctaaaaatgtttgacaaatgcctaatttgmaaattagtttgctgtcttcaagcttctcttaggaaagaaacgtggtccaaaagaagtttgtctagtatgcagggatttttaaaaactggataacccagggtggtctgcataagttatatgcttttcccccaaagaatttcaaacggctttcctggtatcatttgtccttatgtttctttagttccaggacagttcatactgttcttggcagcttacaaaatgagaaactgaggtattgtaattcagtctacttcccttccaaggaaaattgaaaaacactgtggggaaaatactaacaatt

SEQ ID NO: 706182 - DNA, 628 bp, Homo sapiens
tccctatgacagggtgatagagtcatttgatggtcccaggataaggatgttaaatccctggcacttatgacactactccttgtttctaaacagggattgacaaagactttttaatcaattagtgtgcacttccacacccaggccagacatggtcacatggttttcctcactttattattttacacagctaattcccagagatatcagttaaacaaaacccacattctatccctagtggaaagcttgctgctaargccagtgcttaggagagagggcaccacaagttgactccgaatatgagtttctggggagggacaacatcgctggaagcatgagacagggagctgactggggagagatagaaattgaatcacattgaaggataactaggagcagaatctctaaatggcccaatgacactcaaattcttggttttggccacactcaattcttcagcaatcctggctcagcagttcagggtcagagaagcagagagcagattgatccaaatatgggaagtcccagtagagcaatataaagagccacaaatgaatatattgggaggtatctcaacacttcctattgagtacggaacacacagcatggcactaatcttagtcatggtggt

SEQ ID NO: 706183 - DNA, 628 bp, Homo sapiens
tccctatgacagggtgatagagtcatttgatggtcccaggataaggatgttaaatccctggcacttatgacactactccttgtttctaaacagggattgacaaagactttttaatcaattagtgtgcacttccacacccaggccagacatggtcacatggttttcctcactttattattttacacagctaattcccagagatatcagttaaacaaaacccacattctatccctagtggaaagcttgctgctaaggccagtgcttaggagagagggcaccacaagttgactccgaatatgagtttctggggagggacaacatcgctggaagcatgagacagggagctgactggggagagatagaaattgaatcacattgaaggataactaggagcagaatctctaaatggmccaatgacactcaaattcttggttttggccacactcaattcttcagcaatcctggctcagcagttcagggtcagagaagcagagagcagattgatccaaatatgggaagtcccagtagagcaatataaagagccacaaatgaatatattgggaggtatctcaacacttcctattgagtacggaacacacagcatggcactaatcttagtcatggtggt

SEQ ID NO: 706184 - DNA, 674 bp, Homo sapiens
ttctaatttgtcttcaagttgactgaatttttccatggctgtatcgagtgtactaaaaaactcatgaaagatgttctttatctccgatcccatattttaaatttctagcatttatttgattctttttcacagtgtccatctctgtgttgaaatttctcatgtgttcatgcatgttgtccatgtttttgyactggaatctttgctgtgttgataatatttgttttatatttccagttgtttcattgtctggatgatattttagtctggttctcttgattgtctgtggaatgaagtcaattattacaagaatttcatggatgcagaaactgaggctcaaggaggttagatgagtactcaaaatcacggagccaagaactgatgaaatgaagtcaaacaaatttcaggctttatcttctgcccactaaactgtgctgctctataatatggacacaataaatagctactgaacaggtgattacatgacctggaattctcaagcataaaaatctgtccaatgttgcccaatagaaatgcctctggggacccaaatcttgggacacagctgagtgggaagccactaggagcttatacctatgttctgatggtgtagaactatttcaaaaccccatgagaatgtatgcatttggtaggtaagtgtcactgtggccaagtga

SEQ ID NO: 706185 - DNA, 1015 bp, Homo sapiens
tgcagggttctaatttttaaggaggattttcaaatattattttataattagtcataaatttaaaattactcaaattgataggaaaaaggtcttcctgaaatcaaactttctacctcattcccagagatcattgctatctactcacctgtcttaatcattactcttctttatgaattgaccagtgtgtatgtatgtatgtatacatctatatattagtatgcaatatgaaacaggtgtgtatgtaacctaaaatatacatacatatcctaaagtttacatgcacacctaaattacatacatgtactcaggcacacagtagctgtatgctgctgggaccacagaacccctccccaggaaggctccgggaaagacaagggtctctgggctgtgatggccttggcttcctgagacagacaggggccttctggaggaagagggtgtccaaggcctcacagctgtgcagcatgtggaggctgatctcagggagtgggcagaaaaaatgggctgagcttccccccactcaaggtcaaggtccttcctccagccagaggtcaaggcagagtcctttccagatgcactgctgtcctgttggggtgcattgtccactggcttcctgagaaatggtgcctgggcagtaaagcctgtaagagcttgtatatcaacagacatctttattctctcctgacacttgattgacagttttcccaggtgtagaatttcacgtcagaaattaatttccttcagaaccacaaaggcatttctccaygtcgtcctacgtccaagtgtttctttgagaagcacaaagtcttcctgtgtgccggtcttttgctttgacagcttcaggcctcttcctgttgctcccaagagttctgaatgccacggtgcacgccttcatgctagtgtttccattcatgtgtgagatcttttgatctggcaactcatgtctcaccagcctggggaatattcttgaatgactgtactttgttgatatggttttgctctgtgtctccaccca

SEQ ID NO: 706186 - DNA, 247 bp, Homo sapiens
ccccccaacccccccccyctatatatatatgtatgtgtatgtatattttgatgagctcattaaatacattcacaattgtcccataagatagggattaataacacttttatagaaaagaaaggagttcatggaaaagaatctgattgtttctctgttttgctgtcactttgtgttttgcggagttaatccaaagagttgcttcaacaagcagaactcaaggaaacacgggtgaggttactttcaggct

SEQ ID NO: 706187 - DNA, 247 bp, Homo sapiens
ccccccaaccccccccctcyatatatatatgtatgtgtatgtatattttgatgagctcattaaatacattcacaattgtcccataagatagggattaataacacttttatagaaaagaaaggagttcatggaaaagaatctgattgtttctctgttttgctgtcactttgtgttttgcggagttaatccaaagagttgcttcaacaagcagaactcaaggaaacacgggtgaggttactttcaggct

SEQ ID NO: 706188 - DNA, 2474 bp, Homo sapiens
ggaggtacctagaactagagtttcttacctgtggccttccggtcaaatagcctcagaggttcagttcctggtggaattgaaaatcctggagtaggccatggatgtgagcggtggatatgagggatttttccttctattggcaatctgataggttgtggtagagaatcattcacacactactgcctgttgaggcgatttctttagatttgaagacaaaaaaacgtcagtgttaacgcaaaggggtagagaaacaattaagttaccttcgcgtactttttaaatgctggtattgaaaggagtcgaaaacttaacctaccgagagtggggttcgaacccacgcgggcaccagcccattggatcttaagtccaacgccttaaccactcggccatcccggtgactggggcaagtttcaaggcaatcatttttttataacaacaaaggcatttgcactgagagtcaaggaagtaccgaattattcctgtttttactgaattgtattaaaatataaggaggatataataggaaaacacagcatgtgttcatcaatcacttctcctgagtctcctcacttggtcaaaaatttccggagaaatttttgtttgtacctgatttgaaaagaaaaacaagggagcggttggaggggaagggtggagagatgaggggagggagtgccctagtggaaaccacagcattaacaccacctactacttctacttcactaaaggcactgtcccgattttttcttcagagatcactgttttgcctgctgaattcaaacctccaccccagacacactgatgtcattggaggcatcaggactgggggcccaagttttattatattaaaacgagttcatgctggggtaaattttaagatctttagtggacagaaaggcagttcaaattctttgattttagtgacaaaatgctttaaactgacaatgcaacctatcaacaaaaggaccatattgagctgtgtgtgggctgcacagaaatacgccgccccagaactctaagtgctcccggaaaagctcgcaattgttacaacagagaatccaattcttgtggctaaagtatctcctgggggacttattacaaatgtggattctagaacccctcgtgcaatgatcctgactaaagcgatttactatgggtcccaagaatcttaatcttaccaagcaccctcaagtaattctaacttcaatagtctgctaaacggcactcagtgaagggtgctaaagctgtcatggggaatttaaaaactcatgaaataagctcgtagaaaggaagtttagggtctggaggacacagagctgaaatgaaatcctgaagtagggttggaatataattaattyatgtaacaatactgaacacctagtgtgtggcgtgcccctttgtttttcaggtaatcagaggaaagcaccacaatatgcaaaggttgtgtggtctgcagcagacaagcaaagaaagtcagagaacatctcctcagaatctcatcagctgaggaaacaggagtccaggtcttatttgtgatgctcaggactgcttgggtccacatcaggatctttatctgcctgatgaagccatgggaaaggaatggacccctgaagtcctttggctgttgggctctgggttctgtctctggccagatcaaggttccattcctagaagaagagatacggcctgagagattcccgcttctaccaaacactgaaggaaattcaggtctcttgctgctggggcaagaactgacttgaggatgggaatggaggtgactggaaggttccatgaaaagcatatcagagaaagaaaccatcataaatagatagacataaaaatgttcagaatattctattgctgttagctctgaaactacagagcagaatcaatcagctgtgaagatttttaaagtatacttatatagagggtttaaatatctacatgtgacagtaaaaaagaaaactattcgaagtatatgaaggatggtcggcctcagtggctccagctataatcccagcattttggcaggccgaggcgggcagatcacctgaggtcggaagttggagactagcctggccaacatggcgaaaccccgtctctagtaaaaatacaaaattagctgggcatggtggcgcatgcctgtaattccagctactcggaagggtgaggcaggagagtcgcctgagctggggaggtggaggttgctgtgagcccagattgtgccactgcactccagcctaggcgacagagcgagactccgtctcaaaaaaaaaaaaaaaaaaaaaatgtatatgaaggagaacatccttatacccaggagacagaaaacttttgaaaacttcaaaagcacaaaccataaggcaaaaaacaaagaagacatatttgcttacattaaaatcaagaatatagccactgtagtctagctactggggagactgaggcaggagggttgcttgagcctaggagttcagtgc

SEQ ID NO: 706189 - DNA, 2474 bp, Homo sapiens
ggaggtacctagaactagagtttcttacctgtggccttccggtcaaatagcctcagaggttcagttcctggtggaattgaaaatcctggagtaggccatggatgtgagcggtggatatgagggatttttccttctattggcaatctgataggttgtggtagagaatcattcacacactactgcctgttgaggcgatttctttagatttgaagacaaaaaaacgtcagtgttaacgcaaaggggtagagaaacaattaagttaccttcgcgtactttttaaatgctggtattgaaaggagtcgaaaacttaacctaccgagagtggggttcgaacccacgcgggcaccagcccattggatcttaagtccaacgccttaaccactcggccatcccggtgactggggcaagtttcaaggcaatcatttttttataacaacaaaggcatttgcactgagagtcaaggaagtaccgaattattcctgtttttactgaattgtattaaaatataaggaggatataataggaaaacacagcatgtgttcatcaatcacttctcctgagtctcctcacttggtcaaaaatttccggagaaatttttgtttgtacctgatttgaaaagaaaaacaagggagcggttggaggggaagggtggagagatgaggggagggagtgccctagtggaaaccacagcattaacaccacctactacttctacttcactaaaggcactgtcccgattttttcttcagagatcactgttttgcctgctgaattcaaacctccaccccagacacactgatgtcattggaggcatcaggactgggggcccaagttttattatattaaaacgagttcatgctggggtaaattttaagatctttagtggacagaaaggcagttcaaattctttgattttagtgacaaaatgctttaaactgacaatgcaacctatcaacaaaaggaccatattgagctgtgtgtgggctgcacagaaatacgccgccccagaactctaagtgctcccggaaaagctcgcaattgttacaacagagaatccaattcttgtggctaaagtatctcctgggggacttattacaaatgtggattctagaacccctcgtgcaatgatcctgactaaagcgatttactatgggtcccaagaatcttaatcttaccaagcaccctcaagtaattctaacttcaatagtctgctaaacggcactcagtgaagggtgctaaagctgtcatggggaatttaaaaactcatgaaataagctcgtagaaaggaagtttagggtctggaggacacagagctgaaatgaaatcctgaagtagggttggaatataattaatttatgtaacaatactgaacacctagtgtgtggcgtgcccctttgtttttcaggtaatcagaggaaagcaccacaatatgcaaaggttgtgtggtctgcagcagacaagcaaagaaagtcagagaacatctcctcagaatctcatcagctgaggaaacaggagtccaggtcttatttgtgatgctcaggactgcttgggtccacatcaggatctttatctgcctgatgaagccatggraaaggaatggacccctgaagtcctttggctgttgggctctgggttctgtctctggccagatcaaggttccattcctagaagaagagatacggcctgagagattcccgcttctaccaaacactgaaggaaattcaggtctcttgctgctggggcaagaactgacttgaggatgggaatggaggtgactggaaggttccatgaaaagcatatcagagaaagaaaccatcataaatagatagacataaaaatgttcagaatattctattgctgttagctctgaaactacagagcagaatcaatcagctgtgaagatttttaaagtatacttatatagagggtttaaatatctacatgtgacagtaaaaaagaaaactattcgaagtatatgaaggatggtcggcctcagtggctccagctataatcccagcattttggcaggccgaggcgggcagatcacctgaggtcggaagttggagactagcctggccaacatggcgaaaccccgtctctagtaaaaatacaaaattagctgggcatggtggcgcatgcctgtaattccagctactcggaagggtgaggcaggagagtcgcctgagctggggaggtggaggttgctgtgagcccagattgtgccactgcactccagcctaggcgacagagcgagactccgtctcaaaaaaaaaaaaaaaaaaaaaatgtatatgaaggagaacatccttatacccaggagacagaaaacttttgaaaacttcaaaagcacaaaccataaggcaaaaaacaaagaagacatatttgcttacattaaaatcaagaatatagccactgtagtctagctactggggagactgaggcaggagggttgcttgagcctaggagttcagtgc

SEQ ID NO: 706190 - DNA, 2474 bp, Homo sapiens
ggaggtacctagaactagagtttcttacctgtggccttccggtcaaatagcctcagaggttcagttcctggtggaattgaaaatcctggagtaggccatggatgtgagcggtggatatgagggatttttccttctattggcaatctgataggttgtggtagagaatcattcacacactactgcctgttgaggcgatttctttagatttgaagacaaaaaaacgtcagtgttaacgcaaaggggtagagaaacaattaagttaccttcgcgtactttttaaatgctggtattgaaaggagtcgaaaacttaacctaccgagagtggggttcgaacccacgcgggcaccagcccattggatcttaagtccaacgccttaaccactcggccatcccggtgactggggcaagtttcaaggcaatcatttttttataacaacaaaggcatttgcactgagagtcaaggaagtaccgaattattcctgtttttactgaattgtattaaaatataaggaggatataataggaaaacacagcatgtgttcatcaatcacttctcctgagtctcctcacttggtcaaaaatttccggagaaatttttgtttgtacctgatttgaaaagaaaaacaagggagcggttggaggggaagggtggagagatgaggggagggagtgccctagtggaaaccacagcattaacaccacctactacttctacttcactaaaggcactgtcccgattttttcttcagagatcactgttttgcctgctgaattcaaacctccaccccagacacactgatgtcattggaggcatcaggactgggggcccaagttttattatattaaaacgagttcatgctggggtaaattttaagatctttagtggacagaaaggcagttcaaattctttgattttagtgacaaaatgctttaaactgacaatgcaacctatcaacaaaaggaccatattgagctgtgtgtgggctgcacagaaatacgccgccccagaactctaagtgctcccggaaaagctcgcaattgttacaacagagaatccaattcttgtggctaaagtatctcctgggggacttattacaaatgtggattctagaacccctcgtgcaatgatcctgactaaagcgatttactatgggtcccaagaatcttaatcttaccaagcaccctcaagtaattctaacttcaatagtctgctaaacggcactcagtgaagggtgctaaagctgtcatggggaatttaaaaactcatgaaataagctcgtagaaaggaagtttagggtctggaggacacagagctgaaatgaaatcctgaagtagggttggaatataattaatttatgtaacaatactgaacacctagtgtgtggcgtgcccctttgtttttcaggtaatcagaggaaagcaccacaatatgcaaaggttgtgtggtctgcagcagacaagcaaagaaagtcagagaacatctcctcagaatctcatcagctgaggaaacaggagtccaggtcttatttgtgatgctcaggactgcttgggtccacatcaggatctttatctgcctgatgaagccatgggaaaggaatggacccctgaagtcctttggctgttgggctctgggttctgtctctggccagatcaaggttccattcctagaagaagagatacggcctgagagattcccgcttctaccaaacactgaaggaaattcaggtctcttgctgctggggcaagaactgacttgaggatgggaatggaggtgactggaaggttccatgaaaagcatatcagagaaagaaaccatcataaatagatagacataaaaatgttcagaatattctattgctgttagctctgaaactacagagcagaatcaatcagctgtgaagatttttaaagtatacttatatagagggtttaaatatctacatgtgacagtaaaaaagaaaactattcgaagtatatgaaggatggtcggcctcagtggctccagctataatcccagcattttggcaggccgaggcgggcagatcacctgaggtcggaagttggagactagcctggccaacatggcgaaaccccgtctctagtaaaaatacaaaattagctgggcatggtggcgcatgcctgtaattccagctactcggaagggtgaggcaggagagtcgcctgagctggggaggtggaggttgctgtgagcccagattgtgccactgcactccagcctaggcgacagagcgagactccgtctcaaaaaaaaaaaaaaaaaaaaaatgtatatgaaggagaacatccttatacccaggagrcagaaaacttttgaaaacttcaaaagcacaaaccataaggcaaaaaacaaagaagacatatttgcttacattaaaatcaagaatatagccactgtagtctagctactggggagactgaggcaggagggttgcttgagcctaggagttcagtgc

SEQ ID NO: 706191 - DNA, 607 bp, Homo sapiens
taattaaytgcatttgaacattaatgattgagttgagaataattattagactaattagaacagttacttatggtgccaggtagttctctttgaagcattttctgaaaattcattgaaattaaaatttcccgagctttcccacccccagccacacaaattgatttcttagtacagagatgacttaatttgtttcagcatggtaaattccacttttaaaatatctgacttgatgtttttaatctgaatcagatctggatgtacgaatggaatagattcttaaaagaaaatgaattacatttctagagtattggaaaaataagctgcaatggaattactttaatctaaaagtgaaaagttcacataaagttgtttctttgacattttttggccttgaatttctcacatgcgaaccagcttttcttggttataaaaatagaagttttttaaatttaagtggtcaaaagatagaaaattgaggggacaggtgtataaggctgtcctgtccagtattgcagccactagccaattgtggatagtgatcattggaaattccatagcatgaattttatataaaatacacattgcatttggaaaagtcagtgccaaa

SEQ ID NO: 706192 - DNA, 1097 bp, Homo sapiens
gatcataacatacagaaaagcaagatagttccaaaatgtttccaagagcttctggcaggatctgtcattctacaaatactgcacaggaaaaattgctttaaatgctgcatctttgcagtagaaagattaggattgagccaggctgtgagtcaggcagaaaaaggcacacagagggggatgaaagaaagcactggagagtcttgtcatgctttgcccttgaaaactatgccaagacctcttttgtgtttttaaatgaagaaatccatcatgttttgtgattgctgtaatgactcaggatcttccaccttccttttaactataaaccgtagcgtagttaggtgtttgttttctttgtatcatgcttgcaaaaagtgacgaaataaagttaaaaccctttaactgggactccattacggttctgctgttcagtgaccagcttgttcattattctcacaatattatctactttcttcatttcagtctgtctcttagatcctgggcttctgatgtctttccatggcggatgaatacaatttaaaacacgaaagctgctggaggaaaggtttaacgttccccctccccaaggtgaaatctttgcctggcctcagtcactaagtctctcaggagcggaaactgaatggacattccggagacggtgaataagaatgataaacggtggttggggagaacagcgcgtttcttccagcggaggactaggcccacaggacgcattcccaacagatgagcggagccgacagcaagtgtgccacgaacgccagctggccgcctsactagagagagctccgccgcaagccgccgcttttggagtggagttccacatgtcctccgcgcttgagccctgggacgtcagaggcctggcgtgctgccaccgccccagttcacgtcgtgtgacccacgaccaatggaagagcaggcaagtattcccggcgtccgctgtgattggttcccggagtggaggcggtggcagagggtgggccttaggacgggtctcccttaaactgggcgatcaggcagcgaccctagaggcgtctgtagggtaaagctgggggttctgtagccggaggcggcggcgagtc

SEQ ID NO: 706193 - DNA, 1462 bp, Homo sapiens
atgtaaaagtctgggattaggttgcttcatcacaaagtattcagccttttaccaaaactacctttcaaaaagcacttaaaagttgaggccactgacaaaaggaaggaaaaatctcctacagtgattgttgttggaagaatgggaatgatagctcaattaatttagttaattcatactgccccagatgtccttgtcagcttgtcctctagtcttcagactttgtgaataaatcaggtggagtaagtaatttacatgttgtgtctcatttactttttgcaacaaacaaccgccctttactgataatggagattaaggctaaggggaactaaaagaatgttgtctacaatcacacagcaagtgatggaactgaaattcctgttggggtctttctggtttaaagtttattttaaagatcatttctactatatcccaattttaaaatatgcattagaaagaaaacagcaaaaacttcttttttctatttaaaaacaagcaaaaagaaggacataaaagttgcctatattcctgccatctagagagacttaattctgtcaagactgtaggacacattgaccatctttatttgttcctctgccccaaaagaaacaaaacttaaagtcagagaagcttaatgaaacagtaggataaaggctccctatcttgtgtctagaagtaagaattgacagtgattccgttttcaaagcatttattgaatagtatcttccaaacagtatgctggcttttagacaggttatacaggtgaatgtaggggtctatccttaaaaagcctataaggcagttgttctcaactctggctcatttaaaactctattgggaagtttttagaaaatatctgtggctgggcattttttttttttaaagagacagagtcttgctctgtcatacagactggagtgtagtggtgtgatcataagtcactgcagccccaaactcctgggctcaagcaattctcccacctcagcctcctgagtagcagccataggcatgtgccacaacgcttggctaacacatttttttaaagcttcttaggagatgcagccatggtgaagagccagtattatgaattaattggggaaactgatgcatatagatcagtattaggagagtttgaggctaggccagatggctcacatgtctgtaatcccagcagtttgggaggctgaggctggtggattgctttgagcccaggagtttgagaccagcctgggtaacgtggtgaaaccctatctctmccaaaaaaaaaaaaaaaaaaaaaaaaaaaaattagctggttgtggtagtacaggcctgtagtcccagctactggggaggctgaggtggaaggatcacctgagcctcacctgaggcggaggttgcagtgaaccatgattctgccactgcattccagcctaggtgacagagggagaccctgtctcaaaaaaacaaaaaacaaaaccaaaaa

SEQ ID NO: 706194 - DNA, 601 bp, Homo sapiens
tatccagtgcccagtacacagcctggaactcaggaggcattcaatgttttgttgcttgattgctataacatctcatcatatactctcttagaaaatatgatgaaccttgttttattattgtaggaattcttatgttgtctgcccagcaaaaagaaacaaaatcatatagatatctacaaaagactctatctgaaactactgtgcagaaaatcacacaggcttrggaaatttgattgcagcatgaataccagtccaaaataatgcaatcgttataatgatctgctgaatttttattaggttttgactagtccctttactctgagatttagaaagagctttgaagatacgcattaaaaaaagcagggctggaattgaggcagaagggaaattttcagttctccaatcagttagatgagtggtgaggactgacctatttgttacctaatttcagggtggctgcaaggacaaggcaggtattcctctatgctctagaaatgttatttcaaaaaaattgaaattcctgtcactaagatctatttgtagaaatatttcattttaaataatctggtaggattttaatgtattttagttatattggaaa

SEQ ID NO: 706195 - DNA, 2189 bp, Homo sapiens
tgatagtggttacctgtgtgtagaagaggataaaatatatttggcaacatatacgggggtttaaactgaattggtcatgttttattcttaacatgggtagtgcatatgtgtaaccttgcattattttttgctttctatgtatctgaatattttataataaaatttaaaaagtttacctaccaattttcctaattagtaattttctcaatacttatttatctttagtgaaaatttctttggatttcaaaatatcatttgttcaaattagtagtctagatattttctccttagtcattattgtttttcaaaagacatcaatttcattatttagcatcatatctagaatatctaagaggaattgctatagttttaagaaataaatatccagtatatccagttaaagcttttttattagtagttgtatacatttaaggggtgcaagtgcagtttttatatatgtgtatatcatgtaaaggtgaagtttgggcttttagcctaaccatcacacaaataatgtacattctaccattaagtaattcaagttcttaaagttagctttacttatccttttaaccttttaaccttttttatcattattatatctgctctagatcacgttttctgttctttatgaaaaaataataaaatgttactgttaaagggactgatttgtaataaccataaagacaaatcaagcacaattaagtgcatataattgacactgattgtaataaatggttatataaaattattttagcatacatattatataatgtgacataagctattcttttttttctttctctcttttggacgttaattttcagttagtcattggcttacatcttatctcccactgtaatggtagaaattaataggataaaagtactctattcaaagacaaattatcttttcactgatatacttcagtaagtgcaaattccctctgcacttactaaaaggcttagaatagtagaaaagtgctagttaactgaaattgtgyttcctttcttagaccataaaactttcgtttatttcatctgttaaacctttttgtaaatacagaaattttgaagctatttggtattacgtgatacatattttggcattgttgctattctggatttcttccttggtactttaattttgtggttcagtgagcaaaactaagtgttctgcaggaggactcgtacttaaaacagtcaggggcgtactgcctgatgagacattcaatcttttcccttgatgagggtgtccagtcagaaaagcccttttgtttttaaacccaggaaaggttttagagaaaattaccatccaaacagtaaaaagcaactcaggattttgcaattacatatagcgtcacaatcaaatacgtgttaggtaaatgtgttgggaaacttgattgtaatgataaaatagagatttttgttttcatcatttaactttgccaattcaaacagaataatgttatggaattccatgtcagagaataagttaacaatgacatattttatgctattaagtcctcaaaacaactaaataaagtaggtcttagtaattttcatgtttagatgagaaacttgagcattaggaaagtgggctaatatctccagtgacacatagatgttaagaggtgcatttgggattcaaactcatgtctttctgatccacaagtcctataataaaacaaatattctaatacagtaagacagaatttataattcaattaatcaaaaatatttattaagtgagtagtatttgggaggtagcattcctggtagagaagtagatataaataataaactcctaaataataaactactattcttactacaattctttagtttttgttaccataaattagttgtcccagatattttcttagctatccccaggccagcttttcatacaggattttttctggaccacgttagagaaatattttctttacaaatacaaactgaaattacattaaccaataaagttatattattaaaacatacaatcaagactaaatatacagcataacagaatatacagtgatattacaagtaatatcttacaaattgaaaatgtattaaccaatacattataaatatataaattatatatcacataattatgaactaataaattatactaaccagtctacaaatagaaattatattacccaataaaattgttattaa

SEQ ID NO: 706196 - DNA, 2189 bp, Homo sapiens
tgatagtggttacctgtgtgtagaagaggataaaatatatttggcaacatatacgggggtttaaactgaattggtcatgttttattcttaacatgggtagtgcatatgtgtaaccttgcattattttttgctttctatgtatctgaatattttataataaaatttaaaaagtttacctaccaattttcctaattagtaattttctcaatacttatttatctttagtgaaaatttctttggatttcaaaatatcatttgttcaaattagtagtctagatattttctccttagtcattattgtttttcaaaagacatcaatttcattatttagcatcatatctagaatatctaagaggaattgctatagttttaagaaataaatatccagtatatccagttaaagcttttttattagtagttgtatacatttaaggggtgcaagtgcagtttttatatatgtgtatatcatgtaaaggtgaagtttgggcttttagcctaaccatcacacaaataatgtacattctaccattaagtaattcaagttcttaaagttagctttacttatccttttaaccttttaaccttttttatcattattatatctgctctagatcacgttttctgttctttatgaaaaaataataaaatgttactgttaaagggactgatttgtaataaccataaagacaaatcaagcacaattaagtgcatataattgacactgattgtaataaatggttatataaaattattttagcatacatattatataatgtgacataagctattcttttttttctttctctcttttggacgttaattttcagttagtcattggcttacatcttatctcccactgtaatggtagaaattaataggataaaagtactctattcaaagacaaattatcttttcactgatatacttcagtaagtgcaaattccctctgcacttactaaaaggcttagaatagtagaaaagtgctagttaactgaaattgtgcttcctttcttagaccataaaactttcgtttatttcatctgttaaacctttttgtaaatacagaaattttgaagctatttggtattacgtgatacatattttggcattgttgctattctggatttcttccttggtactttaattttgtggttcagtgagcaaaactaagwgttctgcaggaggactcgtacttaaaacagtcaggggcgtactgcctgatgagacattcaatcttttcccttgatgagggtgtccagtcagaaaagcccttttgtttttaaacccaggaaaggttttagagaaaattaccatccaaacagtaaaaagcaactcaggattttgcaattacatatagcgtcacaatcaaatacgtgttaggtaaatgtgttgggaaacttgattgtaatgataaaatagagatttttgttttcatcatttaactttgccaattcaaacagaataatgttatggaattccatgtcagagaataagttaacaatgacatattttatgctattaagtcctcaaaacaactaaataaagtaggtcttagtaattttcatgtttagatgagaaacttgagcattaggaaagtgggctaatatctccagtgacacatagatgttaagaggtgcatttgggattcaaactcatgtctttctgatccacaagtcctataataaaacaaatattctaatacagtaagacagaatttataattcaattaatcaaaaatatttattaagtgagtagtatttgggaggtagcattcctggtagagaagtagatataaataataaactcctaaataataaactactattcttactacaattctttagtttttgttaccataaattagttgtcccagatattttcttagctatccccaggccagcttttcatacaggattttttctggaccacgttagagaaatattttctttacaaatacaaactgaaattacattaaccaataaagttatattattaaaacatacaatcaagactaaatatacagcataacagaatatacagtgatattacaagtaatatcttacaaattgaaaatgtattaaccaatacattataaatatataaattatatatcacataattatgaactaataaattatactaaccagtctacaaatagaaattatattacccaataaaattgttattaa

SEQ ID NO: 706197 - DNA, 2189 bp, Homo sapiens
tgatagtggttacctgtgtgtagaagaggataaaatatatttggcaacatatacgggggtttaaactgaattggtcatgttttattcttaacatgggtagtgcatatgtgtaaccttgcattattttttgctttctatgtatctgaatattttataataaaatttaaaaagtttacctaccaattttcctaattagtaattttctcaatacttatttatctttagtgaaaatttctttggatttcaaaatatcatttgttcaaattagtagtctagatattttctccttagtcattattgtttttcaaaagacatcaatttcattatttagcatcatatctagaatatctaagaggaattgctatagttttaagaaataaatatccagtatatccagttaaagcttttttattagtagttgtatacatttaaggggtgcaagtgcagtttttatatatgtgtatatcatgtaaaggtgaagtttgggcttttagcctaaccatcacacaaataatgtacattctaccattaagtaattcaagttcttaaagttagctttacttatccttttaaccttttaaccttttttatcattattatatctgctctagatcacgttttctgttctttatgaaaaaataataaaatgttactgttaaagggactgatttgtaataaccataaagacaaatcaagcacaattaagtgcatataattgacactgattgtaataaatggttatataaaattattttagcatacatattatataatgtgacataagctattcttttttttctttctctcttttggacgttaattttcagttagtcattggcttacatcttatctcccactgtaatggtagaaattaataggataaaagtactctattcaaagacaaattatcttttcactgatatacttcagtaagtgcaaattccctctgcacttactaaaaggcttagaatagtagaaaagtgctagttaactgaaattgtgcttcctttcttagaccataaaactttcgtttatttcatctgttaaacctttttgtaaatacagaaattttgaagctatttggtattacgtgatacatattttggcattgttgctattctggatttcttccttggtactttaattttgtggttcagtgagcaaaactaagtrttctgcaggaggactcgtacttaaaacagtcaggggcgtactgcctgatgagacattcaatcttttcccttgatgagggtgtccagtcagaaaagcccttttgtttttaaacccaggaaaggttttagagaaaattaccatccaaacagtaaaaagcaactcaggattttgcaattacatatagcgtcacaatcaaatacgtgttaggtaaatgtgttgggaaacttgattgtaatgataaaatagagatttttgttttcatcatttaactttgccaattcaaacagaataatgttatggaattccatgtcagagaataagttaacaatgacatattttatgctattaagtcctcaaaacaactaaataaagtaggtcttagtaattttcatgtttagatgagaaacttgagcattaggaaagtgggctaatatctccagtgacacatagatgttaagaggtgcatttgggattcaaactcatgtctttctgatccacaagtcctataataaaacaaatattctaatacagtaagacagaatttataattcaattaatcaaaaatatttattaagtgagtagtatttgggaggtagcattcctggtagagaagtagatataaataataaactcctaaataataaactactattcttactacaattctttagtttttgttaccataaattagttgtcccagatattttcttagctatccccaggccagcttttcatacaggattttttctggaccacgttagagaaatattttctttacaaatacaaactgaaattacattaaccaataaagttatattattaaaacatacaatcaagactaaatatacagcataacagaatatacagtgatattacaagtaatatcttacaaattgaaaatgtattaaccaatacattataaatatataaattatatatcacataattatgaactaataaattatactaaccagtctacaaatagaaattatattacccaataaaattgttattaa

SEQ ID NO: 706198 - DNA, 1149 bp, Homo sapiens
tttttcacgggtgtatgattcagcttagtggttctgctgatcttggccaggctcattcatgtatctgatgtcaactttgggtttggctgggactggatgatttagcacggcttcaacaggaccatctggatccagtccatatatttctcatcctccttcaggttaacccaaacacattcttatggtgatgccaggggtccgagaaagaaagtagaaatacccaagtgctttttcaaagcttgcttgagtcaagccactggttcaaggaaagaatcagtacagggtagcactattacagtatatagttgccaggaggtgtgaaaaaatggggacattaacatagccaatctaccgtaatacttaaaaactgtcggttttccttgtagctcttgyaataagatttactaagttggtcaactttggaaaccaccacattgtttttaaatcggcaactttatattatttgtgggcaaataacactccaggcagtccccaaattaacatattttatttcctgatgtgaataatggaagtcctgcaggtgagttcactcccctccacagttctagtctactccaatagagaccaggaatcacaaatataagagacagcagtcctgtccactttggccttacagcattggagggttttcagctgccagttgaggttgccatgtcctaattttgaagcaactctggatggtggggtagcaccttgctttgtgctagattctcctcaaggtcaaattgaccctctgagggatagatctgtgttcttttagccccttacttggatattttccaggttctattgggtcccagaatggtagagagacacaatttgctgttggtagccctttgatggagattaagactgcagtggaacagaacttctaggggccaccatacctttcactgatactcttctatggaagggtgtcctacaggcaggtgagatgctatccacactagtgaaaggatcattgctgtttagacacctggcaaggagagacactagctaccatcaaaaccatagctgaaaacatccttgggttgttaggaccaatgagaagagacataaatcctggctattagaattctctgtgcccaggcctttcagttcatacacagtaaaattctttggcttgag

SEQ ID NO: 706199 - DNA, 923 bp, Homo sapiens
tcccttcactttctcattgtgaaattctctatcttgtttacttcttgctaccctgcaggggttctgtcctctcaccttgaacctacccaggagagaaacatgggtcaccagcataggaaatgactataatagctggaagagctatatcacactgcagaggagcagatatttacaaataaatattacttatcttctcatatttattcttaaatattctcccagtcttgagcaaactttgtttcaaagaggtgaattgcaggacaagggaggccaacattagagttgtgcaatagcacttcamataacaattgttgatccttgtgtcactataccaatatgccataatcgtgacgtgtgatacaagtaatttattcataacagactatgactaatacatattgttactaaatcagaatggaatcagggctactctcataaaaatgtcattttcacttccttgaattgttatacaaattacagagtaggagagaaagtggtagcattgcaacaagtgtgctgggaatggtgcataaaactggtgtatctctgagagttgccccatatgtgaactttaaccatgcttaaagcttcagcaagaaaatgttaactctcactcatttagaccaatgaatctccagtatggtatccataatcaatgagcaagtaagttgattcagtgggtcaaaaattaaatattataacttatactaatacttacttttatctcatactttaaaatttatctttcgtttgcatgtaaatgtaaaaatacatgcaaaagttttaaaacacagccatagttatttgacatttttctcatcaagatttgggtctatgttccctccccttgaatttaaatttttgtataaatagagggtggccaaagagatgctatgtgactttcaaggctaggtcataaaagg

SEQ ID NO: 706200 - DNA, 923 bp, Homo sapiens
tcccttcactttctcattgtgaaattctctatcttgtttacttcttgctaccctgcaggggttctgtcctctcaccttgaacctacccaggagagaaacatgggtcaccagcataggaaatgactataatagctggaagagctatatcacactgcagaggagcagatatttacaaataaatattacttatcttctcatatttattcttaaatattctcccagtcttgagcaaactttgtttcaaagaggtgaattgcaggacaagggaggccaacattagagttgtgcaatagcacttcacataacaattgttgatccttgtgtcactataccaatatgccataatcgtgacgtgtgatacaagtaatttattcataacagactatgactaatacatattrttactaaatcagaatggaatcagggctactctcataaaaatgtcattttcacttccttgaattgttatacaaattacagagtaggagagaaagtggtagcattgcaacaagtgtgctgggaatggtgcataaaactggtgtatctctgagagttgccccatatgtgaactttaaccatgcttaaagcttcagcaagaaaatgttaactctcactcatttagaccaatgaatctccagtatggtatccataatcaatgagcaagtaagttgattcagtgggtcaaaaattaaatattataacttatactaatacttacttttatctcatactttaaaatttatctttcgtttgcatgtaaatgtaaaaatacatgcaaaagttttaaaacacagccatagttatttgacatttttctcatcaagatttgggtctatgttccctccccttgaatttaaatttttgtataaatagagggtggccaaagagatgctatgtgactttcaaggctaggtcataaaagg

SEQ ID NO: 706201 - DNA, 923 bp, Homo sapiens
tcccttcactttctcattgtgaaattctctatcttgtttacttcttgctaccctgcaggggttctgtcctctcaccttgaacctacccaggagagaaacatgggtcaccagcataggaaatgactataatagctggaagagctatatcacactgcagaggagcagatatttacaaataaatattacttatcttctcatatttattcttaaatattctcccagtcttgagcaaactttgtttcaaagaggtgaattgcaggacaagggaggccaacattagagttgtgcaatagcacttcacataacaattgttgatccttgtgtcactataccaatatgccataatcgtgacgtgtgatacaagtaatttattcataacagactatgactaatacatattgttactaaatcagaatggaatcagggctactctcataaaaatgtcattttcacttccttgaattgttatacaaattacagagtaggagagaaagtggtagcattgcaacaagtgtgctgggaatggtgcataaaactggtgtatctctgagagttgccccatatgtgaactttaaccatgcttaaagcttcagcaagaaaatgttaactctcactcatttagaccaatgaatctccagtatggtatccataatcaatgagcaagtaagttgattcagtgggtcaaaaattaaatattataacttatactaatacttacttttatctcatactttaaaatttatctttcgtttgcatgtaaatgtaaaaatacatgcaaaagttttaaaacacagccatagttatttgacatttttctcatcaagatttgggtctatgttccctccccttgaatttaaayttttgtataaatagagggtggccaaagagatgctatgtgactttcaaggctaggtcataaaagg

SEQ ID NO: 706202 - DNA, 589 bp, Homo sapiens
aagcataaaagaaatcaaattatgatttttgtttcttgacgtgttcccaaggcctcccacccagtaagtctgccctctttgcagccacagtcccccaactagaaggtggtggctacagcattaccacttttggttgatgtagtggaccaacagcatttcccaagccttcctggggcatttacctatatacctgcatttctaacattatatacacatgtaatattggcaaaccaaatgccatggrgcctgagagggtggacaggcctgatttttaaagacagcctgaaattaaacgtttggaaagacttttgtttggggattagaaaactttctccctaagaaatcccaccattagtttggctggctgtgttaatggcttatttgaagaggggcctacctgttcagaactaccttagtggtctttactcttgctaactgctttctttatgcttctagggatatactaatttgcatactgacaccaagaatatgaagataaattacttcttttagagcacgggagagtgaggcccacctcagtcatattccacagcccccctaggatcaatgccagtcatcccatgaacac

SEQ ID NO: 706203 - DNA, 589 bp, Homo sapiens
aagcataaaagaaatcaaattatgatttttgtttcttgacgtgttcccaaggcctcccacccagtaagtctgccctctttgcagccacagtcccccaactagaaggtggtggctacagcattaccacttttggttgatgtagtggaccaacagcatttcccaagccttcctggggcatttacctatatacctgcatttctaacattatatacacatgtaatattggcaaaccaaatgccatggagcctgagagggtggacaggcctgatttttaaagacagcctgaaattaaacgtttggaaagacttttgtttggggattagaaaactttctccctaagaaatcccaccattagtttggctggctgtgttaatggcttatttgaagaggggcctacctgttcagaactaccttagtggtctttactcttgctaactgctttctttatgcttctagggatatactaatttgcatactgacaccaagaatatgaagataaattacttcttttagagcacgggagagtgaggcccacctcagtcatattccacagcccccctaggatcaatgccagtcatcccrtgaacac

SEQ ID NO: 706204 - DNA, 818 bp, Homo sapiens
ttagaagaagcccatggagtctggggttggttcaggagcagtgagacccagatccaattccacagtgtcccttaagtgctgtgtgaccctgcataaagcagttcctctttctgaggttctctgccctcccttttccaagaagggggctaaaatcattttagctttacttcttagggtaatcaaagataaatgagacaataagccgtgtgaggattaattagatgagctctggaaagtgctgtcagccctttggaagaggatgccattataaaatgtatacaaggtcttattatttaagagaaagagttgaatcaccaaaaatacactgcgcagtggggaaaacaaaacactaaccaggaaacctcaactaagcatcccagtcagcagaaagtgcccacgcagatgtctcaagtccctccagattacctcttgtttgtgagttggggagggatttcagagcagtgcctcaagggagtgtatcatttttctgtgatgctctccagtggccagcctgtgtcttgggaaaggggatcaggagaaggtgatgacacagggttgttctttgccctttggccttgttcagtaaacaacctgtcaggaggccagaaaggagcacstagaagataattttgagggccaaaaagggaagatgctccccatctttgagaccagccccatgctgacagagcaggaaccttcctccttccccagcccttttctcctcacctcctttcttgtgcccacactgcagcacacatcactccattctgggagacaaagccagctccatttttggtgaagaggggaagtaagagtca

SEQ ID NO: 706205 - DNA, 752 bp, Homo sapiens
taaaaaagtttaaagttgtctacgacttaaatttcttagctttaattgtccaaatacgtgagtccaatcacaacttggctttaaagtaccctctgaaatgagggaatcaatattgctattaaaaaatccttccrtacacagtgacgactcaggatagcagctctgccagaaagaaaagatgatctgtgctatccttctcctgagcagtggagcaggcccagtccctcagggttacctttagggtaatcaaacttggctttgaagctgagtcctagactaagtaaataattatcctcccagttccctcatctttaacattagggtaataataaccccttagggttgttgtattgattaaataggcatagaaatctcctaacacactttgtgtctagattaatggcataagagaatacggtaggaggtaagcagagaatgtgtttgtgcagctcacacacatgcaccttctgtgggtaaaacaagactacattaataaggactccactgctactacggaaacaaaatgttcagaatttcttaaattctgtactagactcattgacacaacaatccaaggaaccgtagaaacctggttgtcacctaaaaacctgagagctgtggtgctgaggtgaccaagcacacgagatacgtgcctgtagaatgcgtgcgtctctgttatcgctcggtagagcccgctggccgccctggtgctgatcattttaaacaagagcacgatgctgttcccagattcc

SEQ ID NO: 706206 - DNA, 3640 bp, Homo sapiens
cagtggatggtataattaccattgtgaagatgaagcatatacttctctaatctctggttttggaaatgttgacaaaatccagtcagaattgcagtaaactcaaagcctttgaaaggcaagaatttccaagatgattattatttcagatctacttccagaatacattaatttgtttcactattcattttattccatggcatcacaaacatctgctgaaaataacctgctgtctccatctctgaaatatgccagctgaaaagtaaaagactctccttttacatttgaggctcatattcaagagcaaagcataatctagatagaagaatcaaatctaaaattaggccaaatcagaactctacctaccaatctaagcaaacacttgatgtgctttttctgttttcagagacacatatttaggaaaacattaaggaaaataatataaagaggacacaaaagcaatgaaaaaagttattgctaagagaaatttagaaaccatctcttcagaggccttcaagtaggatgtagagctgggcccatagcagtctggatggctggtagttggtggcagagctgaaactacaatacagggcttctgcctggttccctggtgctgtcctatgacaaacaggccttcctgcccatcattctcacaagggcctccctaatctgatatgaactaataagttaactgcccttcccaacttggctaccttaattgtccccagaggacaactctgccaggatatttcagcatcatttaataaactgtctagatactttcagtatactacactacatgcaccctcatgatttagaaaagaataaaaaaatcacctttcataactggattgtcaaagctaaatttactcactacataaacagacctattttatattcatggcattttatataagtattttacaacaaataattaaacatcaaagaagtttacgaaccagcttcatttgctagcatttgtaaacatacatatttttgttctatagtttcatgcatgtaaaaacaatgctaattgtaaactggacccagtacagcttctgatgtcctaattaagaggtacaaatgctaattacaaatcactttatctagttattaaaacttaagtgtcagttatgtatttcagccaaccccatgaaaccaagtaaaattcaccaacatattaaaagcaagttaaaagttaaggtcacacttaacttttccatacaatttcaaaaagaattaaaatcaattaaaattacctagttgaactaggtatgtacattctttgagtactattatgaatctcaagagtccaagtcaattgaatcaataaaggagagaccaagacaggaaatttgattcaagttctaattcataaaatgtctctatttcttacatgaataaaattgatttgataatagttactaacccaattacaggaaagcacaggtagagaccatctactagtcaattataaagtctgaatacattcataaaacaaatgtattatgctattatcactgcagccattgtttaaatgcagttatttggtactccaagcttctgaagatttaaaaaataattttgtgccatcaaaactgggttgcatctagagatcttgaaataattacaaaatcataataggactacacaatgaaaattccaatatgttgtgttatatcttgtattcgactgcaagttatgacagtgaagcgcaaagctttcacaaatcggctttaaataataattttaaaaagtctattctgattaatacagacagctaaaacatccttaagcatgcaatcacttgaatattttgcaagatattttcaggagtaccaagaactcaatataccatcttcattcagaaacaaaattaaacgtctgcctcaacctttaaagctcgattacaaggcaaagtggaaatttcaaattcaaatgataagtatttcaaaatgagtctttatcagtcctttggtaaaacaaacaagcaaatgtcatgtaaaaaactcttaaaggataatgctcattcatcattacttaaaatttttagaatcacatttttcatatgcatggcaaatttctcagccaaagaattatgaaaaacattagaacttagatccaaagcttgctatgtcttcaaagtagctgttttcctttttaattttttgatatgccactgtaagattgaagtctcctgcctttcaataaatattaaatatcaatttcctagtttggctcattcttgagaatcaagtattagagtcagtccaggggagaacatattttgtttgaaaaatgagaccacatgcttcagttgtctaccactgttggtggtgttttacaacgtagagagataaattcaatctatactcaccaatcgtgtgtaacatatctgtgggttggaattcagttacagtagccttagaagagttcatgaaattacattttcaagaaacttaaaaactttaaaaattctgcatgaagtcaaacagagctcttggctgcacactgtaatctgacactaggctgaagaaactgaccaagtttaagtaacccaagaggaactgtttcctgctttctgttagaacagtctgcaatgacctatagtaacactgctgaggcagaggttactatcgggcattagatgctgctatcaggaagtcagtcactcgggtagggtggtttctttttttttttttttttttcctggggtagcacttatctcaagtgtttgtaagaattcaaccctgctcacccatcaagtttataaagacaagaaaaactaaaagaaggattggaaaatgcactcagaccaagtaggtagctccccctccacctcaacaaaaggacctgcatggaaaacctaagttaagatggaactccgcatcaaaacaaacttgcctgtgagtatctctgggaaggtgcagcggcccttctaaagggaaccaaaggtcaatttgacattggtttattttagctcactttacctagtctgctcctgtaagatgagatgaggctccacgaagaacttgactctaagtttaagcctgtaaggggctagcccatccatctgctgggagatccggtttctcaggtttagccataaactttcacctttgctacccgtaaactgcagtccaaaatagtcaacttctatgattcccagtcgcctgcacacctaaaacaaaaaggaatgcagcctggatgagcaaatggtacgtatcaaagcaaacccaacggctccctgaggctaagattgctggtgctttttacaaagttcaatggtgttacaattcctgatctaaactggaaaaacaaagttccacggctccaatgataccaaaccacgagctctagtatggaggctcataattccttttaacgtctagggcatgaccaattgcaatagagaaaaaaggagtcctcaaaagtagccttccaaaagatgaggaggggaaactacagggtattttccttcgtattccaatcaccggaattccctccaccagcatactctgcacagctgatttttggcgacttattatctgggcaattttaaccatttggactccaaaaatcaaacacattgagggaacacgccacaagtgtcagctaagcttcacaagcggtttyccaaaca

SEQ ID NO: 706207 - DNA, 811 bp, Homo sapiens
ccgggtgtgatggcatgcacctgtaatcccagctacttgggaggctgaggcaggagaatcacctgaacctgggaggcagaagttgcagtgagctgagatcaacaagagcaacactctgtcaaaaacaaaacaaaaaaacaacaaaaaaaaccccaaaaaacaaaaaaacagaaaaacagtatttacttcactttcctgcataccctcactgcaccttatctaagggccgaggcttctttaacagcttcttcaaggtgctttaggtttttactatactcttctcaaagtccaattctaatgccactcctgcatattagagtactgttacagcagtactttacccagtaccaaaatctttcttttcccctttaaaaatttttttctttatatgttccaatgaacagaattttaatatgttacctattgctgcataataaactatcccagaatttagcatcttaaaacaagaagtatttactatctcaaagtgcttgagtatcaggaatccaggagtggtttaactgagtggttctgcctaagtttcccatgaggtttcagtcaaactgctggccagggctgtaattatcccaagattttactagggcaattttatcaatttccatactcaatcatgtggttgctggcaggcctcagccttcatgggctcttggccggaagcttcctttccttgccatgygggcctctctatagtggctgttgacaaaatggcagcttgcttctcccagagtgagtgaccccaaaaatagagtacacactaaagacagaagctgtagtctttttttttttaatt

SEQ ID NO: 706208 - DNA, 2043 bp, Homo sapiens
ttaattggttgctctgcaaccttaggtctctgataagtttgacaaaagttgtgattttgtaaattacccaacaatttttaaaaactgttattagtttgataatgatgctcttcccaggtttctgcatcctagatggaagccggagtctcaagccgtctaccttttcacggtgctattcaacgttttggccacctactcctggcctgctgcttgggtctttcttttgggtgacacccttccagtttagccccctgaaatattttcaggttagatgtttccccctctccattccttctttatggcaaatatctgacaaagagaagggacagaggttcctgatctttcttcatcttgggctcaaaataatccatggagtcgtgttctgaaggatacatctgggccaggcgcagtggctcacgcctataatcccagcactttgggaggctgaggtgggcagatcacttgaggccaggagttcaagaccagcctggccaacagggcaaaaacccccctctaccaaaaatagaaaaattagccaggcatagtggagtgcacctgtaattccagctactcaggaggctgaggtgggagaattgcttgaatccaggaggtggaggttgcagtgagctgagatggtgccactgcactccagcctgggcaacagagcaagactctgtcaaaaaaaaaaarggatacatctctgaaaatggggacatgactgggagtgagctaagctcttatccactgtactcctgacttggccctcattttctgtgctagaaaattagatgaagtatctactctatccattaatgagaaataagaatcaaaccaacccaatgaaatagttcttagaagatgaaaactacaacaggataaaaggggaacaggcacaggataaaagggttgtaagcacagtctctagaggcagtctacctgggcttaaattccaggtccatcacttactagctgtagggcctgggacaagttccttcacctctctgtatctcaacttctgtatctgtaaagtggaaacagcaagaggattaaaagggttaatttttgtaaagcacttataatagtgactggcacataataagctctgtggaagtgttaacaattagggcttacttcctataatttcagaaatttgtggaagacagcagttccctccctttctcagaacccattaccatcaaaacagctaacgattactgagcatttccaaagtgcccaagtcctgtaactaaccattttatataaattatcttataagagggagggattaattattcctctttagtaggtaagagatcaaggatcagagaagtgtttacccagctggctagaggaatcaataggtttacaacccaagagggtctgactgtattgcctgtgctcttaaccattgcatttgttgcctcccacaaactagtttccatgcttgtaaactagtgggaaaattgcatgctgtatttatctcacagggttgttttgagatcccaataatgttaagaggcagtgctttagtgtacagagtgctggtcccctgacagggaaacctgaatgtgtcaatgatttgttcacacttccctccctctgcacatgcccttctccctcttttctgcttgttgaactcatgtcttcaagacttagctcagatatcagcgtccagattttattctaacagtggaggaatttaggcaacgccgcgtggcgggggggtcgaggggggcacaccagacttgtgttctgaaatgacagctgacttgtaatgcagggaatggagtgtagccgggccagaatgagtacaagaaaaccagatagggccgggcgcggtggctcacgcctgtaatcccagcactttgggaggccgaggcgggtggatcacgaggtcaggagatcgagaccatcctggctaacaaggtgaaaccccgtctctactaaaaatacaaaaaattagccgggtgcggtggcgggcgcctgtagtcccagctactcgggaggctgaggcaggagaatggcgtgaacccaggaagcgga

SEQ ID NO: 706209 - DNA, 1442 bp, Homo sapiens
tattttgcttttgcagattccttatctgacttttcagttctttatttgcttcacctgctagaatgcaaattgtgcaattagactgattagcacatctgattagcacaaagaagatgctcaacaaattagctgggttggtttgtttgtttttgagacaggtctygctttgtcacccaggctggagtgcagtggcgcaacctaggctcactgcaacgtccacctcccgggttcaagcgattctcctgcatcagcctcctgagtagctgcgattacaggcacatgccaccaagccctgctagtttttgtatttttagtagagacagagtttcaccatgttggtcaggctggtctcaaactcctgacctcatcatccgcccacctaggcctcccagagtgctgggattacaggcatgagccaccatacccggcccaaattaactgtttaattggtggattgattgcttagatgtttgctctatgttaccaatcacaaagtttttattatatttcttaaatttcattttcaaagcagacttctgagaagcaggtgacacttattactgtcttttatttccagtgtattcatctgtttgttggtagtggtgtctttgtgtgttgcttttacgtttgttttaaatgaggaaacaacttgaagctgtgctttgcccatgatcacactcatgagagccaggactttaaaaacttaagtcttgtgctagtttcatcttatcagttgttttctagtacagacaaacaacagttaagagaaaattatcctaaaatataattaatgtcggtctcagttaatatgtagattgtcttaaaccttctattgtacttaaactgtatagtgcttcataaatcagtcacatctgaactatactttgcaagcaagttttaaaatattcttttactagggagcgaagaatggtcaagaaagtggactcgaaattggaactgacacaattcagtttggtgctccagcctcaaatggaaatgaaaatgaagttgttcctgtgctttcggaaaaatctgctgacaaaatacctgaacctaaagaacagcggcagaagcagccacgagcaggacctatcaaagcccagaaggtaaatatactttataatccagataaaattttatgaaggccactgacatgaagagcaaataatacttttaaaagtgaacttaattttaatgaatatctttgatcatggtgcaatgatgaaagatactcatctatcataaacatagttttatcataaacatttgactttagcttccagatttgagtccagtagaaaacaaagaacacaaacctggtcccattggaaaggaacgttcattaaaaaatagaaaagtaaaagatgcccaacaggtggagccagaaggacaagagaaaccaagcccagctacagtcagaagcacagatcctgtcacgacaa

SEQ ID NO: 706210 - DNA, 623 bp, Homo sapiens
aaacaaaaaacaaaaaacaaaacaaatcataggtcccaatttttaaaatctgtcacattgacagaatttaatgtcttctagtggttatgtaatttgacagactgttggcaattgtttttatcaaaaaacagcttgaagagatgtttatttgtattcagaaaattgtttagagacttacagatatttcacagttctctcttgatcatgtcacatgtattttaatatcacaaaactyatatttcctaactcaatataaaaacacctgaattgtaaatattgaagttagtttttaaagtttattcttagtcttatttatctctaatgaacaatgctcttaatctttaatagagagattactagaatttttctcaattcatatgtagtaagtgttactgtttctcttttaacattttgaactcttaagagagaggcttatcctagttttctatacatgactcccagaggtttgggggcctttttcggtcattaacacctcactatatttattacctatctcggttaaaaggcttagttgtagagtatgttgaatatgttcctgaaatgaacttggttttttttaatttcatatatcttgtgccacccttatgccccattaaaacgta

SEQ ID NO: 706211 - DNA, 623 bp, Homo sapiens
aaacaaaaaacaaaaaacaaaacaaatcataggtcccaatttttaaaatctgtcacattgacagaatttaatgtcttctagtggttatgtaatttgacagactgttggcaattgtttttatcaaaaaacagcttgaagagatgtttatttgtattcagaaaattgtttagagacttacagatatttcacagttctctcttgatcatgtcacatgtattttaatatcacaaaactcatatttcctaactcaatataaaaacacctgaattgtaaatattgaagttagtttttaaagtttattcttagtcttatttatctckaatgaacaatgctcttaatctttaatagagagattactagaatttttctcaattcatatgtagtaagtgttactgtttctcttttaacattttgaactcttaagagagaggcttatcctagttttctatacatgactcccagaggtttgggggcctttttcggtcattaacacctcactatatttattacctatctcggttaaaaggcttagttgtagagtatgttgaatatgttcctgaaatgaacttggttttttttaatttcatatatcttgtgccacccttatgccccattaaaacgta

SEQ ID NO: 706212 - DNA, 1470 bp, Homo sapiens
ttgcaattagaggagtgcgcctgccgggaaggttcagggcacctgtaggcaggaagcagagctgtggctggcagggaggaaggtcgctaactgttgctgcaggaatgttggcctctttgagacaggctgagcgtcctactcaaaacagccgggactcacttaatgcagagattagtcttcagcgtcccaaagggctggggatgaacagattaaggaagtgtaaaaggtaataatagttgccaagggtgatttaggatgcatttaaagtgccagactggcatatgtcatctactaatacgttgcttcaaattccattttgaaggaagcttaggaaatgcaatgtagttagcctaatgccaatggaagttcaccttttaaagtaatattaaagacagcgtgtcctttctcgtgttgatctatccgcagagcccataggcagcatgtcatccatggaagtgaacgtggacatgctggagcagatggacctgatggacatatcggaccaggaggccctggacgtcttcctgaactctggaggagaagagaacactgtgctgtcccccgccttaggtagggttgacaaacttgcattagctgaaccagggcagtatcgatgccactcccctccaaaggtgagacgtgagaaccatctgccagtcacttacgcataaacccccaagctcacagccagctcctggctccctaaccccacggttccacacggctgtgtggcagctgcaacagtggtgtggttccgtcatgarttcttctcaaagatttgacatgctccactccggtaactttggtgagttgagagctttcttgtttgttttccctcctttaccacccagaaatccatttgagtctgctccttgtggttaaggactggcgtttgcagggaggtgcggactctcctgcggggctcacgggaaactcttccctcttcgtgcgacaggcatttaggggcgtgcctgccatgggcaaagccatggtgtgtgttcagctcttggcctgtgttgtaaacttagttgcacttcagttcctttcatcccttcacaaaattttgtttcacattcatgcagcaaatatgggctgaggtgccagacctgtacctgggcttggtgcgtttcaaatttcagaccagttctttgggctgggtcaaggcaaagctcagtcgtcccagcagcacctcagccatctgtagaaggttctaccattaccacggtttcagcttcctctaaacttctcacccgcttctcctggcaatctgtcagaacggtgtcatcctggggaagagaaggagcttgggtgcatttgccctcatcctgagaaggccagaatactggagaccagcgtgaaccctcacccagagtcaggggaagatttagaaacagtgacacctgcatatagaattttgattccttgaagagcctatttagttccataaaattggagaactgctgaaggtca

SEQ ID NO: 706213 - DNA, 1592 bp, Homo sapiens
atgttcattgatacatggttagctgttgtgttcttcctaaccacagaaaaatattacagataatttttatttggtgtttggctcatgtgcatgtatgtgtttctgtcttccctgtccaaaaggacttaattgaaaaagcaaggaaaaataacaaaactgagatgtatagcattttagagctgaaggagattttagggattacctgatccagaaccttcttgtttacagctaaaaaaatggattcctcaaaacatacaacttaattgatgaataggaagatccgctctcaaactctgggactccagagcttcctctggatagttgagggcctctgcagggaaaactcttggtgtttctacctctggttctatctaggatgaattgggactcatgaatgtttgttctacctccttctacagagtatgtattcccgtgtgccagagtgccaggtcaccacatactattatgttgggtttgcatatttgatgatgcgtcgttaccaggatgccatccgggtcttcgccaacatcctcctctacatccagaggaccaagagcatgttccagaggaccacgtacaagtatgagatggtaagggggactctgcctgccaccagtggcctttctaatcagggggatccttggcacctatgccaaccattcttggtaaacaccatccaaaatattgcacttttaagccaggagttcaagactgtagagcgctctgtgattgtgcctactaatagatcacccagctggagtgcagtgacgcagtcacagctcacgtcagcctcaacctcctgggatcaggcgatcatcctaccttagtcttccgaatagctgggcttaaaggcgcacacaacaacaccggctaatttttttttttttttttttttttttttgagacgaagtctctgtcacccaggctggagtacagtggtgcaatctcagctcactgcaacctccgcttcctgggttcaagtgattctccagccttagcctcctgagtagctgggactacagacgcgtgccaccatgtccagctaatttttgtatttttagtagagatggggtttcactatttggccaggctggtctcgaactcctgacctcaggcgatccatccacctcagcctcccaaagtgctgggattacaggcgtgagccaccacgcccagccaaaatgaacttttaatggctagcatactcttaggagtttctgttgtgatgcctgttacctcagatcattaacatcttgatgataaggacttgatgataatatcttttgtttcagttatatcctccagcagtgcctacatttatttattcagcatcagtatgctgagtgttcactgggttctaaatgttttgatataaggtgtggatattggtgggaaggaggatgggttcaagaattgggaggagcttcctaggcagagaatatcatgagcaaagtggttgagacttgaaagtgtggtgatgcagccgcacaataaactgttytggctggagggcaagtaggtagtaggaattgggttattagattctgagaaccttcattaacccaggtaaagtatagtcctgtgtcatttga

SEQ ID NO: 706214 - DNA, 621 bp, Homo sapiens
ctgattcctggggcacagactgggtagaagagagaagagcagagtggtcagattcacagaaaacagccatggaacttggagaattccaccctaagaatcctagaatcggctgggcagggtggcttatgcctataatcccaayattttgggaagccaaggcatgtggatcatgaggtcaggagttcaagaccagcctggccaacatggtgaaaccccgtctctactaaaaatacaaaaattagccagacgtagtgacgagtgcctgtaatcccagctacttaggaggctgaggcaggagaatcacttgaacccaggaggtggaggttgcagtgagctgagatatgccattgcactctagcctgggtaacagagtgagactctgtctcagaaaaacaaaaaacaaaaaaccccacaatgtattgtcattaacaatagtcaccataggcagggtgccgtggctcacgcctgtaatcccagcactttgggaggccaaggcaggtggatcacgatgttaggagatcgagatcatcctggctaacatggtgaaaccccgcctctactaaaaatacaaaaaaattagccgggcaaggtggtgtgcgcctgtattcccagctgctgggg

SEQ ID NO: 706215 - DNA, 2113 bp, Homo sapiens
agcaaaaggtgcggctgtgtcctcataaaactttatttataacttctgacctaaaggtggcaaaaggaagaattatgctaaatttttcatttgcttgtgggagagtcagaagatgctgtttccttcttgacgttaattcaacaarttattagagtgcttgctgtgctagacactgcttcagagaattcgcattttgagagaacagacagtaagcaagtgaacaaagaaaataattagcatcaggcctggcacagtggctcacacctgtcatcccagcactttgggaggctgaggcgggcggatcacctgaggttgggagttggagaccagcctgaccaacatggagaaaccccgtctctactaaaaatacaaaattagctgggcgtggtggtgcatgcctgtaatcccagctactctggaggctaaggcaggagaatcgcttgaacctgggaggcagaggttgcggtgagccaagatcacaccactgcactccagcctgggcgacagagcaaaactccttctcaaaaaaaaaaagaaaaagtaattaacatcttctgctctgcagcaactgtccagggtcgtgtcagaggactagagtgggtggtttggagttccttcctgcgtgtagccttgaggctagggcagagctgagcgggtcacaggtgtggcgggaggagggtccaggtaatgccagccggcctgggtcaggttctgtcctaaacacaaccctctgaggttacctaggtgaggtctgacacacgagggcagcagaggggaacacgtggttgtagcgtgggagggagcaaatgtggacagcgtgctggggcacgtgactggaggaagagaccgtgcttgtgcatgtttgaacagcactgtcccccagccctggcctgctcctgaggtttgtagacaacacatgtgagatgggaattcttaacatcagtggtggggctcaggttgttttatacacgaatgtctggtaaaccctctgccatttggatgaaggcagctaaaattgaattggacatttagctgaagcacagtttctcatcctcagcgctccaacatctaggctgaagcactctctgtggtggggcttgtcttgggcactggaggctgtttagctgcatcctaccctggccatgttatgacaacctagagcatgtccagatgccatcaaatggcccctgaggacagaatagcccccaggtaggatccactggcctgaaggtggggtctgagctgcgagcatgtggtggctctgtcccggccctcttcattcccagttgagcactgagtagtctatggtgagatcaaggtttcacaggttcttattgtagtccgtgtggccgcagcacccagctgggtcacacatcaggtgatttcattattttcaagttataccagtttgtgcatccacttagagcagcagtccccaaactctttggcaccagggaccagttttgtgaaagataattttttccacagaccagggagggaggatagttttgggatgatttcagtgcattacatttattgtgcactttatttctattattattatgttgtaatttataaggaaataattatacaactcaccataacatggaatcagtgggagccctgagcttgttttcccagaactagatggtcccatctgggggtgatgggagacagtgacagatcgtcaggcattagattctcataaggagcacgcaacctagatccctcgcatgcacggttcacaatagggttccagctcctatgagaatctactacccctgctgatctgataggaggtggcgctcaggctgtaatgtgagcaatggggagtggctgcaaatatagatgaaactttgcttgttatccccagctcacttcctgctgtgcagcttggtttctaacaggccacagtccggtgccttctgtctactctcccccagcctgccctgtgtggactgtccagccttgttcttggtgcttgtggaaagcactagcagaaattggcacaggggtcaggggagtgagtttgggaggggcactccctgcctggtgccctttggaggcgtctgtccttcccatgaggccacggcccctcacagccggagctaca

SEQ ID NO: 706216 - DNA, 2113 bp, Homo sapiens
agcaaaaggtgcggctgtgtcctcataaaactttatttataacttctgacctaaaggtggcaaaaggaagaattatgctaaatttttcatttgcttgtgggagagtcagaagatgctgtttccttcttgacgttaattcaacaaattattagagtgcttgctgtgctagacactgcttcagagaattcgcattttgagagaacagacagtaagcaagtgaacaaagaaaataattagcatcaggcctggcacagtggctcacacctgtcatcccagcactttgggaggctgaggcgggcggatcacctgaggttgggagttggagaccagcctgaccaacatggagaaaccccgtctctactaaaaatacaaaattagctgggcgtggtggtgcatgcctgtaatcccagctactctggaggctaaggcaggagaatcgcttgaacctgggaggcrgaggttgcggtgagccaagatcacaccactgcactccagcctgggcgacagagcaaaactccttctcaaaaaaaaaaagaaaaagtaattaacatcttctgctctgcagcaactgtccagggtcgtgtcagaggactagagtgggtggtttggagttccttcctgcgtgtagccttgaggctagggcagagctgagcgggtcacaggtgtggcgggaggagggtccaggtaatgccagccggcctgggtcaggttctgtcctaaacacaaccctctgaggttacctaggtgaggtctgacacacgagggcagcagaggggaacacgtggttgtagcgtgggagggagcaaatgtggacagcgtgctggggcacgtgactggaggaagagaccgtgcttgtgcatgtttgaacagcactgtcccccagccctggcctgctcctgaggtttgtagacaacacatgtgagatgggaattcttaacatcagtggtggggctcaggttgttttatacacgaatgtctggtaaaccctctgccatttggatgaaggcagctaaaattgaattggacatttagctgaagcacagtttctcatcctcagcgctccaacatctaggctgaagcactctctgtggtggggcttgtcttgggcactggaggctgtttagctgcatcctaccctggccatgttatgacaacctagagcatgtccagatgccatcaaatggcccctgaggacagaatagcccccaggtaggatccactggcctgaaggtggggtctgagctgcgagcatgtggtggctctgtcccggccctcttcattcccagttgagcactgagtagtctatggtgagatcaaggtttcacaggttcttattgtagtccgtgtggccgcagcacccagctgggtcacacatcaggtgatttcattattttcaagttataccagtttgtgcatccacttagagcagcagtccccaaactctttggcaccagggaccagttttgtgaaagataattttttccacagaccagggagggaggatagttttgggatgatttcagtgcattacatttattgtgcactttatttctattattattatgttgtaatttataaggaaataattatacaactcaccataacatggaatcagtgggagccctgagcttgttttcccagaactagatggtcccatctgggggtgatgggagacagtgacagatcgtcaggcattagattctcataaggagcacgcaacctagatccctcgcatgcacggttcacaatagggttccagctcctatgagaatctactacccctgctgatctgataggaggtggcgctcaggctgtaatgtgagcaatggggagtggctgcaaatatagatgaaactttgcttgttatccccagctcacttcctgctgtgcagcttggtttctaacaggccacagtccggtgccttctgtctactctcccccagcctgccctgtgtggactgtccagccttgttcttggtgcttgtggaaagcactagcagaaattggcacaggggtcaggggagtgagtttgggaggggcactccctgcctggtgccctttggaggcgtctgtccttcccatgaggccacggcccctcacagccggagctaca

SEQ ID NO: 706217 - DNA, 1255 bp, Homo sapiens
tctgtcatattcagtgtgtattcccagcaccgacttcagctcctggattgtagccttctggtgaatattcatgaagtaaagtaggttttctctcctcatcaacccagggcagcgaggcacgggagggaaaaagcccatcgtggttcaacccggccgaggccgtccaggtcctgcgctactgctgcctcctggcccacagcatctccagtcaggtgtctgccagcgacattggcgtcatcacgccctaccggaagcaggtacgccctgcccaggcacgcctggttctgtgaggtccctgcagccctgctccttggctcctgcagctccacagaggcaggaacaagctccttgtgagcagcagcaggtttttaaaggggcaggaccgcacttgaatgtcgttcaacatgagaggtcacccaactgccatccatgggccagttccgggcagctgccagcttttctacggccagagcctcgaacagtttttacatttctaaatggttacatttatatgtcccttgatatttggccctttgggaaaacatttgccaacccccagctctaacccagtgtttctcaaagggggcactttgggtatatttgaatgggacgcttctcatttcgtatgactctgtgatgtgattataggagagttagcgtccccaggccccaggggctggtcccaggaagcatctccacacgttcacagtggctctggagctctggtggggacacaggtgcctcccatgccgaacaccaggtttcattcatgaagcatgtgtccctgtggtgttcacaccaccaagcagaacttggaaagaacccccaaaatacagaagaaaaggtgagtcccctaggccatcacagtaacagatcacctgtaccgcgcgtgtgctgaccgcagagcccgtcaaagatgttatgtttccttttttctgacctcggggactcgagaggtgagtgcttagttctcccagaggtacagagattacgaaggcttatggagacaagtaagttgccagacatcacacagccagtgtcctggtgtcttaacctcagcttgtaggtgccatcctgctgagacatccagcttagagctgccatcctcagctctaagcatcagacatgcatctcgtttctcctgaaggatttcctccatccttgatrtgtgcttgtggggagggaggattttccacatgaaacttggctttcctagtaagcattgtcccccgtccccagtttaactaaaactgca

SEQ ID NO: 706218 - DNA, 1583 bp, Homo sapiens
gggaaagacagctttcatcattgctctggcattcttctatgagttctgggctgacatttctctctattgatatatccattgcagctaaagttttccctctagaaagttgttaaaagtctgtgatcaactaatgcacatgcatctccctttcaccactattatctgaagattttaacataagaataaaatgctcaggtatgtattttggaaatgcagtgtataatattgatagaattgaagaagataaatttgcacaaggtaatcatatgtggaataaagggaaagacagtcaaagtaggaagataatctaggaatttattgtaaaaatctggaaaagagatgatgagggcatccattaggaaaaggagataaaagtagggttttgattatacacatatggtggaatctacagatttaatgaccttttgagagtgaggaatacaaataattctaagtcattctaatttggacgacttagtggattgtggtatcaataacttgggtggtgaataaagaaagaggaataattttttttaaaaagacaatgtagtgagtttgattaagaagtaggttgagcataacaggtggaaattaccaggaggcaactgaaagtaatagtctgatatttaaaaggtttagaaatggatcccagtggaaatgttatgcaaacattacaaaggacaatgtagttgttacattttagattgagagtttgaaatttagtagcctcttgaacaatggtgaattcagttggattaatatttaacaatatagacataaactcaatcaagtgtattttggttgggtgaggagtgtgggtggagaagaaaacaaacatggcttagcatctagcacaggagtacatttcccctctgtawattcataacaatcagatgcagttaacagaaactagtagaagtagcaggtaccctaactgctttatctcatattttctatatcaccttttctactgaaagctaagcaaggtcgggtgcggtggctcacacctgtaatcccagcactttgggaggctgaggcaggtggatcacttgaggtcaggagtttgagaccagcctggccaacattgtgaagccccacctccactaaaaatacaaaattagcagagtgcatgcctgtaatcccagctgcttgggatgctagacagaagaatcgcttgaacctgggaggtggaggttacagtgagccaagatcatgccactgcactccagcctgggcaacagagtgagactctgtctcaaacaaacaaacaaaaaaaactaagctaaatatttatgcatggagttttaggagacaaactggattacttaagtacttattatcaagagttcatttaatcagttttttagtattttaaaaattcagtatcttcatgaaatgaaaactttaccatagcaattgaaacatgaattgtgcttggagtctcacaatgtacttccagtccttaatatatcatttacaattcaaaattgtactcttacaagtcattctataattgattttatagtctatctttctgaatccttaaaaaatgttccataattcctttagtaaattgctccatg

SEQ ID NO: 706219 - DNA, 1570 bp, Homo sapiens
tgcaatcaaaacaaaagagagaataaaaatctcaccagaagaactacagccaatagaaattacaggaataaaaaattacatgtctatgcaaattgcattgaagggcctagccactgcaataagaaaaataactaaaaggtgtaacaatcagaaaagaagaaacgtaacagcattattagcattaacaaaccattaaatggttttagcatggctgatgaacagaggaagggaatttatctagaatgagagctctcagctacaatttgagagctatatatttaaatgcagtgctaagggtttcatttaacacgaggaaaaaaccattgtcttcattttatagctgaagaaactaaaactccgagaggttaagtaatgtgttcaaagccacctggcaagtaaccggctagttttgaaattaagacaatctgtccccaaggcttaaccactatactatgatgtctcgacacacgataaacatatatgtgccctctcagaggcaagcgtgattgtgtgattacaaggacactggaggaaaaaagagacgaaattcacctaaggaaagccagggaagagaggaatgcttagagcaagaatggtattctggagagaataagaacagcaagtacaaaggttaaaaggcatgaggctgggtgcggtggctcatgcctgtaatcctagcactttgggaggctgaggcaggcagatcacttgaggtcaggagttcgaaaccagcctagccaacatagtgaaaccctgtctctaccaaaaaactcaaaaaattagccaggcatggtgacatgtgcctatagtcccagctacttgggaggctgaggcaagagaatcacttgaacctgggaggcggaggttgcagtgagccgagatcatgccactgcactccagcctaggcgactgggcaagaccctatcttgaaagcaaaaagcacataaaggaaggttcccttggacagagagtggagaacagcccattgagcctctagtcttgggctgtccagtatggcagccaccagctattaacasttaaaaagtagttagtccaagtgagaaactgacttttttttttgagacagggtgtccctctgtcattcaggctgagtgcagtggcactatcacagctcattgcagcctcaacctcctgggtgtaagcgatcctcccacttgagccttctgaagcttggactacaagtatgtgccactgcacctggctaattttttattttttatagagacagaggactcactatgttgtccagactggtctcaatgactttttaattttagtcaattttaatgtaaacagtcacgtggttagtggctaccacactggacatcgcagttctggaggttcaagtctggagaaagggaaatggttagaagaccaggaaagaggaatatatccaagaggaaaaacagacaggacatagtgatggatgatgccagggaatgggggatgggggcagggattcaaagtctcaaatttcggaggcatggtaggtgataatgccacaaagagaaaaatagaattaagaacaaactggtttggatctgataaa

SEQ ID NO: 706220 - DNA, 575 bp, Homo sapiens
gacgtggtggtgcaggcctgtagtcccaggtactcaggaggctgaggtgggaggatcacttgagcccaggagattgaggctgcagtgaaccaagattgcaccactgcactccagcctgggcaacagagcaggaccctstctcaaaaataaataaataaataaataaataaataaataaataaataaatggaaaacaaacctaagaacacgtgctgtgcaccaactgttaatattttggccatatcaaagcactaactatggcggctggaggaacacatttctgaacatacctctgaatgacatgctcacctgccaagtacgtgtaaagatctgaattctttgtaaatgtgtcattgattaggaggcaattaccccaatctccctggctttgttttgttttgttccattctggctgcacatgtctgctcacgtcaaattgtaccagcaagtacaatgttccactcctgccatgcccggctggagcctgctcccagacaaaggtaggtatggagcagcatacaaacagggcttcccaagtgggcactgggcactgcccaggtgccctgaattgggat

SEQ ID NO: 706221 - DNA, 628 bp, Homo sapiens
attttctactctgggaggaagatataaactccggcaatagtccctccttgagtccttgctatgcaggaggatgaggaggtcccagaagccaacagattccattctgaatccagccaatcatcttaccttttgccagctcctaattagataaattaaaaggcatcctgcaattgtaaaactaattttttttaaagttattggatgcaactgctgtgaatccagattgccttagtgtaaggtaaaatgagatactgaggctactttttttttttttttttttgagacggagtctcgctgtgttgcccaggctggagtgcagtggcgcgatctcggctcactgcaagctccgcctctcaggttccagcgactctcctgcctcagcctcccgagtagctgggactacaggcacctgccaccacgcctggctaattttttatattttttagtagagacggggtttcaccgtgtgttagccaggattgtctcratctcctgacctcgtgatccgcctgcctcagcttcccaaagtgctgggattacaggcgtgaatgaggctactttttaaaacattgcagcagtctcaaaatgtaaatgcatcaaaaaagtaacattgcccttcctgattaac

SEQ ID NO: 706222 - DNA, 1753 bp, Homo sapiens
caggggagggtgggagggttgctttcctgcccctccctcataggtgagatgggaagatttcatgggctttgggccagaaacctgttctacttcccagctccggggcctgggcctccgttttcccaggagtcatatgcgagtaacaaaacaccccaagacacccactggggaagcactggaaatatatatatatatatatttttttttttctagacagtctcactctgtcgccaggctggagtgcagtggtacgatctcggctcactgcaagctctgcctcccaggttcacaccattctcctgcctcagcctcccgagtagctgggactacaggcgcccactaccacgcccggcaaatttttttgtagttgtagtagagacggggtttcaccctgttagccaggatggtctcgatctcctgacctcgtgatctgcgcaccttggcctcccaaagtgctgggattacaggtgtgagccacagcgcccggccccggaaatattaatagtagcaagcttgctggtgctcatatgttcatttctctcttttcccttaaaaacagatgtgcacctgctttaacacggtaaaacaaaacacgaatgccaactgaaaaccagcaaacaaacataaaatgtgaagataaaaaaagaggcacgccatttccagcccgaaatatctatgaaatactaaagtcaggacatcacagacaagacgctgctggaagtccatctccaatatatcagtttatgccaaaatagttattattgacttagtgggtataagaggagtggaggggccagggcctgtggctacacctgagaggctagcccggctcaccccgggatggcactgggctgcaagctagcccctttccctttccgaaaagactgcagcctctggcagatgtgcaggcggcaagaaagtgaaaacaggtttttttttgtttttttttttgtttttgagacagagtttcgctcctgttgcccaggctggagygcaatggcgcgatcgcggctcactgcaacctctgcctcctgggttcaagcaattctcctgcctcagcctcccaagtagctgagattacaggtgcacaccaccacaccccgctaattttttgtatgtttcgtagagacagggtttcaccgtgtccaggctggtcttgaacttctgacctcaggtgatccgcctgcctcgccctcccagcgtgctgggattacaggcgttaaccaacgcgcccagcctgttttttgttttttgagacagagtcttgctctgtcacccaggctggagtgcagtggtgtgacctccgctcactgcaacctctgcctcccgggttcaagtgattctcctgcctcagcctccccagtagctgggattacacgtgcatgccaccatgcccggctaatttttgtatttttagtagaaacagggtttcaccatgtatgtgggccaggctagtctcaaacttctgacctcaggtgatccgcccgcctcggcctcccagcttgctgggattacaggcgtgagccgccgcgcacagctgaaaacagggatttttaacagaaagacagcaagcccccccactcccaaacgggccctgggagccggctcccccgcccgcaccaaactcaccgccacagccttcagggactgcacgatgatccagtggatctcgtcgaacagcttgctggtcacctccttgccgcgggtgctctccaggtagagccgcaggttactcactgtccacttgccccca

SEQ ID NO: 706223 - DNA, 650 bp, Homo sapiens
taaaatgagaaggtgtctcctgtcaccctgggaactcctgacaagtgagtcatctccccactggaaaaggatcagacagaagctttgmcccggtgggccccgggcacttctgagcagctgagaaaaaacaaagacagagaagccagcagacccaggcccctgggcttgccacgaggccactgccccaccacttgctcggctgtgcccatcggctgtgcccggctcctcccagatgcttcatatttcacatgtgttaactcgttccatccccatcacaaccccatggcagtggtgctgctggtgtccccggtttactcagatggagaatgtaagacatggagagtctgaagaacaaaatacgctcagccacttcgtgtgagactgggcttcaaacccaggaccctagggccacgagtcccaggactttggcaggtgcctcgctgcctcagaaccaccacgactgagcggttctcacaccagcctgtaatcaaaaagtggctgcaggccctggcccatgacctacacccttcttcatggcctgccttgggcagagtctgggactaatcacacgaagacaaccacagaaccccaccgtgacgccacgtgacagatgacgcacgcctgtaaaagcaagcatgggctgtgtggct

SEQ ID NO: 706224 - DNA, 567 bp, Homo sapiens
acggagtcttgctttgttgcccaggctggtctcaaacttgaagcctcaagtgatactcctgcctcagcctccaaaagtcctgagattacaggtgtgagccaactgcacccggccaagaagtcttaacagttcaactttgacaggtgtagtcaaagaattaaatgtggacaaaggaccaggtgtggtagctcatgcctgtagtcccagcactttcggaggccaaggaaagaggatcacttgaagccaggagttcatggccagcctgagcaacaaagcaagaccctgtctttacaaaaaaaaaaaaaaaacaaccaattaaaaaaatttaaattagccaggtgtggtggtgtgtgtctatagtctcagctattcaggaaactgaggtgggagaaccacttgagyccagaagtttgaggctgcagtgagctgtgatcgtgtcactgcacttcagcctgggtgacagggctagactccacctctaataagaaaaaatagacaaatcgggacaaacagcaaaataaaaggccaggaataaaggaattacgttcagagcatgaaatcatgaag

SEQ ID NO: 706225 - DNA, 575 bp, Homo sapiens
aaccccacgggtaccataaaagataaaagatctaaaaatggtgccctttaatcaaaagtaaacaccctttaaccatcagagagagggagaagtttggcagctgacctagaagccccatcaactgccccagctcaatgataaactcttctcttcttcaaataaaagcacatcctggcttacatggccatcacttctttgtacaattttatatttttatcatctaaagttatagtttagttttacctttaagagtatatttttatcctcatttattccatagattcctgcttgaaatttatattgtctggtagtttcctgtcctttgcattttgcagattgcaccccaaggtgtggtttaatgtatctctatgacctgtattttctgtaaattggtagtttgttatagaggtttgcgtmtattcagggtttttttttttttttttttttttgccatgaggattgatggtactatatcatgtttttcatcaagaggaagaattcaatactagttatttcttttttgtgatgttaattgccattgctgttcagtggctaaatctgttaattcattacaa

SEQ ID NO: 706226 - DNA, 825 bp, Homo sapiens
tgcctacccagactgagggtgggtttgcttctcccaatccactgactcaaatgttaatctcctttggcaacaccctcacagacacacccagcagcaatactttgcatccttcgaaccaatcaagttgacactcaatattaaccatcacactgagttcagacggcagctctgcctcttacaaagtgttgaacacatccttttagcagatcgggcttcaatttcctcatctgaaaatgtacttaatwcgtaatagtacttacctcatagtgttatttagagtgctaatcagctaatatgtgtaaagcaactggaacaatgtttagcaaacagtaagtactataaaagtattagcttctgttattatttgcaatttagcccaggctgtggagttttgtacagagttttatgtacccatttcccagatcaccccttcctttgagaatggtttgctatggtctatgtttgtgttccctgcaaattcctatgttgaaatcttaactcccagggtgatggcattaggagaggggagctttccgaggtgattaggtcatgagggcagcatctccatgaatgggattagtgaccttataaaacaggcctcagggagcttgtttgccccttctaccacatgaggactcagccagaaggcactatttatgaaccaggaaaccgacccacattaaacaccaggcactctgtcagcatcttgatgttggacttccagcctccagaactgagaaataaatttctgttgtttccaagcttcccagtttacagtatgttgttatagcagccccaacagatgaaaaaaaaaaaaaaaaaaaa

SEQ ID NO: 706227 - DNA, 2306 bp, Homo sapiens
tgtacacacacaatggagcaattttattgcaaaactcttatattttattttattatattttatattgagacagagtcttgctgtgttgcccatcctggagtgcagtggtgcagtcttgctcactgcaacctccacctcctggattcaagcgattctcccacctcagcctcctgagtagctgggattagaggcatgcacgaccatgcctggctaatttttgtatttttagtagagacggggtttcaccatgttggccaggctggtctcgaactcctgacctcaagtgatccacctgcctcggcctcccaaagtgcggggattacaggcctgagccaccatgcctggcctgcaaagcttttaaaagcaacaacagaatgtgcgtgtaaatggttggtttttaatgcaaaaattacaactgctcagattttgcacttctacagaatttctcagccaagaatatttcaatgtttctgttaggctatgttgttagaaaatgataagttttccattaaaagaaagataaatatgctaaagtaatagtctattgttgaacagtcaacagtaattaatttagagtttcaggttgttttgagtcatcctctattatgtttatattataatccccaaagcttagaaattgcatttcctttatacccattctgattcacctattgatttctcccactgtgtttaaaatgaaaatgaaatgaacttgactctggagatttgttttgaaccagcattatcaccagcatccttacggttcccaaacatggccttttttggcagatgacaattgcaaggtgaggtgagatgtccagttttcagcatcaaacccatttagtgattacaccatgtctgtgtgccgaatgccaacagggagatgcttgamttctgggtcatagtgtgaggggtatttagggctctctcaatactgctttgtctcaaactatttggatgattgagtcaatggtggttgttattttaatccgcattgaaaataataaagctttcttgcctttctccacctcacctagcctgtcttcacacagcaacagttggttgcaaattattgcaggcatacgataatatgtatagaaatgttttctcttgtaaaatattgtgtatatacacacttatgcccacacaaatttgaatatttgcttatataagcattgtggtttttaggcatcggataaggcattttccaagatagctaaatcaaatttctgggaggataatttttaaaataagatgtatctattttaaccatatcagtttcatcaaatcaacttctgtgaaataatgccacaaaagtctctcacagagtcagtgtgaagaaagcaattgtttcttttttctttttaatctttaatatggagacatagaaatattttctggccatcatctttcaaagcagctcttcccagtggaattggaatctggttcatggaaactttgcaaagctcaaacctccaaaatccccatcgtgaaagatcgtgtgtattacttgattttctaaagtgacaagacgtacattaaaaaatatttctcttattgttacatttcaggcacgtttactgttagctgcttggcttcattatgtatcatagtctgaatctacaaatcaagtataattagacttagcgaactgattggatttctaattaagctacattggaaacaatgcacaatcagtaaatattctgactaggtacattttaaagagcaactcttgggctttttgctgatgactagacaccagtgtcattaaatttgttggtggcaagcaaattttaaagctaaaatagaggcaattagtaaagatcttgaaatatttaatcacgtttgtccaattagtgtgcaattaggcagtggtgtggcgtgggacaggcattctgcttcactgcttggtgcagaaggatccctttgaaattttgctgtttagtttattgatatataaaaaggaagttatggttgtaatttccaatttaaaaaaaatactgtgcagatggtctgactatatatttaacaatgttaaacaaatccaaacaagggaagcatgttacctgaaattacacagctgtgatctgtgaataagctctggatcatggtagattacagctgtgcttatctcgatcattgaaaccgccaggcattttatactggaggaatcgggaacctgataagcttgcccaacaggtcttaaaatgattggcagctccttacttgtccaagtgtgtgcttcctggtggctagcttggctcctctgagttccaggggttttaattttatgcagagggaga

SEQ ID NO: 706228 - DNA, 1081 bp, Homo sapiens
ctgggactgtaactgccagtcagccacgcagcattgccccaacaagcaggcgttctagctaagagaaccgaaacaggtaccaggcaaaccacatgccatcccatccccaaaataaataaacagtgaaaaacccaccattgcagttggaaatcggatgcctcaggactgagctattcctcaatgctgtgcaggaccagctacataatctgaggcttatgcaaaacgaaaaggcaggcccctcgttaaataaaattagtaagaatttcaagacagtgatagcagaacattaaactaagtgtgggcccttcaatgctcagggcattgttcaattgcacaggttgtcacccaggaagctggccattgtgtacagagggacatttgcccactggtttgggaaggcgtctgtatttttttggtgcattttaatcttctagtggcctgattggaccatccgacaatttcagcatttgttttgctgggagaaggacagtgccattcattttttttcccctatttggagctgcagtgagatcactcctccctctcgatgaccaggtaatggccatttgcaatatgagactactatggcaaagagacaggtcaaaggggaatgatgttttatgatcaagctgaaaaatctatagggagtcgggggagctcaaagatgcctgtgagagacagatagacaaagagattgccatagaaaaatagaaatcaactttctgataagacattcttagactcagtcatactgagaggtgacagcgtgctggcagtcctcacagccctcgctcgctctcgggacctyctctgcctgggctcccactttggcagcacttgaggagcccttaagcccaccgctgcactgtgggagcccctttctgggctggtcaaggccggagccggctccctcagctggcaaggaggtgtggagagagaggcgcgagcgggaaccagggctgcgcgcggggcttgcaggccagctggagttccgcgtgggcgtgggcttggcggccccgcactcggagcaaccggccggccctgccggccccgggcaatgaggggcttagcacccgggcca

SEQ ID NO: 706229 - DNA, 1128 bp, Homo sapiens
tttttttttttttttgggtagagataggatttcaccgtgttgcccaggctggtctcaaactcctggacttaagtgatcctcccacctcagcgtcccacagtgttggcattacagatgtgagccaccatacctggccaagcactttaattaataacttcagttatcctcacaacaatcctgtatgctatatattactaatattcccattttatagatgggtacaatgaraaacagcacattgcagtaacctccaaagttacctcgtaaataacagagacatttgaactcaggcatgttggctcccgaacctgtgtcctttattactaaaaaacattgcctcccccgtaatcagtagcttaatgtttgtaataaaaactgaaaacaaatccaggctttatcactgctttccaatatcttggttactctcagctattctcaggagatgaaaatcacaaggcttcttaacaaccagttttgcccttgattttctgaagagtggaatgagatgcaccagctgtgagtgagaaccttttgtgcctgtgtacttgcaaatttatcatcacttccctgtttctgtgtgaaacctgaaccagactgtggagcagctgatctgctctctttggcccacttcacaattcatacctgtttcgaggcggctggatccgcctgcgggctacatccatcacaaggcggctgctgtggtgactcagccgggctgaaatccggttcttccggccgcatgtccctggacatctgcctgctggaaagccaagacaagcaggttcacacacctatgttcactgatgtgagctgtgctgttaccttatttttattattaattattattttgaggcagagtctctctctgtcaccgaggctggagtgcagcggtgtgatctcggctcactgcaacctccgcctcccgggttcaagcaattctcctgcttcagcctcccaggtagctgagattacaggcgctcgccaccatgcctggcattttcttttcttttttcttttttctttttcttttttgtatttatagtagagacgaggtttcaccatgttggccaggctggtttttattatttttttaattcagaaaacttcggcgttctaaggcgcaaagtg

SEQ ID NO: 706230 - DNA, 1128 bp, Homo sapiens
tttttttttttttttgggtagagataggatttcaccgtgttgcccaggctggtctcaaactcctggacttaagtgatcctcccacctcagcgtcccacagtgttggcattacagatgtgagccaccatacctggccaagcactttaattaataacttcagttatcctcacaacaatcctgtatgctatatattactaatattcccattttatagatgggtacaatgaaaaacagcacattgcagtaacctccaaagttacctcgtaaataacagagacatttgaactcaggcatgttggctcccgaacctgtgtcctttattactaaaaaacattgcctcccccgtaatcagtagcttaatgtttgtaataaaaactgaaaacaaatccaggctttatcactgctttccaatatcttggttactctcagctattctcaggagatgaaaatcacaaggcttcttaacaaccagttttgcccttgattttctgaagagtggaatgagatgcaccagctgtgagtgagaaccttttgtgcctgtgtacttgcaaatttatcatcacttccctgtttctgtgtgaaacctgaaccagactgtggagcagctgatctgctctctttggcccacttcacaattcatacctgtttcgaggcggctggatccgcctgcgggctacatccatcacaaggcggctgctgtggtgactcagccgggctgaaatccggttcttccggccgcatgtccctggacrtctgcctgctggaaagccaagacaagcaggttcacacacctatgttcactgatgtgagctgtgctgttaccttatttttattattaattattattttgaggcagagtctctctctgtcaccgaggctggagtgcagcggtgtgatctcggctcactgcaacctccgcctcccgggttcaagcaattctcctgcttcagcctcccaggtagctgagattacaggcgctcgccaccatgcctggcattttcttttcttttttcttttttctttttcttttttgtatttatagtagagacgaggtttcaccatgttggccaggctggtttttattatttttttaattcagaaaacttcggcgttctaaggcgcaaagtg

SEQ ID NO: 706231 - DNA, 1128 bp, Homo sapiens
tttttttttttttttgggtagagataggatttcaccgtgttgcccaggctggtctcaaactcctggacttaagtgatcctcccacctcagcgtcccacagtgttggcattacagatgtgagccaccatacctggccaagcactttaattaataacttcagttatcctcacaacaatcctgtatgctatatattactaatattcccattttatagatgggtacaatgaaaaacagcacattgcagtaacctccaaagttacctcgtaaataacagagacatttgaactcaggcatgttggctcccgaacctgtgtcctttattactaaaaaacattgcctcccccgtaatcagtagcttaatgtttgtaataaaaactgaaaacaaatccaggctttatcactgctttccaatatcttggttactctcagctattctcaggagatgaaaatcacaaggcttcttaacaaccagttttgcccttgattttctgaagagtggaatgagatgcaccagctgtgagtgagaaccttttgtgcctgtgtacttgcaaatttatcatcacttccctgtttctgtgtgaaacctgaaccagactgtggagcagctgatctgctctctttggcccacttcacaattcatacctgtttcgaggcggctggatccgcctgcgggctacatccatcacaaggcggctgctgtggtgactcagccgggctgaaatccggttcttccggccgcatgtccctggacatctgcctgctggaaagccaagacaagcaggttcacacacctatgttcactgatgtgagctgtgctgttaccttatttttattattaattattattttgaggcagagtctctctctgtcaccgaggctggagtgcagcggtgtgatctcggctcactgcaacctccgcctcccgggttcaagcaattctcctgcttcagcctcccaggtagctgagattacaggcgctcgccaccatgcctggcattttcttttcttttttcttttttctttttyttttttgtatttatagtagagacgaggtttcaccatgttggccaggctggtttttattatttttttaattcagaaaacttcggcgttctaaggcgcaaagtg

SEQ ID NO: 706232 - DNA, 633 bp, Homo sapiens
ccagttcatgtcacagacctgtgaaggtcaaaacagaaggcaggagggagcatattccataaaaggtacagcagccgggcagagtggcccatgcctggaatcccagccaaggcaggaggattgctggagaccagaagtttgagacaagtatgggcaaaatagcaatacctcatctctaaaaaaaattatttaaaaaatcagctggggctgggtgcggtggctcacctgtaatcccagtactttgggaggccaaggcaggcggatcacttgaggccaggagttcaagcccagcctagccaacatgatgaaaccccatctctcctaaaaatagaaaaattagccaggtgtagtggtgcacacctgtagtaccactgcactccagcctgggtgacaaagcgagactctgtctcaacaaacaaacaaacaaacaaacaaaaaaccagcggagcatggtggcacacactgtagtcccagrtacttgggtggctgagtggggaggatggcttgagcccaggaggtccaggctgcagtgaaccacgatcgcaccactgcactccggcctgggccacagagtgagactctgtctctacaaaagaaaataagaaaggaaggaaggaaggaaagaaaaaaaaa

SEQ ID NO: 706233 - DNA, 633 bp, Homo sapiens
ccagttcatgtcacagacctgtgaaggtcaaaacagaaggcaggagggagcatattccataaaaggtacagcagccgggcagagtggcccatgcctggaatcccagccaaggcaggaggattgctggagaccagaagtttgagacaagtatgggcaaaatagcaatacctcatctctaaaaaaaattatttaaaaaatcagctggggctgggtgcggtggctcacctgtaatcccagtactttgggaggccaaggcaggcggatcacttgaggccaggagttcaagcccagcctagccaacatgatgaaaccccatctctcctaaaaatagaaaaattagccaggtgtagtggtgcacacctgtagtaccactgcactccagcctgggtgacaaagcgagactctgtctcaacaaacaaacaaacaaacaaacaaaaaaccagcggagcatggtggcacacactgtagtcccagatacttgggtggctgagtggggaggatggcttgagcccaggaggtccaggctgcagtgaaccacgatcgcaccactgcactccrgcctgggccacagagtgagactctgtctctacaaaagaaaataagaaaggaaggaaggaaggaaagaaaaaaaaa

SEQ ID NO: 706234 - DNA, 633 bp, Homo sapiens
ccagttcatgtcacagacctgtgaaggtcaaaacagaaggcaggagggagcatattccataaaaggtacagcagccgggcagagtggcccatgcctggaatcccagccaaggcaggaggattgctggagaccagaagtttgagacaagtatgggcaaaatagcaatacctcatctctaaaaaaaattatttaaaaaatcagctggggctgggtgcggtggctcacctgtaatcccagtactttgggaggccaaggcaggcggatcacttgaggccaggagttcaagcccagcctagccaacatgatgaaaccccatctctcctaaaaatagaaaaattagccaggtgtagtggtgcacacctgtagtaccactgcactccagcctgggtgacaaagcgagactctgtctcaacaaacaaacaaacaaacaaacaaaaaaccagcggagcatggtggcacacactgtagtcccagatacttgggtggctgagtggggaggatggcttgagcccaggaggtccaggctgcagtgaaccacgatcgcaccactgcactccggcctgggccrcagagtgagactctgtctctacaaaagaaaataagaaaggaaggaaggaaggaaagaaaaaaaaa

SEQ ID NO: 706235 - DNA, 1627 bp, Homo sapiens
aaggattcctcagcctcacatgattcttgctaggattttttcttgcttcagtattcttgttactgtgacttagaagttgcatatacagacttcaggcttcaagttgtaagcagtcaatatctattgaaaggcttgggccatttcaatatgccacagaaaagcactggccaataaaaagataatgtaaacaacatatgtaattttgtattttctaatagcattattaaacaaaaagaaacaagtgaaatcaatttttaataattttacttaacccaacgtaactgaaatattatcattttatcttgaaattaataaaatgtactaatgagctattttacattctttattattcatattaagtctataaaatacagtgtgtattttatactttcagctagtctcaatttggactagccatatttcaaatgctcaatagctacatatggatacaggctactgtattagacagtgcagatctaggagacctgggttatggctatataatgttccagtgctgactctgatccgattcctttaagtatttacctgtattttcttaatgtgcatgattcctgctaagctgtagtaaagtgacattttaatggtgtctgaagtaaaaagagatcattcgcagtgtgtgaaaattgttaccagatcatttaatgcaaagtgccacaaaacttcctctaggatacaatacttcttgtatttactgttattcattcttgtccagtattatgtgggttatataaataatgcttcacaatgtgtattgaatatactataaaaaactgacttctacgtttgaatccatatgtggctaatagcaaacagagactgatgacaacagaagagtcatttgtgagtaacagcagcattagatgagtttgcatggactaaaaaaacatagctcagggaggcatagaactggagctatagatagaacatataagactgcatgcaagagaaaggatatgagcatatagacagaatgacatctatattagcatggatctacatgcttaaaattggattcaaagaaagacttggtaagtctaatgttttgaacattttattagacataaaaatgaatttcacagaatcccaataacatagaaatcaaatgtgataataagcaaacaatatcaaactatgtattttgccatctcaaaaagccaattcaactatcataatcttactcttcagttatgaagattcactcaagcaaaatgttgcctaattacaaacagaccaccatgactgaccaaaattttgagagagagaggaawctaaagattaaatatagtcatgtcaaatggtaattgactgagggtcttctaactaaatctcaaacaaatattcttgtatgaatattcttccaaattacaaagaacagggagattaaaatgaagaagacaaggcagagagaaaatacagaaagttctgatattgggaatgactaagaagaaattagattaaacagtcagataaatatttacaataaaatataaaaataaattaaggaaaaactacagatatttcagtttaaatgctttttacaagtttttaaaatttctttttaaatcgatatgtaagattttacatatttttggggtacatgtatttg

SEQ ID NO: 706236 - DNA, 2019 bp, Homo sapiens
gtttatacatggtcatgtaaaagaatcagtatttagagcactattgcaatcccacgtattgaaacaattgcagaattgcctctgaactactaacttataagattctcttcaagcaatttgaaagcacctggctactattcaaaccttccattggtcttatcaaatgatgagacactgataatcaactaagttatctatggaaaaatgaagaacaatatatgcagtaaaaaaagttagttttcaaaaaatactgtaaaaggctttataagaacaagtttttaatgaaaattcaccaataagttgatatttgtccacagatctcctttctatataaatcatcttgatgtttaacaactcttattatgttaaaatctctgtgtctcagaacttaagcaaccttattggtattttctataccaagagttttgagattagaattcacctgaggagatacacacacacacacgagagagagagagagagagagagagagatacacacacacacatttacacagatgcctagtccaatcattctcaaagtgtggtccacagaccaatagcatagcattacctgagaacttgataatgcaaatttgcgggcctcaccctcccaaacctactgaatcagaagctctgagagtgaggcctaccaatctgtgttttaacaagctcttcaggtgattctgattcacactacagttttagaaccactgattagaccacatcctccagggactggtttaattgatttgggtaaatatagctgagcattgatatctcttatatgtcccaggaaagtgcatccagaacttacagcaactcgtctataccaattccttcaagtaatagccaagaacactgaatccagtgagattaagtaatttttccaagaaattaagttttatcctattcctgtgttttccaaaacaagaaaatagacctgatttcttctgagatcattcagccagcacagaccagtgatagtctagaagtcaactatctcaacctccattgttacccattaggttttttcccctctaataatgttaaaggctatttaaagtttacaatataggtttctggttactctttatgctgcaatttcactctacctatcatgggcagtatcagaaaacacaccggtaaccatcattattttacttgaattgtagtatggaatttaacatattgattcctgcaatggaaagaaaaaaattttgttaaaatttgtaaatgttcagataaatcacagctatactgtgagatgaatatctcagggtcagtgaaaaattagtaaaatatttccctcaaagttggtagatttatgtgatagctactaataagcatatggtgatatacttagaacttatttccagaatgtcattgcaatattatagtgatcatacacaattaacttgggattaaatgaaagatgctatctcaagtatactttaagtaattgatttatttaaaaataaagcttttttttcttaaaaaaatcctgtaagattattttagttgatgctgaaaaagcatttggtaaaattcaacattccttaatgattaaaaaatgacaaaacatcaatttagaagaaacatgccacaacataataaaagtcatatatgaaagacccacacatagtatcatactgaatggagagaaactgaaaatgtttcctctaagatctggaaaatgaaaagaatgcctaatttcccaactgttattctacataatacttgatattgtttgsctgtgtccccacccaaatctcatcttgaatggtagtttctataatccccacatgtcttggtagggaccctgtgggaagtaagtgaatcatgggggtgaatctttcctgtgctgttttcatgatagtgaataagtgtcaggagatctgacggttttataaagggcagttcccctgcacatgctctcttgcctgccaccatgcaagacatgcatttgctcctccttcaccttccactatgtgaggccaccccagccatgtggaactgt

SEQ ID NO: 706237 - DNA, 2019 bp, Homo sapiens
gtttatacatggtcatgtaaaagaatcagtatttagagcactattgcaatcccacgtattgaaacaattgcagaattgcctctgaactactaacttataagattctcttcaagcaatttgaaagcacctggctactattcaaaccttccattggtcttatcaaatgatgagacactgataatcaactaagttatctatggaaaaatgaagaacaatatatgcagtaaaaaaagttagttttcaaaaaatactgtaaaaggctttataagaacaagtttttaatgaaaattcaccaataagttgatatttgtccacagatctcctttctatataaatcatcttgatgtttaacaactcttattatgttaaaatctctgtgtctcagaacttaagcaaccttattggtattttctataccaagagttttgagattagaattcacctgaggagatacacacacacacacgagagagagagagagagagagagagagatacacacacacacatttacacagatgcctagtccaatcattctcaaagtgtggtccacagaccaatagcatagcattacctgagaacttgataatgcaaatttgcgggcctcaccctcccaaacctactgaatcagaagctctgagagtgaggcctaccaatctgtgttttaacaagctcttcaggtgattctgattcacactacagttttagaaccactgattagaccacatcctccagggactggtttaattgatttgggtaaatatagctgagcattgatatctcttatatgtcccaggaaagtgcatccagaacttacagcaactcgtctataccaattccttcaagtaatagccaagaacactgaatccagtgagattaagtaatttttccaagaaattaagttttatcctattcctgtgttttccaaaacaagaaaatagacctgatttcttctgagatcattcagccagcacagaccagtgatagtctagaagtcaactatctcaacctccattgttacccattaggttttttcccctctaataatgttaaaggctatttaaagtttacaatataggtttctggttactctttatgctgcaatttcactctacctatcatgggcagtatcagaaaacacaccggtaaccatcattattttacttgaattgtagtatggaatttaacatattgattcctgcaatggaaagaaaaaaattttgttaaaatttgtaaatgttcagataaatcacagctatactgtgagatgaatatctcagggtcagtgaaaaattagtaaaatatttccctcaaagttggtagatttatgtgatagctactaataagcatatggtgatatacttagaacttatttccagaatgtcattgcaatattatagtgatcatacacaattaacttgggattaaatgaaagatgctatctcaagtatactttaagtaattgatttatttaaaaataaagcttttttttcttaaaaaaatcctgtaagattattttagttgatgctgaaaaagcatttggtaaaattcaacattccttaatgattaaaaaatgacaaaacatcaatttagaagaaacatgccacaacataataaaagtcatatatgaaagacccacacatagtatcatactgaatggagagaaactgaaaatgtttcctctaagatctggaaaatgaaaagaatgcctaatttcccaactgttattctacataatacttgatattgtttgcctgtgtccccacccaaatctcatcttgaatggtagtttctataatccccacatgtcttggtagggaccctgtgggaagtaagtgaatcatgggggtgaatctttcctgtgctgttttcatgatagtgaataagtgtcaggagatctgacggttttataaagggcagttcccctgcacatgctctcttgcctgccaccatgcaagwcatgcatttgctcctccttcaccttccactatgtgaggccaccccagccatgtggaactgt

SEQ ID NO: 706238 - DNA, 972 bp, Homo sapiens
agaaaaagaggaagtgtttttctaactatgccgcctacccctacactccattctgatgctgaaatggtgagaagattgtcaatgggcatgtggggtgggagctggtaagtttggtttccaaagggtggctaggtaatcctgacctcccagttgaaacagcattggactaaaactgatctacagaaagtgacaggctttagaggacagttttatagatggctaagagataaacaaaataatgactgtcaccagtaatttttttttcttttttttttagaaagggcctcactgtcacccaggctggagtgcagtgacttgatcttggctcactgtagcctccaactccaggactccaatgatcttcccacctcagcctcccgagtagctgggatcacaggcatgcaccacgacgcctggctaattttgtgtattttttgtagacacgaggtttcgccatgttgcccaggctgctctcaaactcctgagccgaagtgatctgcctgcctcagcctcccaaagtgctgggattacaggtgtgagccacagcgcctggcccactattttttattataggaacccttcttggttagcataaaccattgggatcatgagctcatgactaaagtaataggataaaattgtatatcaaaggaaaaataartacctgactgatgtggattcaggagaaagatggatctgaattagtaataagatttgattagatagatgggtagagttatgctactgccaaatatatacagtaactattaatagaacttctctaatgttctaattaatagaacatccctaatctctaatggaagagattagggatgatagtcatggcagcaactgctgtggcagctaaaacttagtgtctacatgctttatgctaaacactgtgctaaatactttatcacagattacccattttatggattagaagactcaggcttaaagaagtttaataac

SEQ ID NO: 706239 - DNA, 688 bp, Homo sapiens
tactattcattgttaaacgtttacaggaagctactataatgatttcagcttctataatctattttgatgagcttcaaacatctgtgttttagaacttaattatctgaactagatttgatctgtttttgcatccccacagttggccacagcagtggaacatcctgaatgattatagcctgaacttcccaaagagatttctctgaaaaggtctcactgttcagtaacagaaggtattttatagaaaacaagcacaattacacaagtggctaggttcaagatttaatgtgtacatggtacctacatgaataaacatttttccactatatctcaaaaatggaaaatgaaaagaaatggctttctaaattaatatagtaaagttcacaagaaagttataaaacctgacattataaagaaataaaaactcacaaaagcctgatattaaaccttcccttctacacgggctttggattttggmgggaaaatcccacgagactgactaatatttgtacagactaacagtttataaaacactttatatgttatttcttttcatcctctatagcaatgattctcagctagggcaatttcctccctccagggacatctgggaatgtctggagacatgtttagttgtcacgacttgtggtaggagagttgctactggcaactagtgggcagaggtcagtga

SEQ ID NO: 706240 - DNA, 589 bp, Homo sapiens
tgccaacacagtgctccctgcgtgacaggtatatatttaatcctcacaacaataacaacccatgaggtaggtgcaattagtgtcctcctttaacaggagactgaggctgagagaggcttgccttcctaacatccatcatacagccagcaaatggcagagccagaaaatgaatgcaggcagcctgactcctgcattcacattctggctctgctctttgctggctgtatgatgcctgcagagctcaggctttgcagcaatccaggtcaggataatggtgaccaaggattgtggtaagcagaataaagcctcgcctaccaaagrtgtccactccctaattcccagcacctgtgactacattaggctgcatggcaaaaggggattaaggttgcagatggaaacttttaactcaccttaaaatatggagactgttctggaccatctgggtggcctaaagtaatcaaagggtccttaagagtggaaaagggaggcagaaaaaaaggatcagagaaagaaatgtgatcatgaaagccaggcagagagctgtaacattgctggatgtggagataggggaaggggccacaagtcaagg

SEQ ID NO: 706241 - DNA, 978 bp, Homo sapiens
tgagaaagcaagtacttagattttccaaacctctatagtagatgctggcaatggagaaggaggttgggaatgggtatcgggtaaaccaaaacaactgtgtctgccacactctctgggccctttgatgaccttacaggtagagtggcacagtggaaaagtcactggactgggagtcagaattgctgagttctaatctgagccaaaccacaaggtgtttgactttggacagttgctttacctccctggaccttggatatctaatggactcttggagaacactagaaacagatattgcgaactatcgatattcattcaattcacatctattaagcaccctgaatatcaccagacatgctaccaaaggctgcaagagatagaaaagtaagagaaagggtatcccttcttgcatggatcctgtatgtcttatgctttgagctgcagataacaaaaaatacagcttgagttggtttaaatagcaagggaaaccattatttcactgaagtccagatttagagtaggctgcggggttggttgattcggaagctccgcaatatcaccaggaactcactccttagggttaggctgctctaccagcctcasggctggcctcatcctcagcagttttaggcgtgtccaggcatggcaatgtccagaggaggagagagcaataactgatctggaaatgaagaaaccttcccaaaaagcccctcggtagacttcccctcacattattggtcaaagcagtgtcacagcccaatcctgctcaattattagcaaagagaagaggatggcatgattaacttacacacattcttacggagggaatgaatgttggaaaatcagccataatgttcattacattagcaataatgacaataacagcaataataacagcaaatgtttgtttattgattgattgattgattttgagacggtgttttgttcttgttgccgaggctggagtgcaatggcatgatc

SEQ ID NO: 706242 - DNA, 811 bp, Homo sapiens
gaaagtgcttagtgcagaagagccacgcaacaaaactgtctttgttttcactccataggtccttggaaagccaagaacaataaaggaaggggtaaggattcatcatttgctccacacataacacatgacagactctgaaagcctcttgtatataacaccccatttggtaccgcccaacattctcatgtggaataagaggccatattatcccctggttttaactgaaggcattgtggtgacaagactgagccaggttcacgcagagctgggaggcaggagcaggtaaatgcatataaggaggtttttggagaacaagaaattagaggaagttgagtttytctctcacatccttgctccagaattgcaaaggttacattttcatccctttggtaattgtcaggtctctgagctcaagctaagccatcatatcccctgtgacctgcacatacacatccagatggctggttcctgccttaactgatgacattccacccccaaaagaagtgaaaatggcctgttcctgccttaactgttgacattatcttgtgaaattccttttcctggctcatcctggctcaaaagctcccctactgagcaccttgtgacgccccccactcctgcctgccagagaacaaccaccatttgactgtaattttcctttacctacccaaatattataaaacggccccaccccatctcccttcactgactctcttttcggactcagcccatctgcacccaggtgaaataaacagccatgttgctcacacaaagcctgtttggtggtctcttcacagggacgcgcatgaaa

SEQ ID NO: 706243 - DNA, 1529 bp, Homo sapiens
tctgttctgattccaagaatctgatgattatccaatcacacaggataatgtgtgccaggtagtaggagttcagagatgaataagccagtgtcttccttccagaggtttatggtcttgtcatctaagctggtattctagcagcataaaacaaaggattttttcctgtttgataaatcagagagatattgttctgcccacatatcagcttgtcattaggcaattgacttaccctttgagggtctcagttacttcatctataaaatgtaggccagtatacttactcccaaggggcttctgatgaatgataaaatacatgaaattgtccaacctcatgtccaatacatggcagatgctcaacaaatattagttacacattttatttgtaaaataaagaattctatttttattgaaaaccaaggagataaagtggcatgttctagcattggggaaaaagagaggtgaagataattaataatcctgttacctcttgcattttttcccacccagcccaactcacagaaggaaagaacatgtgagggggaaaggtggtcaacactagaccaggatccagacaatgggagagaggagaggtctatgtttgctcaacatatatccccagcatctagtataattcctgactcaaagcaggcgctctgtaaatctttgttgaatgtattatctgcaaattggaatctgcattaagcaactatataaagaaagatgtgtagttctggaattgaataatgcacatatccagtggccaaaacccaccaagatggttgaaggaactaaggatgtttaagcttgggaaagaacccacagagatgtgatttctgccatcaaatatttaaagcatcatcttgagaacaactgaattgacttgatccatggggctccaggaaaatgtgctaagagcaacaggaacaagttacatggaggtgaatttcagttcagttctcttttagagcagtttctcccatgctgcttcatttgagggtggcctcaaatatgattgcattgtctatcactggtatgttctagtacagtatcacataatgggctcttgcgtatcaaatggacaagtagaaagataatctttaagttctaggtttctctggtggatacttgtggttttagtctggcacatgcctccttttcatgaacttcccttccttcctccaggttgttttggtgaggttgccaatcacaaggctgcactccatgcctcacaccttcatccctcacaccttcatccctatccctggagcagtgggcttgacagcagctaggaaaatcagcatctcttgatgaggtggaatttgtcttaagcaagggcgcacaaagtcagaaagtccttgccgttggtaatctgatggcagccactcttggaaccagttcawgtgtttctaatgctgaggtgtcctggcgtcccctggttcctgtcctttctgccggctgttggttcagcaaatactttaatattatgagttactcaatagcctttgaataagcccctccattacttaaac

SEQ ID NO: 706244 - DNA, 589 bp, Homo sapiens
aaatagaatgaaatcgtagatgttgaatcaagtgaacagggaattagggtttcccatttctctctctcctcatgcgaagagccaaggagactagaaactggatacaagcaatccactttaaggtgggtgatgaggcagggctacacgtgaacacgaaggacatcccgaaactcaatgaaagtcgtatttattacacacagacttacattaactgataactaaatgcataggaagttastagtctcaaatgttttgtgttagaaaaaagctttactattcaagccaacaactggaattgctctctatgactagaagactgtgggtgctgaaactagagattatttttgttttatttagcatgaccatatgtattttctgtctgaagaatctacagtgtagtagatccaatgtagtaaatttgtaatacgaaaaaaaaaacagctctgaaagttttacaaaaattattaaactaggagtagctacttgtcaaccttggttaagaggaggtattgtctttcctgtaggatcacagtgacagagacaaacaaagctcttcaataaacactggctgaatgagtgtgaatggaca

SEQ ID NO: 706245 - DNA, 545 bp, Homo sapiens
aatccaaaaccaacatactataaagctaactaaataaatgaatgatattagctttaggttccaagtgaggcagcattttttaggcagtagttctctggctcacattttatgcggatacagtatttcactttgagttcaattctttatttgatatttgtttagaataaaactacctagccccgggctttaaatctcaatctgaatctctctctctctctctcacacacacacacacacacacacacacacacacacacacacacacacacasagagagcatacatacacacacagaggagagagaaaaaatatatatatatgtataaaatatatatattttgtgggttttttttttttttttttgagacagagtcttgctttgtcacccaggctggagtgcagtggcacaatctcggctcactgcaagctccgccttccaggttcacgccattctcctgcctcagcctcccaagtagctgggactacaggcgcctgccaccacgcctggctaattttttgtttttttagtagagacggggtttcac

SEQ ID NO: 706246 - DNA, 545 bp, Homo sapiens
aatccaaaaccaacatactataaagctaactaaataaatgaatgatattagctttaggttccaagtgaggcagcattttttaggcagtagttctctggctcacattttatgcggatacagtatttcactttgagttcaattctttatttgatatttgtttagaataaaactacctagccccgggctttaaatctcaatctgaatctctctctctctctctcacacacacacacacacacacacacacacacacacacacacacacacacagagagagcatacatacacacacagaggagagagaaaaaawatatatatatgtataaaatatatatattttgtgggttttttttttttttttttgagacagagtcttgctttgtcacccaggctggagtgcagtggcacaatctcggctcactgcaagctccgccttccaggttcacgccattctcctgcctcagcctcccaagtagctgggactacaggcgcctgccaccacgcctggctaattttttgtttttttagtagagacggggtttcac

SEQ ID NO: 706247 - DNA, 988 bp, Homo sapiens
tgcctcccctgttcaagcaattctcccgcctcagcatcctgagtagctgggattacaggcatgcgccaccacacctggctaattttttttttttgtatttttagtagagacgggtttctccatgttggtcaggctggtctcgaactcctgacctcaggtgatccgcccacctcggcctcccaaagtgctgggattacaggcatgagccactgcacccggccagcataaacttctttctggactatgcccactcacctcacttaaggaatagtataatgatccaacataccatgctaggacaagggtagcatggtaggtttcaagtgacggcccagactccagaggctttggaacaaagaaaaaatagactcccacggtgttttgctgcttgagttctgccccttctcatccagagagaaaatctggattgcaagtcatgactgtctaacatttgaaaacttgtgaaacatatatwtttttttaatttgagtttgaaaatctgatgtgggcaccagagtcatgacggtaaccagatttccagggtaaacagctagtagatatgattggacacctgtctttcagttagagcctagaagtctgttggtgtcctggctgtaataagactgtatctgaaagcctgtaaaagtttcagaaaggtgaagtagagtaaaagatttgcagggatttttgtcagtgtttcttttgtttaagtaaattccttgggttgggaatcataaatcccatgagtaaacggaagagaaaccaatggcccacagcagtatgtcatgtgtctgaagaatggtgaatattctgatttttaaaaatcattaggatgggaatttttatttttccctacagtgaattttacatatgtatttgtctctgcctctgcttttgtcccctggctagagacaattctctgtgtgtatttaaatgagaaaagcctttactccctcctcatagaggaaaagaaattagtcatgaagga

SEQ ID NO: 706248 - DNA, 634 bp, Homo sapiens
taacattaaggggttactgttgtcgtggtgttgttgcttgttggttggtttttcatttatttctttaatgattttgcagaattgattgcgcaaatatttttcctgcaatatgtaacctcctttgtcctgaatccgttttttttttttttcttctagttttgatcttttagtctggctactgaggggtcacctctatgtcaggttagtcatttattggacacaaattgttctatagcactcttagccwgttacattttcattctataccattagacatatgtatgtggcgccattgtagttttatgagtttatatgtttccgtatgttcatccagaaactagtagattagtttttccctcttttattattcttgtgatagcatattcttagaaatgaacacagtgttttagattaattgatatttttagagtaacgaggcagccatgagcagagcaggagagggcaccagcccccaccagaaatgtcaggtgaccaccaggtgatagtcatggtttttaaactgtctctctaaaataagaattggtcatagttgatgccagggaaaggcagtttccgaatagataaaaaacatctgaagctggtgatcaacagcttcctgataagatctcgggag

SEQ ID NO: 706249 - DNA, 674 bp, Homo sapiens
tacttgcttattttagtccgttgagaacttgattttacagtacactaattttaagaaatttatttcatgtaaaggagcctgaccattctaatgacccgatagagatgttaatcaaatggttttatatgattcagtaatacttttttccctttagtacagcagttttatttccaagattctattgtatagatatactagcagtaaaatgcaaaaaacatatatatgttattaattacaacataactgattataagactgaaaaaatcagaaaaaaaataaatttatattgatagcaatggttgaatccatactggaaatactacacagcgttgaaaatraggtgaatctacatgttctgatctggaagcatctcaaaattgtaatcaagtgaaaaataaaaggtacagaagtgtatatgatatacttccacctacagaaaaaacagaataaggtaatacataaagttatataaaacatacatttttatatgttcataaaacattttaattcagtaatactttaaagtgtttatcatcctaaagacaatgatgcagatctaattcaacgagtgctactaaagcaattacactgccacttgtttgagaaaattaagacattcattaattaatatccctcttcattatagtacaactttctcaggtctaccataacca

SEQ ID NO: 706250 - DNA, 665 bp, Homo sapiens
gctgaaatataagctcaactgcaaggaaatagcaagaagcagagagtgagggatgagaaattacccattgggtacgatgtacactatttgcatgatagttacactaaaagaccagaccaccactatgcaatatatccatgtaataaaactcttcttgtaccccctaaatcyataaaaataaaaatggagaaaaataaaaaatggaaaattttttaagaggaaggaataaagaaaagataataggaaacagataaaatctcaagactaaagggtcatgttaccttctgttttaccaaaattgtgattctacatgttgttgaagagaaataacttactagcctacaaaattaacaaatgtgaatttttatttatcattttatttttaaattgacacatagaaattgtgtatatttactgtgtgcccacatgttgttttgaaatatgtatacattgcatcatagctaattcaagaaaattagcatatgtataacctcatatacttattttattgtgagaacacttaaaactactctactgtctcaacagttttcaagaacacaatattttgttattaactataatcatcatgttgtacaatagatctcttgaacttgttcctcctaactaaaattttgtatcctttgaccaacatctccccaaaccgt

SEQ ID NO: 706251 - DNA, 1551 bp, Homo sapiens
atttccttattttagaggcttacctcctaaaagatttctgaaaaaaacaaaacgggacctttttgagactttgcttttaggatcttttctttaccctggtgttctgaaattgtatagtgatgttccttgcctagagtttcttatttgttttatcctctttctccaccttctttcctctcctcctcccctacccctctgcaccttctccacaaccacctggattatgacccggtactttatttttgactccccatgttatccatgtctgtcttttttgttctactttatgaagatttccttaattttagcttttcatcctttactgattgcttttatttctggtgtcattaatttccaagagcttgtacttattttttgtctttttaaaaaaaatcctgtttactttctttgcagttttctgtatttcatcagaatgttttttttttcatgttatgtgttcatttttggcctctgtcttctatgttagaggcttccttcaaatctctgatttttttttttttttttttttttttgctgtccattcacattgaagagtcttgtaccaaaatttgattatgaaagtccttgttgacatggcttgtcaactgacagccgttaactgggtgcttaagtaagcagcattttcttcagatgaagaatttctttaatcttttttcctgaggtgaggtgggactacaggaagagaagcccggttggcagctttttaggcctcrgaggaggaagggggctgaaggtctgtgttttgtttacatcaactttccatttcatgtgttttgctcctaccctttgccactctagagcctggtcccctaagtccagagcctctgctaatgtctcaggagacttcctttactgtcttctgtgttggtggatgcagggacctggagagcagtgctccatattgaaaccttcaggacagcaaggtccacagctctttcccttggtgtcaaccgctgtctgcactaacctctctgtctttaatctcttagctgctctcatgccttttaaaaatttttctcccaaattaaaagtggctttagtttttctgtagtgaaaacaatcagtacatgtttatacatacactcatgcagttttatgtaagtaggactttggtatctgtttttctgtaactatacattatgtattatcaaggagatctaagctatatgcataatgatttttgtatttaattaacaaaaaatttttttgtcttctgtttttgctgctgtaatacatagcatcatttacctaaccagtcctctaaagggcattttggcttcctgttttcttaatataaacactatgatgaacatccttgtacatacatttttgtgtacttccccaattatgcttgtcttgctagaataaacttcgagtagttgaagtattgggtcagataaatttttttttgtattttgttgagtatactctttctgaaggatacgccagtaccctgagtacccgattttatataaccttcccagtattagaattaacacattttgaaacatctttttgcctattgaacag

SEQ ID NO: 706252 - DNA, 2029 bp, Homo sapiens
gtgaaggagggaagcctattctcttttctcacggctccttgataagagatgcaccaaccatggggcttctgagaatgagggagaccatcatcacagggagatgcaaaggtaaggagagagaaaagaggctttcatgtgctgacgatggggtggaagggcagtaagacaggagacttgagaaatgggaattgcagcaaggagctatcaagacaagaaatgtgtaaagagaatgaactagaagttaggagaaaaaaatggatagatggaagctggggaatagacagggtatgggagagctagaactagagaaagagtggtgaatgacaaagcaattgtgttacttcaccgtgtcccagttgtgtgcttctcttggggaacctggggcctctcattgtttagcgactttagcccagcttgagatcctgggtcagctgcccaggctcatttatttatttataaaatgcaacctatcaaacttagaatctaatgaagattcttcccttggcataatagggccaatctgggcatagggcatgatctggttcctaacccactctccaacctcattgcctcctactcacccttttgctcaatccacactgggtttcttactgtacatcagacattcttatcctgcatttggccttaacatgagttgttctttaagcctataatgctctttgggcaaatatttacatgtctgtattcctcagtttattcagatctctgctcaactgttacctgctcctaaaagccttccctgacaaacctattgaaaacagcttttcttatcaatcttcatgcccaaactgtttttttaatcattaattactatctaacttcacacatgtatgcattgattcattcaatcatatatttatctttgccatttagaagataagatccatgtgttgggagagatttctccatgagtctcacatttctgccttttgtgtgaacagagacatagactttgttgccgatgatctcttctagtccatttgtatagtaaacaccctggaaagtggagagagtgtctcactccagagcaaagaccaggaaagcttagtgaccarttagaaaagatttagattccctaaactcagtgttcttttcctgtaatacaacccactgcgtgttcccctgtcacctggttccatgggtcccagttctcacaaggtgatgccagtgcaagaagaggctgttactctgcatccactgaaaatgtttcaggctaacttttagcttgcaactagggtaaaatgctttaagagtggatactcagctatttaattacatttaattacatcttggtaaaggtccttcccacccttcccacactgctacctgtgctcagattccctgttcctctattagccactattggtgtctagagcacaataaattgcaaccgccctcagtgaagcatcccaagaccaaatcaggactcatatgtcatagcttagggaaatttccaaccagtggggctgatctcaaatctcctatctcccccagatttgcacccaggaagtcaatttagataatcccctgacttttccccaatgcctgcagagtttgaattttatctgtgggagttatttatagagagttttctttgtgcatgagcaagactgaaaatttacaatgttgttttggtatctccctgatcctcagctgtcttaagaacatttgattcaaagggcagttttgtagctaatgctagtggatcagttggtgagactgaattgctgttttgcctgacttaacctaagtatggttttaaagaggtataattatttctttgcattggtaatagaggcacatgcaacaaacattatccccaaaggtctatgtaattgagttattatagatcaatttgtattttctcattcaattacattacaattttagaggtaatagtacttattctcagtgcttaatggtctacaaatggaagtgattactgcctcaattgtcattttccaaatgcttattgaacacctataatgtcccaagaatagcattaggc

SEQ ID NO: 706253 - DNA, 612 bp, Homo sapiens
ggtgcaggtagaggtaaggaaatggattttggcgtctgatagttctggcttcaagtcctgcctctgactcaccccagctatgatgcttcatgtcacttcatttaacctgcttctttatctgcaaaataggattagcaggccacrtcccagggttctgtgacagttcattaaatcatataactcatgcatgtgaaatgcttaatacagtacatgaaggcagctgcaatgatgatggttaattcaccaattcccatgtcccttgctgcccagggcagcggacctgtgtgggcgggttgttgcccagtatctaccccttcccagataaccttgatcttggtttggagatccatgtagttccagggactgtctccacttctgatgccagggaggggcaaaactaagtcattaagtgcatttcagtgattggtttaaggttgggcatatgacccagacctgtcacatgtttgtcttgggaacttctggcaagtgtcttgtgcctataaaagaagccagtcttaaaaatggcagaccaagtgagagaaaaataactgggctcttgctggcactggttagctgctggatcaagcctttcctgaaggacctttcaataat

SEQ ID NO: 706254 - DNA, 1099 bp, Homo sapiens
atcagggctctcctcccatcctgaccccactaatcagcaatgtgcttttaaaccttccactgtactcctttattagacatacttcacatttttctataacgtagggctttaaagactcactggatatgcctctaagaggcaagtgtctaacttcacagaagtttacccattctgttccaagctagttctaatgcacaaattacctgatggcagcaaaacaagaagtgcagggagattctaggagaaacttaggtagagccgcaagaatgcagtactcaactttgaaaggcggacttaagaatacacatttcaggccgggcgcagtggctcacgcctataatcccagcacttagggaggccgcaacgggcggatcacctraggtcaggagttcaagaccagcctggccaacatggtgaaaccccatctctactaaaaatacaaaaattagccaggcacggtggctcacgcctgtagtcccagctacttgggaggctgaggcatgagaattgcagagattgcagcaagccgagatcacgccactgcactccagcctgggcgacagagtaagatctggtctcgaaaaaaaagtaataatacagatttaagaggtaaaactggacctaacacagcactgtaagcaccacaaaaggagaggccaggaatgcaggtttcacgcccagctctgctaccatacagctgtgtggtgacaggcaaaggtcatctaaatgtcctcacctttcctcaccatgtgcaagatgcagggatttaaactagctagtctcaattctgtgattgtgacatatgaactaaaaaggattacaaattgttccccacccagttctccatcttagcctattttcaatcccactatctaaataaatacaatgtagaataacaatcatctcaatacaacattgtgtatgaactgtccaagttgtgcactgcacaagggtaccacatccaaggcagtactatttgctcacaaaatagatctgtgtatttactgtaacagttctagcaggtagcaaccaaatgccttgctttggaaaataaaatcactaaattattacaagtcgttcataaagtatctttggaagg

SEQ ID NO: 706255 - DNA, 1393 bp, Homo sapiens
taaactttgaaatctgaaaatactaattttcaaccacaagtagccataaattatcttttctcgccaggcgcagtggttcacacctgtaatcccagcactttgggaggccaaggcgggcggatcacctgaggtcagaagttcgagaccagcctgaccaacatggagaaaccctacctctactaaaatacaaaaaaattagccgggtatggtggcgcatgcctgtaatcccagctactcagaaggctgaggcagaagaatcgcttgaacctgggaggcggaggttgcggtgagccgagattgcaccattgcactccagcctgggcaacaacagcaaaactccatctcaacaaaaaaaaaaaataaaaattttctctgtgcctttggacacaaatgaacacagaagaaaacccctcatttatcatgacattatgggtcattgttttctctatattccaaatttaatataccattacttttatgattttaatgtattaaaaatttctctaatctttactgtctctccatttcacgttctcaattaaatccaaatagttcctcgtggtacacagtgtaacaccacattccatggaagcaacatgttaacttgcaaacagtaacagtaactcaaagcacaaagtttwgaattcctacattctaaagatactctaaaggatatctttctgagattttcctctggctaactgagctgataataagacggcacatagagaaaagtcagaaattaagatgtgcagccactcttgaaaacaagaaatagcactgaggaattaggtacatttaaggaagaaagtaatttgttcttacaatttggatagctgacaaatgtcaatactgtgagcagataatagttcactctcaaaatattttcagatacagtttaaaataagctatctatcgtaagaaactaaacatgttattagacacataaattgaatatgccttcaaatatcaagagagtaataataataaatactgtaaatggcttatgaccttataaccttaggcatatttaggaaactctaggctttaaaaaggagcaggtaggggtgaagggagagaatcagtgggcatgattcctatgaattcattcccttagtccctccccaaccactaatgcagtccccagttctctgcaaggtgcacgcatcaggattttagttcaatttggagcttgtatgatgcactctagtctcactctacttcatctactacactgttcacccagggtactccaaactcctatttgccgacccaggtctgggactgctccttggtcaagcatcgacaatcattatattcaatcctgctaactaataacaaaaggcaagtactttgctcatgtgctagtttctcaaaatgtccacaagagaca

SEQ ID NO: 706256 - DNA, 1393 bp, Homo sapiens
taaactttgaaatctgaaaatactaattttcaaccacaagtagccataaattatcttttctcgccaggcgcagtggttcacacctgtaatcccagcactttgggaggccaaggcgggcggatcacctgaggtcagaagttcgagaccagcctgaccaacatggagaaaccctacctctactaaaatacaaaaaaattagccgggtatggtggcgcatgcctgtaatcccagctactcagaaggctgaggcagaagaatcgcttgaacctgggaggcggaggttgcggtgagccgagattgcaccattgcactccagcctgggcaacaacagcaaaactccatctcaacaaaaaaaaaaaataaaaattttctctgtgcctttggacacaaatgaacacagaagaaaacccctcatttatcatgacattatgggtcattgttttctctatattccaaatttaatataccattacttttatgattttaatgtattaaaaatttctctaatctttactgtctctccatttcacgttctcaattaaatccaaatagttcctcgtggtacacagtgtaacaccacattccatggaagcaacatgttaacttgcaaacagtaacagtaactcaaagcacaaagtttagaattcctacattctaaagatactctaaaggatatctttctgagattttcctctggctaactgagctgataataagacggcacatagagaaaagtcagaaattaagatgtgcagccactcttgaaaacaagaaatagcactgaggaattaggtacatttaaggaagaaagtaatttgttcttacaatttggatagctgacaaatgtcaatactgtgagcagataatagttcactctcaaaatattttcagatacagtttaaaataagctatctatcgtaagaaactaaacatgttattagacacataaattgaataygccttcaaatatcaagagagtaataataataaatactgtaaatggcttatgaccttataaccttaggcatatttaggaaactctaggctttaaaaaggagcaggtaggggtgaagggagagaatcagtgggcatgattcctatgaattcattcccttagtccctccccaaccactaatgcagtccccagttctctgcaaggtgcacgcatcaggattttagttcaatttggagcttgtatgatgcactctagtctcactctacttcatctactacactgttcacccagggtactccaaactcctatttgccgacccaggtctgggactgctccttggtcaagcatcgacaatcattatattcaatcctgctaactaataacaaaaggcaagtactttgctcatgtgctagtttctcaaaatgtccacaagagaca

SEQ ID NO: 706257 - DNA, 1393 bp, Homo sapiens
taaactttgaaatctgaaaatactaattttcaaccacaagtagccataaattatcttttctcgccaggcgcagtggttcacacctgtaatcccagcactttgggaggccaaggcgggcggatcacctgaggtcagaagttcgagaccagcctgaccaacatggagaaaccctacctctactaaaatacaaaaaaattagccgggtatggtggcgcatgcctgtaatcccagctactcagaaggctgaggcagaagaatcgcttgaacctgggaggcggaggttgcggtgagccgagattgcaccattgcactccagcctgggcaacaacagcaaaactccatctcaacaaaaaaaaaaaataaaaattttctctgtgcctttggacacaaatgaacacagaagaaaacccctcatttatcatgacattatgggtcattgttttctctatattccaaatttaatataccattacttttatgattttaatgtattaaaaatttctctaatctttactgtctctccatttcacgttctcaattaaatccaaatagttcctcgtggtacacagtgtaacaccacattccatggaagcaacatgttaacttgcaaacagtaacagtaactcaaagcacaaagtttagaattcctacattctaaagatactctaaaggatatctttctgagattttcctctggctaactgagctgataataagacggcacatagagaaaagtcagaaattaagatgtgcagccactcttgaaaacaagaaatagcactgaggaattaggtacatttaaggaagaaagtaatttgttcttacaatttggatagctgacaaatgtcaatactgtgagcagataatagttcactctcaaaatattttcagatacagtttaaaataagctatctatcgtaagaaactaaacatgttattagacacataaattgaatatgccttcaaatatcaagagagtaataataataaatactgtaaatggcttatgaccttataaccttaggcatatttaggaaactctaggctttaaaaaggagcaggtaggggtgaagggagagaatcagtgggcatgattcctatgaattcattcccttagtccctccccaaccactaatgcagtccccagttctctgcaaggtgcacgcatcaggattttagttcaatttggagcttgtatgatgcactcyagtctcactctacttcatctactacactgttcacccagggtactccaaactcctatttgccgacccaggtctgggactgctccttggtcaagcatcgacaatcattatattcaatcctgctaactaataacaaaaggcaagtactttgctcatgtgctagtttctcaaaatgtccacaagagaca

SEQ ID NO: 706258 - DNA, 1393 bp, Homo sapiens
taaactttgaaatctgaaaatactaattttcaaccacaagtagccataaattatcttttctcgccaggcgcagtggttcacacctgtaatcccagcactttgggaggccaaggcgggcggatcacctgaggtcagaagttcgagaccagcctgaccaacatggagaaaccctacctctactaaaatacaaaaaaattagccgggtatggtggcgcatgcctgtaatcccagctactcagaaggctgaggcagaagaatcgcttgaacctgggaggcggaggttgcggtgagccgagattgcaccattgcactccagcctgggcaacaacagcaaaactccatctcaacaaaaaaaaaaaataaaaattttctctgtgcctttggacacaaatgaacacagaagaaaacccctcatttatcatgacattatgggtcattgttttctctatattccaaatttaatataccattacttttatgattttaatgtattaaaaatttctctaatctttactgtctctccatttcacgttctcaattaaatccaaatagttcctcgtggtacacagtgtaacaccacattccatggaagcaacatgttaacttgcaaacagtaacagtaactcaaagcacaaagtttagaattcctacattctaaagatactctaaaggatatctttctgagattttcctctggctaactgagctgataataagacggcacatagagaaaagtcagaaattaagatgtgcagccactcttgaaaacaagaaatagcactgaggaattaggtacatttaaggaagaaagtaatttgttcttacaatttggatagctgacaaatgtcaatactgtgagcagataatagttcactctcaaaatattttcagatacagtttaaaataagctatctatcgtaagaaactaaacatgttattagacacataaattgaatatgccttcaaatatcaagagagtaataataataaatactgtaaatggcttatgaccttataaccttaggcatatttaggaaactctaggctttaaaaaggagcaggtaggggtgaagggagagaatcagtgggcatgattcctatgaattcattcccttagtccctccccaaccactaatgcagtccccagttctctgcaaggtgcacgcatcaggattttagttcaatttggagcttgtatgatgcactctagtctcactctacttcatctactacactgttcacccagggtactccaaactcctatttgccracccaggtctgggactgctccttggtcaagcatcgacaatcattatattcaatcctgctaactaataacaaaaggcaagtactttgctcatgtgctagtttctcaaaatgtccacaagagaca

SEQ ID NO: 706259 - DNA, 1445 bp, Homo sapiens
atccgaaaggcggaggttccggtgagccgaggtcgcgtcactgcactccagcaagaccccgtctcaaaaaaaaaaaaaaaaaaaaaaaaaraaaaaaaaacaagaatgataagttgtaagccaggcaaggtggcgagcgcctgtagtcccatatactctgcaagctgagatgggagaccgattgagcccaggagttccaggctgaagtgcgcttgtgaacagccactgcgctgcagcatgggcgacaaaaaagagtgatgggttctgaaaaatgaccgcttgaaatcaagtctcgtttctgtcattcttgtatggtcttgggtaacgtaattcacctcagttcagtcttccgtacaaccagaataacaacacctacgtgatagtatcgatcgcggattaaagatcatccgtttaaaggctcttaactcaggacctgccactcatcaaacactgcttttactgtcagaatctgctagaaagaccgcttggactacgtgaagccactagcacactggacagctgcaccttgagaccggggagatgctccgagatgtgctcgcgaacaaggccacctgacccgggcactgggctatttcctcgggttcagtcccgcacacttgaggttcagcctggcagacgttggctccagacagcgtttggacccgccgcctccaccacccaaagttccgtgcgggatgagactgtccgcggaagcgagggtgtcgctcgcccccgggcccgggtccgccccgctccgaggcctgctcggaagaaagacctcggtgcgcagttctcgtcgcgctcccacacctggtccgcccagtcggaactcacccctacggggccgcggccggtccctgagcctgagaagaaacagcaaccggcgctcgccagaagtatcctcacttcctgtgttgacgcctaatgatgatataatagccgacctctggcccagaactcaagacgacaggggctcgctctgtgcggcacttcctgtgtctgcgcgggatgatgacgcataaaacagcgcttgctcaggtccaggactccaaaagaaactgcgccgtgagctgcacttccgacttcggcgcgggccggggcgccgagcagagcgacgccgacttttggagcagtttgcgcctgcgcggaacgcgtggccggcttccggaatcctaccgggacttttccggtagcgaagcccgcgcctgtgccaaggcttgcgagcagaatgccttcgcgatggacgcccgcattccacccccttgaccgctgggacccctagtggcgggtgggtggagcgcgctccatttacctgctggttacctcgtgaggcgcctcaggtctgtgtgtcttgtaaaggccgatctcggaatttaactctgaaccttactcagaaacaaagcagggagagctcttacgatgtgattttattttatttattcatg

SEQ ID NO: 706260 - DNA, 628 bp, Homo sapiens
ttcactaacttaaacaatggaaaatagtataggtatttttagttataattttactcaattgcaggttcacagaaaccttgagttattcaagacagatacctgtcttctctctctttaacattcatgatgttcagaaatagataagatgcaggtgaaaatatggcaaagagcctgtctacacagcctcatcataaaaaacatgattagaaaagaactgagatctctcaggcagccgggtaaattggctgagactgaggctctcagacccagacaccatggcatcaaatggagttgggccacaccagctgtgtggcctgggacaagttacttaacctctctgggtgttagttyccatgtctgttcaatgatggttaataatacataccctccaagattcttgtgagaataaaagctatattaaatgtcaaaccttttttttttttttaaaaaaaagcacaatgtttggacatagtaagcttgtatttattgatttatcaactaaaattgttttcgagtgcttactatgtgcctgacagttttctatgtacgtgcactacgttggacaaaaatcctcacccttatggcacttacagtctggtggtaggagacagtcaggtcaggtaagcaa

SEQ ID NO: 706261 - DNA, 628 bp, Homo sapiens
ttcactaacttaaacaatggaaaatagtataggtatttttagttataattttactcaattgcaggttcacagaaaccttgagttattcaagacagatacctgtcttctctctctttaacattcatgatgttcagaaatagataagatgcaggtgaaaatatggcaaagagcctgtctacacagcctcatcataaaaaacatgattagaaaagaactgagatctctcaggcagccgggtaaattggctgagactgaggctctcagacccagacaccatggcatcaaatggagttgggccacaccagctgtgtggcctgggacaagttacttaacctctctgggtgttagtttccatgtctgttcaatgatggttaataatacataccctccaagattcttgtgagaataaaagctatattaaatgtcaaacctttttttttttttwaaaaaaaagcacaatgtttggacatagtaagcttgtatttattgatttatcaactaaaattgttttcgagtgcttactatgtgcctgacagttttctatgtacgtgcactacgttggacaaaaatcctcacccttatggcacttacagtctggtggtaggagacagtcaggtcaggtaagcaa

SEQ ID NO: 706262 - DNA, 1294 bp, Homo sapiens
gggaaaagcaagactttggaggtagcccttcacaacacatctatctctattacagagaacagaagtcggagaagagcaatcaggagaatacaactattgcaagcaaaagagactttactgaagacaacttgaaatgcaagctaagtgtgcttttctgtggtaattattgataaggaaatgcattttacttcctcagctaagtccaggaatggttagtcacttcggtttttcagaagttaaaggggtaaaaagtctgagtaattcctacacagcgtgttggaattggtagtactttaaaaatgattataatcataattctgagtcatcattaaaccttgctctcagaagacaaaaagcgggtgggggagagagaaatcaaatatagagttctggaagaagaaaatagaaagggtgaggcaatacttaaagagaaaatagagaatttcctgacttaacaaaagacacacatatcttcagaatgaggaaggaaacatttccaagacaggacacacacatcccctggatgcatcagtgtgaaactgtagtgtatcaatgagaaataaatattcacagagaaagaatacttacaaagatactgtaattagtccgacatcagatctcagcaaccgtgttagcacatagtagaaaactgtcttcagtgaactgatagaaaataactgccaacttacaattgtatattcagccaaactcattcaagtacaaaaagagagaaagtaaatgcattcatatgagaaatatacaaatattaaagcaagcattattagagggctttattatcttttgctatgtaataagccattccaaaacacagtgacttaaaataacaatcatttatttagttcacaactgggaagtttggcaatttggcctggactgaacatggtggttccctggttccagagaccagttgtccctttgaattaaaagctcactgaggcagcagccaccatcttccagtggtcagtctagcaaaccttgcaatttgctcaaaaaacagggcacttgatgaagtggaataatggagagccaacagggctccagacctggtatgctgtacccctagtgtggattgctggtcctgatggattcttgtaacytgtttgtgcagagggagattgagtgattgggaactgtgcaatgctccaaatcaaacacatgtatgaaacacacatgtagtcatttcctagggttgctaagcaccaaaaccagatggtataaaacatacgagtccggcatggtaatgtgcaatgctccaaatcaaacacatgtatga

SEQ ID NO: 706263 - DNA, 858 bp, Homo sapiens
tacaattaaataaagtaacgtataataaagccttaccttagcgtagtgcaaaagggagttggcaaaaaaacgacacaatttgagtgttttctgaaataatctgtagtcagcattatcctgatccaaaaagggaaataagaaagcataataaataagaaaagaatataaaattagctaagcttacaaatgagacaatattttctaaaaacaaaaacaaaaaaaacccctcttaaacacagtataaaatttttccgagaaaatataactcctctttgaattattaggtgcgatacaaataacaaatgacaacagaggtattaaattaaattctacattactgaaaagaaaagaaatcttaacctacgatagcaaaagaggtgatccttctcagttgatctgaaagtgaaagaaatttaaataccttattctttgttacatggggatcaatttaacggatggtcaaaagaaaaaggtcttacaaatcaaagaaagaatgatatataaaagaaaacaggtaaagacataaaaacacattacacaaaaaagacaaaacaaactgctactgaaaaatatccaaattataacytaattatatatatttcgggaagggggaggtttgagggttatttgattagcaaagattaaaaagactgataatatccctgcactagtaaggaagtaagttaacaagcactttcttttaccattggtgggagcataaaataatacattattattaaaagttgaaatgttaaaacaccttaattgagtagcaattcaatttctggaaatacagtctatagaaatactagcataggtatgcaatgtgacatatttggctgctctgcctatggagta

SEQ ID NO: 706264 - DNA, 1456 bp, Homo sapiens
tgaggtgggaggattgcttgagcctgagaagtcaaggttgcaatgagccactgtactccagcctgggcaacagagcaagatccttgtctcaaaaaaacaaacaaacacaatctcactcatttatttacacattgtggctgtgttcacaacaacagcagagttaagtgatcacaacagagatttcattgcctaagctgaaaatatctcctatctggtccctcaccaagaagatatttgctgacctctgtctacaatgatcacaggttctcaaatgtggctgtacataggaatcacctacggagttttaatgtctagttcccactcctagagatgtctggtatctgatgtcygatgtctggtgtctggaccttattcctagagactctgatgtagctggtgtgggattcagctggggcattggaatttttataaacttcccaaatgatcatgatgtgcatttgagacttgctggtctagtagacatcgccctagcccctgcacccgcacctgtccttacatccagtgaagacttcactttagcagaggctctgcttccagatgtctgcctttatcagctgctctaggaaaacaagacaggcccagccaggacctaagacatgcccctctccaaaggggcattttggagatgtatcttagtctattcaggctgctataacaaacagccatagaccaggttgtttataaacaacagaaatgtatttctcacagttctggaggctgggaagtcctacatcaaactgtgggcagatttggtgtttggtgaggacccacttcctggttcctagatggctgtcttctcgctgttatcttcatatggcagaagagacaagagagttttctggcatctctttgataagaacactaattccagttggcaggggtcgtgtgggggtgtgggacatgaacactcagttgatagcagtaagttcacgtggatgtgtaaagttcagcatgcccatttacaatagctcagtgtacattcttgtcccttcccagctaaacctcaccaggtctgaccttcctaacaagtccatctggctcccaaccctactgagagaatctgaaccattctctggactgaaccatagcatgaagccacacacgagatatcatctagaaagaaaatgtgaattgtcctttctggaaaaaaggaaaagagagagagaattgctagcagtagaaagtgggttttcaggcctcagtttccaagagcagtgtataggtccttggcagcaagtcccaactgaagtgcccaggagtaccctggttaaaacacttgcatagttctggccaggcatggtggctcatgcctgtaatcccagctctttgggaggccgaggtgggcagatcacctgaggtcaggagtttgagaccagcctgaccaacatggggaaaccctgtcgctactaaaaaaaaatacaaaattagttgggca

SEQ ID NO: 706265 - DNA, 1456 bp, Homo sapiens
tgaggtgggaggattgcttgagcctgagaagtcaaggttgcaatgagccactgtactccagcctgggcaacagagcaagatccttgtctcaaaaaaacaaacaaacacaatctcactcatttatttacacattgtggctgtgttcacaacaacagcagagttaagtgatcacaacagagatttcattgcctaagctgaaaatatctcctatctggtccctcaccaagaagatatttgctgacctctgtctacaatgatcacaggttctcaaatgtggctgtacataggaatcacctacggagttttaatgtctagttcccactcctagagatgtctggtatctgatgtccgatgtctggtgtctggaccttattcctagagactctgatgtagctggtgtgggattcagctggggcattggaatttttataaacttcccaaatgatcatgatgtgcatttgagacttgctggtctagtagacatcgccctagcccctgcacccgcacctgtccttacatccagtgaagacttcactttagcagaggctctgcttccagatgtctgcctttatcagctgctctaggaaaacaagacaggcccagccaggacctaagacatgcccctctccaaaggggcattttggagatgtatcttagtctattcaggctgctataacaaacagccatagaccaggttgtttataaacaacagaaatgtatttctcacagttctggaggctgggaagtcctacatcaaactgtgggcagatttggtgtttggtgaggacccacttcctggttcctagatggctgtcttctcgctgttatcttcatatggcagaagagacaagagagttttctggcatctctttgataagaacactaattccagttggcaggggtcgtgtgggggtgtgggacatgaacactcagttgatagcagtaagttcacgtggatgtgtaaagttcagcatgcccatttacaatagctcagtgtacattcttgtcccttcccagctaaacctcaccaggtctgaccttcctaacaagtccatctggctcccaaccctactgagagaatctgaaccattctctggactgaaccatagcatgaagccacacacgagatatcatctagaaagaaaatgtgaattgtcctttctggaaaaaaggaaaagagagagagaattgctagcagtagaaagtgggttttcaggcctcaktttccaagagcagtgtataggtccttggcagcaagtcccaactgaagtgcccaggagtaccctggttaaaacacttgcatagttctggccaggcatggtggctcatgcctgtaatcccagctctttgggaggccgaggtgggcagatcacctgaggtcaggagtttgagaccagcctgaccaacatggggaaaccctgtcgctactaaaaaaaaatacaaaattagttgggca

SEQ ID NO: 706266 - DNA, 1456 bp, Homo sapiens
tgaggtgggaggattgcttgagcctgagaagtcaaggttgcaatgagccactgtactccagcctgggcaacagagcaagatccttgtctcaaaaaaacaaacaaacacaatctcactcatttatttacacattgtggctgtgttcacaacaacagcagagttaagtgatcacaacagagatttcattgcctaagctgaaaatatctcctatctggtccctcaccaagaagatatttgctgacctctgtctacaatgatcacaggttctcaaatgtggctgtacataggaatcacctacggagttttaatgtctagttcccactcctagagatgtctggtatctgatgtccgatgtctggtgtctggaccttattcctagagactctgatgtagctggtgtgggattcagctggggcattggaatttttataaacttcccaaatgatcatgatgtgcatttgagacttgctggtctagtagacatcgccctagcccctgcacccgcacctgtccttacatccagtgaagacttcactttagcagaggctctgcttccagatgtctgcctttatcagctgctctaggaaaacaagacaggcccagccaggacctaagacatgcccctctccaaaggggcattttggagatgtatcttagtctattcaggctgctataacaaacagccatagaccaggttgtttataaacaacagaaatgtatttctcacagttctggaggctgggaagtcctacatcaaactgtgggcagatttggtgtttggtgaggacccacttcctggttcctagatggctgtcttctcgctgttatcttcatatggcagaagagacaagagagttttctggcatctctttgataagaacactaattccagttggcaggggtcgtgtgggggtgtgggacatgaacactcagttgatagcagtaagttcacgtggatgtgtaaagttcagcatgcccatttacaatagctcagtgtacattcttgtcccttcccagctaaacctcaccaggtctgaccttcctaacaagtccatctggctcccaaccctactgagagaatctgaaccattctctggactgaaccatagcatgaagccacacacgagatatcatctagaaagaaaatgtgaattgtcctttctggaaaaaaggaaaagagagagagaattgctagcagtagaaagtgggttttcaggcctcagtttccaagagcagtgtataggtccttggcagcaagtcccaactgaagtgcccaggagtaccctggttaaaacacttgcatagttctggccaggcatggtggctcatgcctgtaatcccagctctttgggaggccgaggtgggcagatcacctgaggtcaggagtttgagaccagcctgaccaacatggggaaaccctgtckctactaaaaaaaaatacaaaattagttgggca

SEQ ID NO: 706267 - DNA, 851 bp, Homo sapiens
ggccttatgagccagtgtaaaagctttcrcccaggacctatcattttctttgcttgaagccatggacgctaaggaagcatctcccgctgtagcctcacagagcagagcaaagttccaggattctatgacatttgaaatgaattactcattcatgcagttacatacaaatacatacatatagatagacataggcgccaggaacttgaaagttatttaataagttttcagttggtcgaaaatattcccgaagaaattataatgtaaggaaaagagtcctatattgggtattaggaaatcgattattttatttggacaatgtcatttcctagtaagtcattcagtgactcaacaatttcctaatttctattccctaatcagtcgaataaggaacctgaactaaattatttgtatagtcttttcatttcttaaaatcttgtgaatgtagtaacttttccctattcagttagccaggtaagcactgcttacagttgtcttagaaaaattctgtgtaactataagcagattgaaatcccctgaaaaaccataaagttgaatataagccacctaatattattgtttgttccagcaaattttcatgccattattcacttataaaaagtaaaccttaatgtgagtacagcaagacaattaacaaaacaagaaaattttatttaggaacgaggttattgcagagagactagcaattgccatttgcaataatgatagttaccgtttgaactaacaaaaaagagcattaataactattgtttttatgacctaggaggcgtggataaaagaaatcaaaagggagggtataaagatcagggaggattttggaagtgtttaattta

SEQ ID NO: 706268 - DNA, 851 bp, Homo sapiens
ggccttatgagccagtgtaaaagctttcacccaggacctatcattttctttgcttgaagccatggacgctaaggaagcatctcccgctgtagcctcacagagcagagcaaagttccaggattctatgacatttgaaatgaattactcattcatgcagttacatacaaatacatacatatagatagacataggcgccaggaacttgaaagttatttaataagttttcagttggtcgaaaatattcccgaagaaattataatgtaaggaaaagagtcctatattgggtattaggaaatcgattattttatttggacaatgtcatttcctagtaagtcattcagtgactcaacaatttcctaatttctattccctaatcagtcgaataaggaacctgaactaaattatttgtatagtcttttcatttcttaaaatcttgtgaatgtagtaacttttccctattcagttagccaggtaagcactgcttacagttgtcttagaaaaattctgtgtaactataagcagattgaaatcccctgaaaaaccataaagttgaatataagccacctaatattattgtttgttccagcaaattttcatgccattattcacttataaaaagtaaaccttaatgtgagtacagcaagacaattaacaaaacaagaaaattttatttaggaacgaggttattgcagagagactagcaattgccatttgcaataatgatagttaccgtttgaactaacaaaaaagagcattaataactattgtttttatgacctaggaggcrtggataaaagaaatcaaaagggagggtataaagatcagggaggattttggaagtgtttaattta

SEQ ID NO: 706269 - DNA, 590 bp, Homo sapiens
aaagaaatttcttagacatgagctccagaatctggaattctcttctacccgaggattacttttgtaattgaaaaacctttatgagcccttcaactcagcaattttataarcttgcctgtattattcttttgctttctcccatctaaaaacatctagtgatttttactgtgattttaataggaacaagtttttttttttcctgagaaaacatggtttctggcctctgtgctgtgttatgcaaaattaatgagggttaattttttcaaataagtagagccttaaaggatgcttttaaataaatgcaatgatgaagaggtttcatttgtttatgcctgcaacttttttctcttaaaataatatatttgttcaggaacttgaagatgcttttctagcattcaggaaactgagtgactgctatgtgcccagcactccagaaacaataaaatttaataccaaacaaagataaattgatacatcgatccatttaaaaatggctggatgagttgagacaggctagtgtgatattttctaaaaagcaaatgaactgagttagggcactgggccccacattttttttttttttagtgaag

SEQ ID NO: 706270 - DNA, 590 bp, Homo sapiens
aaagaaatttcttagacatgagctccagaatctggaattctcttctacccgaggattacttttgtaattgaaaaacctttatgagcccttcaactcagcaattttataagcttgcctgtattattcttttgctttctcccatctaaaaacatctagtgatttttactgtgattttaataggaacaagtttttttttttcctgagaaaacatggtttctggcctctgtgctgtgttatgcaaaattaatgaggkttaattttttcaaataagtagagccttaaaggatgcttttaaataaatgcaatgatgaagaggtttcatttgtttatgcctgcaacttttttctcttaaaataatatatttgttcaggaacttgaagatgcttttctagcattcaggaaactgagtgactgctatgtgcccagcactccagaaacaataaaatttaataccaaacaaagataaattgatacatcgatccatttaaaaatggctggatgagttgagacaggctagtgtgatattttctaaaaagcaaatgaactgagttagggcactgggccccacattttttttttttttagtgaag

SEQ ID NO: 706271 - DNA, 1468 bp, Homo sapiens
ataatctactttacataaatctcgtttaatatttttaaacactttgagatatgcttattaaaatctcatctttctgatatctaaataagcttgaaggccgggcgcggtggctcacgcctgtaatctcagcactttgggaggcggaggcaggcggatcacgaggtcaggagatagagacaatcctggataacacggtgaaaccccttctctactaaaaatacaaaaaattagccgtgcgtggtggcaggtgcctgtagtcccagctactctggaggctgaggcagaagaatggcgtgaacccgggaggcggagcttgcagtgagccaagatcgtgccactgcactccagcctgggcaacagagagagactccctctaaaattaaaaaaaaaaattaaaaaaaagtaagcttgaagatgctaaataaccatctgagatcagacagcaggtaggtggagaagccagtgtttaaaatgatgttgttttggctcataatattttatttataacataaattaataaaaccaattgattaataacatttgccataaaccataattctttttgtaaacacaccctgacatatagagataacaatagcataataatggctccttatttaatcagctagttagaaatctttcaggctcttactctatggacaaatttgcataaatattagcaaatatgtccgtttctttattattctcttttccaccggcgaagcaataaaaataagtcaattccaaaagaagattcataaatgtgtccttaaatgtttcagaagaaaaatacattttatctattttatcaaaatacattcagaaaattactactcccactaaatgccaataggttttcttgacaaaaattatccacatttatataaaattatataactattgcaaaattgaatgtttgaaattcagaatatttattaatgtgtgaaaagtttaagtatttacttttattcaacactgaattgcattattatctctggagtttgatacacacacatacatagaaaggtgcatagaacattgaacttgatatttgaaaaatatattagtccactatatgcataatagaacttagtcctcatttaaagcactttgatgaaatttccacagtcatacactttggttttaacagaatcggaatgaaaacccaagtataagcatattcagtttatgccaaggcaagtcagctatgggtaggacaaggagcatgatattttgttgcattaaatgtaatttgcattcaaaacttactaaatgaatcaaagttttcttatctctaaaatgagaataaaaataacaatatatgccctaattacttcacagtgtcagtattattgtgaaggtcaaataaatayatttatttaaaaggattttaaaagcagcatgtatcatcattttaattaggttaggaagacaatatcgtaagtatcaaagcattgtatatcaatga

SEQ ID NO: 706272 - DNA, 1551 bp, Homo sapiens
atgttttatgttccatattgtgagtatttaaggtcctcctgatcattggattagggcctacattatctgaagttgattacatttgcaaaaattgtatttcaaaattatgtcatattcagattctgggtggtcaggatccttaaactgctctactttacttatttatgcatatgacatacacattgtgtatacactattttcaatgttatttccaataaatgcaaatgattttatttttggagattctacttaggctgaagttcagtgaaactgggcacctgtgtcttttcctattctacaaggacacagaaagcacattattgtgctaccttattttatgaactatttttaatctttaaatcttgagtttctgatttactcttaaggtctgaaggaggctatgacttgctaaataagctacaaaagatctattatttttaaatagttatgataaagggagtgggaagataaattgataacttacactatatttctgattcatttgatatggcaattaaatgaaagtctgaatttatttattattctacwtagttacaaccaatcttcaaagatgtgaaactattaatgtgttatattaagtggaatcttgtgttatttatatgctaaaatattacacatttaatctactagcaactttggtttctgaatttctggaaagagagctggacttctgctaaaagtattccagccctcactctgacaaattttggacttccttcaccttgggaaatacatcttcctcagtatgtttctctagagaccaaatgactattaaattaggggttgtcaaagtatggcccattgcttatttttgtaaataaagttttattgtaacacagccttgtccatttatttgtatatcatctgtgactgcttttgtgctacaatggttaaatagctctggtaggtccatctggattgccaaaattaagatatttactacttgatcctttacaaaaactgaaaccctctaatcaagattatttctattactgctctaaattttaaaattatgtaattttgtggtcctttttctttagctcctactgaaaaaatctgattaggtactttctacatgttagactcacaaatgaatagttggtatattgaaaggtataatgatccagagtccataaaattttgccagtgcctatgttgtgaatagtattgcctagattttcttctagggtttatatagttttgggttttacatttaagtctttaattcatcttgagttaatttttgtatatggtgtaaggaaggggtccagtttcaatttactatttatagatagccagttctcccagcaccatttattaaatagggaatcctttccccattgcctatttttgtcaggtttctcaaagattagatggttttagatgtgcagacttatttttgggctctatatttggtttcattggtcattttgtcagttcttgtaccagtaccaagctgctgtggttactgtagccttgtagcatagtttgaagttggttagcgtgatgcctccagctttgttctttttg

SEQ ID NO: 706273 - DNA, 630 bp, Homo sapiens
atgggatcctgcagttctattaaatcattcttggcaacaccctgtttctgtctgatagttccacctagttacatttagaaacaagtaaataaagaagaaaggttgtgtgcgtgtgtgtgtgtgtgtgtgtgtgtgtgtccggtgtgcatgttaggaagaacaggatggaccagtaggtggtaacaatctaaaccttgcaaatagctcctagcctgctgacccatagctggtccaagagggcatgaattaaagaatattcattatatctacttgattcctgttttcttctagaccagcactgccaatagaacattctgccatgatggaaatatttcctgtctatgttgttcaatatggtagctactagccacatgtggctactgagcacttgaaatgtgcccagtgtgaatgcggacccgaagttttaatttgawtcaatcgagctttaaatttatatagctaaatgtggctagtggtgattgtattgtatagcaatggctttagagtctaggctgaggcatgctgtgggtctcaatctatgagtattttaggggagtccaggaggcaagtatgatgaacacaagaacccattcttggcccatggcctctttctactcccacaccaaaggt

SEQ ID NO: 706274 - DNA, 608 bp, Homo sapiens
cattggctctttccccacgacctaaaaccctggtcctcctcagcctcttgagctagtagtcccccactcctcctttttgttcattctcctatatacgtttttctttttaaagatayacatttattcattcattcagtgagtattggagtgtctgtcatataccaggcacagtttcaagtgtttgaggtgtagcagtgaataaaatagttttctctctgtagtttacgttctagtagaggaaagcagataaatgaataaatctgaagaaaaatagcagggtaagggaatagggagacactggattattaaagaaggcctctcagaaaataaaatttgtgcagaaatatgcaagaactggagtagtgagctatgtgtatctttgggggaataactttctaggcatagagcgtgcttcttgattctaaggaacgaaaggaggccagtgtggctacagatggagtaaacgaagggggagataggaatatggagaagtcacaagggtagacagggaccagatcatggagagctttattctgagttaaataggaagacattggagagttttgaatagaggaatgacataatctgacatccattaaaaaaaaaaa

SEQ ID NO: 706275 - DNA, 920 bp, Homo sapiens
aaaatgtttttctttcctttatcttccctcttttcttcaattcttaaaactttctttctttttagaaaacctgtaatgaagcactattctctgggttttcttctctttctgttttactgttgcacagcctagattttatatgaaaggctgggccgggcgtggtagctcacgcctgtaaacccagcactttggcaggctgaggcaggcagatcacttgaggtcaggagttcgagaccagcctggctaacgtggtgaaactccatctctactaaaaatatgaaaattagctgggccygatggcacacacctgtaatcccagctactcaggaggctgaggtgggagaatcacttgaacccgggaggcggaggttgcagtgagccgagatggtgccactgcacttcagtctgggcgacagagtgagtgagactctgtctcaaaaaaaaaaaaaaagagaatttagattttaaagattatttctcagaggctggtgatagatactttaaccagggttagtggcttttatatgttttacctaaaggatcacttttctctgctgcacataacagaatgtggtttttggcttgctgtaaggagactagtttaaatgctagtatagaaaacttttaaaaacatcctagatttggagcttgtctgtgagcagacagcctatcatgaataggagcaaacctctaggagagttattttagagtggaagtggatatcctgatttagtcgaataaaatagcagccttggtattaatgggaaatctgcaataatcagggtttcagccccatcagcgtagtcaggagtttggtgagattatttgccagggtggtgtaggtctagttttctttgtgcccttgtttgggactatattttgcctgttgcaaggtcctcactaacttatgggctctgatt

SEQ ID NO: 706276 - DNA, 607 bp, Homo sapiens
ttttgtagagattggggtctcgctatgttgtccaggctggtctcttgaactcctgacctcaagtgatcctcccaccttggcctcacagaaagtgctgggattacaggcgtgagccactgcgctcagcctagggttagaggtttttttttgttttttttttaatgtgtaggtgtttcctgatgtctcccaccctctttgttgggtctgggtctcgattcatttttccgatgttctgagcagggattggagagtgtcttcaatgtgaaaacactggcctttctgcagcttagtttcagtctcttacctgctactatatggggaggcatcatctgggtgacttcctcagggctgtcttccmactcccatattctcttttggccacatctaatctgctattgaagccatcagctgaggtttttataccaacagccatattcctcgtgttaaaggtcctgtgtggttgtttttctaatctgctgggtccttttcatgctattatattgtttttcatttctacttttatctctttagtcattttaaactcatgtataatcttttttttttttttttgacagattctcactctgtggcccaggctggagtgcag

SEQ ID NO: 706277 - DNA, 607 bp, Homo sapiens
ttttgtagagattggggtctcgctatgttgtccaggctggtctcttgaactcctgacctcaagtgatcctcccaccttggcctcacagaaagtgctgggattacaggcgtgagccactgcgctcagcctagggttagaggtttttttttgttttttttttaatgtgtaggtgtttcctgatgtctcccaccctctttgttgggtctgggtctcgattcatttttccgatgttctgagcagggattggagagtgtcttcaatgtgaaaacactggcctttctgcagcttagtttcagtctcttacctgctactatatggggaggcatcatctgggtgacttcctcagggctgtcttccaactcccatattctcttttggccacatctaatctgctattgaagccatcagctgaggtttttataccaacagccatattcctcgtgttaaaggtcctgtgtggttgtttttctaatctgctgggtccttttcatgytattatattgtttttcatttctacttttatctctttagtcattttaaactcatgtataatcttttttttttttttttgacagattctcactctgtggcccaggctggagtgcag

SEQ ID NO: 706278 - DNA, 1863 bp, Homo sapiens
atcccctcaataaagtggaagcagaatttggaactaaagtctaatggtaaatttcatgagctggttttaacaataaaaaacaggtgcctattgccaaatgcacatgctaatccctaagtatctgctgctgttgtatagctgcaaatcaaggagaaaacgtgtagctgactttatgtaactgagtaggtgaaacacagccaaatcttcctagaaaaaccaccttatgactgatcaacatctccgacttgttgttttacccatcgttacttgactatatcaaacatcatgtttccttagtgttttgttttttttttaattatttggagacaagtcttgctctatcactcaggctggagtgcagtggcgtgatcttggctcactgcaacttccacatcctgggctcaagtgattctcgtgccccagcctcctgagtagctaggattacaagtgcacgtcaccacacccagctaatttttgtatttttagtagaaatggggtttcgccatattggccaggctggtctcaaactcctgacctcaagtgatccgccctccttggcctcccaaagtgctgagattacaggcgtgagccacggtgcccagccctaaaacatcatgtttatttatccatttaggctaatggcctcagtcattactcataatagtaaatattagctaggattttgatataaaatatgtaacatttgttcatcaaagcaatgtgtgtttaaagcaagatgattttttcccaggctgtttattagtgaatcaatttctatcaaatgtttgacaaaacaacctatatttttttgggaaaaagcattcactttggaaatattctaaacatttcttcctttttgctatttaccgtgcagcccaaagtctcctcagcaacacttcctgtgagactacaggaatgaagggtgcctgtgtgatcagtcagatcaatcagcacatggaaactgagaaagacagatttaaagtccaaggagtttttgttgcaagttgtgcacatgttagatgcttcatttacaatataaccacagctggaactgaaaagaaacaaagacaatgataaaatgtgatgccctaagctacaaatttcatctgtagcagaaaaagaattgtcactaaaaactctacgacagtgtgtggaaaacttactgagtgttcagtgctatgcggtctacaagacagtcgtaaaaaacagtaaaacacactttctacgmagccattctcaggagtcatctgaaactgcgtacaccagtcctctgcctgccctccttccctccctctgccaagccctcgaggtccatcccagtctcatttccttgctggggccctcccttctcgtatcccagcctgcagcctttctctcttggaacagcagcagagtgcacgcctcaggactgactggtgctgttgcatcagctccttattctcacctccctggctgggagttctgagggcaggaactgtgtcttgtgcctggaaagcacgagttcaacagctgctcactggatgggcctgcacggggccttctctacaaatacagaaagccttgcaaggctggccgggtagcacccagatgctattaacactgctggtgatacactctcctctctttcagtgatttatgctattccatatttctgaagcaagccttactttagcaattttaaacagggaaactaattcaaatttctcaaataggggaaatgaactgaagatagtggtttcttatctagccacagatcacttggtctagcaaattttagatgcttttcctcagatatcaataataaatgtacaggaaaaaaattagtttttcaatttttgaaaactatttttcaaaaaatgaata

SEQ ID NO: 706279 - DNA, 1863 bp, Homo sapiens
atcccctcaataaagtggaagcagaatttggaactaaagtctaatggtaaatttcatgagctggttttaacaataaaaaacaggtgcctattgccaaatgcacatgctaatccctaagtatctgctgctgttgtatagctgcaaatcaaggagaaaacgtgtagctgactttatgtaactgagtaggtgaaacacagccaaatcttcctagaaaaaccaccttatgactgatcaacatctccgacttgttgttttacccatcgttacttgactatatcaaacatcatgtttccttagtgttttgttttttttttaattatttggagacaagtcttgctctatcactcaggctggagtgcagtggcgtgatcttggctcactgcaacttccacatcctgggctcaagtgattctcgtgccccagcctcctgagtagctaggattacaagtgcacgtcaccacacccagctaatttttgtatttttagtagaaatggggtttcgccatattggccaggctggtctcaaactcctgacctcaagtgatccgccctccttggcctcccaaagtgctgagattacaggcgtgagccacggtgcccagccctaaaacatcatgtttatttatccatttaggctaatggcctcagtcattactcataatagtaaatattagctaggattttgatataaaatatgtaacatttgttcatcaaagcaatgtgtgtttaaagcaagatgattttttcccaggctgtttattagtgaatcaatttctatcaaatgtttgacaaaacaacctatatttttttgggaaaaagcattcactttggaaatattctaaacatttcttcctttttgctatttaccgtgcagcccaaagtctcctcagcaacacttcctgtgagactacaggaatgaagggtgcctgtgtgatcagtcagatcaatcagcacatggaaactgagaaagacagatttaaagtccaaggagtttttgttgcaagttgtgcacatgttagatgcttcatttacaatataaccacagctggaactgaaaagaaacaaagacaatgataaaatgtgatgccctaagctacaaatttcatctgtagcagaaaaagaattgtcactaaaaactctacgacagtgtgtggaaaacttactgagtgttcagtgctatgcggtctacaagacagtcgtaaaaaacagtaaaacacactttctacgcagccattctcaggagtcatctgaaactgygtacaccagtcctctgcctgccctccttccctccctctgccaagccctcgaggtccatcccagtctcatttccttgctggggccctcccttctcgtatcccagcctgcagcctttctctcttggaacagcagcagagtgcacgcctcaggactgactggtgctgttgcatcagctccttattctcacctccctggctgggagttctgagggcaggaactgtgtcttgtgcctggaaagcacgagttcaacagctgctcactggatgggcctgcacggggccttctctacaaatacagaaagccttgcaaggctggccgggtagcacccagatgctattaacactgctggtgatacactctcctctctttcagtgatttatgctattccatatttctgaagcaagccttactttagcaattttaaacagggaaactaattcaaatttctcaaataggggaaatgaactgaagatagtggtttcttatctagccacagatcacttggtctagcaaattttagatgcttttcctcagatatcaataataaatgtacaggaaaaaaattagtttttcaatttttgaaaactatttttcaaaaaatgaata

SEQ ID NO: 706280 - DNA, 1863 bp, Homo sapiens
atcccctcaataaagtggaagcagaatttggaactaaagtctaatggtaaatttcatgagctggttttaacaataaaaaacaggtgcctattgccaaatgcacatgctaatccctaagtatctgctgctgttgtatagctgcaaatcaaggagaaaacgtgtagctgactttatgtaactgagtaggtgaaacacagccaaatcttcctagaaaaaccaccttatgactgatcaacatctccgacttgttgttttacccatcgttacttgactatatcaaacatcatgtttccttagtgttttgttttttttttaattatttggagacaagtcttgctctatcactcaggctggagtgcagtggcgtgatcttggctcactgcaacttccacatcctgggctcaagtgattctcgtgccccagcctcctgagtagctaggattacaagtgcacgtcaccacacccagctaatttttgtatttttagtagaaatggggtttcgccatattggccaggctggtctcaaactcctgacctcaagtgatccgccctccttggcctcccaaagtgctgagattacaggcgtgagccacggtgcccagccctaaaacatcatgtttatttatccatttaggctaatggcctcagtcattactcataatagtaaatattagctaggattttgatataaaatatgtaacatttgttcatcaaagcaatgtgtgtttaaagcaagatgattttttcccaggctgtttattagtgaatcaatttctatcaaatgtttgacaaaacaacctatatttttttgggaaaaagcattcactttggaaatattctaaacatttcttcctttttgctatttaccgtgcagcccaaagtctcctcagcaacacttcctgtgagactacaggaatgaagggtgcctgtgtgatcagtcagatcaatcagcacatggaaactgagaaagacagatttaaagtccaaggagtttttgttgcaagttgtgcacatgttagatgcttcatttacaatataaccacagctggaactgaaaagaaacaaagacaatgataaaatgtgatgccctaagctacaaatttcatctgtagcagaaaaagaattgtcactaaaaactctacgacagtgtgtggaaaacttactgagtgttcagtgctatgcggtctacaagacagtcgtaaaaaacagtaaaacacactttctacgcagccattctcaggagtcatctgaaactgcgtacaccagtcctctgcctgccctccttccctccctctgccaagccctcgaggtccatcccagtctcatttccttgctggggccctcccttctcgtatcccagcctgcagcctttctctcttggaacagcagcagagtgcacgcctcaggactgactggtgctgttgcatcagctmcttattctcacctccctggctgggagttctgagggcaggaactgtgtcttgtgcctggaaagcacgagttcaacagctgctcactggatgggcctgcacggggccttctctacaaatacagaaagccttgcaaggctggccgggtagcacccagatgctattaacactgctggtgatacactctcctctctttcagtgatttatgctattccatatttctgaagcaagccttactttagcaattttaaacagggaaactaattcaaatttctcaaataggggaaatgaactgaagatagtggtttcttatctagccacagatcacttggtctagcaaattttagatgcttttcctcagatatcaataataaatgtacaggaaaaaaattagtttttcaatttttgaaaactatttttcaaaaaatgaata

SEQ ID NO: 706281 - DNA, 1863 bp, Homo sapiens
atcccctcaataaagtggaagcagaatttggaactaaagtctaatggtaaatttcatgagctggttttaacaataaaaaacaggtgcctattgccaaatgcacatgctaatccctaagtatctgctgctgttgtatagctgcaaatcaaggagaaaacgtgtagctgactttatgtaactgagtaggtgaaacacagccaaatcttcctagaaaaaccaccttatgactgatcaacatctccgacttgttgttttacccatcgttacttgactatatcaaacatcatgtttccttagtgttttgttttttttttaattatttggagacaagtcttgctctatcactcaggctggagtgcagtggcgtgatcttggctcactgcaacttccacatcctgggctcaagtgattctcgtgccccagcctcctgagtagctaggattacaagtgcacgtcaccacacccagctaatttttgtatttttagtagaaatggggtttcgccatattggccaggctggtctcaaactcctgacctcaagtgatccgccctccttggcctcccaaagtgctgagattacaggcgtgagccacggtgcccagccctaaaacatcatgtttatttatccatttaggctaatggcctcagtcattactcataatagtaaatattagctaggattttgatataaaatatgtaacatttgttcatcaaagcaatgtgtgtttaaagcaagatgattttttcccaggctgtttattagtgaatcaatttctatcaaatgtttgacaaaacaacctatatttttttgggaaaaagcattcactttggaaatattctaaacatttcttcctttttgctatttaccgtgcagcccaaagtctcctcagcaacacttcctgtgagactacaggaatgaagggtgcctgtgtgatcagtcagatcaatcagcacatggaaactgagaaagacagatttaaagtccaaggagtttttgttgcaagttgtgcacatgttagatgcttcatttacaatataaccacagctggaactgaaaagaaacaaagacaatgataaaatgtgatgccctaagctacaaatttcatctgtagcagaaaaagaattgtcactaaaaactctacgacagtgtgtggaaaacttactgagtgttcagtgctatgcggtctacaagacagtcgtaaaaaacagtaaaacacactttctacgcagccattctcaggagtcatctgaaactgcgtacaccagtcctctgcctgccctccttccctccctctgccaagccctcgaggtccatcccagtctcatttccttgctggggccctcccttctcgtatcccagcctgcagcctttctctcttggaacagcagcagagtgcacgcctcaggactgactggtgctgttgcatcagctccttattctcacctccctggctgggagttctgagggcaggaactgtgtcttgtgcctggaaagcacgagttcaacagctgctcactrgatgggcctgcacggggccttctctacaaatacagaaagccttgcaaggctggccgggtagcacccagatgctattaacactgctggtgatacactctcctctctttcagtgatttatgctattccatatttctgaagcaagccttactttagcaattttaaacagggaaactaattcaaatttctcaaataggggaaatgaactgaagatagtggtttcttatctagccacagatcacttggtctagcaaattttagatgcttttcctcagatatcaataataaatgtacaggaaaaaaattagtttttcaatttttgaaaactatttttcaaaaaatgaata

SEQ ID NO: 706282 - DNA, 1863 bp, Homo sapiens
atcccctcaataaagtggaagcagaatttggaactaaagtctaatggtaaatttcatgagctggttttaacaataaaaaacaggtgcctattgccaaatgcacatgctaatccctaagtatctgctgctgttgtatagctgcaaatcaaggagaaaacgtgtagctgactttatgtaactgagtaggtgaaacacagccaaatcttcctagaaaaaccaccttatgactgatcaacatctccgacttgttgttttacccatcgttacttgactatatcaaacatcatgtttccttagtgttttgttttttttttaattatttggagacaagtcttgctctatcactcaggctggagtgcagtggcgtgatcttggctcactgcaacttccacatcctgggctcaagtgattctcgtgccccagcctcctgagtagctaggattacaagtgcacgtcaccacacccagctaatttttgtatttttagtagaaatggggtttcgccatattggccaggctggtctcaaactcctgacctcaagtgatccgccctccttggcctcccaaagtgctgagattacaggcgtgagccacggtgcccagccctaaaacatcatgtttatttatccatttaggctaatggcctcagtcattactcataatagtaaatattagctaggattttgatataaaatatgtaacatttgttcatcaaagcaatgtgtgtttaaagcaagatgattttttcccaggctgtttattagtgaatcaatttctatcaaatgtttgacaaaacaacctatatttttttgggaaaaagcattcactttggaaatattctaaacatttcttcctttttgctatttaccgtgcagcccaaagtctcctcagcaacacttcctgtgagactacaggaatgaagggtgcctgtgtgatcagtcagatcaatcagcacatggaaactgagaaagacagatttaaagtccaaggagtttttgttgcaagttgtgcacatgttagatgcttcatttacaatataaccacagctggaactgaaaagaaacaaagacaatgataaaatgtgatgccctaagctacaaatttcatctgtagcagaaaaagaattgtcactaaaaactctacgacagtgtgtggaaaacttactgagtgttcagtgctatgcggtctacaagacagtcgtaaaaaacagtaaaacacactttctacgcagccattctcaggagtcatctgaaactgcgtacaccagtcctctgcctgccctccttccctccctctgccaagccctcgaggtccatcccagtctcatttccttgctggggccctcccttctcgtatcccagcctgcagcctttctctcttggaacagcagcagagtgcacgcctcaggactgactggtgctgttgcatcagctccttattctcacctccctggctgggagttctgagggcaggaactgtgtcttgtgcctggaaagcacgagttcaacagctgctcactggatgggcctgcacggggccttctctacaaatacagaaagccttgcaaggctggccgggtagcacccagatgctattaacactgctggtgatacactctcctctctttcagtgatttatgctattccatatttctgaagcaagccttackttagcaattttaaacagggaaactaattcaaatttctcaaataggggaaatgaactgaagatagtggtttcttatctagccacagatcacttggtctagcaaattttagatgcttttcctcagatatcaataataaatgtacaggaaaaaaattagtttttcaatttttgaaaactatttttcaaaaaatgaata

SEQ ID NO: 706283 - DNA, 1863 bp, Homo sapiens
atcccctcaataaagtggaagcagaatttggaactaaagtctaatggtaaatttcatgagctggttttaacaataaaaaacaggtgcctattgccaaatgcacatgctaatccctaagtatctgctgctgttgtatagctgcaaatcaaggagaaaacgtgtagctgactttatgtaactgagtaggtgaaacacagccaaatcttcctagaaaaaccaccttatgactgatcaacatctccgacttgttgttttacccatcgttacttgactatatcaaacatcatgtttccttagtgttttgttttttttttaattatttggagacaagtcttgctctatcactcaggctggagtgcagtggcgtgatcttggctcactgcaacttccacatcctgggctcaagtgattctcgtgccccagcctcctgagtagctaggattacaagtgcacgtcaccacacccagctaatttttgtatttttagtagaaatggggtttcgccatattggccaggctggtctcaaactcctgacctcaagtgatccgccctccttggcctcccaaagtgctgagattacaggcgtgagccacggtgcccagccctaaaacatcatgtttatttatccatttaggctaatggcctcagtcattactcataatagtaaatattagctaggattttgatataaaatatgtaacatttgttcatcaaagcaatgtgtgtttaaagcaagatgattttttcccaggctgtttattagtgaatcaatttctatcaaatgtttgacaaaacaacctatatttttttgggaaaaagcattcactttggaaatattctaaacatttcttcctttttgctatttaccgtgcagcccaaagtctcctcagcaacacttcctgtgagactacaggaatgaagggtgcctgtgtgatcagtcagatcaatcagcacatggaaactgagaaagacagatttaaagtccaaggagtttttgttgcaagttgtgcacatgttagatgcttcatttacaatataaccacagctggaactgaaaagaaacaaagacaatgataaaatgtgatgccctaagctacaaatttcatctgtagcagaaaaagaattgtcactaaaaactctacgacagtgtgtggaaaacttactgagtgttcagtgctatgcggtctacaagacagtcgtaaaaaacagtaaaacacactttctacgcagccattctcaggagtcatctgaaactgcgtacaccagtcctctgcctgccctccttccctccctctgccaagccctcgaggtccatcccagtctcatttccttgctggggccctcccttctcgtatcccagcctgcagcctttctctcttggaacagcagcagagtgcacgcctcaggactgactggtgctgttgcatcagctccttattctcacctccctggctgggagttctgagggcaggaactgtgtcttgtgcctggaaagcacgagttcaacagctgctcactggatgggcctgcacggggccttctctacaaatacagaaagccttgcaaggctggccgggtagcacccagatgctattaacactgctggtgatacactctcctctctttcagtgatttatgctattccatatttctgaagcaagccttactttagcaattttaaacagggaaactaattcaaatttctcaaataggggaaatgaactgaagatagtggtttcttatctagccacagatcacttggtctagcaaattttagatgcttttcctcagatatcaataataaatgtacaggaaaaaaattagtttttcaatttttgaaaactrtttttcaaaaaatgaata

SEQ ID NO: 706284 - DNA, 639 bp, Homo sapiens
tgggattttgcacacatgcacacatacacacacagacacacaaacacacagaaatatacatgttctattggttcactttctctagagaacccaaactaatacatttaccatgtatgtctttcttataatgcctgtttccatcattagcatgtgaaaacacttgaagacttgatttgttttagaaaacattaattctccttaaacatatcagaacagataaaaaatatgtattgtccctccaaggcatcatcttaagagtctttacaattgtacataatacttaaagtacctttgcattcagccattagaattagagttagaagcaaggattaaccaggtgctttactctgtaggtgtcctcaggcaccacccaaatgttgctacctargttacacacctgagtttctctatagagtagggttcagcacactagagtctgtgggccaaatctgactcagagcctacttttgtgtggtctgtgacctaagaaccattcttaaatggttgagaaaaaataaaaagatgagtattttgtggaacataaaaattatatgaaatacaaatttcaatgtctgtaagtaatatcttattagaacatcatctcactcatttgtatacaaatggtttatggctgtgtac

SEQ ID NO: 706285 - DNA, 599 bp, Homo sapiens
ccccttctcacctctctgtggtcgtctctcacctctctctcccatgttcatcttgtcacccaccctatgcacatgctatttcttcttcctataacactttcacctcatcccagctctgacttgcctggtcatgcatttctgatacttgaggtagcatctgagatgtcatttgacccagggacttcctccaaacccctacttctatgctaratgcccaacgatgtgcgctctcactccttgtccttcccctttactgtaactctatgaggacagggacagtgtctgtcttcccagcttatggcacatgggagaaactcagtttatatatgaaaagaaggaaagaatataaaggaagaatgggtaagaggaaggaaaaaggaaaaatatttgtcttaatgaagatgctaaaaaatattcagcagtttctgaaatactcctaaaattatttaatctacagatgaagataatgaattgtagaaaacagagtaaaacatgacattaaattctaacacaaaatattgggatatatatgcagaggaactcacactcttgcacataggtggacttttcagactaatgtttttgtgaaaaaatattaa

SEQ ID NO: 706286 - DNA, 599 bp, Homo sapiens
ccccttctcacctctctgtggtcgtctctcacctctctctcccatgttcatcttgtcacccaccctatgcacatgctatttcttcttcctataacactttcacctcatcccagctctgacttgcctggtcatgcatttctgatacttgaggtagcatctgagatgtcatttgacccagggacttcctccaaacccctacttctatgctagatgcccaacgatgtgcgctytcactccttgtccttcccctttactgtaactctatgaggacagggacagtgtctgtcttcccagcttatggcacatgggagaaactcagtttatatatgaaaagaaggaaagaatataaaggaagaatgggtaagaggaaggaaaaaggaaaaatatttgtcttaatgaagatgctaaaaaatattcagcagtttctgaaatactcctaaaattatttaatctacagatgaagataatgaattgtagaaaacagagtaaaacatgacattaaattctaacacaaaatattgggatatatatgcagaggaactcacactcttgcacataggtggacttttcagactaatgtttttgtgaaaaaatattaa

SEQ ID NO: 706287 - DNA, 599 bp, Homo sapiens
ccccttctcacctctctgtggtcgtctctcacctctctctcccatgttcatcttgtcacccaccctatgcacatgctatttcttcttcctataacactttcacctcatcccagctctgacttgcctggtcatgcatttctgatacttgaggtagcatctgagatgtcatttgacccagggacttcctccaaacccctacttctatgctagatgcccaacgatgtgcgctctcactccttgtccttcccctttactgtaactctatgaggacagggacagtgtctgtcttcccagcttatggcacatgggagaaactcagtttatatatgaaaagaaggaaagaatataaaggaagaatgggtaagaggaaggaaaaaggaaaaatatttgtcttaatgaagatgctaaaaaatattcagcagtttctgaaatactcctaaaattatttaatctacagatgaagataatgaattgtagaaaacagagtaaamcatgacattaaattctaacacaaaatattgggatatatatgcagaggaactcacactcttgcacataggtggacttttcagactaatgtttttgtgaaaaaatattaa

SEQ ID NO: 706288 - DNA, 662 bp, Homo sapiens
tgaaattcacaaaagaaagttttgcactttttttttatgctcttgaaggttatttttatgtaaaagggagacaattcaaaatattttatgctacaaaattgacattaagttcatctagcacccagatcatggcctttaaatacaattcttcactgaaaggaacaagggcttttcagaaatgactgatttcatagaatgaaaggggcttaatgtaaaaattaaaaaagaagttaaaaagaaatgactgattccagagcaggggcaaaaaaagtacaagatgagccaatggtatctgtggtgttagaaagtaaggaggtgcccagaaaatgttggggacatgccagaagggcacaagacctagcttaaaagctgcctaccctttccccrtgaaatctggtataacccaagcaacaggatgcttggtaggaatagattacaatccataaaaaaagaacccatactgatataaataccattgtccaagagagaagggaacatttttccttacagtagaactccatctattaaatgtggaagacatgaggaattagaaaaaaatcttcatttgggaactgccgtattgataattatttcaggtagatatcaacagatactaaaactagtaggaaagttcagtgaacaacagcatatttacataatca

SEQ ID NO: 706289 - DNA, 662 bp, Homo sapiens
tgaaattcacaaaagaaagttttgcactttttttttatgctcttgaaggttatttttatgtaaaagggagacaattcaaaatattttatgctacaaaattgacattaagttcatctagcacccagatcatggcctttaaatacaattcttcactgaaaggaacaagggcttttcagaaatgactgatttcatagaatgaaaggggcttaatgtaaaaattaaaaaagaagttaaaaagaaatgactgattccagagcaggggcaaaaaaagtacaagatgagccaatggtatctgtggtgttagaaagtaaggaggtgcccagaaaatgttggggacatgccagaagggcacaagacctagcttaaaagctgcctaccctttccccgtgaaatctggtataacccaagcaacaggatgcttggtaggaatagattacaatccataaaaaaagaacccatactgatataaataccrttgtccaagagagaagggaacatttttccttacagtagaactccatctattaaatgtggaagacatgaggaattagaaaaaaatcttcatttgggaactgccgtattgataattatttcaggtagatatcaacagatactaaaactagtaggaaagttcagtgaacaacagcatatttacataatca

SEQ ID NO: 706290 - DNA, 1490 bp, Homo sapiens
caaaacacagatacacacacacacacacccctcatgtaccaattactccctagagtctgtttttcctgcaagaactccttctcagcttcttcaactcccactggtctctgtccttcccttctcccagagctgggcctcatgggtgctggcagcagttgagactgaatggtgaaggaggtamaacatgactctggaagcacatggctctgccctctctagctgcatcaccttgggcaagtcacttaacctctctggtctcaatttcctcaccagaaaaattaggataataatagtacctaccccaaacatccttgtgaggaataaatgagttaacctacataatattttagagtaatgtcaggccagcagcaaggactgtgttaatgtcagctctccttgttactaaattccagggaatatgacacagtaggagaagcatggaacttgggagctgacagatatgggttcaaatcccagcaccccactgactccacatgtgaccttgaatgaaataccttactgcccagtatcctcctgtgcaggagggggactactgatagaaccttacccaatagggttaacactgggtgtggggtgtgccagccctgaagagtatagaggcagctgtagggagaggagtcaagctcctggaatctgatcccccagattagttgctgcactctggggtgagcagagtaaactggtctgacttggaaagaagagccagagaccagccaggaattcaggcccccaggaggtgccataaatagctagagcagatcagagggcctccagggatggcaggctgggagacggggaaggctcaaaggagcagtgaaaaaggaagctgtcagtcatcagtctgggggcagacccaggaccctctcccaaaggtcgaagggaaaactgtctataagtaagacagaagaaaggggtcaactcttaaggaccagcctgagaccacctgggcaccattcactctgagctgttgggagaggcaggaaattctcgacacgccattcacctgtggtcttcacaagcccactcggcgccctattttctgccctttgaccatttggaaatagaaatcaatagcacagcctgtgtcacagatgggaaaacggaggctcagagatgtcaagtgatttgtccaagatcacacagtgaatcgggctaagatggggatatgaacgtagaatattttttgcctcctaatccagggttatacatgacagccaaaatagaaggccctgtcctcagggaggaagtctttcttgcaggggaacagtgaactgaaaggatccatcctccttgctttcctccccaagacattttactcttcctccgttgatccaagcatatcaccctagctgggcctgggaagtgtgagagggatgcacatttataatgcttcagagatgtttcatcaaaggtagctgtgcgcagccctgggaataggctaaacttgaacttgggctctgaagacctga

SEQ ID NO: 706291 - DNA, 2283 bp, Homo sapiens
gaggtaggaggagctccttggaggcaaaagcccagagaataaaaccacccttcaggcctcctggtattgggatggccacctgcctctctgggtagaagcttagtcccagggagtttggcgaggacagaggatgagactggcacatctatatgtggctccgttcaaagcaacccttcccctcaacttctctgttcctgagtgggtctctccgctagccataggcctctagccctttctttagagcttcttcctggagtagatgctcccaagacaggaaagatagatccatcctttcccaagactcagaagcagcttttttcttattaaatcttttgagtctcctcaggggctgtcccacagagaaacagagaaattacatgcagataacgcagcccaggagcttatggacacaggagctgttccaacatgctcaggcattgcctggaggaactgggacccaaagaaaagggtctacagactgcaaggagggggctgtgtgcagggtacctctgtcttatccagattatgccatctccaggaataaaactaagtagtcttcttcctcttccctttctattcctgtagtggaagacccttctaaatcctgagcaaagaataaaaagagaatctatgaggccatatttcctccttgaaccaaacgttcccttcatggggtctccaggaatgaccacaggcagagtgggtgcgagactaagagaagtttcaggaagaaaggaggcatgatgctttcaagggggaaaggaagccctgagtggcaatttggacttgatatttcaagcttgacaagtgattttccagtcagccacagttttagcacttataacatgaagatctatagtagtaaggtcccttccagctcagatgttttctgattttcaagagaacctaagggaaaatgcatcctatttcctgaggcaagagtagcccctgaatttccatttgcccatgcccacccaactaatctcaccctcatcctaggattaagggagcagctgggcacagattaatatagacacagggaaagcctaaggcagcctggccaggagagtcctcaattccagtggctttcttatggaaggagagcctttttctaacacctaagcatgctggtatacgctatccttagtcatacacacacgcgtgtgcacactacactcttgtgtggctttccaacacagagggagggtaggtcaagaacagaattagactatgtttgttcagctgaacatgctttgggggtcccagagcaatggatcctgaagggttaagtccactgatataacttacatttgtccagggctttataatcacaacatagtttcatgaacatgagaccattcaacactcagcacaaaggtaggagagggagatatattattgccactttacagagggggaaactgagactcagagagattgaatggtatgtccaaaaccacagaactggtaggtggcacatcttcttactcccagcaaagtatcctttctactggtytcttattcattctggatcccaggtttcccagagctccacgttatctctatctgggaggtagtgaggacccaaggctcagaaaaaggggcacagaaggggcaacgttctgagcattctgtgaacagttcaggtgggagcagagcgctgagtgtttcctggccacaagtaacagctgtagagagctgtctcctgggcccctctgggtaaacagatggcttaaaatagcccagaggtgcagctgggtctgtgcagggagagggtgagggaatagctttcctctccttccctcttgagatgcattccccccaggactccctcctggagtcaagggggtcagcaaagcagcttttctagcctggtctcctatagggaagatctttagtgctccttatatttgggccaaaaactagcagaagagcaggtagcttttccggaaacagtccgacatgaggagggtagctggtaggaaggagagatgcccagctcatagcgattctggttgaatagggcattcaggatagaaagcggaactgagcacattaacaaaataacatggtagaatgttctggaaaagggcctaagcctgccgtagcgtgctgaagccagttcctgttggttcacaagtctcttccctactctgcatccagtgatatcacctcgggagcttgaaatctctgtaatgggagtacttaccttatggaaatcagcaaactttagaaattggggattcttccttctatcagagagatgagtgttacacttatcag

SEQ ID NO: 706292 - DNA, 2283 bp, Homo sapiens
gaggtaggaggagctccttggaggcaaaagcccagagaataaaaccacccttcaggcctcctggtattgggatggccacctgcctctctgggtagaagcttagtcccagggagtttggcgaggacagaggatgagactggcacatctatatgtggctccgttcaaagcaacccttcccctcaacttctctgttcctgagtgggtctctccgctagccataggcctctagccctttctttagagcttcttcctggagtagatgctcccaagacaggaaagatagatccatcctttcccaagactcagaagcagcttttttcttattaaatcttttgagtctcctcaggggctgtcccacagagaaacagagaaattacatgcagataacgcagcccaggagcttatggacacaggagctgttccaacatgctcaggcattgcctggaggaactgggacccaaagaaaagggtctacagactgcaaggagggggctgtgtgcagggtacctctgtcttatccagattatgccatctccaggaataaaactaagtagtcttcttcctcttccctttctattcctgtagtggaagacccttctaaatcctgagcaaagaataaaaagagaatctatgaggccatatttcctccttgaaccaaacgttcccttcatggggtctccaggaatgaccacaggcagagtgggtgcgagactaagagaagtttcaggaagaaaggaggcatgatgctttcaagggggaaaggaagccctgagtggcaatttggacttgatatttcaagcttgacaagtgattttccagtcagccacagttttagcacttataacatgaagatctatagtagtaaggtcccttccagctcagatgttttctgattttcaagagaacctaagggaaaatgcatcctatttcctgaggcaagagtagcccctgaatttccatttgcccatgcccacccaactaatctcaccctcatcctaggattaagggagcagctgggcacagattaatatagacacagggaaagcctaaggcagcctggccaggagagtcctcaattccagtggctttcttatggaaggagagcctttttctaacacctaagcatgctggtatacgctatccttagtcatacacacacgcgtgtgcacactacactcttgtgtggctttccaacacagagggagggtaggtcaagaacagaattagactatgtttgttcagctgaacatgctttgggggtcccagagcaatggatcctgaagggttaagtccactgatataacttacatttgtccagggctttataatcacaacatagtttcatgaacatgagaccattcaacactcagcacaaaggtaggagagggagatatattattgccactttacagagggggaaactgagactcagagagattgaatggtatgtccaaaaccacagaactggtaggtggcacatcttcttactcccagcaaagtatcctttctactggtttcttattcattctgkatcccaggtttcccagagctccacgttatctctatctgggaggtagtgaggacccaaggctcagaaaaaggggcacagaaggggcaacgttctgagcattctgtgaacagttcaggtgggagcagagcgctgagtgtttcctggccacaagtaacagctgtagagagctgtctcctgggcccctctgggtaaacagatggcttaaaatagcccagaggtgcagctgggtctgtgcagggagagggtgagggaatagctttcctctccttccctcttgagatgcattccccccaggactccctcctggagtcaagggggtcagcaaagcagcttttctagcctggtctcctatagggaagatctttagtgctccttatatttgggccaaaaactagcagaagagcaggtagcttttccggaaacagtccgacatgaggagggtagctggtaggaaggagagatgcccagctcatagcgattctggttgaatagggcattcaggatagaaagcggaactgagcacattaacaaaataacatggtagaatgttctggaaaagggcctaagcctgccgtagcgtgctgaagccagttcctgttggttcacaagtctcttccctactctgcatccagtgatatcacctcgggagcttgaaatctctgtaatgggagtacttaccttatggaaatcagcaaactttagaaattggggattcttccttctatcagagagatgagtgttacacttatcag

SEQ ID NO: 706293 - DNA, 625 bp, Homo sapiens
tggcaagagaagaatgcctcaaacaaaggctactttgttcccatctctactgcacctacacccacacccgccccggcccccaagctaaaagaccagaataaccaaagccattttaacagtagtgtgcaaaactgtcagctgacaaacaacataaaaacaagtcacrctatgttatctgtggtcacgttcttcagggttagtccagtaactcaagactttacattcttttgtctttatttgtttattttaattaaacatataaaggttaataaacagacaaagtccagagttagtaggttggtattataacatttattaaaataatgctgtgggttaatagaaacagcaaagaaccaaagaattaaaatgcaagctatgtaaaatcccaactaaaacccaaaagtgtctaatgtattcattcattagctaactaaaagcccaaaaaagacaagacacccaatataataaagtactgcaaaacaattggcaattttcagttatcaaaattgtggattttgcattttgtatccttttctcaatcaagaaaaaaattctttttgaatgttatataacatacatataaaacaagatagaaaaatacattataaacttgtaacaatggctg

SEQ ID NO: 706294 - DNA, 880 bp, Homo sapiens
ctgtacagattgtgtatgcacatttgttttgactggatctgaacccactccaattggctgatgttctggcttttctgattgtttaatattctaagcctcacttctgtttgtgagcacttacaaaacttataaaaggaatgagtcactgaacactctgcagtgcttgctaagtgtcaaaaatagatcatataaaactaacctgtacttctttgatagctgtactaggctgacatcaggggaatactgttcgtgatagttcaaaaatgaaaatgaattaatgtcagttggatataagactatttaaatggccccctaatgaagaataacacctgatgtcagcctggtaggaggtttctggtggtatgttttagagttctatgcttttccctgtctaattggttattcataatttgaatgagggagatgatggcttgcaaattaaatttctagacaaagcataccttgaaagatgactaactgatggaatagaagactttggacaaaaaaaaaatcttaactgaataaataagagaccactgcaacaaggcaaaattcaaaagaaatacaaaacttctgggatycaaaatttggattgtagaatgctcattaggaataaagtggcttaacagcaacaggtctgagttgactaaatggtcttagctgataccaaattgaattcattcatgtgaactggctgtcaagaattaatttgctcttgaactacattgaggaaagaatacggctacatcctttctattaagcaaccaatggccatagatatcaaaactgaatgtgtttagggaaggctgacaagagtggagatataaacacaaaccatctcaaagaagtggtttcagaatatgatgttccacttggggca

SEQ ID NO: 706295 - DNA, 880 bp, Homo sapiens
ctgtacagattgtgtatgcacatttgttttgactggatctgaacccactccaattggctgatgttctggcttttctgattgtttaatattctaagcctcacttctgtttgtgagcacttacaaaacttataaaaggaatgagtcactgaacactctgcagtgcttgctaagtgtcaaaaatagatcatataaaactaacctgtacttctttgatagctgtactaggctgacatcaggggaatactgttcgtgatagttcaaaaatgaaaatgaattaatgtcagttggatataagactatttaaatggccccctaatgaagaataacacctgatgtcagcctggtaggaggtttctggtggtatgttttagagttctatgcttttccctgtctaattggttattcataatttgaatgagggagatgatggcttgcaaattaaatttctagacaaagcataccttgaaagatgactaactgatggaatagaagactttggacaaaaaaaaaatcttaactgaataaataagagaccactgcaacaaggcaaaattcaaaagaaatacaaaacttctgggatccaaaatttggattgtagaatgctcattaggaataaagtggcttaacagcaacaggtctgagttgactaaatggtcttagctgatacyaaattgaattcattcatgtgaactggctgtcaagaattaatttgctcttgaactacattgaggaaagaatacggctacatcctttctattaagcaaccaatggccatagatatcaaaactgaatgtgtttagggaaggctgacaagagtggagatataaacacaaaccatctcaaagaagtggtttcagaatatgatgttccacttggggca

SEQ ID NO: 706296 - DNA, 1142 bp, Homo sapiens
gcactgttttaagaacttcacatatgttaactcatttactcctcacaacagccctactgaggtaggttctacttccccaattttaccaatgaggaaacagaagcaaaagtgattatgtaacttgtccaagtttaaacaactagaaagtaatgaggtcaggattcagggctaggcagtctggctgcagagtaccttgtctttaaccaagagtctatgcagaaagttggggaatttagactcatggttcattttcctcctatgagactggaccacgtaccagaaataaacatttcaactttgtttctcacaagaataataatgaagcaaactaaagaattactattgcatgctgagaaatataatccaaagataataaatacaaaataaaaacacgtatccatttcctgtgataggccttactcacaacagtttcaagaytgaccttaatagtaaaaccatccactatggaacaaagagggccctgaaaatgaacctaaatgaatgccaggtaactctcatcagaacatttctaagtgagccaggttatgtaaaccaagcacaacttctttatgattatatctgctctggaccctatacctatgacaggagagtcatgaagtcactgtggggcattgcaatattgatcattcctagttggccattcactgcaagcagtgctgccccatctgtcactctgaattgcaacatcatagactctcttagcttttcagttaagttatccagaacacagcatttgattactgagaatctgaacttgctcctatatgtctccatttttcccaacaacaggtatgcctctgaccttctttttcatccccacagctactcctcctctttccacagtgagtcaaatagaaaaccctatttataataaattggaattacatttagtttaataacattaaattctaattctaatcattttaataacattaaattataatttttaaagtatcctaatgaagatctgatttcttgaatggaggacttactaaagtgcttagatgccggaacttgctttatgtttagtcttatagaagtcatatatgattggtaattagcaggttacaacctcttgcatttaaagatgccagatgagtcataaaaggcattctcagtaa

SEQ ID NO: 706297 - DNA, 627 bp, Homo sapiens
gatgaggaaaacaaaaagaaacaagaaagcaaaaagcgaacagttgcagcaaaaaaagggtcacagttgcagcaccgcctaatatgtccctgggcatcttgttgataatcacagaatcctgttctactttggatttgtagccagggatgcctgtatgtacaaccataaattctctctttgcccgtctccctgccttcattgcataggtctttgtcatgcctaggcatcctttccttcatcagatacttttcccttcctgcagtctttttggatgtctagagcctatgggatgaccactcccattctaagagggcaccgattccccatcactcctgtcatttccctcaaagttccatattcagtaacctgtcccttggtaaaccatcagacaaaacggtggcattttagtgttaacrtctaatagaaactttaatgtattatttgcccaaaggtttttaaatggctgtattcatcagcattcaaccagagggacagaaccaggaggacagaaccagtcggagatattagagatttattataagatattggcttgcctcattgtggaggatgccaaagcaattctgaaatctgaaggacagctgtcaggagggacacgccagaacactt

SEQ ID NO: 706298 - DNA, 627 bp, Homo sapiens
gatgaggaaaacaaaaagaaacaagaaagcaaaaagcgaacagttgcagcaaaaaaagggtcacagttgcagcaccgcctaatatgtccctgggcatcttgttgataatcacagaatcctgttctactttggatttgtagccagggatgcctgtatgtacaaccataaattctctctttgcccgtctccctgccttcattgcataggtctttgtcatgcctaggcatcctttccttcatcagatacttttcccttcctgcagtctttttggatgtctagagcctatgggatgaccactcccattctaagagggcaccgattccccatcactcctgtcatttccctcaaagttccatattcagtaacctgtcccttggtaaaccatcagacaaaacggtggcattttagtgttaacgtctaawagaaactttaatgtattatttgcccaaaggtttttaaatggctgtattcatcagcattcaaccagagggacagaaccaggaggacagaaccagtcggagatattagagatttattataagatattggcttgcctcattgtggaggatgccaaagcaattctgaaatctgaaggacagctgtcaggagggacacgccagaacactt

SEQ ID NO: 706299 - DNA, 447 bp, Homo sapiens
cttctctaatccgttgtggaagggagatcattggcaccttaaaagtcttaggtgaagacattagtttcttcatttctaatcactttaattgaatstgtagtgtgtatatggaactataattctgtccagaggttgcttgtcaaaccatgtttttattgtaattacctgatttgttcagctttaatcatatttacttttgaaggtcagctgtcctgctcagacacggttagttgaagaagggaaaaatatgtaacacccacagacagaaagcctacaagaaagaaaaaggaagagagtattgtcttcccatttggacaataaacagagccaagctgtcacctacaaattattgtaaactgacagatcatactatttcctttcacttcattacatttcatagtcacttttgacatttgatgctgacttgtaacttttgggaaagaaggc

SEQ ID NO: 706300 - DNA, 478 bp, Homo sapiens
gtatacagcccctgggtgtcagggacatgggcaggagggtcctcccggggcgtggagaggagagtgcagcctgatgtaagccagggccagataggtcatggtgcgccagggccttccccgccttagggcatttgtgctgttgtaacacagtacttaagacgcagtaactsatgaagaacagatttatgtctcgccgggtgtgggagcacttgccctgtaatcccagctactcaggaggtttagatgggaggatcacttgagctcaggagttcgagaccagcccaggcaacatagtgagactctgtctctaaaatataaaaataaggccaggcacggcggctcatgcctgtaatcccagcactttgggaggctgaagtgggcaggtcacttgaggtcaggagtttaggaccagcctggccaacatggttaaaccctgttactactaaaaatacaaaaaaattagccgagcatggtggtg

SEQ ID NO: 706301 - DNA, 881 bp, Homo sapiens
tgaaggactgtttggctggagatcagtgggaaggatgttctttgttttttttgagagggagtttcgctctgtcgcccaggctggwatgcagtggcgatctcagctcactgcaacctctgcctcctgggttcaagcaattctcctgcctcagcctcccaagtagctgggattacaggctcccaccactacgcccagctaatttttctatttttggtagagacggggattcgccatgttggccaagcttgtctcaagctcctgacctcaggtgatctgccctccttggcctcccaaagtactgcaattaacagacatgagccaccgtacctggccaggatgttcttaaaggtggaagaaagggccaggagttcgagaccagcttgggcaacattgtgaaaccccatctctacaaaaaatacaaaaattagctgggtgtggtggcatgtgcccttagtcccagctacttgggaggctgaggtgggagaatcacttgagcccaagcagttaaggctgcagtgagccatgatcacgccactgcactccacgtgacagagtgacaatctgtctcgggggaaaaaaaagaggcaaagtgggcacagcgtggggagggcaggagactggggaagtgggcgaagtgctgctcttctggggttggaaacccagactcagggggtggggttcagtctctggagctctctgagcgtggaggtaatctgctggaaggggcatttcggaagctgagttttgtggcactgtatctcgtgctgaagcagaggctgtgggtttaggaggcagaggcccaggcagctgtggtgtaagcgaatgcatttgtggtgggagggtcctgggcaggaaggcagcgtgcatgggacctcatgttg

SEQ ID NO: 706302 - DNA, 640 bp, Homo sapiens
tgacttagggcctccgttgttcatttgaaaatggggatgctgattgaaaaatggagatgcacctgggcgcagtagctcacacctgtaatcccagcactttgggagaccaaggcaggtggatcacttgaagtcaggagtttgagaccagcctggtcaacatggtgaaaccccgactccactaacaatacaaaaattagctgggcatggtgacgggctcctgtaatcccagctacttaggaggctgacacaggagaatcgcttgaacccgggaggcagaggttgcagtgagccaaggttgcaccactgcactccagcctgggtgacagagagagactctttctcaaaaagaaaaagaaagacggggatgctgatgcccccagcacaggttgagccgaacagatgccccaggtgtttgaaaggacaggcgaaagtgcagcgagcgtgaacctggcccctcctcccctcacctgtsctacctcatttagcagcatcttcttatagcttctgtgggaaaagtcatggtaataaaaacataatgctttaatcaataacacccatgtctctgttttagctttttattctgggaatgctcagatatacacaaaagcagagtgtagagcatcccaagcccctgggtatt

SEQ ID NO: 706303 - DNA, 882 bp, Homo sapiens
ggacgcttatcgagcagcttcagggttagtacaggggcaggaggggaccggacatgggggctaggctggggctgggctgggatgccccctggggaagaatgccagagacatcacaagattgccctggcacctcccaacttctgcccttctcttttaactctgttcatcaagcttgtaaataataataataataagcttaactacaagaagattgatgtctttgagttgcactggttttgctcttgaaaagaggtgtgcaggctgggtgtggtggctcacccctgtaatcccagcacttttgggaggccaaggcaggcagatcatgatcatggtcaggagtttgagaccagccwgaccaacatggtgaaacctgtctctaccaaaaatacaaaaaaaaaaaaaaaaattagctgggtgtggtggcaggtgcctgtagtcccagctacttgggaggctgaggcaggagaatcacttgaacccaggaggcagaggttgcagtgagctgagatcacgccactgcactccagcctgggtgatagagtaagactctgtctcaaagaaaaaagaaaagaaaagagacatgcaaattaaaaacagctactctctttcccagtggcttccattaatttcaggaatttccccttgagtggcttgggttgagaggttgatgacctgtcagttagactcaagaaagctgaatctaggagaaccgctattttttttttaagggaatctgccaaatttccttgctgtgtaaagcttcaatgtgtatagcttggcttttgtagattgtattttcttgaaacttagcacacaggtatttgcagaacttctaggagttaatttttctgctccactcggctctcagtcttttacggcatg

SEQ ID NO: 706304 - DNA, 882 bp, Homo sapiens
ggacgcttatcgagcagcttcagggttagtacaggggcaggaggggaccggacatgggggctaggctggggctgggctgggatgccccctggggaagaatgccagagacatcacaagattgccctggcacctcccaacttctgcccttctcttttaactctgttcatcaagcttgtaaataataataataataagcttaactacaagaagattgatgtctttgagttgcactggttttgctcttgaaaagaggtgtgcaggctgggtgtggtggctcacccctgtaatcccagcacttttgggaggccaaggcaggcagatcatgatcatggtcaggagtttgagaccagccagaccaacatggtkaaacctgtctctaccaaaaatacaaaaaaaaaaaaaaaaattagctgggtgtggtggcaggtgcctgtagtcccagctacttgggaggctgaggcaggagaatcacttgaacccaggaggcagaggttgcagtgagctgagatcacgccactgcactccagcctgggtgatagagtaagactctgtctcaaagaaaaaagaaaagaaaagagacatgcaaattaaaaacagctactctctttcccagtggcttccattaatttcaggaatttccccttgagtggcttgggttgagaggttgatgacctgtcagttagactcaagaaagctgaatctaggagaaccgctattttttttttaagggaatctgccaaatttccttgctgtgtaaagcttcaatgtgtatagcttggcttttgtagattgtattttcttgaaacttagcacacaggtatttgcagaacttctaggagttaatttttctgctccactcggctctcagtcttttacggcatg

SEQ ID NO: 706305 - DNA, 882 bp, Homo sapiens
ggacgcttatcgagcagcttcagggttagtacaggggcaggaggggaccggacatgggggctaggctggggctgggctgggatgccccctggggaagaatgccagagacatcacaagattgccctggcacctcccaacttctgcccttctcttttaactctgttcatcaagcttgtaaataataataataataagcttaactacaagaagattgatgtctttgagttgcactggttttgctcttgaaaagaggtgtgcaggctgggtgtggtggctcacccctgtaatcccagcacttttgggaggccaaggcaggcagatcatgatcatggtcaggagtttgagaccagccagaccaacatggtgaaacctgtctctaccaaaaatacaaaaaaaaaaaaaaaaattagctgggtgtggtggcaggtgcctgyagtcccagctacttgggaggctgaggcaggagaatcacttgaacccaggaggcagaggttgcagtgagctgagatcacgccactgcactccagcctgggtgatagagtaagactctgtctcaaagaaaaaagaaaagaaaagagacatgcaaattaaaaacagctactctctttcccagtggcttccattaatttcaggaatttccccttgagtggcttgggttgagaggttgatgacctgtcagttagactcaagaaagctgaatctaggagaaccgctattttttttttaagggaatctgccaaatttccttgctgtgtaaagcttcaatgtgtatagcttggcttttgtagattgtattttcttgaaacttagcacacaggtatttgcagaacttctaggagttaatttttctgctccactcggctctcagtcttttacggcatg

SEQ ID NO: 706306 - DNA, 882 bp, Homo sapiens
ggacgcttatcgagcagcttcagggttagtacaggggcaggaggggaccggacatgggggctaggctggggctgggctgggatgccccctggggaagaatgccagagacatcacaagattgccctggcacctcccaacttctgcccttctcttttaactctgttcatcaagcttgtaaataataataataataagcttaactacaagaagattgatgtctttgagttgcactggttttgctcttgaaaagaggtgtgcaggctgggtgtggtggctcacccctgtaatcccagcacttttgggaggccaaggcaggcagatcatgatcatggtcaggagtttgagaccagccagaccaacatggtgaaacctgtctctaccaaaaatacaaaaaaaaaaaaaaaaattagctgggtgtggtggcaggtgcctgtagtcccagctacttgggaggctgaggcaggagaatcacttgaacccaggaggcagaggttgcagtgagctgagatcacgccactgcactccagcctgggtgatagagtaagactctgtctcaaagaawaaagaaaagaaaagagacatgcaaattaaaaacagctactctctttcccagtggcttccattaatttcaggaatttccccttgagtggcttgggttgagaggttgatgacctgtcagttagactcaagaaagctgaatctaggagaaccgctattttttttttaagggaatctgccaaatttccttgctgtgtaaagcttcaatgtgtatagcttggcttttgtagattgtattttcttgaaacttagcacacaggtatttgcagaacttctaggagttaatttttctgctccactcggctctcagtcttttacggcatg

SEQ ID NO: 706307 - DNA, 734 bp, Homo sapiens
ttttttatttatttatttatttttgagagggagtatcgctctgtcgcccaggctggagtgcagtggcgtcatctcggctcactgcaacctccacctcttgggttcaagctattctcctgccttagcctcttgagtagctgagattacaggcacccgccaccatacccggctactattttttgtattttagtagggacagggtttcaccatgttgggcagactgttctcgaactcctgacctcaaatgatctgcccgcctcagcctcccaaagtgctgggattacagggatgagccaccgtgccagctgtatttgttttactaattgtcccaataatgtctcttttagcagtgtttttccaatccagcactttttagaaaaaaaaaaaaaaaaaaaaaaatggctcacggcatgttggtgtcacgtcttttgtcacatttaatctgaaagggtttcttagcctttttcagagtgtaagctagttgtttgatgaagtatttgttgtttagggtttatttgtttttgtgtttttttgcgccacagtgcattayatcgggggcccgtgatgtccgtttatttcattattagtgatattaattttggtcattcacttaaggtggtatctgccaggttttctctgagaagttacaatttcttctttgtagtgaatatatatataatatatatattatatataatacatattatatatttttatatatattttatatatat

SEQ ID NO: 706308 - DNA, 734 bp, Homo sapiens
ttttttatttatttatttatttttgagagggagtatcgctctgtcgcccaggctggagtgcagtggcgtcatctcggctcactgcaacctccacctcttgggttcaagctattctcctgccttagcctcttgagtagctgagattacaggcacccgccaccatacccggctactattttttgtattttagtagggacagggtttcaccatgttgggcagactgttctcgaactcctgacctcaaatgatctgcccgcctcagcctcccaaagtgctgggattacagggatgagccaccgtgccagctgtatttgttttactaattgtcccaataatgtctcttttagcagtgtttttccaatccagcactttttagaaaaaaaaaaaaaaaaaaaaaaatggctcacggcatgttggtgtcacgtcttttgtcacatttaatctgaaagggtttcttagcctttttcagagtgtaagctagttgtttgatgaagtatttgttgtttagggtttatttgtttttgtgtttttttgcgccacagtgcattatatcgggggcccgtgatgtccgtttatttcattattagtgatattaattttggtcattcacttaaggtggtatctgccaggttttctctgagaagttacaatttcttctttgtagtgaatatatatataatatatatattatatataatacatattatatatttttatatatatwttatatatat

SEQ ID NO: 706309 - DNA, 734 bp, Homo sapiens
ttttttatttatttatttatttttgagagggagtatcgctctgtcgcccaggctggagtgcagtggcgtcatctcggctcactgcaacctccacctcttgggttcaagctattctcctgccttagcctcttgagtagctgagattacaggcacccgccaccatacccggctactattttttgtattttagtagggacagggtttcaccatgttgggcagactgttctcgaactcctgacctcaaatgatctgcccgcctcagcctcccaaagtgctgggattacagggatgagccaccgtgccagctgtatttgttttactaattgtcccaataatgtctcttttagcagtgtttttccaatccagcactttttagaaaaaaaaaaaaaaaaaaaaaaatggctcacggcatgttggtgtcacgtcttttgtcacatttaatctgaaagggtttcttagcctttttcagagtgtaagctagttgtttgatgaagtatttgttgtttagggtttatttgtttttgtgtttttttgcgccacagtgcattatatcgggggcccgtgatgtccgtttatttcattattagtgatattaattttggtcattcacttaaggtggtatctgccaggttttctctgagaagttacaatttcttctttgtagtgaatatatatataatatatatattatatataatacatattatatatttttatatatattwtatatatat

SEQ ID NO: 706310 - DNA, 595 bp, Homo sapiens
cccagaggttgaagctgcagcgaactgtgattgcactactgcactccagcctaggcaacagagtgagaccatgtctcaaaaaaaaaaaaaaaaaaagaaaatctataaatttggtgagttgccctgaagagttggaactaagacttcttcggttatgttgaggctggttctgggaacattggaaatactgcaaactggaaccaactgttgctactggaacaatactgctactactggggagaatagggttggtgtgatggtaatggttcccttttagatttttcggttctttagaacccggctaactctgtttctgcctcctgtatggastcaccctgatgctaccaactcatgtctttttgtctcctcctctccactactgtgttgatattatttagaattttagttctggattattatgctataaatatatttttatttctctctcttttctttgttcatttttgaaaataaaaacagcatctgaatttcatatgtctttatcagataaaaattctatttttcatttattatgttttttgttaaaaaacagctttattaaggtataattgacatataataaactgcaaatatt

SEQ ID NO: 706311 - DNA, 595 bp, Homo sapiens
cccagaggttgaagctgcagcgaactgtgattgcactactgcactccagcctaggcaacagagtgagaccatgtctcaaaaaaaaaaaaaaaaaaagaaaatctataaatttggtgagttgccctgaagagttggaactaagacttcttcggttatgttgaggctggttctgggaacattggaaatactgcaaactggaaccaactgttgctactggaacaatactgctactactggggagaatagggttggtgtgatggtaatggttcccttttagatttttcggttctttagaacccggctaactctgtttctgcctcctgtatggactcaccctgatgctaccaactcatgtctttttgtctcctcctctccactactgtgttgatattatttaraattttagttctggattattatgctataaatatatttttatttctctctcttttctttgttcatttttgaaaataaaaacagcatctgaatttcatatgtctttatcagataaaaattctatttttcatttattatgttttttgttaaaaaacagctttattaaggtataattgacatataataaactgcaaatatt

SEQ ID NO: 706312 - DNA, 599 bp, Homo sapiens
acttagggtccactggatactgcaacaaaggacttttattgtttcttcttgagtagggaaacagatttgcctaatcaaagaccagattctttcttagcagtaagggaaagaaagtaggtaatactttttgtttgtttttcccttcagtaatggagaaagctcacaaaagaagagaagggacatgcttcactcaggtaggcaatattgcttctttaaccccaggtgcagctatagaggcttccaagtatattaaggtaagaaggcatttgagaatggagttyacgctgcaggtacccatgtcttcccgcatactccggagactagatttgggtttgaatcgattctgtggctttcttttacaaatttcactccagcctaacattgtctcaacattgtcctcgcccactaccaataatttccactttagtaacaacattcaactattcttgagaatagctgagcctcaaattgggtaacaccacctcatagtgtcatagaactgagatcccgtgaccctaccaacctataggtgtgcagtgcatcagctgctgcaacttgttacccaactgctgcctctggtcaattaacaaaaataaact

SEQ ID NO: 706313 - DNA, 577 bp, Homo sapiens
attcatcctctctgtttctaataatacctacaatcagttgtgtgtattaaaagctttgttaataatctacaagtggtaggtgacctcagcatttagttctgtggtttaaagcatgaccaagattgtgtttttgttttccccattttacagctaaaaagtatgatgttaaaaatactgacaaaaacgagttgttgctataaatatgtgaatcaaatgggaattttctggactttgttattatgaacattgcacaaagraaaagccaatgcatcacaccagaatgtcagtgggatagagtactgagccaaaggaaaagggcaaagagcccactttggtacacctggagtagattacacacatggggttgatctttcccttgaagccaaaaagctctggtaatgtgctctccacagtacatgatagagcagggtaaagctggaaattaatcacccagtgctaccagagcagttcattacatgcaattgacagcttcctctctgtatttttagatggctaagaatcaagtagttgcacatcaaaatgtgattttttttcttgcttcttggcacaggacccg

SEQ ID NO: 706314 - DNA, 577 bp, Homo sapiens
attcatcctctctgtttctaataatacctacaatcagttgtgtgtattaaaagctttgttaataatctacaagtggtaggtgacctcagcatttagttctgtggtttaaagcatgaccaagattgtgtttttgttttccccattttacagctaaaaagtatgatgttaaaaatactgacaaaaacgagttgttgctataaatatgtgaatcaaatgggaattttctggactttgttattatgaacattgcacaaagaaaaagccaatgcatcacaccagaatgtcagtgggatagagtactgagccaaaggaaaagggcaaagagcccactttggtacacctggagtagattacacacatggggttgatctttcccttgaagccaaaaagctctggtaatgtgctctccacagtacatgatagagcagggtaaagctggaaattaatcacccagtgctaccagrgcagttcattacatgcaattgacagcttcctctctgtatttttagatggctaagaatcaagtagttgcacatcaaaatgtgattttttttcttgcttcttggcacaggacccg

SEQ ID NO: 706315 - DNA, 1107 bp, Homo sapiens
gcactgatttttgtcaagcttttggacaaacgcctcttcttgcttatttttggatacagagtttcaccccatgggaattaatttcctgacctctcctgacttttaataactaacacacccactctaaccgacatctatccagttacagtctattcataatcttggaaattagttgagattacttaaaaatatttgtctattattaacgtaggaatagcaacttaggcacatttccgggtatttcttttttcaggtcaaattgaacaagttctgtgccttatgctccaagagacccacaataaataatttcataatttttcaaaccagatacccatgtagaggtacataatgattcttcatttgaaaccagtacacatgtagttataagaatcttttacttctccgtaaagcaattagtagcaacattaaatccaaggcctttttatttttgttttttaatgacaagcatttttaccatgcatttccaactttttggctggaactacgctcagtgctctgcaatttatattttagcctctataatgttagatattaatatatgcatgaagagttgtagtgaatgtaattacagtggcaaaatgataaacacatagctattttgcctggtaatattatgtattttaacaggtttatttgttcaacagttctaagtttaattacattttgccatttgggatttttagacatacaacaatcatagctcttctctggctattagtctaagaagattgcattcattataaaaataatccgtatttgtttatttaattttttttcttaatgctatgcaagtgaactaagaaatgataastttctgtgctgctggtattatgtgactcatttgaatgctaaacaaatcattccccattcctacctgtggcagtgaaagatgctcaacagggcttttgccccaggactgctcagtcttagggacggtgctgtatactctcacacagacatggagctagtcctcaaaaccttggttctagatcactctgaaaataccaaatgctttgggaagcaagctaacaaaaaataaacaggaaatgggtactgaagctaacaaataggtgcagagggccagtc

SEQ ID NO: 706316 - DNA, 563 bp, Homo sapiens
aaagcaaagatgaatagcctggattcaagtcatgtattgacaataagtgtatgcctctgggtaagtcatttcactccctgagcttcaggttcaggttcatgatctgtaaaatagttgtcatgtacctactttagagggttatgttgaaatttttaaataattgcttactttacaattctttgtaagttgtaagctctctgtaaacacaaagacctatttttctatctgtaaacacattgacatctcctcccaggatgcctctgcttccagccaagagctcactatccaaaaggctagaaatcagaaaagctgtggcttaacaagtcctyagtaagtgccaggtactgttctgaacacttcagttgaataactcatttaatcagcacaacaaccctaccaggtaggtaatatcagtatcatcatcatctgcatttttcagagaaggaaacggaagcatggaaagattgagtaatatacctacgcttacatagcttggaagttacggcactggaatttgaatccaggtgtgctggtttgaaagcagagctgtaacaactccactc

SEQ ID NO: 706317 - DNA, 563 bp, Homo sapiens
aaagcaaagatgaatagcctggattcaagtcatgtattgacaataagtgtatgcctctgggtaagtcatttcactccctgagcttcaggttcaggttcatgatctgtaaaatagttgtcatgtacctactttagagggttatgttgaaatttttaaataattgcttactttacaattctttgtaagttgtaagctctctgtaaacacaaagacctatttttctatctgtaaacacattgacatctcctcccaggatgcctctgcttccagccaagagctcactatccaaaaggctagaaatcagaaaagctgtggcttaacaagtcctcagtaagtgccaggtactgttctgaacacttcagttgaataactcatttaatcagcacaacaaccctaccaggtaggtaatatcagtatcatcatcatctgcatttttcagagaaggaaamggaagcatggaaagattgagtaatatacctacgcttacatagcttggaagttacggcactggaatttgaatccaggtgtgctggtttgaaagcagagctgtaacaactccactc

SEQ ID NO: 706318 - DNA, 613 bp, Homo sapiens
ccaatgctgaagctcaagcagccaggcttcctctactctcaggaaggcctttttgttttctttaagccttcagttgattggatagagcctgcctaaactaggaagaacaatttgctttactcacttgactgattcaattgttaatctcatctaaaaattcccctataaacaaattcaaagtaatgtttaaccaaatgtctaggcaccctgtggcctggtaaagtggaacataaaattaaccatcatgggtggtgaaaaacttcattttgaaagcttgtgatcctttgtaagtttgcagaaacaacgtcctttcatgagtcagaatgtagtatatagctttatctatctctaagggaggtcaggaaatgtagtctgtagctgggtggacataaattgaccttaaacttggaggtttctagtacttcaaagaaaaagrgaacttacactagaaacaatctatctctgtctgcattcacatgcatgtgtgttgcacattattaccctactttttgtacctagagtagcaataaagaggtcttttatacagatgccttcaaaaaattttaagaggccactgacaaacaaccagagaggtcacagaatattaactgtt

SEQ ID NO: 706319 - DNA, 613 bp, Homo sapiens
ccaatgctgaagctcaagcagccaggcttcctctactctcaggaaggcctttttgttttctttaagccttcagttgattggatagagcctgcctaaactaggaagaacaatttgctttactcacttgactgattcaattgttaatctcatctaaaaattcccctataaacaaattcaaagtaatgtttaaccaaatgtctaggcaccctgtggcctggtaaagtggaacataaaattaaccatcatgggtggtgaaaaacttcattttgaaagcttgtgatcctttgtaagtttgcagaaacaacgtcctttcatgagtcagaatgtagtatatagctttatctatctctaagggaggtcaggaaatgtagtctgtagctgggtggacataaattgaccttaaacttggaggtttctagtacttcaaagaaaaagagaacttacactagaaacaatctatctctgtctgcattcacatgcatgtgtgttgcacattattaccctactttttgtacctagagtagcaataaagaggtcttttatacagatgccttcaaaaaattttaagaggccactgacaaacaaccagagaggtcacagaatattaastgtt

SEQ ID NO: 706320 - DNA, 595 bp, Homo sapiens
aatagcatctatgtctaagttcaaaaccttattaaaaccttgcctgcctactaatgctaagtgcttgtgttttatacctttacactctatactttcactattatgtttttcaaatttataactagcagaatcaaacttacaattgctaaaggaaagataatttaatggagagattcaggggtatatcaagacctraagctctctttcctaatttgtactttattcctttctctttgaacggatattttctctgcactacttataaagatggcagaaaatgacaagctcgtccatgagcctacattatctcccagtcatagtgcctgtgatcacgtcactgatgtctattgtctttgtacagagggactgtgaaggtacacaccaggggttcttcctggcacaacctctgtgtagatagaggtgacaaaaacaaggcaacacaaccttggagatccatcatgctgctggaggagcatttcctggggaaaaaaaggagtcttactgcaaagatactttatactctgcccattaaaattgcactggatttgattaatgatgcaagtttcaaattaaaaatgaaattaatttgtagatt

SEQ ID NO: 706321 - DNA, 595 bp, Homo sapiens
aatagcatctatgtctaagttcaaaaccttattaaaaccttgcctgcctactaatgctaagtgcttgtgttttatacctttacactctatactttcactattatgtttttcaaatttataactagcagaatcaaacttacaattgctaaaggaaagataatttaatggagagattcaggggtatatcaagacctaaagctctctttcctaatttgtactttattcctttctctttgaacggatattttctctgcactacttataaagatggcagaaaatgacaagctcgtccatgagcctacattatctcccagtcatagtgcctgtgatcacgtcactgatgtctattgtctttgtacagagggactgtgaaggtacacaccaggggttcttcctggcacaacctctgtgtagatagaggtgacaaaaacaaggcaacacaaccttggagatccatcatgctrctggaggagcatttcctggggaaaaaaaggagtcttactgcaaagatactttatactctgcccattaaaattgcactggatttgattaatgatgcaagtttcaaattaaaaatgaaattaatttgtagatt

SEQ ID NO: 706322 - DNA, 595 bp, Homo sapiens
aatagcatctatgtctaagttcaaaaccttattaaaaccttgcctgcctactaatgctaagtgcttgtgttttatacctttacactctatactttcactattatgtttttcaaatttataactagcagaatcaaacttacaattgctaaaggaaagataatttaatggagagattcaggggtatatcaagacctaaagctctctttcctaatttgtactttattcctttctctttgaacggatattttctctgcactacttataaagatggcagaaaatgacaagctcgtccatgagcctacattatctcccagtcatagtgcctgtgatcacgtcactgatgtctattgtctttgtacagagggactgtgaaggtacacaccaggggttcttcctggcacaacctctgtgtagatagaggtgacaaaaacaaggcaacacaaccttggagatccatcatgctgctggaggagcatttcytggggaaaaaaaggagtcttactgcaaagatactttatactctgcccattaaaattgcactggatttgattaatgatgcaagtttcaaattaaaaatgaaattaatttgtagatt

SEQ ID NO: 706323 - DNA, 1252 bp, Homo sapiens
ttttcatgagccataaacataccgaagaaagagagaagataaggactacaaaaatgtcaaggataacaaaagcaggttttaaatctatgcctggagtaagaactaatggccaatgaagcaatgctgaagagcagagmaaaaaactgacagcaaccactatttggctccatctgctccactgaggacaatcatttccaaattaaagagtgtaaagaaaaacctggttaggatttgaagtccaagagtgataaggggatagcaggaaacacctgttttaaacgagttctcatgaaagacatgtcagtcgctgaaacaacctgtggatatgactgcagaattgttgtcagaactccagggaaacaatgaacgaagtccagatactgataatcactgccctattttccaaagtagattctaaaaactccagaatggtgaacttaatgtaaaactctggcaaaatcaggaataatatagacggtgaacatttgactcctaacaattgctgatttcttttcaacactgatttaacaaagaaaatgtcacacgaaataacttccttccctttttttggataggattactagagcagccaaccagggaaataacagtgaaacaatagcttacagctgaaagagaccagtggggtgagttgagattacaatcctgaagttatcacttacactttactctgagctagatggggttccaaaggctttatatatacagtatcattagtcatctatttaatccttacaaggaccctgtaacatagaaactaacattactcctatttggcagaagagaaaactaaggcaaagttttcttgccaaaaggtcatacaggtaggatttcaacccagccaatgtggtctccaagttgtacttctcatattagtctacaatgcccttcacatgattagcaaggctgccaaaaatagagggagaaatgggaatcctcccttttccatacaagaaaaaggacagcagaacacatctgccctctctctcgcctcttatccactcacttctctgacgggaggagggaagactttgattgctgcttgggaggtgcagctaagcacactttcttggcatggtaaggtcatcagtgtagaatctgccacaaggggagtttacaatttaaggtaggtaaattccaggactgatatttaatatattttaataatcactttatcaccagaccaaccctcagagcaaccactggtgtgctactgagccctggtaagttaggt

SEQ ID NO: 706324 - DNA, 1252 bp, Homo sapiens
ttttcatgagccataaacataccgaagaaagagagaagataaggactacaaaaatgtcaaggataacaaaagcaggttttaaatctatgcctggagtaagaactaatggccaatgaagcaatgctgaagagcagagcaaaaaactgacagcaaccactatttggctccatctgctccactgaggacaatcatttccaaattaaagagtgtaaagaaaaacctggttaggatttgaagtccaagagtgataaggggatagcaggaaacacctgttttaaacgagttctcatgaaagacatgtcagtcgctgaaacaacctgtggatatgactgcagaattgttgtcagaactccagggaaacaatgaacgaagtccagatactgataatcactgccctattttccaaagtagattctaaaaactccagaatggtgaacttaatgtaaaactctggcaaaatcaggaataatatagayggtgaacatttgactcctaacaattgctgatttcttttcaacactgatttaacaaagaaaatgtcacacgaaataacttccttccctttttttggataggattactagagcagccaaccagggaaataacagtgaaacaatagcttacagctgaaagagaccagtggggtgagttgagattacaatcctgaagttatcacttacactttactctgagctagatggggttccaaaggctttatatatacagtatcattagtcatctatttaatccttacaaggaccctgtaacatagaaactaacattactcctatttggcagaagagaaaactaaggcaaagttttcttgccaaaaggtcatacaggtaggatttcaacccagccaatgtggtctccaagttgtacttctcatattagtctacaatgcccttcacatgattagcaaggctgccaaaaatagagggagaaatgggaatcctcccttttccatacaagaaaaaggacagcagaacacatctgccctctctctcgcctcttatccactcacttctctgacgggaggagggaagactttgattgctgcttgggaggtgcagctaagcacactttcttggcatggtaaggtcatcagtgtagaatctgccacaaggggagtttacaatttaaggtaggtaaattccaggactgatatttaatatattttaataatcactttatcaccagaccaaccctcagagcaaccactggtgtgctactgagccctggtaagttaggt

SEQ ID NO: 706325 - DNA, 3004 bp, Homo sapiens
ccagactctgtcctcctccccaacagtcagcaaccaaaccaagccatctggcttttccctgtgcagttgcaggtgcacagcctggtgttagggaagtttctactcctggctatgataggaactggcttttgactttggacacatcacatccattccctggttcagtttctcatggcccaagtggagctgattaaatctgtcctcctgaaagttctctgaaaatttaaagcactcttcaaatgtagggaggggctgtttctattagaaagttaggtcagttaatccaccatcatgagctctgacagtgggaggaagagcagaaagccccaactctacccacctttctgtggtcttagtttcctcccaaacccaaaggatctgtatttggaaagctttttttttttcctagctctggaattccatgacactgtgaatcttagcaggctcaggtaatcaagggcagtgctatcccagagaaaaaaatatccataaatagacccataggttctcagttaaattcttcagtgtttggatgacgggacttttgactgagacatttgctaaaactcccaggctgaatctgaaggtggcaatctctgaaaattataagaaactttggactacaagctttccaaaaaccaagtacaaccttagaaaatttatatcaagttttggtgctcgttatagaagacaccttgatcaccatgcttcagggaatatgagggttgttagaacatgtggagacttcctaatgcatgacagctaaagctgtatttcaaaatgagccttgctccctggtactcatgcaacagtgtgatcctattttcctcacctgcccgtctcaaaccttccacaccatacagaaggaccagaaagaacctggaaagttgccctctaagtcagagaatattgtacctattccttaatatgtccccagtggtatctccctcatctcacccaatcagcacagaaagttcacttaactaaaaaagggttttgtgtgcataggtacataaactatcattaaaagcaacttgaacacaaagctgaaagcctgacctagacatttacagaaacagcaccttttctgaaagccttagtttcaactctcctccctgctcacacctgttccccaagtccccgtctctaatacttacagtggccgcaggggacccagttcatcacaaaccaccagatgttcagcatcgaggcatggtggtagacgtgcaggaccgtgatctggtggttgttcttgcgcaggatgaagaagaaagtgtccataaattctatgagtttggagaagtagtaccaccagaggacacggataatctaagaggaaagggtcaaagatttaaggcttatcctcacggcttctctggaatatcacctctgacatgtttcactaatatccaaaaatctgatgtcaactcggagaagcccgagtgccccaagagctcttaatgtccatcagtggctgggagctatggtcactctccaagtacctttaaccaaagaacatgattgggttgggacagctggaggggtttgaaatgactacagggaatatttttgaaagggtccctgacactctttgagactaacaaaaacatgaggctcaaggttcaaaaccttgaagtctgcctattccctctggaagcagcctgcacagccattagcaaaggaaaaccatctgaaaaacgctattgatttcagggactaacatggagcagccgacctgataagtgacacagaagaaaaggaatcagaacctgcagtgtcaggtctctgcccaattaaacatgtcaaacaagtgctctaaggagatgactgcccatgctgagctgcgactgttggcctgtgatttaaaacaaacctcatgagtggaagtcagattttatttttaacaccactrctcggaaaaaagtacttggatgaatgattttaaaaatttaagacattgctcttatgatcctgattgtgtaaatataacatactgactgcatgtgatttttcctgccaattgttaaccggagttatttttacagagggggatgctttaggttttattttatacctttcacattcaaattttaatttgatgtgtatatattgccttttttattcttttaaaaatatcaacagggattgcctgggcagtgaggttatgggccattttgtattttatacaatttatttttaaaaactcaacacttataataataaagtttctgaaaaagagacagtaccttcatatctgattctcctgcggtgcgtgtgccctgacagaagaagttgtatttgccttcccatactcctgttactaactaaaaaagaagaaagagccagtcaccaacagcatctgagccatgtaaagtcctcattgaactttattagttgcagaatctgtgataatttaccttgggctgtgctgagccaagtttgctctgagaaaaaacaattgtaggcaagtgtaaacaaaaggaaagctttaatgacttgagtctcaatttcctaaggggtgggcttaaaagtcactcccaggctgctgccctcagagaccttcctttaccacgctgcttctctgcagaaccctcagcccgtcacccccttggtcctagcacaagtgcccagaccaagccaatcacaggctccctgctctgccccacagaagcctctggctgctttccctaagccagtgctcctcaaacttgagtgtgcagcaccagaattacctgaggggtgagttagtaaaacatgggtccctgggggtgtttctgttccagtaggtctgggggcctagaatttgtatgtctaacaaggtccaggtgatactgatgctgctgatgtggaaaccatactttgagaaccactgctgtaggctcagggataatttagtccaactttatcttcattatttcctgttgttgtatgtacaatcctccggatccatgaattaggcttcacaaactgaaggcttcacaagtgcccatgcctcagaatcact

SEQ ID NO: 706326 - DNA, 1660 bp, Homo sapiens
acactgacaggaaaatggacagggctgggagtggccagcacttcccaggaaaaagaccacgctgacaccaagccaaagcatcgattcccatcctctttaaccaggagtctctgacctgcactcaacctagggggcttcccagaattacaggttacaacagggagtagtaacagggcccagtgaaaaaaagtcccaatgaaaacagtcttccaaagctattcactagttcaagagccacacacagaaaataatgacagtaaaaatggattacgggcaggtaaattagaaccaattttaaagaattcctttttaacgcacattttccaaaagacactcctaatttaaaaagccgcttcccattataagattctggagtgtttttggtaaccatgcaactatattataattgtgtctcattttaagtatctcactacaaaaaactgactggagctgaccattctctttataaactaccctatatttaaagatacagctgaaaggagcaagagagtgtgagggagttcagcacaccttcgtctgactcacccccaccaccatggatcagttctgcgctcctggctagttccctccccaygtactatactaagtgttgtagaattttaggatccttgggcctgaattcgagagaaagactggaactaccatagcctggaatacaaaaacctggaaatactaacacgagcagaacaaagaacaaaacccaaagccctaaagagagtcctgctcatgtggaaaatccatctgtccactgttcaactccctccaggggcaagtatatgcccaggtgaatcacgtgtgggaggttaagtcaacatcagtgctcactttgaactaataatcaaactagttgctagaagcatgtttgaaaaaagacactacaataagctttacagcaaatcagtccccctccacctcctttccacttggctcccaaggacaacagaacatgaggggatgggggtaggtggcaacaacggaaggaggtggttggggttaatgaggagaaggcacagtcacaattctcaagatgaagtacgtctcaaggagagtgcaaatattaagcatcttggccatttctacctggggtaggagagagtgacaaagctgcccagcaaaggaaaagtactgggatcttaaggcaaatctgttttaaaaggtatcaagatttttaaaaatatacattatagtaaagagttggtataagaattatattaaagaaaagtttatttcctaaacccacaaccaggctgtttgctgactctaaaacagtaaagatatttttagggccaagtcttggtttgtctggcttctaaggcagcagtcagcttgctttgaaagctccctttcctgtggtatcagtcaagtcacattccttttgatttaaaaacgtttagctattgtctagcttaacttcatcatatcctgctttactttttttttaacggttattgttcacctaaaaatgagtcagctgagtttacaaacccatgtgctgcaaggaatcagactgagatttccttgcattttctcttctctcattcccatccatcacttttatcagtcaactcgttaacgttaggcaggcatgggaacattcttcaagttggctgccagttacacagaatgaaaaattaaatgg

SEQ ID NO: 706327 - DNA, 629 bp, Homo sapiens
atgtaatacgtgatataaaggaagggcaaaaaattagcatgcactctctgatgggttaaaagaaaagccctgcatgaatgtatatttttaaaatggtgttcgtgacctctaattgtgggtctacaaactgttttacctttactatctagcaagtagtcatttgatagacacaaagcaatatgacacaatttttttcaaggtatctttaaaaccaaatatttgataatccatctaaatatttgaaaagtatttaatcaattgtttgcttttatgaaatgacactgggtaatacggtattgtattagtcaaaatggtccaggttttctatgttaacgaacttctccaaaacctcaaaggtatagcctaaaggtttatttttcatccacactacattgatagcataaacaggttcatcaatgggtaaactacaaatctgctccccataatgttgactctggggtcaggcaggtacagtaggctttacctggatcattgctagctttgtgacagagggggaaaaagacagcaagccatgtgctggttcctatagcttctgtccaggagtaayacaagtcactttggcactttttattggctgaaaagaaatcacaagaccaaacctgacatca

SEQ ID NO: 706328 - DNA, 1321 bp, Homo sapiens
tgatcatatgcatgcatgtgtctttatggcagaatgatttatattcctttgggtatataccaatatatccaaataataatgggattgctgggtcaggtggtcattctgttttacgattttctgtgagaaattgtcaaaccgcttttcacatagctgaactaatttatattcccaccagcagtgtataagcattctcttttctccacaaccttgccatctgttattattttgacttttaaattcaaaaaaaaaaaaattaagaacactgatacccaaagaagttgagcaaattttctaaggtcatacaggtatttaagcatcagagttaagatctgaaccagacttattggattccaaagacaaagtttttgacacctccttaataaaagaatcagaatgaagggataaatgcataatctgaatttcatttcaggtgaggcttaaaggtgaagcagagattagacacattttcataattttttttttttttttgagatggagtctcgctctgtcaccctggctggagtgcagtggtcgatctccgctccctgcaagctccgccccccaggttcatgccattctcctgcctcagcctcctgagtagctgggaatacaggcacccgccaccacgcccggctaatttttttgtatttttagtagagacggggtttcaccgtgttcgccaggatggtgtcgatctcctgacctcgtgatccgcccgcctcggcctcccaaagtgctgggattacaggcatgagccaccacgcctggccttaatattttcaaaaaacacaagaaatctcaaagataccttatttcactaaacataatattatttatcactgtctgttgtattttttccaaactcccatgaaggcctaatattaagcaaacccatactttccaattagaattgatcaatgcactctcctcttccagaatggagtctccatgggctgatttcagggactttggatcggtcaacatttacaatttactatatgttcactgtgtcttaaaagaagtcagagcacawctgacttcaagcagctcacaaggtaaaggaggaaatgaatctgtgtaattttcttctaaaatggcctcttcaactagtgttgggaagaggagatgctgcctcagtagctgactgtctgcaatgtgcaagttagaacagcctggtcccagggctcttatactttatgccctgttcaagccggaagtacaggctttgtaaggtttcttagggtttgcaactttcccattgtattagtctgttctcacgttgctaataaagacatatctgagactgagtaatttttaa

SEQ ID NO: 706329 - DNA, 1882 bp, Homo sapiens
aggaactgggattttgaacccaggcaacgtaactctagggcagtggtgtccaatcttttggcttccatgggccagaagaagaagaattgtcatggaccacacagaaaatacactaacactaacgatagctgataagcttaaaaaaaacaaatcacaaaaaaaatcccataacattttaatagagtttacgaattcgtgttgggccacattcaaagctgtcctgggctgcatggggcccatgggcaagggttagacaagcttgctctataccagtagctgagcatgtgccagagcctgtgccaggagctgagcatggccaggaactgaggacagagactctgtggaccagaaaggctactgtcagatgagggagctggctagtaaacagacacaaaaactatttaataaaatgcaattaaataaaaagtacctaattataattgtgaaatatgccgtgaaggaggagtagagaatacaatgaaaatgcaggacagaaagacttaatgttgatgggtggtggaggtgggctggtcaggaaaggattccttgaggaagttgacatttgagttgagacttgaagaaacacatacgttaggcccctaagaggtgggcgggtcaatgagccaggtagacagaagggcatgtgcaaagactctgagactgaggaagagctttgtgccttcgaggagctgcaaagccaagtcagagtgtccactctctacagatgagttaattccctggggagctgatgtgtgtgtgtctttatctcagtctacagcagagaactgggcgcacggtaagggggataaattcccttaagcttctactaggcaccagggcttttatcccttacaaacctcaaaactgtgaggtagtgaggtagtgtttaccggtccctacttcacaggtggggaaactgaggttcagaaaggtgtcttgctcaaggaaacaaaataggagttaacatttacaaagcacttagtatatgccaagggctttacagaaattaacttaaccccccaataactctacagggtagatgttattcctatcatccctctctacagaggagacatccaaggcaaaggagtattctaaagaacccaagccagcatggtggctcgtgcttgtaatcccagcactttgggaggctgaggcaggaagatcacttgagctcaggagttcaagaccagcctaagcaacataccaagaccttgtctctactaacaattaaaaaaaaaaaattagccaggtgtggtggcgcacacctgtagtcccagctactcaggaggctgaggtcagcggggggattgcttgagcccaggagatcgaggctgcagtgagctattatcacaccattgcactccagcctgggcaactgagcaagactgcatctcagaaagaaaaaaagaattcacccamgcttacatagctagtaagtaccagagtaaggattcaaaccaaagcattctgggatctagagtctgtatcctaaccacaggctcaatttccattcaataacaagcagcagagtaagattctaaacctggagctgtctgatgtccaagcccctgcctctccactatgccatattgccatagtaatgcttactgaatgaatacatggctgaaggcacgcatgcaggcgtgcacatatgtaggggcaaggagacagcctagggaagagttaagagcacacagttttagaattaacaggcctggattccaatttgggctctgccaaggccagggacagaatgagatgaccgaggcactcgcctcaggggcaaaatttatggggttgccaaaaaactcagtgatcaagaggaatcacattttaatgcaatattttaaaagtctaaattaatgcaaaaataaatcct

SEQ ID NO: 706330 - DNA, 1489 bp, Homo sapiens
ggacagcccaggtctagaatctttttcaatccatagctcattttacagggaagagctgtctcatctttctcccttctcttagaaaagatgtcctgatcgtagcctccgggctgacaaattccacatgagcccggagggaggagctggaagccacaatggagagaaagcccgggcctgcctgggtgtgaagaggctgtggctgctggggatgctttctgtctctccacagccaaattactcatgaagccccagggatggggagagtccctgcggaagatggccacaatcctgcttttcctcctgaccccaaaattcccttaattggaaattcagtctgagcttgaaacccatccaggcagccacctccacccatggcaacatctccrtgggcacgcaggactcctgccccagacacacaaggaatccaatcccacagcagcacctcatgcaagaggctggatcccagcttctcagtccccaggctcacttcccggctgtgggcctggcagccttctcggtgggagctcaaaacctccacatgcaggggcacaggcattggcaggaaggaccaggagggcaaggaaaataagggggcatccctccttctccccagacttccacttcctcacctttaaaatcaaatgttgttagatcatagcaatgattgtctttatgctggctgccctgtgccaggcattttacaggcattagctcgcatactccttctaaccaccctatgaggaaagaggatcccagggtcagagtggtgaagcaacttgggcaaggtcacacagctcttcagaagaagagctggggttccaattcatggtcttctgaatcaagaacctaagctccttcctgctgtgctctgcctaagtggcccagggtgttccaggacagtccgagcttacacttgtcataaccagatatatttagtgtaattatttaaaatgttccctttggaagaaggagcaaatcttccatacagaggaattttaaataatataggtagatattcccccctccaaaaggtgtgcctgaattccagacccttctccctcttgagtgtgggctgcactgagtgtctgaattccaaaggatggagcgggaaaagaggaaatagtaactgtacatcagagaaacctggctgacccaccttagccaagtgatcaaagttaacatcctcagtttataagaaacatatcagacaaacccaaattgagggacactctataaactatctcaccagtactcctcaaaactgttgggctgggcgtggtggctcacacctgtaatacgagcactttgggaggccaaagcaagaggatcacttgagtccaggagttcgagaatagtctggccaatatggcaaaaccccatctctattaaaaatacaaaaattagccaggtgtggtggcgcacacctgtggtcccagctactttggtgactgaggcacaagaatcacttgaatccaggagatggaggttg

SEQ ID NO: 706331 - DNA, 411 bp, Homo sapiens
gggagtggcttatgctaataaacaatgaagacagctgaggatcgcttttcttgacatctccttgtccctgctggtttcttcactttttactgcctggaccagatcctgttctggtcagcagggtggtgaccagaaaacaagttcttctggtctcctacctcagttgcaagaaactcaaaactccattttaaactttaagccttatagtatcttctgtttgagtatttaacaagcatttgtttttccttgaaaatatatccagccaagaccttatgaagaatgtgagctaaaattacggtattttacttgcctggaaacagtacttctcaaatgttaatgtgcatacargtgacttgagtatctcattaaaacgtagatttagattgtgtctccggggtgaggtctgagaaa

SEQ ID NO: 706332 - DNA, 1526 bp, Homo sapiens
caactatattgttactgtggggccacaaggctaatgataaaaagccaacacagaatggctaaatatgaaggctgaaagtagctggatgctgaatgacattgctgagatgcttttttgaccctgaagccatcaactttcaaagtgttgtctgcgaaataatagaatgcctttactgtttagcccactgtgactggggcattctgaagctttcagcagaaggcattgctaactaatacacttatgctcaggctaccatattttggtcctgcagtttctacccaaaattccaaatgatgggactatctcttatttctaggattggctgacacgcccatctcccacctccccttcttgggagctgacgaacagcctgttgaatctgcttagatcctttgcagggtgaatgaaatataaggaaacttcttgaatgaatctttgacattgactcaccttaaacaggcacatttgcttatattttggggcttggattctttgatgtattatcaaacttcagaattcacagctttcagggaatttttgactgtatcagtttagaaagacttggatgcaaataacagaagaattataatgactaacaattatatggtgagtataacttgccaggtagagtaattagcacttcatttacgctaactcattgaataactttacaacaaccctatgtagcggatactatcgttccctccattctccatatagggaaactgaggcacagagctagtcagtaacataactgggctgccacagtatagagccaattagcttcggctaatatagagccaattagcaaatggcttcggccataacgacatccatcatttacttaaaacgaagtttggcattgtcagcccaggagtcctccagcctagaccttggccatgctcactgtcttaagatgggggctgggatcctgtatccctttttcccaatggatgtgtccaaaacaaaaagggaggaacagsggcagtagtgccaactccttagggagagaaagtctccctggagcactcatccccgctgacttcttgttgtacctcattggctagagtcaggtcacatgctcaccttggtccaatcactggcagcttggaatgggtgtggcatgcttgactagaccaatcacattcatcccctggggccaggcactatggctgccattaaccagggttcagttagtgaggaacaagggaatgggtgttgggcaagcagctggtgtcatctgccccagcagctgacgtttactgagcatgtacagtgagccaggctctgtcctaagctcttaatgtgtaatatctcatcaggtcctcttgttatttattattatttagagacagggtcttgctgtgttacccaggctggactgcagtggtgtaatcccagctcgctgcagccttaaactcctaggctcaagcaatcctcctgcctcagcctcccctgtagctaggattataggaatgagccaccacacctggctaattaaaaaaaaaaaaaaaaaattttttttt

SEQ ID NO: 706333 - DNA, 1526 bp, Homo sapiens
caactatattgttactgtggggccacaaggctaatgataaaaagccaacacagaatggctaaatatgaaggctgaaagtagctggatgctgaatgacattgctgagatgcttttttgaccctgaagccatcaactttcaaagtgttgtctgcgaaataatagaatgcctttactgtttagcccactgtgactggggcattctgaagctttcagcagaaggcattgctaactaatacacttatgctcaggctaccatattttggtcctgcagtttctacccaaaattccaaatgatgggactatctcttatttctaggattggctgacacgcccatctcccacctccccttcttgggagctgacgaacagcctgttgaatctgcttagatcctttgcagggtgaatgaaatataaggaaacttcttgaatgaatctttgacattgactcaccttaaacaggcacatttgcttatattttggggcttggattctttgatgtattatcaaacttcagaattcacagctttcagggaatttttgactgtatcagtttagaaagacttggatgcaaataacagaagaattataatgactaacaattatatggtgagtataacttgccaggtagagtaattagcacttcatttacgctaactcattgaataactttacaacaaccctatgtagcggatactatcgttccctccattctccatatagggaaactgaggcacagagctagtcagtaacataactgggctgccacagtatagagccaattagcttcggctaatatagagccaattagcaaatggcttcggccataacgacatccatcatttacttaaaacgaagtttggcattgtcagcccaggagtcctccagcctagaccttggccatgctcactgtcttaagatgggggctgggatcctgtatccctttttcccaatggatgtgtccaaaacaaaaagggaggaacagcggcagtagtgccaactccttagggagagaaagtctccctggagcactcatccccgctgacttcttgttgtacctcattggctagagtcaggtcacatgctcaccttggtccaatcactggcagcttggaatgggtgtggcatgcttgactagaccaatcacattcatcccctggggccaggcactatggctgccattaaccagggttcagttagtgaggaacaagggaatgggtgttgggcaagcagctggtgtcatctgccccagcagctgacgtttactgagcatgtacagtgagccaggctctgtcctaagctcttaatgtgtaatatctcatcaggtcctcttgttatttattattatttagagacagggtcttgctgtgttacccaggctggactgcagtggtgtaatcccagctcgctgcagccttaaactcctaggctcaagcaatcctcctgcctcagcctcccctgtagctaggattataggaaygagccaccacacctggctaattaaaaaaaaaaaaaaaaaattttttttt

SEQ ID NO: 706334 - DNA, 890 bp, Homo sapiens
ccttccgagtagctgggattacaggtgccccccaccacacccagctaatttttgtatttttagtagagacgggatttcactgtattggccaggctggtctcaaactcctaaccttgtgatctacccacctcggcctcccaaagtgctgggattacaggcgtgagccactgctcctggccaggcttaaggtccattgtgagagcaatattcattcttggcatacctgtatcaatgtatcttatgtaccccataaatatatatccctactatgtgaccaaaaaaattaaaaataaaataaaaatttaaaacccatacattctccatgcagattttcctygtacctcaacccaatgtcatctcttcttcattagttatcccaatgcagtttgtacttctccttggtatctattgattatatttactgtgtgtcaatttcaccattttacctctcttccctatcctttcacctgcactgatagaatgtaactgtgagagcaagattttacctcaatcatctttgtatcacttgaaacaagaagcatcatccttaatcctggagttcaataaatcattaataaattcaattgaatacaagctgccaatttgtttgacatttttgtgaatgctttctgtctttctagcttttcaagtttggtataggagggtttcatatgtaaataaatatttaactatggtttttttaatgaaatcatttatgttctttcccggcacaattttcattggaagatctttgaggattccttaaataaggttctaaaactaaagatggaatgtgcccccataagggaatggccatatcctgtgagacataggcaggaatagtcaggaattcctgagggtggagaggagaaccctggcacatgtaatca

SEQ ID NO: 706335 - DNA, 1456 bp, Homo sapiens
caagacatctcctgacttgcagaccctatacttttcatgtagttctgtgtttgtctttaggattttaaaagcattattcttcttggcattatctctgcccaaaccagggcaaaaacgtttataaagtaagagggtgggtgaataaaccaagactatagagctagcaaaggaaaaggactcagacaagagaccatgtcccctagttcctaattcagtgctctgtgattcagttgagcattaaagcaaactaaggctgcataagaattaaaatctgtgatccttagactcttacgtaaaataggctgctgtcttattttctgtagtccaatggtatcggtctctatagcagcgattctgatttcctttagacggtggagtaattgtccccactcgagagtctgaaaactctcagggatcctcttctcaaaaaattgtgtacacacacaatttgcaggttcaggtgattcacataacacctcaatatgagggcaagaccctgggctgtgaatgaatgttctaaataccaatgccagctgtgtttgtttattgagtgtttgctatgttccaggcattattctgaagactttatatgtgctacttcatttaatttctgcaactccacttgaagtaggtactattatcatttctattttatttatttatttatttttttgagacagagtttcgctcttgttgcccaggctggagtgcaatggcgcaatctcagctcaccacaacatacgcctcccaggctcaagcaattctcctgcctcagcctccctagtagctgggattacaggcatgcgccactatgccaagctaatttttgtatttttagtagagacagggtttcttcatgttggtcagactggtctcgaactcccaacctcaggtgatccacccgcctcggcctcccaaagtgctgggattacaggcatgagccactgctcccggcctattatctctattttacagagaaaacagatttagagtgcatctctttatttaacactattccttaaatactgactgatgtcaggcaagatgctaggtactgagtatacagtggtgcacaaaaatggacacagttccttttttcatccagcttggaatccagtgaagcaaagygattgcctgtatacgcagaaacatgccacgagggaaacgtcatgggtggggggcgtgtgtcaggcagtgataataacatggacccatggagttctggaaagatctgaagaaggaagttgtgcctggaccactatgcaaactgggtgcaagagctatatatgaggtgagaggtgtcagatgatgtgtgggagttaaatcatgtgctagaggttaactccaaaggacagaggctgagctcaaaccaagttcatctgcccccaaggtcagaccctgccctattgtcaccacagttcagttcctctgactatcatgactcctagtgacatat

SEQ ID NO: 706336 - DNA, 1456 bp, Homo sapiens
caagacatctcctgacttgcagaccctatacttttcatgtagttctgtgtttgtctttaggattttaaaagcattattcttcttggcattatctctgcccaaaccagggcaaaaacgtttataaagtaagagggtgggtgaataaaccaagactatagagctagcaaaggaaaaggactcagacaagagaccatgtcccctagttcctaattcagtgctctgtgattcagttgagcattaaagcaaactaaggctgcataagaattaaaatctgtgatccttagactcttacgtaaaataggctgctgtcttattttctgtagtccaatggtatcggtctctatagcagcgattctgatttcctttagacggtggagtaattgtccccactcgagagtctgaaaactctcagggatcctcttctcaaaaaattgtgtacacacacaatttgcaggttcaggtgattcacataacacctcaatatgagggcaagaccctgggctgtgaatgaatgttctaaataccaatgccagctgtgtttgtttattgagtgtttgctatgttccaggcattattctgaagactttatatgtgctacttcatttaatttctgcaactccacttgaagtaggtactattatcatttctattttatttatttatttatttttttgagacagagtttcgctcttgttgcccaggctggagtgcaatggcgcaatctcagctcaccacaacatacgcctcccaggctcaagcaattctcctgcctcagcctccctagtagctgggattacaggcatgcgccactatgccaagctaatttttgtatttttagtagagacagggtttcttcatgttggtcagactggtctcgaactcccaacctcaggtgatccacccgcctcggcctcccaaagtgctgggattacaggcatgagccactgctcccggcctattatctctattttacagagaaaacagatttagagtgcatctctttatttaacactattccttaaatactgactgatgtcaggcaagatgctaggtactgagtatacagtggtgcacaaaaatggacacagttccttttttcatccagcttggaatccagtgaagcaaagcgattgcctgtatacgcagaaacatgccacgagggaaacgtcatgggtggggggcgtgtgtcaggcagtgataataacatggacccatggagttctggaaagatctgaagaaggaagttgtgcctggaccactatgcaaamtgggtgcaagagctatatatgaggtgagaggtgtcagatgatgtgtgggagttaaatcatgtgctagaggttaactccaaaggacagaggctgagctcaaaccaagttcatctgcccccaaggtcagaccctgccctattgtcaccacagttcagttcctctgactatcatgactcctagtgacatat

SEQ ID NO: 706337 - DNA, 1716 bp, Homo sapiens
ttgggtttattgaaaatgttaaagaccacaaaaagtcattttcatctgtgtttgaaagtagaacaaggaagtgattccaaactgcttggggcagatggtgtaataataacagataacagaactggtaaattcatattctgttttcacgttcagcagcaaggaaagtggtctgctggctggaaggaaaagaaaattatrccttgaattaattttggggggtgctttgggtttgggggacttttttttttcacttcgtctcatttatttttgccctgtgaggtagtcacagtagttatcctactttactggggtggaaattgtgacttagcattaaatgacttgtccacattcacaaacaatgtaaagagggagttgactgcaagtctacatagataagtggacagtaagacaaagcctggtcactttaaatgagaacacaggacaggcgcaagttatgccaggctgctgagaaaactggaatgttgggcaaatagtagatactcagaatattcattttgaatgagtgaatatgaactgaggattaatatcagtaactactgagatctttcagagaccaagagatgaatgaataagggaaatgtcaattaatttttcacaaaaaggaagcagattccataattcacaaacagatcagctattctcagatggtgaacctagaaaaagtcaagaatggatttttaagctaatggttcatgactgttaacaaaggaatgtggtggttactgggagtgaacataggttcacagggaatgtcatgttatgctagcttaatttattttattgtttttgaaatagagctacttcataagatcagaggattgactaggatgacttaattttcataatatcataaaaattgcaaccactgttgaacgtttactctatgctaggctctgctttatttacccctcacaatagttccagtaggtaagtactttgtttatctccctttttaaagataagaaacagagaatcagtaagatcaagtaatttacacgaattacttgccagtgagtggctgagccggaattgaggctaaatttgtccgactcaaagcagttgatggtaactactacaccatatcgtgttgacacacagccaggctgatgagatctttgaggttaaggtaaactgaatataccaatagggtcataatacctttagatagattcacaacaggttgtaaacaaacctaaagcacattgattaatattttggtcttaatttgcctggcatttgaattaatgagttggctaaagacatagaaaacacacttgtcacttttacagttgacaaaaatcaagaagaaaagccaatcctatcaatcctattaactaacacttgcatagtgtttctcatattaaagaatagttttgcctagattgtcatgtttgattctcacaactatacagaacagacttattgctagatcccaactctcctttatttttacagtgggcagaactgaggttcaggaaaatcaagtgactcagtcagagtcatacggtgaataatctgaggacttctcttttctgtcacagtgcaatagatatggagtcatgatttgaaaaagtatcaagacatgcagatggaagatcgaaaccagtaagatgaaatacgaaggtggtgaatgtaaagtctaacgctgaagtaaaaatatgttcatttgaatgtttaatggaagccagcatttca

SEQ ID NO: 706338 - DNA, 643 bp, Homo sapiens
taaatagttcctttctcaaatacctccatttaagtgtggtagctcttcctccttccaccctcactttgatgaatctagtgtgcagctctcttatggggttttgattttacccatggcygcagatctatccgtgcatcagacacactcatacacagctgaatcccagtgtagattccctggtactcatccctgacattcctacagaaagatcattttactgtacatttgaccaccttcctgtttgctttgacatctcatttattcattcatttgttcaacaaatggtccacatttttgcatgccttaagctgcctttgctgtttttaaaatggtgaggcagcatacagattatggaatttggagaaaggcagacatttttgccacttactaagaggaagctcgggcaagttagttagcctgccccgaccttggtttccttaattcttaaggatggcagttgtgagtattaagtgggctaaggtatgaaaagtgccgagagccatgcctggcccacagccgatgtcctagatcagagttctaaggaaaatgactttaaggcagatatctgtgtaaagaagttcctgcaggccaggcgcagtggctcacgtctgtaatcccagcactttgggaggccaagacgggc

SEQ ID NO: 706339 - DNA, 593 bp, Homo sapiens
tagtaaaataattcatgtaagagaattcattttgatgtagcatgcaaacatctgactgaaaagaagtagaaaggtcagaatatattttataaagaacgcataaaattgaataacaacaacaaagcccaattcaaaaattggcaaaagaaatgaatacacatttatccaaggaaaatgtacaaatagttgataagcacatgaaaagatgcttaacctcactaacttttatgaacatgcaaaccaaaacccacaatgagatgcccttcatatccatgagggtgggyattataaaagcagaaccagacaagtgtggacaagaatgtaaagaaattggaacatttgtgcactgttgatagaaatgtaaaataatgctaccactgtaaaacacagtttggtagttcctcaaaaatttaaacacaaacttaccatataatagactaattctacttgtggatatgtatgcaaaacaattgagagtaaagattcaaatggatgcttgcatgtcaatgctcatagcagcattattcataatagtcaaaaatgataacaactcaactgtccgtcaacagatgaatatgtttttgaaaaaatcc

SEQ ID NO: 706340 - DNA, 2744 bp, Homo sapiens
atggactaactrcaaatactgaaatgccaatcaatgggtactcaaaagaggagattcccgagtcctgcacctgcagctaaagacagaaacgctatttatacaaagtcgggtggtttaaagatatgtaagttatccacataaattatttgctttcttataaataaaataagaaaaataaatcaacattgcccctcaaggaaaccaggcaatgtgcttaaaagaaactttaatgacctttgccttcatttattaatgtgttgctttcctaggaatttggattttggagggaagttcttcctgggttatctatgggcacaccatgtccctacacactcaagacatatggcaagaggagaagggcatttttggcagaggaggttcacgccattctcctgcctcaacttcccgagtcagtcgctgggactacaggcgcctgccaccatgcccggttaattttttgtatttttagtagagatggggtttcactgtgttagccaggatggtctcgatttcctgaccttgtgatccacccatcttggcctcccaaagtgctgggattacaggcatgagccaccacacccagccaaaatcaactgtgtttttacctcaaaacaaaaaatggttttgcaaagggagcttggcttcatctgtttcaacagtgtaaagatttgaaggtcaaagttttcctcaatatggctgatctaatgcaaagctcaagaacattcatgtttttcaccaaggtaactataactaaagggacagataacttttgtattgaagccacatgggaagaaaaagaaggacacattgtcttccttacaggagaaaagagcaattgctctgtgtatacaagacagagaagtcaatggcctaatggattattcgatcatattcccagagcatgttcaactacattgcctgattacggtcagacaactagaaaccaaaataattcttgtaaaaccaaggggcatgtattatttttgctactagacacaggcaactggtagggctggaaatacaagacttatcccagctagaagcagcaaccacctgattcattgccctgtatttccaaaagtatcctctccttttctgtaaaaagagaggaaaatggaggaagatacttccttgtcagaggagaaggatatgttcttgcatctgataactaaggatgaccagtctcaataatccatttctaagcccctatagaaaataaccacgttttctcctctccatgacccctagacaaaggagactaatgacctcccaaacaagttaccacaagtacaagttatgactatcaccattccttctgtctgcaaggtaggagcctcttcctcactcaacggcccttccccagaactctgattctaatagttaacacttgttgtacaatacactttgtttccaaagtctggtgatgggtcgcaaagaacagagcccacattcaaatttcaaaacagaatagtttttaattatatcaggattctggcttatagaatcacagaatttcagaattaggccaacctctttgacttgactgattaggaaattaaggttcagcacaggctgatgatttgcaactagtaaaaataataacggtgaatatgcagtacatgtttactatgtccttggtactgccctaagacttttgtgaggatcgcctcattcctcaagacaaccactgattacatactgctattagatccattttgtagatgaaaacctgcagcacaaattgcttaagtaacaagcccaaggtgttcacatcagtgcacaatggggccaggaatgaaatccaggcagtccaaagccagatcagagccctcattccaatttgcaatgttgcagcagacgcacgactggcattgagcttcccttgccccctgtgcagcctgccttgtgcttctcatatcacttagctcagctcaaataggaacattctgttaggagccttagggacctgagatctcattaacctctctactacttctttcaaatagcctcatgggtacccataagtattattttatttctggctcataaactttccaccaggacaggacaccacatcagtgaagtcattaaatctttataataacaatattatgctaatggaaattattagtctattcctcatcccccaaaaaccatctggtaggtttacctggccaattactttgagatgtcatagtgaatcttaaagcataaagaatatagggattcataactttctctgagcagtggagttttccatgtggtaacaagctggcatggctggactattggatttagacataaacaggatactggaaaaggctgggggagagcacacggcagctctcagattagaattcaggtggtagggtagaaagcataggtatttccaagtccaggctttctactgggagaatgggttgccaatattttgattgcttcatgaatttcttcataaaatggcttgttctttaatatcaaataataaaacgtaggtattagggcccatttaagtaatttagagtaattagagtcttaagtagggagcacatgttcagagcagaacaatctctctccaaacaacagtgatgtcagaggttttaggtgtgagtctgttttctctctctcctccctgtggctcaaacgcatggtgtggtttcccttcctggagcccagttacccagtaactcctgaaatggctggataaatgttggctgccatgcacattcaaccttgaaagcaca

SEQ ID NO: 706341 - DNA, 2744 bp, Homo sapiens
atggactaactgcaaatactgaaatgccaatcaatgggtactcaaaagaggagattcccgagtcctgcacctgcagctaaagacagaaacgctatttatacaaagtcgggtggtttaaagatatgtaagttatccacataaattatttgctttcttataaataaaataagaaaaataaatcaacattgcccctcaaggaaaccaggcaatgtgcttaaaagaaactttaatgacctttgccttcatttattaatgtgttgctttcctaggaatttggattttggagggaagttcttcctgggttatctatgggcacaccatgtccctacacactcaagacatatggcaagaggagaagggcatttttggcagaggaggttcacgccattctcctgcctcaacttcccgagtcagtcgctgggactacaggcgcctgccaccatgcccggttaattttttgtatttttagtagagatggggtttcactgtgttagccaggatggtctcgatttcctgaccttgtgatccacccatcttggcctcccaaagtgctgggattacaggcatgagccaccacacccagccaaaatcaactgtgtttttacctcaaaacaaaaaatggttttgcaaagggagcttggcttcatctgtttcaacagtgtaaagatttgaaggtcaaagttttcctcaatatggctgatctaatgcaaagctcaagaacattcatgtttttcaccaaggtaactataactaaagggacagataacttttgtattgaagccacatgggaagaaaaagaaggacacattgtcttccttacaggagaaaagagcaattgctctgtgtatacaagacagaraagtcaatggcctaatggattattcgatcatattcccagagcatgttcaactacattgcctgattacggtcagacaactagaaaccaaaataattcttgtaaaaccaaggggcatgtattatttttgctactagacacaggcaactggtagggctggaaatacaagacttatcccagctagaagcagcaaccacctgattcattgccctgtatttccaaaagtatcctctccttttctgtaaaaagagaggaaaatggaggaagatacttccttgtcagaggagaaggatatgttcttgcatctgataactaaggatgaccagtctcaataatccatttctaagcccctatagaaaataaccacgttttctcctctccatgacccctagacaaaggagactaatgacctcccaaacaagttaccacaagtacaagttatgactatcaccattccttctgtctgcaaggtaggagcctcttcctcactcaacggcccttccccagaactctgattctaatagttaacacttgttgtacaatacactttgtttccaaagtctggtgatgggtcgcaaagaacagagcccacattcaaatttcaaaacagaatagtttttaattatatcaggattctggcttatagaatcacagaatttcagaattaggccaacctctttgacttgactgattaggaaattaaggttcagcacaggctgatgatttgcaactagtaaaaataataacggtgaatatgcagtacatgtttactatgtccttggtactgccctaagacttttgtgaggatcgcctcattcctcaagacaaccactgattacatactgctattagatccattttgtagatgaaaacctgcagcacaaattgcttaagtaacaagcccaaggtgttcacatcagtgcacaatggggccaggaatgaaatccaggcagtccaaagccagatcagagccctcattccaatttgcaatgttgcagcagacgcacgactggcattgagcttcccttgccccctgtgcagcctgccttgtgcttctcatatcacttagctcagctcaaataggaacattctgttaggagccttagggacctgagatctcattaacctctctactacttctttcaaatagcctcatgggtacccataagtattattttatttctggctcataaactttccaccaggacaggacaccacatcagtgaagtcattaaatctttataataacaatattatgctaatggaaattattagtctattcctcatcccccaaaaaccatctggtaggtttacctggccaattactttgagatgtcatagtgaatcttaaagcataaagaatatagggattcataactttctctgagcagtggagttttccatgtggtaacaagctggcatggctggactattggatttagacataaacaggatactggaaaaggctgggggagagcacacggcagctctcagattagaattcaggtggtagggtagaaagcataggtatttccaagtccaggctttctactgggagaatgggttgccaatattttgattgcttcatgaatttcttcataaaatggcttgttctttaatatcaaataataaaacgtaggtattagggcccatttaagtaatttagagtaattagagtcttaagtagggagcacatgttcagagcagaacaatctctctccaaacaacagtgatgtcagaggttttaggtgtgagtctgttttctctctctcctccctgtggctcaaacgcatggtgtggtttcccttcctggagcccagttacccagtaactcctgaaatggctggataaatgttggctgccatgcacattcaaccttgaaagcaca

SEQ ID NO: 706342 - DNA, 2744 bp, Homo sapiens
atggactaactgcaaatactgaaatgccaatcaatgggtactcaaaagaggagattcccgagtcctgcacctgcagctaaagacagaaacgctatttatacaaagtcgggtggtttaaagatatgtaagttatccacataaattatttgctttcttataaataaaataagaaaaataaatcaacattgcccctcaaggaaaccaggcaatgtgcttaaaagaaactttaatgacctttgccttcatttattaatgtgttgctttcctaggaatttggattttggagggaagttcttcctgggttatctatgggcacaccatgtccctacacactcaagacatatggcaagaggagaagggcatttttggcagaggaggttcacgccattctcctgcctcaacttcccgagtcagtcgctgggactacaggcgcctgccaccatgcccggttaattttttgtatttttagtagagatggggtttcactgtgttagccaggatggtctcgatttcctgaccttgtgatccacccatcttggcctcccaaagtgctgggattacaggcatgagccaccacacccagccaaaatcaactgtgtttttacctcaaaacaaaaaatggttttgcaaagggagcttggcttcatctgtttcaacagtgtaaagatttgaaggtcaaagttttcctcaatatggctgatctaatgcaaagctcaagaacattcatgtttttcaccaaggtaactataactaaagggacagataacttttgtattgaagccacatgggaagaaaaagaaggacacattgtcttccttacaggagaaaagagcaattgctctgtgtatacaagacagagaagtcaatggcctaatggattattcgatcatattcccagagcatgttcaactacattgcctgattacggtcagacaactagaaaccaaaataattcttgtaaaaccaaggggcatgtattatttttgctactagrcacaggcaactggtagggctggaaatacaagacttatcccagctagaagcagcaaccacctgattcattgccctgtatttccaaaagtatcctctccttttctgtaaaaagagaggaaaatggaggaagatacttccttgtcagaggagaaggatatgttcttgcatctgataactaaggatgaccagtctcaataatccatttctaagcccctatagaaaataaccacgttttctcctctccatgacccctagacaaaggagactaatgacctcccaaacaagttaccacaagtacaagttatgactatcaccattccttctgtctgcaaggtaggagcctcttcctcactcaacggcccttccccagaactctgattctaatagttaacacttgttgtacaatacactttgtttccaaagtctggtgatgggtcgcaaagaacagagcccacattcaaatttcaaaacagaatagtttttaattatatcaggattctggcttatagaatcacagaatttcagaattaggccaacctctttgacttgactgattaggaaattaaggttcagcacaggctgatgatttgcaactagtaaaaataataacggtgaatatgcagtacatgtttactatgtccttggtactgccctaagacttttgtgaggatcgcctcattcctcaagacaaccactgattacatactgctattagatccattttgtagatgaaaacctgcagcacaaattgcttaagtaacaagcccaaggtgttcacatcagtgcacaatggggccaggaatgaaatccaggcagtccaaagccagatcagagccctcattccaatttgcaatgttgcagcagacgcacgactggcattgagcttcccttgccccctgtgcagcctgccttgtgcttctcatatcacttagctcagctcaaataggaacattctgttaggagccttagggacctgagatctcattaacctctctactacttctttcaaatagcctcatgggtacccataagtattattttatttctggctcataaactttccaccaggacaggacaccacatcagtgaagtcattaaatctttataataacaatattatgctaatggaaattattagtctattcctcatcccccaaaaaccatctggtaggtttacctggccaattactttgagatgtcatagtgaatcttaaagcataaagaatatagggattcataactttctctgagcagtggagttttccatgtggtaacaagctggcatggctggactattggatttagacataaacaggatactggaaaaggctgggggagagcacacggcagctctcagattagaattcaggtggtagggtagaaagcataggtatttccaagtccaggctttctactgggagaatgggttgccaatattttgattgcttcatgaatttcttcataaaatggcttgttctttaatatcaaataataaaacgtaggtattagggcccatttaagtaatttagagtaattagagtcttaagtagggagcacatgttcagagcagaacaatctctctccaaacaacagtgatgtcagaggttttaggtgtgagtctgttttctctctctcctccctgtggctcaaacgcatggtgtggtttcccttcctggagcccagttacccagtaactcctgaaatggctggataaatgttggctgccatgcacattcaaccttgaaagcaca

SEQ ID NO: 706343 - DNA, 2744 bp, Homo sapiens
atggactaactgcaaatactgaaatgccaatcaatgggtactcaaaagaggagattcccgagtcctgcacctgcagctaaagacagaaacgctatttatacaaagtcgggtggtttaaagatatgtaagttatccacataaattatttgctttcttataaataaaataagaaaaataaatcaacattgcccctcaaggaaaccaggcaatgtgcttaaaagaaactttaatgacctttgccttcatttattaatgtgttgctttcctaggaatttggattttggagggaagttcttcctgggttatctatgggcacaccatgtccctacacactcaagacatatggcaagaggagaagggcatttttggcagaggaggttcacgccattctcctgcctcaacttcccgagtcagtcgctgggactacaggcgcctgccaccatgcccggttaattttttgtatttttagtagagatggggtttcactgtgttagccaggatggtctcgatttcctgaccttgtgatccacccatcttggcctcccaaagtgctgggattacaggcatgagccaccacacccagccaaaatcaactgtgtttttacctcaaaacaaaaaatggttttgcaaagggagcttggcttcatctgtttcaacagtgtaaagatttgaaggtcaaagttttcctcaatatggctgatctaatgcaaagctcaagaacattcatgtttttcaccaaggtaactataactaaagggacagataacttttgtattgaagccacatgggaagaaaaagaaggacacattgtcttccttacaggagaaaagagcaattgctctgtgtatacaagacagagaagtcaatggcctaatggattattcgatcatattcccagagcatgttcaactacattgcctgattacggtcagacaactagaaaccaaaataattcttgtaaaaccaaggggcatgtattatttttgctactagacacaggcaactggtagggctggaaatacaagacttatcccagctagaagcagcaaccacctgattcattgccctgtatttccaaaagtatcctctccttttctgtaaaaagagaggaaaatggaggaagatacttccttgtcagaggagaaggatatgttcttgcatctgataactaaggatgaccagtctcaataatccatttctaagcccctatagaaaataaccacgttttctcctctccatgacccctagacaaaggagactaatgacctcccaaacaagttaccacaagtacaagttatgactatcaccattccttctgtctgcaaggtaggagcctcttcctcmctcaacggcccttccccagaactctgattctaatagttaacacttgttgtacaatacactttgtttccaaagtctggtgatgggtcgcaaagaacagagcccacattcaaatttcaaaacagaatagtttttaattatatcaggattctggcttatagaatcacagaatttcagaattaggccaacctctttgacttgactgattaggaaattaaggttcagcacaggctgatgatttgcaactagtaaaaataataacggtgaatatgcagtacatgtttactatgtccttggtactgccctaagacttttgtgaggatcgcctcattcctcaagacaaccactgattacatactgctattagatccattttgtagatgaaaacctgcagcacaaattgcttaagtaacaagcccaaggtgttcacatcagtgcacaatggggccaggaatgaaatccaggcagtccaaagccagatcagagccctcattccaatttgcaatgttgcagcagacgcacgactggcattgagcttcccttgccccctgtgcagcctgccttgtgcttctcatatcacttagctcagctcaaataggaacattctgttaggagccttagggacctgagatctcattaacctctctactacttctttcaaatagcctcatgggtacccataagtattattttatttctggctcataaactttccaccaggacaggacaccacatcagtgaagtcattaaatctttataataacaatattatgctaatggaaattattagtctattcctcatcccccaaaaaccatctggtaggtttacctggccaattactttgagatgtcatagtgaatcttaaagcataaagaatatagggattcataactttctctgagcagtggagttttccatgtggtaacaagctggcatggctggactattggatttagacataaacaggatactggaaaaggctgggggagagcacacggcagctctcagattagaattcaggtggtagggtagaaagcataggtatttccaagtccaggctttctactgggagaatgggttgccaatattttgattgcttcatgaatttcttcataaaatggcttgttctttaatatcaaataataaaacgtaggtattagggcccatttaagtaatttagagtaattagagtcttaagtagggagcacatgttcagagcagaacaatctctctccaaacaacagtgatgtcagaggttttaggtgtgagtctgttttctctctctcctccctgtggctcaaacgcatggtgtggtttcccttcctggagcccagttacccagtaactcctgaaatggctggataaatgttggctgccatgcacattcaaccttgaaagcaca

SEQ ID NO: 706344 - DNA, 2744 bp, Homo sapiens
atggactaactgcaaatactgaaatgccaatcaatgggtactcaaaagaggagattcccgagtcctgcacctgcagctaaagacagaaacgctatttatacaaagtcgggtggtttaaagatatgtaagttatccacataaattatttgctttcttataaataaaataagaaaaataaatcaacattgcccctcaaggaaaccaggcaatgtgcttaaaagaaactttaatgacctttgccttcatttattaatgtgttgctttcctaggaatttggattttggagggaagttcttcctgggttatctatgggcacaccatgtccctacacactcaagacatatggcaagaggagaagggcatttttggcagaggaggttcacgccattctcctgcctcaacttcccgagtcagtcgctgggactacaggcgcctgccaccatgcccggttaattttttgtatttttagtagagatggggtttcactgtgttagccaggatggtctcgatttcctgaccttgtgatccacccatcttggcctcccaaagtgctgggattacaggcatgagccaccacacccagccaaaatcaactgtgtttttacctcaaaacaaaaaatggttttgcaaagggagcttggcttcatctgtttcaacagtgtaaagatttgaaggtcaaagttttcctcaatatggctgatctaatgcaaagctcaagaacattcatgtttttcaccaaggtaactataactaaagggacagataacttttgtattgaagccacatgggaagaaaaagaaggacacattgtcttccttacaggagaaaagagcaattgctctgtgtatacaagacagagaagtcaatggcctaatggattattcgatcatattcccagagcatgttcaactacattgcctgattacggtcagacaactagaaaccaaaataattcttgtaaaaccaaggggcatgtattatttttgctactagacacaggcaactggtagggctggaaatacaagacttatcccagctagaagcagcaaccacctgattcattgccctgtatttccaaaagtatcctctccttttctgtaaaaagagaggaaaatggaggaagatacttccttgtcagaggagaaggatatgttcttgcatctgataactaaggatgaccagtctcaataatccatttctaagcccctatagaaaataaccacgttttctcctctccatgacccctagacaaaggagactaatgacctcccaaacaagttaccacaagtacaagttatgactatcaccattccttctgtctgcaaggtaggagcctcttcctcactcaacggcccttccccagaactctgattctaatagttaacacttgttgtacaatacactttgtttccaaagtctggtgatgggtcgcaaagaacagagcccacattcaaatttcaaaacagaatagtttttaattatatcaggattctggcttatagaatcacagaatttcagaattaggccaacctctttgacttgactgattaggaaattaaggttcagcacaggctgatgatttgcractagtaaaaataataacggtgaatatgcagtacatgtttactatgtccttggtactgccctaagacttttgtgaggatcgcctcattcctcaagacaaccactgattacatactgctattagatccattttgtagatgaaaacctgcagcacaaattgcttaagtaacaagcccaaggtgttcacatcagtgcacaatggggccaggaatgaaatccaggcagtccaaagccagatcagagccctcattccaatttgcaatgttgcagcagacgcacgactggcattgagcttcccttgccccctgtgcagcctgccttgtgcttctcatatcacttagctcagctcaaataggaacattctgttaggagccttagggacctgagatctcattaacctctctactacttctttcaaatagcctcatgggtacccataagtattattttatttctggctcataaactttccaccaggacaggacaccacatcagtgaagtcattaaatctttataataacaatattatgctaatggaaattattagtctattcctcatcccccaaaaaccatctggtaggtttacctggccaattactttgagatgtcatagtgaatcttaaagcataaagaatatagggattcataactttctctgagcagtggagttttccatgtggtaacaagctggcatggctggactattggatttagacataaacaggatactggaaaaggctgggggagagcacacggcagctctcagattagaattcaggtggtagggtagaaagcataggtatttccaagtccaggctttctactgggagaatgggttgccaatattttgattgcttcatgaatttcttcataaaatggcttgttctttaatatcaaataataaaacgtaggtattagggcccatttaagtaatttagagtaattagagtcttaagtagggagcacatgttcagagcagaacaatctctctccaaacaacagtgatgtcagaggttttaggtgtgagtctgttttctctctctcctccctgtggctcaaacgcatggtgtggtttcccttcctggagcccagttacccagtaactcctgaaatggctggataaatgttggctgccatgcacattcaaccttgaaagcaca

SEQ ID NO: 706345 - DNA, 2744 bp, Homo sapiens
atggactaactgcaaatactgaaatgccaatcaatgggtactcaaaagaggagattcccgagtcctgcacctgcagctaaagacagaaacgctatttatacaaagtcgggtggtttaaagatatgtaagttatccacataaattatttgctttcttataaataaaataagaaaaataaatcaacattgcccctcaaggaaaccaggcaatgtgcttaaaagaaactttaatgacctttgccttcatttattaatgtgttgctttcctaggaatttggattttggagggaagttcttcctgggttatctatgggcacaccatgtccctacacactcaagacatatggcaagaggagaagggcatttttggcagaggaggttcacgccattctcctgcctcaacttcccgagtcagtcgctgggactacaggcgcctgccaccatgcccggttaattttttgtatttttagtagagatggggtttcactgtgttagccaggatggtctcgatttcctgaccttgtgatccacccatcttggcctcccaaagtgctgggattacaggcatgagccaccacacccagccaaaatcaactgtgtttttacctcaaaacaaaaaatggttttgcaaagggagcttggcttcatctgtttcaacagtgtaaagatttgaaggtcaaagttttcctcaatatggctgatctaatgcaaagctcaagaacattcatgtttttcaccaaggtaactataactaaagggacagataacttttgtattgaagccacatgggaagaaaaagaaggacacattgtcttccttacaggagaaaagagcaattgctctgtgtatacaagacagagaagtcaatggcctaatggattattcgatcatattcccagagcatgttcaactacattgcctgattacggtcagacaactagaaaccaaaataattcttgtaaaaccaaggggcatgtattatttttgctactagacacaggcaactggtagggctggaaatacaagacttatcccagctagaagcagcaaccacctgattcattgccctgtatttccaaaagtatcctctccttttctgtaaaaagagaggaaaatggaggaagatacttccttgtcagaggagaaggatatgttcttgcatctgataactaaggatgaccagtctcaataatccatttctaagcccctatagaaaataaccacgttttctcctctccatgacccctagacaaaggagactaatgacctcccaaacaagttaccacaagtacaagttatgactatcaccattccttctgtctgcaaggtaggagcctcttcctcactcaacggcccttccccagaactctgattctaatagttaacacttgttgtacaatacactttgtttccaaagtctggtgatgggtcgcaaagaacagagcccacattcaaatttcaaaacagaatagtttttaattatatcaggattctggcttatagaatcacagaatttcagaattaggccaacctctttgacttgactgattaggaaattaaggttcagcacaggctgatgatttgcaactagtaaaaataataayggtgaatatgcagtacatgtttactatgtccttggtactgccctaagacttttgtgaggatcgcctcattcctcaagacaaccactgattacatactgctattagatccattttgtagatgaaaacctgcagcacaaattgcttaagtaacaagcccaaggtgttcacatcagtgcacaatggggccaggaatgaaatccaggcagtccaaagccagatcagagccctcattccaatttgcaatgttgcagcagacgcacgactggcattgagcttcccttgccccctgtgcagcctgccttgtgcttctcatatcacttagctcagctcaaataggaacattctgttaggagccttagggacctgagatctcattaacctctctactacttctttcaaatagcctcatgggtacccataagtattattttatttctggctcataaactttccaccaggacaggacaccacatcagtgaagtcattaaatctttataataacaatattatgctaatggaaattattagtctattcctcatcccccaaaaaccatctggtaggtttacctggccaattactttgagatgtcatagtgaatcttaaagcataaagaatatagggattcataactttctctgagcagtggagttttccatgtggtaacaagctggcatggctggactattggatttagacataaacaggatactggaaaaggctgggggagagcacacggcagctctcagattagaattcaggtggtagggtagaaagcataggtatttccaagtccaggctttctactgggagaatgggttgccaatattttgattgcttcatgaatttcttcataaaatggcttgttctttaatatcaaataataaaacgtaggtattagggcccatttaagtaatttagagtaattagagtcttaagtagggagcacatgttcagagcagaacaatctctctccaaacaacagtgatgtcagaggttttaggtgtgagtctgttttctctctctcctccctgtggctcaaacgcatggtgtggtttcccttcctggagcccagttacccagtaactcctgaaatggctggataaatgttggctgccatgcacattcaaccttgaaagcaca

SEQ ID NO: 706346 - DNA, 2744 bp, Homo sapiens
atggactaactgcaaatactgaaatgccaatcaatgggtactcaaaagaggagattcccgagtcctgcacctgcagctaaagacagaaacgctatttatacaaagtcgggtggtttaaagatatgtaagttatccacataaattatttgctttcttataaataaaataagaaaaataaatcaacattgcccctcaaggaaaccaggcaatgtgcttaaaagaaactttaatgacctttgccttcatttattaatgtgttgctttcctaggaatttggattttggagggaagttcttcctgggttatctatgggcacaccatgtccctacacactcaagacatatggcaagaggagaagggcatttttggcagaggaggttcacgccattctcctgcctcaacttcccgagtcagtcgctgggactacaggcgcctgccaccatgcccggttaattttttgtatttttagtagagatggggtttcactgtgttagccaggatggtctcgatttcctgaccttgtgatccacccatcttggcctcccaaagtgctgggattacaggcatgagccaccacacccagccaaaatcaactgtgtttttacctcaaaacaaaaaatggttttgcaaagggagcttggcttcatctgtttcaacagtgtaaagatttgaaggtcaaagttttcctcaatatggctgatctaatgcaaagctcaagaacattcatgtttttcaccaaggtaactataactaaagggacagataacttttgtattgaagccacatgggaagaaaaagaaggacacattgtcttccttacaggagaaaagagcaattgctctgtgtatacaagacagagaagtcaatggcctaatggattattcgatcatattcccagagcatgttcaactacattgcctgattacggtcagacaactagaaaccaaaataattcttgtaaaaccaaggggcatgtattatttttgctactagacacaggcaactggtagggctggaaatacaagacttatcccagctagaagcagcaaccacctgattcattgccctgtatttccaaaagtatcctctccttttctgtaaaaagagaggaaaatggaggaagatacttccttgtcagaggagaaggatatgttcttgcatctgataactaaggatgaccagtctcaataatccatttctaagcccctatagaaaataaccacgttttctcctctccatgacccctagacaaaggagactaatgacctcccaaacaagttaccacaagtacaagttatgactatcaccattccttctgtctgcaaggtaggagcctcttcctcactcaacggcccttccccagaactctgattctaatagttaacacttgttgtacaatacactttgtttccaaagtctggtgatgggtcgcaaagaacagagcccacattcaaatttcaaaacagaatagtttttaattatatcaggattctggcttatagaatcacagaatttcagaattaggccaacctctttgacttgactgattaggaaattaaggttcagcacaggctgatgatttgcaactagtaaaaataataacggtgaatatgcagtacatgtttactatgtccttggtactgccctaagacttttgtgaggatcgcctcattcctcaagacaaccactgattacatactgctattagatccattttgtagatgaaaacctgcagcacaaattgcttaagtaacaagcccaaggtgttcacatcagtgcacaatggggccaggaatgaaatccaggcagtccaaagccagatcagagccctcattccaatttgcaatgttgcagcagacgcacgactggcattgagcttcccttgccccctgtgcagcctgccttgtgcttctcatatcacttagctcagctcaaataggaacattctgttaggagccttagggacctgagatctcattaacctctctactacttctttcaaatagcctcatgggtacccataagtattattttatttctggctcataaactttccaccaggacaggacaccacatcagtgaagtcattaaatctttataataacaatattatgctaatggaaattattagtctattcctcatcccccaaaaaccatctggtaggtttacctggccaattactttgagatgtcatagtgaatcttaaagcataaagaatatagggattcataactttctctgagcagtggagttttccatgtggtaacaagctggcatggctggactattggatttagacataaacaggatactggaaaaggctgggggagagcacacggcagctctcagattagaattcaggtggtagggtagaaagcataggtatttccaagtccaggctttctactgggagaatgggttgccaatattttgattgcttcatgaatttcttcataaaatggcttgttctttaatatcaaataataaaacgtaggtattagggcccatttaagtaatttagagtaattagagtcttaagtagggagcacatgttcagagcagaacaatctctctccaaacaacagtgatgtcagaggttttaggtgtgagtctgttttctctctctcctccctgtggctcaaaygcatggtgtggtttcccttcctggagcccagttacccagtaactcctgaaatggctggataaatgttggctgccatgcacattcaaccttgaaagcaca

SEQ ID NO: 706347 - DNA, 585 bp, Homo sapiens
tttagttatacagctgatgaagccaatcctacagaaaaatgtaaaatgttatgaaagtcgggctgttccaggaaagccagagcatcggtgactacccgtgcccatgagaggcttccctaagaaaccggagtgttcacaagagggcaggcgccgctggagggctggggctcgggaggcctttaacgcttttgcctgctgaccttggaagcagcccccacagccaaggctctccgtccccrcagctgactctcatctgggccctccctggcaggaaactcttgtctctgtagggtcggccagtttcccccatgtttctactacaggagagcaaagcagaaaagtccccatccttggtaagtagagtccctcttggtcttgggtcccgccctggccatgcactttccttccttcagtctgaactgcccttgccccactcagtccccgggcttcaagcttcctgcagctgaagctgcacgatgagatcccaacagttggcactacctgagcctgccctgggcctgtttctctcttgaccctctgaacattctcttgggcatattcatccattccaaaaggttcagccag

SEQ ID NO: 706348 - DNA, 587 bp, Homo sapiens
tctctcagtatttaaacctgtggcattgacaaccatattaagatatctaaggaagagaacaaaaagaaaaggaataatacagctacctgatcctcatgcattctgtcacactgtaactccagagattgacccaaaggacttcaagagttccrtttctgggtgtaagttctttgtagagagcattgattcacactagtgactgttttcacagttacattttgataaaatttccaactgacagaaaagctgcaagaatagtacaaagaattcctgtttactcttaacccaaatgttaatgttaatattttacatttgctttatcatctttctttctcagtatatgtgtataattttgtttaactatttgatcgtaagttgagacgtaatgcccttttacttctaaatacttcagagtatatttcttatctagccatgtcacaattatcaaaatcaaaaaattaacattggttcaatactgtcaccttttttccacagactttattcagatttcactaatgtcccattaatgtcctttataataataacacaaatcccagctcaagcattgattccattgtcatgtctct

SEQ ID NO: 706349 - DNA, 608 bp, Homo sapiens
aaatggtgggttagcgcttcaatatatgaattttagagagacacaattcagtcaatagcrggaacccagaaggagaaggattggaatggaagatgaagggcttagtttggacacattgagtttgtggtttcttctgattactcaagtggctatatctagctggtagcttggagataaggagtaaacaattttaaaaggaaatcagagttcaagtgttacgccttcctgggtatataaattttggtagacatttcttagaaccgaaaacctcattacccaaaggattaaatatctaatgggagtggctacctacactgtctacgtggtattatttgaaaaagataaattcatccttactcattagaaagaaaagtgtgagggctcaggagtcaaattgtttggattgaaatccttgctgttcttattaccatctgcatgacattacataagctactgaaactcttagtgccttaatttcttcatgtgtaaaatgagcatagtaataatacctttcttacacagttgttggaaaaattaaaagaattaatatgtgtaatggattgagacagtacatactagttcctcaacaaatgttaactattgtttca

SEQ ID NO: 706350 - DNA, 685 bp, Homo sapiens
tgacgtttactgggggccaggccatcctttaaatgtaggcattagacttcctgggtgacagacaaaccaaagwgcagaaaatcatgcagcctgcaacaccattgaacaagcaaaggctgaaaacatcaataaattggttctgtacacagatagtatgtttgctataaatggtataactaactgggttcaaggtaggaagaagaacaggtggaagacaagtacagggaaataggtgatgaacaaaaaggactttgtggcactggagaagctcagtcaaggcatggacattcagtggatacttgttcctggtcatccagggtgtattggcaatgaagaagctgatagattagcaagaggagctaaacattctgaagactaagcaaagtgaatttattacttgggaaaagttgagccagtggcagttttgctacttttgcttactggtacggaaaacagactgcaggctggaccattgcagtggatgggcagatgtggctttcacactgaatcacggtggcacagtggcattctgtgatacattttgataaaaagtggttaaatatataataaattgaacatctctgagatttaagaattatgtgagatttcagcattatgcttactaggtttgacacttttcttgcttattttattgcaatctggtttaaaatgctacaggtttgat

SEQ ID NO: 706351 - DNA, 653 bp, Homo sapiens
cccatctcctcctctcaaagtgctagaattacagatgtgagccactgcctctggcctggcgtgcagtttttatctcagtgacaattacttggtaattacataaggctttccacttcttgaaagccctaagggctgggcatgatggctcattcctrtaatcccagcactttgggaggctgaggagggaggatcacttgaggccaggagtttgagatcagcctggccaacatagcaagatcctgtctctaaacaagactaaaaaattagcagggggtggtgatgcgagcctgcaatcccagctactcctgaagctaaggcaggaggatctcttgagcccaggaatttgaggctgcaatgagctatgatcatgccatgcactgtagtctgggtgacagagtgagaccctgtttaagaaaaaaataaaaaataagaaaaaggaagccttaaggttttttcttcatttaagtgtattgtaataaagtttacttaaaatcttgtaaaaagttaggttcattctgatgctcccaggctggggagtgtaagatgtggtgggcacaagccttgctgattaaaaaggcttaaaataggttgagaattttcaggggaaagaatgcaatatcacatcagtagcttttttttgaattagggactta

SEQ ID NO: 706352 - DNA, 543 bp, Homo sapiens
cagatatacatgaccatttaatccatcagcatagttaatggattcctgagatccttcactcgtatttggaagtgtcaaggacactttgtgatgcctgtggaattcaggctggaaagattcacagcggcatgttggaggtggacaatgaagttctggcactttctatcccttcgaagaagaaaactagcctttcaagtctgcaagacatagggacaatagaccctttggggcagtctggaggagacccttttttcaggatttatactgggcagtgtatctgtgtgggaaggaaggtggactgaaaggtgaaagatgctggtgctggcaagcagtgtgacattggtaggtcaacttgatctttcctccgccttggtttctttccctctgaaatgaagggaaggaaagaaagaatttttcagctctttaattctagtctctaagagtaatgctaatttattattcaggtcagtgatggtaattgttaaaaaaaaamcaaaaacaaacaaaaaaaaaaaacggctgtaataatctcctagggcttga

SEQ ID NO: 706353 - DNA, 543 bp, Homo sapiens
cagatatacatgaccatttaatccatcagcatagttaatggattcctgagatccttcactcgtatttggaagtgtcaaggacactttgtgatgcctgtggaattcaggctggaaagattcacagcggcatgttggaggtggacaatgaagttctggcactttctatcccttcgaagaagaaaactagcctttcaagtctgcaagacatagggacaatagaccctttggggcagtctggaggagacccttttttcaggatttatactgggcagtgtatctgtgtgggaaggaaggtggactgaaaggtgaaagatgctggtgctggcaagcagtgtgacattggtaggtcaacttgatctttcctccgccttggtttctttccctctgaaatgaagggaaggaaagaaagaatttttcagctctttaattctagtctctaagagtaatgctaatttattattcaggtcagtgatggtaattgttaaaaaaaaaacaaaaamaaacaaaaaaaaaaaacggctgtaataatctcctagggcttga

SEQ ID NO: 706354 - DNA, 543 bp, Homo sapiens
cagatatacatgaccatttaatccatcagcatagttaatggattcctgagatccttcactcgtatttggaagtgtcaaggacactttgtgatgcctgtggaattcaggctggaaagattcacagcggcatgttggaggtggacaatgaagttctggcactttctatcccttcgaagaagaaaactagcctttcaagtctgcaagacatagggacaatagaccctttggggcagtctggaggagacccttttttcaggatttatactgggcagtgtatctgtgtgggaaggaaggtggactgaaaggtgaaagatgctggtgctggcaagcagtgtgacattggtaggtcaacttgatctttcctccgccttggtttctttccctctgaaatgaagggaaggaaagaaagaatttttcagctctttaattctagtctctaagagtaatgctaatttattattcaggtcagtgatggtaattgttaaaaaaaaaacaaaaacaaamaaaaaaaaaaaacggctgtaataatctcctagggcttga

SEQ ID NO: 706355 - DNA, 579 bp, Homo sapiens
ctgtatcagcacattttcatagctgcgtataagaatgctgctaaacaaacaaccacaaaacctcgcttattgtttacacatctggagccagctggggttgcctgggcagctagctcygctaagctcctagggctaatgtctggcattaggctagatactggctgatctaagctggcctcaactggaatgactcaggcaactctgtgtagttgtgatcctccaagatggtcctcagtgacttttccctcctaatattcatgcccctatgtagtcccctcccacataaaatggagctgtcctgtgtaactaatacgatattccaaaaacaacagagtcattttaaggattagtcacaaaagacgttgtagcctctaccatgttctcttggatcatttagtctcatggaagccagatgctatcttatgaagacacataatcagccctatggagaaattcacatggcaagaaaccaaggcttccacatccagcaccaatttgacattcacatgaatgttttggaaatgggtcctccagcctcagtcaagccttcagatgactgcaacccctgagccagaactg

SEQ ID NO: 706356 - DNA, 946 bp, Homo sapiens
cagcagcatctgctagtaaaactgctgtccactggacactgaagtagatgggcatgtaaacaacgatcaggaggatagttagggtcggcaaaaataggaattacactttccctactgcccttcacatctcaaaaaagtttaagaggcaacagggggagatgcccaagttcggaaagtatacccaaacgttgtccggagaccaatctgtagctgctagtgccttacactgcttgaagtgcggcagggtcggccacagtcttcacttcttcttcacaggtatttccatctcacctacctggcaatttcttagttgagaaacttttcaccagtgtttatgttggttatggaaataaatgaagaaactatttttggaaattttccctggtattagtttttagaacacatactctgaaaagaagaggataagggaagtgtagagcaaagggaatagttggtcaataaatgtaaatggctccataaaaatgttgaaatgtactaacgaggaatccacaaagtgtgttcatcttcaccgaagcacctcaaaggcactcaaaaccctgctctaataaacacttaaccacaggttttcagggcaacttgcttgttttggcctccacattttataccgtttaggtcctcagaaatgcttttctccttcctgttttcttccaagtgtaagcccatggctttcacaggcaagttatagagtcgactgagaagacagtgtactttcctcgacacgtagatcccaagtcccaacaatgaaggaggatcgttcccaattgtcttggaataatgaaaataaacatatatggattaagtggcaacaaaratgagataatggctaaggcattccgggattaaagatcttacaactcaggttgtaactgtgattaaactgatgagagtggggagttccagtgcctttgttctttggagtaattcc

SEQ ID NO: 706357 - DNA, 583 bp, Homo sapiens
gagagacatcatagactgaatattctcctcaaaatggcctttacactacattctcacatgccaataaagcaaataacatacacttygagttgctgaacaatatgttgtatatagatagaaatgtctatgacactatgtatagataaagtttaggagtggtccactctaaagtttaggagtggtctgcagaaatccattacatttaatcatgtaaccgtaagcatacatttctaagccagaaataacgtgaatttacacgtgcctttcttatgacccagcaatcttgatactagtttttatgtgagaaatgaaaacatatgcccacaaaatatcttgtacaggattatttatagcagctttattcatactaaccaacaattggaaacaatccaaatattcatgaacaggagatttgagaaatacattgtggtatattcatacaactgaatactgttcagcaataagaagaaacaaccttgatacacgcaagtacacagttgaatctcaaaaacaaaacatgataatgggtgaaacatgccaaacaaaagtgcattctacatgacttcctttatgttaaattcaa

SEQ ID NO: 706358 - DNA, 584 bp, Homo sapiens
ccactagagtagtctggtcctttttcctagattccccagccagaagactgtagaaagagaatcaaactctcctggtgtactttcgaatgcagtgcacttgacagcaccatccttcatctcttattgcaactgacactattatttagccttgacctcacctccacagtctctagcaatttatggaacacctatcacacacaagtactacatcaagtattttatgtaactttttaaagttwattttataataaatatacaagattgtactattatctccacttttaagatataaaaattgagacaaaaagagttgaaattcctcaaggccacacaactggaaaatgaaaggtaggctataactcaaacacctatgctttccaaaaccatgttatatttcccatgacaagcttatctttttccctagaggaaagcacttttgtgtcagttagctgtttctaggaaacaaatcaccctaaaacatggtggcttaaaacaaccacatgtttagcccatgacactgtggggtggcaatttggtctgggctcagttgggcagttctgctggtcttggctgggctcactcat

SEQ ID NO: 706359 - DNA, 584 bp, Homo sapiens
ccactagagtagtctggtcctttttcctagattccccagccagaagactgtagaaagagaatcaaactctcctggtgtactttcgaatgcagtgcacttgacagcaccatccttcatctcttattgcaactgacactattatttagccttgacctcacctccacagtctctagcaatttatggaacacctatcacacacaagtactacatcaagtattttatgtaactttttaaagtttattttataataaatatacaagattgtactattatctccacttttaagatataaaaattgagacaaaaagagttgaaattcctcaaggccacacaactggaaaatgaaaggtaggctataactcaaacacctatgctttccaaaaccatgttatatttcccatgacaagcttatctttttccctagaggaaagcamttttgtgtcagttagctgtttctaggaaacaaatcaccctaaaacatggtggcttaaaacaaccacatgtttagcccatgacactgtggggtggcaatttggtctgggctcagttgggcagttctgctggtcttggctgggctcactcat

SEQ ID NO: 706360 - DNA, 584 bp, Homo sapiens
ccactagagtagtctggtcctttttcctagattccccagccagaagactgtagaaagagaatcaaactctcctggtgtactttcgaatgcagtgcacttgacagcaccatccttcatctcttattgcaactgacactattatttagccttgacctcacctccacagtctctagcaatttatggaacacctatcacacacaagtactacatcaagtattttatgtaactttttaaagtttattttataataaatatacaagattgtactattatctccacttttaagatataaaaattgagacaaaaagagttgaaattcctcaaggccacacaactggaaaatgaaaggtaggctataactcaaacacctatgctttccaaaaccatgttatatttcccatgacaagcttatctttttccctagaggaaagcacttttgtgtcagttagctktttctaggaaacaaatcaccctaaaacatggtggcttaaaacaaccacatgtttagcccatgacactgtggggtggcaatttggtctgggctcagttgggcagttctgctggtcttggctgggctcactcat

SEQ ID NO: 706361 - DNA, 584 bp, Homo sapiens
ccactagagtagtctggtcctttttcctagattccccagccagaagactgtagaaagagaatcaaactctcctggtgtactttcgaatgcagtgcacttgacagcaccatccttcatctcttattgcaactgacactattatttagccttgacctcacctccacagtctctagcaatttatggaacacctatcacacacaagtactacatcaagtattttatgtaactttttaaagtttattttataataaatatacaagattgtactattatctccacttttaagatataaaaattgagacaaaaagagttgaaattcctcaaggccacacaactggaaaatgaaaggtaggctataactcaaacacctatgctttccaaaaccatgttatatttcccatgacaagcttatctttttccctagaggaaagcacttttgtgtcagttagctgtttctaggaaacaaatcaccctaaaacatggtggcttaaaacaaccrcatgtttagcccatgacactgtggggtggcaatttggtctgggctcagttgggcagttctgctggtcttggctgggctcactcat

SEQ ID NO: 706362 - DNA, 1164 bp, Homo sapiens
tggccactgccagctccccagtgcctagagcagggccccgaccgagtgggagctcagcagtattgttgagtggatgaacatcccttgccctcgcccgtcaccgcacccctgtgcaatctgtcctgtctgttttgttcactactgtgcccccagtacctgagaccgtgtctggcacataatgtttgctcaatagataatccttgaaagacaagttgaattaaaaacgcacatccagccccacttgaccccggaattcagccttgactgacttatacgttgctcatttcctctcgggttcatcaccaaatggggctcttttcctgctgtttatgaagtcaccaactgcagatacttgagaagggctccaccggtttttgttttttgtttttttgagacagagtctcactctgtcacccaggtaggagtgcagtggcatgatctcggctcattgaaacctccgcttcccaggtacaagcgattctcctgccttagcctcctgacgtaactaggattacaggcatgggctatcatgcccggtgaatttttgtatttttattagagatggggtttcaccatgttgttcaggctgatctcgaactcctgacctcaagtgatccacctaccttggcctcccaaagtgctgggattacaggagtgagccaccacgcctggccaccgctcataaacttccatgagaaaagcagtgttagctccatcttacaggtgaggaagaacgaggccagggaatcctgtaacttgccctccagccccgtaattgctgagaggtggagtcattcatttgtggagcgtgatgttgccttggtgttgcygctgggaggagggaacacatatgagcctgtgagtctttgaaggggagttccaggcactccaggtcccacggagacagggaggttcctggaaatgaagcttacgcttgaaggatgagaaagtatgaaccacgcatggtgtaggtgtggaccgggagtgaaaggcgttccaggcagagagaatggcgtttgcaaaggcctcaagcctcaagagctcagggaccgctggggggaaagtgagcagaggagaggatgattttttttttttttcccgacagcaactttccttttcatagccaattatattaagatagaattcacatgccataagattccc

SEQ ID NO: 706363 - DNA, 2005 bp, Homo sapiens
acagaatgagatgaatttatagtgttttatgaacaaaaacagtggtttccacgtggagtgggaagaacatgggttcaaaccccggctctgtccctccccagctgtgtgaccaatgacatgtcacagctcactgagccccagtttcttcacctaggaaacagataatgttaccccccacagagttgttgctggaaggaccaaacgagtttatatacgtgaagggtgtggcacagttcttgcacatagaagggactcgataaatgtcacttaattttaataatatccccaagtgcccagaaaagagccacaacaaagctcatgcaatccggaggcaggataaaagaggatggatcagacaaaatccccccaaattgaaattgggggtgatggtcattggtgactgtccctgaatggagtcagcaagattctgggggcgtgttccaaagatcgtgatgaataaagccataccctgcaccaggcaggctttcagtggaattccaaaccctgctttggtcacttgtttaaaaaaaaaaaaaaaatgctaagacatggataggggcccagggaggtgtggccaagatgactaaagagattgaaaatggttcctgtggagaagaaaggagtttgaagaagttggagtaactcaatcactgaagccaatttaaaaaatatttttaatgcatatattaacacatatatttaatacttgttgaatgtgcttacctcaactgtcggcccctgaggttataaagtaaataaagtatttttcttctttttcttttcttttttttttttttttttggagacagagtcttgttgttgcccaggctggagtacagtggcgcgatctcggctcactgcaaccttccatttcctgggttcaagcaattctcctgcctcagcctcctgagtagctgggactacaggctcctgccagcatgcctggctaatttttgtatttttagtagagataggatttcgccatgttggtcaggctggtcttgaactcctgacctcaggtgatccgaccacctcagcctcccaaagtgctgggattacaggagtgagccactatggggggccaactttttacttgtaaataaagcctttaagatctttgtgtgccagtatgcgaggattatccttatctcttttaaccactgaataattttctatttaagggatttatttaattcccaccttctcacgcctgaagggtattttgaagtgcttggagagattgtttggttgaatgggaccaagggacactcctaggaatcaggtgctccatctcaggaatgaaggtcagcagagcctgttatctgtctttccagggggctacatggttgcccacttctgctgctacctgcgggcctgctcctgtctctggcttgatttccccagacygtgggaatgcccagggcccaagcctactcatctcaatctcaggcccacctgggtctgaccaacaacatccctctcctcctctcccagagttgaacaagagactcaatctgattggctccaggccagccaatggattttctggctttaagtcaggtgcctacctttagtccaatctgaaggagctgtgaggagtcacattgcttaatctgctcaaagccctcagtgatcacttcattaatttattccagctgcttctagccgctgcagacatatgagtttgcaactttggccttctgtgtcagtgcttcttaaacttgaacatgcacatgaatcacctggggaccgtgtcaacatgcagacgtgggttatagagaaaagtctttaatgccttgtcttacagagaaacaagacgcagtccttggccttaattctgtaaatactactgacaccaccaattagggcaatgacaccaataatgacagttaacatttattgcatttactatgtaccaggcttcactgatgcgttaagtcatatcatctttagctacctttttagagaaagcatttggatagctccctttgaaacatgcttagag

SEQ ID NO: 706364 - DNA, 655 bp, Homo sapiens
tttattttttcctttggaaactactttattttttatttattttttttttgaacatatgtatttgtcaatatatttttggctgatgtgtttacacaggaaaaaataatatttacatactcaaacctcagttcaacattttaacaaaacaacatgcagaaaagtcttcacttcctttctaaatacaaatgctagaatgtcggaatcacaygtggatgttttgaaaagcgtgctgagcctcctcaagggtcatggagctgcacatgctacgacaccaaagcaactgggttttgttggttttgtggcagttgcttattaatatgtaatttacattcagtaaaatctgccttttattttttttttattttttatttttaaatttatttttttattgataattcttgggtgtttctcacagagggggatttggcagggtcatgggacaatagtggagggaaggtcagcagataaacaagtgaacaaaggtctctggttttcctaggcagaggaccctgcggccttccgcagtgtttgtgtccctgattacttgagattagggagtggtgatgactcttaacgagcatgctgccttcaagcatctgtttaacaaagcacatcttgcaccgcccttaatccatttaaccctgagtggacacag

SEQ ID NO: 706365 - DNA, 927 bp, Homo sapiens
tgggcttgacttcttcttctcctcgttttcctctttctccatccccctccttcctcatctccttattttttttgtttatttgcttcttctatagtaaaactttctgaaagccaatgtgcctggatgatttttgcctggtacattctgctaattggagtttcagaatcacagtttcttgcttgggtgcagaattttcaaaagtgtttaagtgcctaaattattgttgtagttgctggccactgcccatgccttgtagacaggcagctgagaaggtaccagaaaaaaaaaaaaaggctgcaggtctgtacccttcactgtaccagaatgcagagccctactgagctgtaggaatgcagaaccctactgagctgctcctcatggaaggagcagccatgttgtactgagctgacaacacgggcaatggaaagagcaaacccagggcgtaaatggaaccaggccctggaagcgtttgkttgggagtctcccaactgagctgagccctgagaataagatggttcctttggccaagtggctctgtgaaaatgaggaagaatctgatccacgatgaaggtaaggagtgcatctgtgtctcctctcctcaagccacagggatctcattaaggatcagggcacttacgctgatggcttcactttaggcacaaccctcagcaggagggccccatgcaaagataattaccaggaatggtgggcccattacagccctttgatttggtcactccaacatactgttagacagatgtaagaaagctgaccgacatttacctaaaagtgacaaattgcaggttgaaggatttggtttcagcctctggcaggttggggctttgaaaaaacagaatataccagactcttgctttggagctcttgcaaattcaagtacataaggacagatatagccaaaattgagac

SEQ ID NO: 706366 - DNA, 927 bp, Homo sapiens
tgggcttgacttcttcttctcctcgttttcctctttctccatccccctccttcctcatctccttattttttttgtttatttgcttcttctatagtaaaactttctgaaagccaatgtgcctggatgatttttgcctggtacattctgctaattggagtttcagaatcacagtttcttgcttgggtgcagaattttcaaaagtgtttaagtgcctaaattattgttgtagttgctggccactgcccatgccttgtagacaggcagctgagaaggtaccagaaaaaaaaaaaaaggctgcaggtctgtacccttcactgtaccagaatgcagagccctactgagctgtaggaatgcagaaccctactgagctgctcctcatggaaggagcagccatgttgtactgagctgacaacacgggcaatggaaagagcaaacccagggcgtaaatggaaccaggccctggaagcgtttggtygggagtctcccaactgagctgagccctgagaataagatggttcctttggccaagtggctctgtgaaaatgaggaagaatctgatccacgatgaaggtaaggagtgcatctgtgtctcctctcctcaagccacagggatctcattaaggatcagggcacttacgctgatggcttcactttaggcacaaccctcagcaggagggccccatgcaaagataattaccaggaatggtgggcccattacagccctttgatttggtcactccaacatactgttagacagatgtaagaaagctgaccgacatttacctaaaagtgacaaattgcaggttgaaggatttggtttcagcctctggcaggttggggctttgaaaaaacagaatataccagactcttgctttggagctcttgcaaattcaagtacataaggacagatatagccaaaattgagac

SEQ ID NO: 706367 - DNA, 1624 bp, Homo sapiens
atatattaaagtatatcaaagattagctaaaacttgtaggtgcacttgctctgtactgggaatgttctaagtagtggaaacatattaactcatttaatcctctaaataacctatgagtagatgctatctctatctccaccttaaagatgacaaaactgaggtaaaaagatgtttgataacttgctcagagtcataagtgctaataagtagcagagtcaggcttcacacgcaggcaatctaactcaaragccacttgctcttcctacttgcagctccccattgtttcacttcaaagacatgcagggaatcctaaggactcatacaacagaaccacacatgattacatctatatgcagaacttagcctttcaaaatacatcagtttaactatctagagacaataatagtctttttttttttttttttttttttttttttttttttttttttttagagacagagtcttgctcaggctggagtgtggagtgcagtggtgcaatcttggctcactgcaacctccgcctctcaagcaattctcctgcctcagcctcccaagtagctgggaccacagacacacgccgccacaaccagctaatttcttttgtattttagtagagacggggtttcactgagttgcctaggctggtctcaaactcctgagctcaggcagtccacccaccttggcctcccaaagtgctaggattataggtgtgagccaccgcgccgggccaataatagtccatcttatataaaagctcagaaagaaagaaaagtcctaatagccattcagtagaaccatattttacatacttgttctgttatttgttctagagttttttaaaattcattattggcttgatctgtcaaacttctagttttataacagtaaatcctgctttatcaaagaactgtttttaagcaaaaaaatttacatggtaataatttagctcatcataaatgcagatattttctgttctctattttgttagttttctgtaaatgaaatgcaacactgaatccatttatgccaacattgaaaatgttaaactatctcaattgtatcaaattccataattaagattgcatcatttttcaaatcactcagtttttcttatttctctagaaaataagctggtaggggcttagtaatctgcactgtaaaaaaaaaaaaaaaaaaaaaaaaaaaaaaaaaaaagaagtgaaatcctaccaacagtgtttcacttataaatttctcaaatcaaaaaaaaaccaacaaattaattgttacccatattaattacttcctcttgattgtttgtcctttctcctctttctccccatggaaggacagagggggaaggaggacaaaggaataatggggctgtctgttatgttcttcttgcctcagaaagcaccaagctcctctgatggagttctcttctgcagaaaccaatgagtgaggcaggatctgtttcagcaaaggccctggtcaggtatcagcatcacacagtgttcctgctggagagaggagacagcatgcaaagtcaagattcaggtggaactgaactgctagggtggattttgttgctgtccctacccttccagaagccctatagcattacagtgctgaatgagaaagagag

SEQ ID NO: 706368 - DNA, 1344 bp, Homo sapiens
cttccaccaccactcgtaatcacagccacaggytgtaaaccacactgtggagaatggaggcaaagtgcagctcaccaggccccagcgccagatactggattccgggattctgtgtgtgtctgcatagatgcatgcatttgcctctcccaacactgaggaagactccccctgttacacactgggagccggactcagagctactccccagcggagtgggacccagggcaggtgctctttctacttcccatggtggcttttccagccttcttttcctcaccataataagggtgacacatactcattagagaaaacgttttcagtagatgggatttttttaattacctgtagtcacattacctagacacaaccatggaaagattttggcatattttcatgtttttacggaacaaagaaattgaaaacattaaattaaatcaaatctatttttctcattattaaagaaatatatgttccctgtcaaaaatatgaaaagtataaaaaaccttaaaaccatctgtatttgttggcgagggctgtcataacaaagtgccacagactgcatggtttaacaacagacattttttgtctcacagttctgaaggccagaagtgcaagatcaaggtgttggcagggctggttggttccttctgagggctgtgagggaagggtctgttccacacctcccagctagcttctggtgttttactggcaatctctggcatcccttggttgacagaacattacactgacctctcccttcatcttcacatggtgtcctcccagtgtgcaaatctgtatccaaatttccccttcttataaggacactggttttattagatttgaggcccaccccactccagtatgacctcattctaacttaagtaattaacacacgatttccaaatagtcacattctgaggtagtgggggttagaacttcaacatatgaatttggaagggggtggcgggacacagttcaacacagaacaccatcccaaatcctatgagccaaagaaaaccgatgttaacaagttattaccaggtcgttttggaaagtatggccagaaattcttttgctactctgctgattgaggttggggtctgtgtccccctttctctgaatctgggcaagctggtgactgctccgctcagtaatcctagtattcaagtcatgacaacccaggcaccaggcagggcaatgaaagagcttccagatgcttccagcccccagctaccaagtcattgccagcttgagtcttactgagctgaggtctcagacaccagggaataaagacaaaccctccctcctgtgccctgttgaaattccagatccacagaacccttg

SEQ ID NO: 706369 - DNA, 1344 bp, Homo sapiens
cttccaccaccactcgtaatcacagccacaggctgtaaaccacactgtggagaatggaggcaaagtgcagctcaccaggccccagcgccagatactggattccgggattctgtgtgtgtctgcatagatgcatgcatttgcctctcccaacactgaggaagactccccctgttacacactgggagccggactcagagctactccccagcggagtgggacccagggcaggtgctctttctacttcccatggtggcttttccagccttcttttcctcaccataataagggtgacacatactcattagagaaaacgttttcagtagatgggatttttttaattacctgtagtcacattacctagacacaaccatggaaagattttggcatattttcatgtttttacggaacaaagaaattgaaaacattaaattaaatcaaatctatttttctcattattaaagaaatatatgttmcctgtcaaaaatatgaaaagtataaaaaaccttaaaaccatctgtatttgttggcgagggctgtcataacaaagtgccacagactgcatggtttaacaacagacattttttgtctcacagttctgaaggccagaagtgcaagatcaaggtgttggcagggctggttggttccttctgagggctgtgagggaagggtctgttccacacctcccagctagcttctggtgttttactggcaatctctggcatcccttggttgacagaacattacactgacctctcccttcatcttcacatggtgtcctcccagtgtgcaaatctgtatccaaatttccccttcttataaggacactggttttattagatttgaggcccaccccactccagtatgacctcattctaacttaagtaattaacacacgatttccaaatagtcacattctgaggtagtgggggttagaacttcaacatatgaatttggaagggggtggcgggacacagttcaacacagaacaccatcccaaatcctatgagccaaagaaaaccgatgttaacaagttattaccaggtcgttttggaaagtatggccagaaattcttttgctactctgctgattgaggttggggtctgtgtccccctttctctgaatctgggcaagctggtgactgctccgctcagtaatcctagtattcaagtcatgacaacccaggcaccaggcagggcaatgaaagagcttccagatgcttccagcccccagctaccaagtcattgccagcttgagtcttactgagctgaggtctcagacaccagggaataaagacaaaccctccctcctgtgccctgttgaaattccagatccacagaacccttg

SEQ ID NO: 706370 - DNA, 1432 bp, Homo sapiens
tcttttgttttctatgcattaaatttaaattatatgagcactacctaaaagctgattgtgttagaaatctatgtaagctgaaagtgtatcatttctgatacctgtctacatcgctatggatataaaagtctacagttctgtttgtgttgtcaatggagtgtgcagatgaatgaggtagtattgaacattgttttttctgtaattctgtgccttggagatcttctgctggagcccagaaaccaatatcctaatagacagcactttgacatgctgaactgaagaaaaggcttcacatcctctctgaccttctgccactctcaatcttctgtttcccctaaagcacaggatggagttgtttcctgaagttccctgatctgtctaaagtctggacctgacaaagaagaaaacagtcacctccggttccttccctgagtttttgttaattgaattcatgtcgcaggaagaaagactgaagtctttcaactcacctggacagacttttgtctcaaatyattgtctactctgcaggcccaataaactttgtctcaggccactgtgtgttctttaagaccactgaattccgctaaaaatcatttactacccccactttcccctaagaagaaggtatgcagccatttctaccccactgcctgacggggagatcactctgtggccctgccccgtgcgtgataacacatttgcatgtcattcctcctgttaacctgtcttttgtcagttgatcttcagtgaaccttcagagggcaagggggatgttcttccttgtcccctatacttgcgatgctgaaaagtggacctactgtattctgtacagccttagtttacataattgttacccttttgatgatctcttgttttcagtttctagctattatcaaaaaaatactttattgctaacctcttttctacaaaactcagcttctgatgatgtgcccccaccaaccagaaaggagctctactccaccctcagcctcccaggagttgacagacaactccttccttccagattgttcaggtcaaaaacgcaggagtcagccttgattcccagtgattcacatggtggaaaatcatgcgggttctactttcgaaacacttgcagaaagatacggaaacaatctaagtgtccgttaacagataagtgaataaaaaaactgtagtgtatatgtgtatataaatatattttttatgtgtgtgtgtgtgtgtatatatatatatagagagagagagagagaatgaaatattattcagccttaaaaaagaagagaatcagccaggtgcagtggcttatgcctgtaatcccagcactctgggaggccaaggcaggaagattgcttaagcccaggagttcaagaccagcctagtaagtcaacatggagacagggtcaacaaagtaagaattcgtctatacaaaaaa

SEQ ID NO: 706371 - DNA, 1432 bp, Homo sapiens
tcttttgttttctatgcattaaatttaaattatatgagcactacctaaaagctgattgtgttagaaatctatgtaagctgaaagtgtatcatttctgatacctgtctacatcgctatggatataaaagtctacagttctgtttgtgttgtcaatggagtgtgcagatgaatgaggtagtattgaacattgttttttctgtaattctgtgccttggagatcttctgctggagcccagaaaccaatatcctaatagacagcactttgacatgctgaactgaagaaaaggcttcacatcctctctgaccttctgccactctcaatcttctgtttcccctaaagcacaggatggagttgtttcctgaagttccctgatctgtctaaagtctggacctgacaaagaagaaaacagtcacctccggttccttccctgagtttttgttaattgaattcatgtcgcaggaagaaagactgaagtctttcaactcacctggacagacttttgtctcaaatcattgtctactctgcaggcccaataaactttgtctcaggccactgtgtgttctttaagaccactgaattccgctaaaaatcatttactacccccactttcccctaagaagaaggtatgcagccatttctaccccactgcctgacggggagatcactctgtggccctgccccgtgcgtgataacacatttgcatgtcattcctcctgttaacctgtcttttgtcagttgatcttcagtgaaccttcagagggcaagggggatgttcttccttgtcccctatacttgcgatgctgaaaagtggacctactgtattctgtacagccttagtttacataattgttacccttttgatgatctcttgttttcagtttctagctattatcaaaaaaatactttattgctaacctcttttctacaaaactcagcttctgatgatgtgcccccaccaaccagaaaggagctctactccaccctcagcctcccaggagttgacagacaactccttccttccagattgttcaggtcaaaaacgcaggagtcagccttgattcccagtgattcacatggtggaaaatcatgcgggttctactttcgaaacacttgcagaaagatacggaaacaatctaagtgtccgttaacagataagtgaataaaaaaactgtagtgtatatgtgtatataaatatattttttatgtgtgtgtgtgtgtgtatatatatatatagagagagagagagagaatgaaatattattcagccttaaaaaagaagagaatcagccaggtgcagtggcttatgcctgtaatcccagcactctgggaggccaaggcaggaagattgcttaagcccaggrgttcaagaccagcctagtaagtcaacatggagacagggtcaacaaagtaagaattcgtctatacaaaaaa

SEQ ID NO: 706372 - DNA, 653 bp, Homo sapiens
ttccttgtgccgcccagaagactacccctccagtcatggtttactcaaccacaagtggcctaatcagactctctggagaatttgaagckggggtaagggatggatatcaagaggcagtggttctcaaattcaggttgcgtcaagatcacctggagaatttctgggttccatccacaaagatcaattcagaaatctaatgtggggtttaggaatctataactctttatttatttatttatttatttatttaacttattgtttattttatttttttgagccggagtcttgctctgtcgccgaggctggagtgcaatggcgcgatctcagcttactgctacctccgcctcccgggttcaagcgattctcttgcctcagcctcctgagtagttgggattacagccaccacgcccggctaatttttgtatttttagtagagatggggtttcaccatgttggtcaggctcgtctcgacctcctgacctcgtgatgcgcctgcctcggcctctgaaagtgctgggattacaggtgtgagccatgacgcctggcctaggaatctataactttttttttttttttttttgagatggagtctcactctattgcccaggcttgagtgtatctcggctcactgcaagctccgcctcctgggttcc

SEQ ID NO: 706373 - DNA, 2051 bp, Homo sapiens
aattttgatatgctgtgttttgcttttattttcattctgcccaaaatatttcttggcgtgtggtggtggtgggggtagaaagccatgaaaaggcctccctcctgcaaccctgcgcctgcaccccggactgccccctcctctgcagggcccccactttctccttcctttccctgcagctggatgctggggctttggcagcaaccctgccggcccaggctggatctggagactacagaactacagggtgatcctggctgggaatgtgtatggtgagggcctttcagaagatggggctcaagtgggactttcaggaatgtgcagacactgtagtcactcaggggctccaagcttccagaactgggatgtcagcaggcttcrtgaaaatgattctagtggtcttcttgctttgcaaggcagaggatctgatggggccccatcttagtccacttgggctgctgtaacaaatgagtggcttataaacaacaaaaatttattcctcacatttctggaggctggaagtctgaggtcaagtgtcagcatagccaggttttggtggcgactcttttcccagttgcagatggctgtctctcactgtatcctcatgtggtggaaagcagagagcttgctctcttcctcttcttataaggatgctcatcccatcatagcgatccaccctcatgacctaattacctcctgaaggcgccacctcctaataccatcctatgatggcttggtgtgtcaacatacgaattttgagggacacaaacatgtgcaccgcaggccagttggccattgtgtctgtcatttgcctatgtatcctcagacacattccttgccctttgtctgatctgctctgccctgccctgccctacagggatgatggcccttgcagcctctgtttctcgggctcttatttcagctggcttccatctgagttcagccagtggggccactggagggagttcacaagctagaaggaagggagaagccagggaatttgtctccctttctctgccttgggtgggctctccagaagcagctgtctcctctgtggctccagcttccccaggccgccttccacaatcacagattctgctaggcagccccctcaccactgtggttttagctctttccacatggttctggcttctgggctctggtaacacctaacactacctcctcctattttctccctatcccttattggtattgctaatctctggggtgcctcatcataccattggcatcttggttcttccatcattcatgtaacctattccctgtatcaacagcctcccccaccacacacacacacacacacacacacacacacacacacacacacacacaatttggaatacgctgaattgtcctaactggctccaactgatagattcatcatccaaaatggaataccccctttggctagagttttaggaaaagatccccaagaggtggcaggcctcctttatggctcagccacacatctgcagtccaagttcaaggtattatcaagttcagggatgccacattgtcccacttcaaggggcaccattcatatagaattgaagcccttctctgggtagcaggattgctttcacttaatatactggcaagatgcaaggcagattttagtaggaagaatcacttggggccgggcacggtggctcatgcctgtaatcccagcactttgggaggccaaggtgggcagatcacctgaggtcaggagttcgagactagcctggccaacatggtgaaaccctgtctatactaaaaatacaaaaattagccaggtgtggtggcaggtgcctgtaatcccagctactcaggaggctgaggctggagaatcacttgaacccaggaggtggaggttgcagtgagccaagatggcgctgctacactccagcctgggggacaagagtgaaactccgtctcaaaaaagaaaacaacaaaatcacttggggcctctgtctttcggggaatgagatgtgtcttgagcatctgtttttgttttgtcctcccaatgcttccacagtataccccacactttg

SEQ ID NO: 706374 - DNA, 2051 bp, Homo sapiens
aattttgatatgctgtgttttgcttttattttcattctgcccaaaatatttcttggcgtgtggtggtggtgggggtagaaagccatgaaaaggcctccctcctgcaaccctgcgcctgcaccccggactgccccctcctctgcagggcccccactttctccttcctttccctgcagctggatgctggggctttggcagcaaccctgccggcccaggctggatctggagactacagaactacagggtgatcctggctgggaatgtgtatggtgagggcctttcagaagatggggctcaagtgggactttcaggaatgtgcagacactgtagtcactcaggggctccaagcttccagaactgggatgtcagcaggcttcgtgaaaatgattctagtggtcttcttgctttgcaaggcagaggatctgatggggccccrtcttagtccacttgggctgctgtaacaaatgagtggcttataaacaacaaaaatttattcctcacatttctggaggctggaagtctgaggtcaagtgtcagcatagccaggttttggtggcgactcttttcccagttgcagatggctgtctctcactgtatcctcatgtggtggaaagcagagagcttgctctcttcctcttcttataaggatgctcatcccatcatagcgatccaccctcatgacctaattacctcctgaaggcgccacctcctaataccatcctatgatggcttggtgtgtcaacatacgaattttgagggacacaaacatgtgcaccgcaggccagttggccattgtgtctgtcatttgcctatgtatcctcagacacattccttgccctttgtctgatctgctctgccctgccctgccctacagggatgatggcccttgcagcctctgtttctcgggctcttatttcagctggcttccatctgagttcagccagtggggccactggagggagttcacaagctagaaggaagggagaagccagggaatttgtctccctttctctgccttgggtgggctctccagaagcagctgtctcctctgtggctccagcttccccaggccgccttccacaatcacagattctgctaggcagccccctcaccactgtggttttagctctttccacatggttctggcttctgggctctggtaacacctaacactacctcctcctattttctccctatcccttattggtattgctaatctctggggtgcctcatcataccattggcatcttggttcttccatcattcatgtaacctattccctgtatcaacagcctcccccaccacacacacacacacacacacacacacacacacacacacacacacacaatttggaatacgctgaattgtcctaactggctccaactgatagattcatcatccaaaatggaataccccctttggctagagttttaggaaaagatccccaagaggtggcaggcctcctttatggctcagccacacatctgcagtccaagttcaaggtattatcaagttcagggatgccacattgtcccacttcaaggggcaccattcatatagaattgaagcccttctctgggtagcaggattgctttcacttaatatactggcaagatgcaaggcagattttagtaggaagaatcacttggggccgggcacggtggctcatgcctgtaatcccagcactttgggaggccaaggtgggcagatcacctgaggtcaggagttcgagactagcctggccaacatggtgaaaccctgtctatactaaaaatacaaaaattagccaggtgtggtggcaggtgcctgtaatcccagctactcaggaggctgaggctggagaatcacttgaacccaggaggtggaggttgcagtgagccaagatggcgctgctacactccagcctgggggacaagagtgaaactccgtctcaaaaaagaaaacaacaaaatcacttggggcctctgtctttcggggaatgagatgtgtcttgagcatctgtttttgttttgtcctcccaatgcttccacagtataccccacactttg

SEQ ID NO: 706375 - DNA, 2051 bp, Homo sapiens
aattttgatatgctgtgttttgcttttattttcattctgcccaaaatatttcttggcgtgtggtggtggtgggggtagaaagccatgaaaaggcctccctcctgcaaccctgcgcctgcaccccggactgccccctcctctgcagggcccccactttctccttcctttccctgcagctggatgctggggctttggcagcaaccctgccggcccaggctggatctggagactacagaactacagggtgatcctggctgggaatgtgtatggtgagggcctttcagaagatggggctcaagtgggactttcaggaatgtgcagacactgtagtcactcaggggctccaagcttccagaactgggatgtcagcaggcttcgtgaaaatgattctagtggtcttcttgctttgcaaggcagaggatctgatggggccccatcttagtccacttgggctgctgtaacaaatgagtggcttataaacaacaaaaatttattcctcacatttctggaggctggaagtctgaggtcaagtgtcagcatagccaggttttggtggcgactcttttcccagttgcagatggctgtctctcactgtatcctcatgtggtggaaagcagagagcttgctctcttcctcttcttataaggatgctcatcccatcatagcgatccaccctcatgacctaattacctcctgaaggcgccacctcctaataccatcctatgatggcttggtgtgtcaacatacgaattttgagggacacaaacatgtgcaccgcaggccagttggccattgtgtctgtcatttgcctatgtatcctcagacacattccttgccctttgtctgatctgctctgccctgccctgccctacagggatgatggcccttgcagcctctgtttctcgggctcttatttcagctggcttccatctgagttcagccagtggggccactggagggagttcacaagctagaaggaagggagaagccagggaatttgtctccctttctctgccttgggtgggctctccagaagcagctgtctcctctgtggctccagcttccccaggccgccttccacaatcacagattctgctaggcagccccctcaccactgtggttttagctctttccacatggttctggcttctgggctctggtaacacctaacactacctcctcctattttctccctatcccttattggtattgctaatctctggggtgcctcatcataccattggcatcttggttcttccatcattcatgtaacctattccctgtatcaacagcctcccccaccacacacacacacacacacacacacacacacacacacacacacacacaatttggaatacgctgaattgtcctaactggctccaactgatagattcatcatccaaaatggaataccccctttggctagagttttaggaaaagatccccaagaggtggcaggcctcctttatggctcagccacacatctgcagtccaagttcaaggtattatcaagttcagggatgccacattgtcccacttcaaggggcaccattcatatagaattgaagcccttctctgggtagcaggattgctttcacttaatatactggcragatgcaaggcagattttagtaggaagaatcacttggggccgggcacggtggctcatgcctgtaatcccagcactttgggaggccaaggtgggcagatcacctgaggtcaggagttcgagactagcctggccaacatggtgaaaccctgtctatactaaaaatacaaaaattagccaggtgtggtggcaggtgcctgtaatcccagctactcaggaggctgaggctggagaatcacttgaacccaggaggtggaggttgcagtgagccaagatggcgctgctacactccagcctgggggacaagagtgaaactccgtctcaaaaaagaaaacaacaaaatcacttggggcctctgtctttcggggaatgagatgtgtcttgagcatctgtttttgttttgtcctcccaatgcttccacagtataccccacactttg

SEQ ID NO: 706376 - DNA, 795 bp, Homo sapiens
gagttacagtttgttcatctggaaaacaaacacgatgggctcaggttccgaaggccctttggttctcaccgtctcttttctcagggcatgggagtgatttctcagagtaggggtggtagaagcacatgcatacacacacgcacacacacagacacgcacgcacatgcacgcacatgcatgcacatgcacacacacgcacacatgcacacgcatgcacatgcacacacacgcacacatgcacacgcacacacacacacaygtgcacacacacacgcacacacaggactcagtgcagtggtcttggctgggaaaggtccttgccctctgaccaggaaggagccctcggagctgaggtgctcccagactcagcactgtttggggcctacaggatgtggtgtggcccactctagctcaggctggggggttcctgtgggtgtcaggggatgggtggccatccaactgtgtccactgggctgggctgccacagtgactttgtgtatgaccttcagggagtgtgggtggcatgcatcaggacgcctatctgtgtcgttatgactgggcgtgagggagggtgccacatgtctagccagccagggagcagggccagttagctcctgttcctgggtgcctcctggctctggggagaatagaaaatgattcatgcaaaggggccctccctgttttggccacagcctgaggagtaaggtggcctggctgtctgcctttccctgctgcccaccaggtgcctgagttctcccctccttcctcgcctcagaccgcgtttctccctggggg

SEQ ID NO: 706377 - DNA, 795 bp, Homo sapiens
gagttacagtttgttcatctggaaaacaaacacgatgggctcaggttccgaaggccctttggttctcaccgtctcttttctcagggcatgggagtgatttctcagagtaggggtggtagaagcacatgcatacacacacgcacacacacagacacgcacgcacatgcacgcacatgcatgcacatgcacacacacgcacacatgcacacgcatgcacatgcacacacacgcacacatgcacacgcacacacacacacacgtgcacacacacacgcacacacaggactcagtgcagtggtcttggctgggaaaggtccttgycctctgaccaggaaggagccctcggagctgaggtgctcccagactcagcactgtttggggcctacaggatgtggtgtggcccactctagctcaggctggggggttcctgtgggtgtcaggggatgggtggccatccaactgtgtccactgggctgggctgccacagtgactttgtgtatgaccttcagggagtgtgggtggcatgcatcaggacgcctatctgtgtcgttatgactgggcgtgagggagggtgccacatgtctagccagccagggagcagggccagttagctcctgttcctgggtgcctcctggctctggggagaatagaaaatgattcatgcaaaggggccctccctgttttggccacagcctgaggagtaaggtggcctggctgtctgcctttccctgctgcccaccaggtgcctgagttctcccctccttcctcgcctcagaccgcgtttctccctggggg

SEQ ID NO: 706378 - DNA, 795 bp, Homo sapiens
gagttacagtttgttcatctggaaaacaaacacgatgggctcaggttccgaaggccctttggttctcaccgtctcttttctcagggcatgggagtgatttctcagagtaggggtggtagaagcacatgcatacacacacgcacacacacagacacgcacgcacatgcacgcacatgcatgcacatgcacacacacgcacacatgcacacgcatgcacatgcacacacacgcacacatgcacacgcacacacacacacacgtgcacacacacacgcacacacaggactcagtgcagtggtcttggctgggaaaggtccttgccctctgaccaggaaggagccctcggagctgaggtgctcccagactcagcactgtttggggcctacaggatgtggtgtggcccactctagctcaggctggggggttcctgtgggtgtcaggggatgggtggccatccaactgtgtccactgggctgggctgccacwgtgactttgtgtatgaccttcagggagtgtgggtggcatgcatcaggacgcctatctgtgtcgttatgactgggcgtgagggagggtgccacatgtctagccagccagggagcagggccagttagctcctgttcctgggtgcctcctggctctggggagaatagaaaatgattcatgcaaaggggccctccctgttttggccacagcctgaggagtaaggtggcctggctgtctgcctttccctgctgcccaccaggtgcctgagttctcccctccttcctcgcctcagaccgcgtttctccctggggg

SEQ ID NO: 706379 - DNA, 657 bp, Homo sapiens
tttttttttttttgagacagagtctcgctgtcgcccatagtggcgcagtctcagctcactgcagcctctgcctcccgggttcaagcgattctcgtgcctcagcctcccaagtagctggaattacaggcgtgcaccaccatgcctggctaatttttgtatttttagtagagacggggtttcagcatgttggccaggctggtctcgaactcctgacctcaggtgatgcgcccacctcagcctcccaaagtgctgggattacaggcatgagctaccgcacccggcccctgttctgtatttttataaactcttccaaaattggaaatttttcaaaatgagaagttggggaaaatgatatttagaaattattgagtactgtgtctgctttaatagcacatgtattaaaattagaatgatatgaagattagcatgttccctgcactcataygacatgtaaatctgcaaagtagtgactactttgctatgattttttaaaatttcaccaagttatcctgtttgtattgaaaaaagtacaaatgagatttgaggttgaaccttaagactaacaacagtaaatttgcacctcagtaacttttaacttttacattcctagggttgccatctaccagacttggcacctttctagagaatcgtgtgaat

SEQ ID NO: 706380 - DNA, 650 bp, Homo sapiens
atccagggggctaggggtggggtggagaggggacaaacgatttagacaaagraaatgacaagtgcaaaacgcaaacaggcaaaaaacttagagggttctaggaaaccaaataaggccagtacggctggagcatagtgcatggccaggagaatagaaggagatgagctttgagaggctggtgcgactagatcttgctgggccttgtgggccatataaacaaggagttcggatttcattgtaagtgcaataggaagctcttagggcattttaagtagggaactggcatgatgtgatttatgttttcagaagctcaatctcgataagaagtgaagaatggataaaaggagtggaatacatttagaagtggaacctggagattgtgataaatgttagacctcaaagcttcactccatagacggacaagaatgacatttcttctttatccccgtagatgtgtttcccaagacatccaggagaggatattggcgcaaacagtgagtcatcactctccacccaccttccagactccctcctccatgcatatccagctcttctcaacctggggctcccttagaaaatccagacaaaacaattgccacagagccaacatcttccttttccctttgtcttatggtaaaaacatatttgta

SEQ ID NO: 706381 - DNA, 650 bp, Homo sapiens
atccagggggctaggggtggggtggagaggggacaaacgatttagacaaaggaaatgacaagtgcaaaacgcaaacaggcaaaaaacttagagggttctaggaaaccaaataaggccagtacggctggagcatagtgcatggccaggagaatagaaggagatgagctttgagaggctggtgcgactagatcttgctgggccttgtgggccatataaacaaggagttyggatttcattgtaagtgcaataggaagctcttagggcattttaagtagggaactggcatgatgtgatttatgttttcagaagctcaatctcgataagaagtgaagaatggataaaaggagtggaatacatttagaagtggaacctggagattgtgataaatgttagacctcaaagcttcactccatagacggacaagaatgacatttcttctttatccccgtagatgtgtttcccaagacatccaggagaggatattggcgcaaacagtgagtcatcactctccacccaccttccagactccctcctccatgcatatccagctcttctcaacctggggctcccttagaaaatccagacaaaacaattgccacagagccaacatcttccttttccctttgtcttatggtaaaaacatatttgta

SEQ ID NO: 706382 - DNA, 650 bp, Homo sapiens
atccagggggctaggggtggggtggagaggggacaaacgatttagacaaaggaaatgacaagtgcaaaacgcaaacaggcaaaaaacttagagggttctaggaaaccaaataaggccagtacggctggagcatagtgcatggccaggagaatagaaggagatgagctttgagaggctggtgcgactagatcttgctgggccttgtgggccatataaacaaggagttcggatttcattgtaagtgcaataggaagctcttagggcattttaagtagggaactggcatgatgtgatttatgttttcagaagctcaatctcgataagaagtgaagaatggataaaaggagtggaatacattyagaagtggaacctggagattgtgataaatgttagacctcaaagcttcactccatagacggacaagaatgacatttcttctttatccccgtagatgtgtttcccaagacatccaggagaggatattggcgcaaacagtgagtcatcactctccacccaccttccagactccctcctccatgcatatccagctcttctcaacctggggctcccttagaaaatccagacaaaacaattgccacagagccaacatcttccttttccctttgtcttatggtaaaaacatatttgta

SEQ ID NO: 706383 - DNA, 650 bp, Homo sapiens
atccagggggctaggggtggggtggagaggggacaaacgatttagacaaaggaaatgacaagtgcaaaacgcaaacaggcaaaaaacttagagggttctaggaaaccaaataaggccagtacggctggagcatagtgcatggccaggagaatagaaggagatgagctttgagaggctggtgcgactagatcttgctgggccttgtgggccatataaacaaggagttcggatttcattgtaagtgcaataggaagctcttagggcattttaagtagggaactggcatgatgtgatttatgttttcagaagctcaatctcgataagaagtgaagaatggataaaaggagtggaatacatttagaagtggaacctggagattgtgataaatgttagacctcaaagcttcactccatagacggacaagaatgacatttcttctttatccccgtagatgtgtttcccaagacatccaggagaggatattggcgcaaacagtgagtcatcactctccacccaccttccagactccctcctccatgmatatccagctcttctcaacctggggctcccttagaaaatccagacaaaacaattgccacagagccaacatcttccttttccctttgtcttatggtaaaaacatatttgta

SEQ ID NO: 706384 - DNA, 642 bp, Homo sapiens
ggacgcgaccctagttaaggcagggaagggaaggggtttccaggacgctcaacgccagtgcaacaatacgtgggcggcagaaggatcacagaggagaaagaaacgtctyagctttcctggaaaggacacgaacatctcaaaatattggttgatccctttagcacccagcgaacagaacaggaatactccaatgcaccgacaccaggcacacacctgatttttagggtccttcaggttgaacatgatgctgcgatatttactcttgtagcgattatctgtaacttgaaacaagttaaacatctccttctcaatatggagggcaatttttcctacttcgttttctgtcatgattaagtcatcgctgtcattgactctgaacagaataaaaaaaaggaactacataagacacttgtgtatattaaactttttgaacagtgaggcaatcctgcagccacactctaatgaaagcccttccattttaatgggtaagaaatcaagcagaacagcccaccttttccacaaaatctcttttaaggagcgtctgatattttgccgaatttgtgaatttggctgcgatggtgcagcactcatagccccaaggcgtcctggggctggcgaggccattggaacagaaggtaccac

SEQ ID NO: 706385 - DNA, 642 bp, Homo sapiens
ggacgcgaccctagttaaggcagggaagggaaggggtttccaggacgctcaacgccagtgcaacaatacgtgggcggcagaaggatcacagaggagaaagaaacgtcttagctttcctggaaaggacacgaacatctcaaaatattggttgatccctttagcacccagcgaacagaacaggaatactccaaygcaccgacaccaggcacacacctgatttttagggtccttcaggttgaacatgatgctgcgatatttactcttgtagcgattatctgtaacttgaaacaagttaaacatctccttctcaatatggagggcaatttttcctacttcgttttctgtcatgattaagtcatcgctgtcattgactctgaacagaataaaaaaaaggaactacataagacacttgtgtatattaaactttttgaacagtgaggcaatcctgcagccacactctaatgaaagcccttccattttaatgggtaagaaatcaagcagaacagcccaccttttccacaaaatctcttttaaggagcgtctgatattttgccgaatttgtgaatttggctgcgatggtgcagcactcatagccccaaggcgtcctggggctggcgaggccattggaacagaaggtaccac

SEQ ID NO: 706386 - DNA, 734 bp, Homo sapiens
agccgaggggcccctcctggcactttcccatggccagcgacttcctctcaggggagggcggcagcctcaggccctggtgagagctcggagcagctcagaggagagatggaggcatgagtgtgtctcttgtcactttaccctaaaagtctgagtccaggctaggtgccgtggctcacgtttgtaatcccagcactttgagaggctgaggcgggtggatcacctgaggtcaggagtttgagaccagcctggccaacgtgacaaaaccccgtttctactaaaaatagaaaaaaattagccaggtgtggtggcaggcaactgtaatcccagctactcgggaggcagaggttgcagtgacttgaggtcacaccattgcactccagcctgggcaacagagcaagactctgtctctaaataaatgtctgtctgtctgtctgtctagtccaggcctctgagtgagtcgggacccacggccacccccacactcaggaaccggggcttcagggatggtgcctgagctctccaagggggtcttttccaggtgtttaaaagctcccaggagatccaggagcggcttgtccgggcctacgagctcatgctgggcttctacgggatccggctggaggaccgaggcacgggcacggtgggccgagcacagaactaccagaagcgcttccagaacctgaactggtgaggcccggctgctcccgcccacccccacccyggcgcagaacagg

SEQ ID NO: 706387 - DNA, 660 bp, Homo sapiens
tcccctaaagcagcatttccaggatagcactattctttaatccactgacaactttggcactggctaaggcttactatttttatcccctttcacaccattctctgagcagaaatgctaggtgcaaacatttgttggtaattatgttaaagtaagtcttcttaagaacaaatggtaaaatgaatacawgaaaactttgcaatctatttttgaagaattgtctgcaaaaagagtggaaattgagtttttcttacgcagctgaaaggataaaacaaaaattacatataatcagaacacaatataaaataaggatcgtactcccccaaaattacatctgtatttggctgtgagaggtgaaatatctttgattgattgattgattgattgatttttgggatggagtctcactctaacgccctggctggagtgcaatggtgcaatctcggctcactgccatctccgcctcccaagttgaagcaattctcctgcctcagcctcctgagtagctgggattacaggcatgtgccaccatgcccagctaatttttgtattttttagtagagacaggagtttcaccatgttggtcaggctggtctcgaacccctgacctcaggtgatctgcccgcctcagcctccccaagtgctggaattataggcgtgagt

SEQ ID NO: 706388 - DNA, 581 bp, Homo sapiens
ccctggtcatctcgggagactccctggaggtgagcttggggacccctgagagccagtcctcccagcagcctgggtcttacccggcttcggcaggggcactgcaggctcggcagcgacctccaccaacgcaccacctctccctccaccaacgcaccacctctccctccaccctgcaggtttgcctcaagtactatgagtacgagttcatggagctggcctgccagtgcccggccgtagtctgctgccgatgtgcccccacccagaaggcccagatcgtgcgcctgcttcaggagcgcacgggcaagctcacctgtgcagtaggtaggcgaggctcaggctgtgctgctggccctggcctgccggtgcaccaggctccctttccctaaggatatttggacactgctgctctttcttcaaattccccaggcccctttgttcaggtcatgatttttctccacctctcagactttggctctttttgttattatttttaatatttcccttggagagtagataagcaygtgccaggcctctactcctttgccagtggctcaagagtgcagccttccagggggtggaga

SEQ ID NO: 706389 - DNA, 632 bp, Homo sapiens
attttaaatttatggcaaggctaaaagatgatcagccctgggtcagcacagagagggtctgcgaaagcaagtaagacctagtcttcctccgyctggcagcggggagagacagatgcaaagctgaggcaagggagacagggaccctcccactgcttgggagaaacacgtctacgttagctgggggcaggtgagggaagacttcctgcaggaaacaccacttgagtcttgtggggagaagagtttgccaagcagccaccgaccacatggtccagctcattattttacagatggggaaactgagactggtggggaaactgagaatggttctaggcccggctctgccaccgtcccgctgtacgaccttggccaagtctttcttcttcagtcttcccatctgtacaatgagatgacctctagggtcagcctcaccttctgggacagaagtctcaaactggcagctcctgggctgaattctcctgctcctggctgttacctgccagagaccaggaggtgtttgagctgagacctgtgtgaaggttaccaactttgtaaattagatgccacctaaaagcggtgattcttgatcaggggcggttttaccccccaggggacatttggcaatgtctggagac

SEQ ID NO: 706390 - DNA, 1230 bp, Homo sapiens
gtccctttgaaacttgcaaacactgggcaggaagagattcagctgtggccaggaggggctgatcatggagtgtagacagctgctgagggccccagtccatgatggtggtggagggggcagttcaagggaagggtcattgctttaagcaaggtaaccaccagaagaggtgccttccacgttataagaatatacacataaactgggataggctgtaaatcaggcaggttatgttcaattgctagtgacaaaaaacccaaayttttctgacttaagccaaaaaaaagttcctttattgcctcagaaagttggactgtctaggaatgagaaccagcctgagtcattgctgaatccagggctccaatgatgatgcgaggcctggtcttggtcttgcttctcttcttctttctctctcttctctgtattttttgcgttctctgctgggttttatccccctgacagccccagcagttctgggattatctgccatccttagagacagccatttcagggccaggagtgtttctcttcagtagttttagcaacagtcctgggagagactcccattggttgggcagaaataatatgctcattaatatgctcatccatgaaccaaccattgtggccttgggaggcttgaactgcactgattggccaggtgtgagctaagtgcctaccctggatggactggaggtggagtcattctccatcaaaccacataggctagggtcatgaatgagctagtaaatcttgaacaactgactctgagtatggaggtaggaaacattttagcatttgccaatttccctctgtaaattctgccacaatggctgatttcaaactctccacataatatcaaatgacttaggaagttcctggtttctaagtcatttgaaattatgtgaagagtttgaaatcagctcatgtttccacaatgagctgtgtgagttggctccagcattgcactggctgagaccaagggagaggtagttccttcaagaaaatcatcattctagtaccagcactggaatattcggtaattgatgtggggcagataaaaccaacagatacctgctacagaatgtagtgaagcttccatttattttgtgaaagacctcttgagtgtttattctcataaaagtgctaagaattatgttctagaagagagaattcattgacccttcaccaaacatttattacctaccaaggacagatgccacctcaattttggaa

SEQ ID NO: 706391 - DNA, 1230 bp, Homo sapiens
gtccctttgaaacttgcaaacactgggcaggaagagattcagctgtggccaggaggggctgatcatggagtgtagacagctgctgagggccccagtccatgatggtggtggagggggcagttcaagggaagggtcattgctttaagcaaggtaaccaccagaagaggtgccttccacgttataagaatatacacataaactgggataggctgtaaatcaggcaggttatgttcaattgctagtgacaaaaaacccaaatttttctgacttaagccaaaaaaaagttcctttattgcctcagaaagttggactgtctaggaatgagaaccagcctgagtcattgctgaatccagggctccaatgatgatgcgaggcctggtcttggtcttgcttctcttcttctttctctctcttctctgtattttttgcgttctctgctgggttttatccccctgacagccccagcagttctgggattatctgccatccttagagacagccatttcagggccaggagtgtttctcttcagtagttttagcaacagtcctgggagagactcccattggttgggcagaaataatatgctcattaatatgctcatccatgaaccaaccattgtggccttgggaggcttgaactgcactgattggccaggtgtgagctaagtgcctaccctggatggactggaggtggagtcattctccatcaaaccacataggctagggtcatgaatgagctagtaaatcttgaacaactgactctgagtatggaggtaggaaacattttagcatttgccaatttccctctgtaaattctsccacaatggctgatttcaaactctccacataatatcaaatgacttaggaagttcctggtttctaagtcatttgaaattatgtgaagagtttgaaatcagctcatgtttccacaatgagctgtgtgagttggctccagcattgcactggctgagaccaagggagaggtagttccttcaagaaaatcatcattctagtaccagcactggaatattcggtaattgatgtggggcagataaaaccaacagatacctgctacagaatgtagtgaagcttccatttattttgtgaaagacctcttgagtgtttattctcataaaagtgctaagaattatgttctagaagagagaattcattgacccttcaccaaacatttattacctaccaaggacagatgccacctcaattttggaa

SEQ ID NO: 706392 - DNA, 598 bp, Homo sapiens
tgtatacttatgtaacaaacctgcacattctgtacatgtatcccagaacttgatgtataattaaaaaaaaaaaaaagacttcctgcaaaaaaaaaaaaaaagagagagaaaggatatgtaaaatgttttaaaaggaaagccagtgtttctaaaaaaaaaatcaaatacttgaaaggctcatctatgcccataaagtatctcttctctgcactgtcccctcgtaatttactcacttgtgcaagttaaagaatggaaagtagtagaatgagtagctcagagaggaggagctgcatgagaagatgaaccagggaaatcatggaatgggactgccctctctgaggccttttccttgctgtttataatgatagcgggcattgtgacttctcaaacactatctctggtggtagtaccataaaaactttttatcaacagtaaacgtccrtggactcttgagtatagctggccttgatagctaaacactgtttacttatcatctttgcttggccatggtcatctccttacactccagttgtctctacagacatatgtttgatccttgtgaaattcataatgaaaagtttgcttgatcattaaaaaa

SEQ ID NO: 706393 - DNA, 598 bp, Homo sapiens
tgtatacttatgtaacaaacctgcacattctgtacatgtatcccagaacttgatgtataattaaaaaaaaaaaaaagacttcctgcaaaaaaaaaaaaaaagagagagaaaggatatgtaaaatgttttaaaaggaaagccagtgtttctaaaaaaaaaatcaaatacttgaaaggctcatctatgcccataaagtatctcttctctgcactgtcccctcgtaatttactcacttgtgcaagttaaagaatggaaagtagtagaatgagtagctcagagaggaggagctgcatgagaagatgaaccagggaaatcatggaatgggactgccctctctgaggccttttccttgctgtttataatgatagcgggcattgtgacttctcaaacactatctctggtggtagtaccataaaaactttttatcaacagtaaacgtccgtggactcttgagtatagctggccttgatagctaaacactgtttacttatcatctttgcttggccatggtcatctccttacactccagttgtctctacagacatatgtttgatccttgtgaaattcataatgaaaagtttgcttkatcattaaaaaa

SEQ ID NO: 706394 - DNA, 618 bp, Homo sapiens
tttcaaccctgtcagagaagtgaatgctgctaatttaatacaagaaaacactcgccgtgattggtgcctgaaatatctactccaattcttcaaatgcattgcatgtgtgctcattacaccaagaatgagagggagcatatctaggtgaaccccacaccttgactcacatcaccccaagattttgccatgggataatcttgagaccatgtccaaaacacagatgttttattttcctggatctctcactgatgaatcataatcattaaggaaatgatacactgttcttgatcttaaattgcattccatagtctgagtgtgtaaatcacagaatctgctgttccacagtgtctgattgataaattcagatcttggcatagtgggctgtgctctagcaaggtttacctgctattcaaacctatcacgaaaagctgaaagtactgactcacatgcctaaggcccaaaataaattaggacgggcccacaaaagggtgagacagcaaaactaatgatgagaaggcagggagcccacaaaaaagggtagtatrctctacttccccttcatactctcttttgattagtttttttatcgggctcttgggaacaaatcctggagtgtat

SEQ ID NO: 706395 - DNA, 598 bp, Homo sapiens
agacacatgagtttcctttagagaatcctgggatataaatgactaatgatccaagattctcggtttcatctcctggaaagtcccccaagagctgtccctctcactcattctctttctccatgactggtgctcttccttgcccactcttcctttttttccctctgctttgctttttctggtagcttctacctcatctccttccttgaatgcttctcaggttttacagatcctttgaaaacatcgacagctaatctatgccccatccatacaccttctctaaccttcacaatctgtgctcttctctgccatttgtttcctctgtttctctatcaacataatggtttctagatttcgttgagttattcttgagtcccaaataattccaaaagcctataaggattcagaaggctaggatctgaacagctgaaatttccaacaatgasagctatcaaacagtggcactcgctgacccacagtgaacagcttctgcctggccaagcaggctttgcagtcaccagccatgaacaggacagctcagggctcaagagatatcccagcactgtccatttttgagacacctgaaaaacataaaaaaact

SEQ ID NO: 706396 - DNA, 586 bp, Homo sapiens
aatttccacagaatttacattcttcttgttgtaaggaatatgcctggtaatggaactcaaatatcagcttggatcrccctggcctttgaaatttgaggtaaaattaggcttaagccgtatccagcgcacaacagaaacctcagtgtctcccacccagggactgtctcggaggctgtgtgttcagatgtcacttctgcctcccggcatctgctcctgagttttcactcttcagcctcccctcccaaggcctccttcctaccctggcactgggcttcttgccccgtccccctagaatccgtggcacaggggctttatctgtgtggagtctctacagacggttagaaacacagagtcagctagaaattaagcagtaggcagctgtgatgttttttgacagcctcatttctaaaaccccttcagcaaccccagtcaaggagcttctccctctagactccagcctcctgctgagtcacctgcaccgtctctgccttcctccccttcctcacatcctccctggccccatcttccaattcctctgaacttctgcagagcagccagctcttcctccagcttcaacttccccacc

SEQ ID NO: 706397 - DNA, 586 bp, Homo sapiens
aatttccacagaatttacattcttcttgttgtaaggaatatgcctggtaatggaactcaaatatcagcttggatcgccctggcctttgaaatttgaggtaaaattaggcttaagccgtatccagcgcacaacagaaacctcagtgtctcccacccagggactgtctcggaggctgtgtgttcagatgtcacttctgcctcccggcatctgctcctgagttttcactcttcagcctcccctcccaaggcctccttcctaccctggcactgggcttcttgccccgtccccctagaatccgtggcacaggggctttatctgtgtggagtctctacagacggttagaaacacagagtcagctagaaattaagcagtaggcagctgtgatgttttttgacagcctcatttctaaaaccccttcagcaaccccagtcaaggagcttctccctctagactccagcctcctgctgagtcacctgcaccgtctctgccttcctccccttcctcacatcctccctggccccatcttccaattcctctgaacttctgcagagcagccarctcttcctccagcttcaacttccccacc

SEQ ID NO: 706398 - DNA, 1716 bp, Homo sapiens
cttccataggtgattcaaccacaatcaaagctgcaatgggattcattcacaggaaggagaaaaaaagcacagtttcttgtctccatgaagctcacagtcctataaataataacagtcttttattcttactttgtacttggacaaaagctactttgttatatccccattacaccccatataaggtaagacttattatcctatacatttatggatgaggaaaataagccttgaccttgctgaaactcatacagctagtaagcagcagcaccaaaacttaagcttaagtttcttgatccccagctatctaaaaccatggtccctaatacctgggctttagctcacttacgagttttgatgcagcacaactcaactgaagtcagtgcctgagatctctgagcctctatttaagagctatttccactcagactacatgcagacctgctacaacaaaggttcgtgaagagacacataatataaatacacttaaagctgcaaagtcattcattaacagaagtgtagattgggtagttgacaatctgaactacagaattttttaaagcatagtcttaccactttcaagagcacttttgagctagtttcaatgtttacatattgagattatctgatgaaattgtattttgcccaatatgtttatcatggaattatttataatggcaaaaaatttcaagataacctaacttattaatattagagaaatgatgaggaaaacatggtgcctctctagagatagtattatgtagtcattaaaagtaattatcaatagttatatggccagatacagtggctcatgcctataatcccaagactttggtgggaggccaaggcaggaggatcactttaggccagtcgaagaccagcccggaaaatataacaagaccctgtctctaaaaaaatatatatatataattaacctggcatggtggcatgcacctgtagtcctagctatatgggaagctgagatgggggtattgcttgagcccaggatttgaaggctgcagtgagctatgatggcaccactgcactccagcctggatgacagagtgagaccctgtcttcaagaaaaaaaacttttttaagttatgcagkatagaaatcgctcactcctctagactgcttactatgcaccagatactcttctaaacattttataaactcattaatcctcacaataacccaatgtactattatcatttccagtttaaatagaaaaattaagcacaaagaaaatgacagaccaaaaatcacacagaaagagaagaggcagggttcaaacccaagtaagctaactgcatgatttgcattttcagtcattccactatatccactatactgcatctccaccattcagtgaaaaacataggagacaagtttatgtacattttgattggacctatcaagcacaagcatctctacagcagagggctaaaatggaagtaaataaacagaagagtattaatgctggttatattagcttcttgttgctgggtgactaagttatccccaacactcggcgatttgaaacaacaagcatttattatctcactgtttctccatgctaagaatttgggagtagcttagctgggtagttctggctcaaggtcttccatgaagattgcagtcaagctattgggtagggctgcagtcatgtgagagctggactggggctcttggatctgcttctaagaaggctcatgc

SEQ ID NO: 706399 - DNA, 1093 bp, Homo sapiens
tctgagcgcacagctactcagagcacaatcaattattccagttcctaaatccccctgggggagaagcttaccccactccatgccattcagaggcatgattgcttaactgatattgccaaattgggtcacaaataatgagaaaagttccatttccctcagctgtgaaggttttgaggcacacaaaatgacactaaagcctagccacttggactacgcatttaggattgtggcacctgtcagtatgaatgtgttgcctaattaagtattctttggataacagtgtcacaggccaggagaaccagtctgccaggtagatctccccttaacctcactggaatttcctattctttgtctttacactgtgagcagaaacaaattgccaattttgttgatgcaagcacgttctcaaacaacttgaaactactcccaaacaccaacagccatgtgagaaagagatgaaacgcagtttgtggaaagtaaattcttgattatgttggaattaaagggtacatactttgctgcactttcaagaactacaggtaagagacacaacagtgttttactcctatgtcaaacaaaaagctggcaatttactgtgcaaaataaacagatggagaaaaatagaaaggtggtatctctgctttttaactatattcctcaagggtcgtcacaaagagagaagtaataattatagcaacggagtkagtgttctcttgccccttggaaagctttatagactggttgtttactgctaacttttgtgaaagactagtttaagtatattaaagctttatggcctgagtgggagccattacgtatggaaactgacctgaccattacttataagcaggtcagagactgggattcaagaaataacgatgttaccattgcaaagacagagaacaaaactcaactgcagagaagactgagaaatgtagtcttctacatttgaaatattacaaatattcttctatacttcaaatattccaaatgtagttttcatggatatttgctgagcacaaactacttttactatgccctccttcacctagaacatgataggcttgataaactgtttctaggagaggcagaa

SEQ ID NO: 706400 - DNA, 1093 bp, Homo sapiens
tctgagcgcacagctactcagagcacaatcaattattccagttcctaaatccccctgggggagaagcttaccccactccatgccattcagaggcatgattgcttaactgatattgccaaattgggtcacaaataatgagaaaagttccatttccctcagctgtgaaggttttgaggcacacaaaatgacactaaagcctagccacttggactacgcatttaggattgtggcacctgtcagtatgaatgtgttgcctaattaagtattctttggataacagtgtcacaggccaggagaaccagtctgccaggtagatctccccttaacctcactggaatttcctattctttgtctttacactgtgagcagaaacaaattgccaattttgttgatgcaagcacgttctcaaacaacttgaaactactcccaaacaccaacagccatgtgagaaagagatgaaacgcagtttgtggaaagtaaattcttgattatgttggaattaaagggtacatactttgctgcactttcaagaactacaggtaagagacacaacagtgttttactcctatgtcaaacaaaaagctggcaatttactgtgcaaaataaacagatggagaaaaatagaaaggtggtatctctgctttttaactatattcctcaagggtcgtcacaaagagagaagtaataattatagcaacggagtgagtgttctcttgccycttggaaagctttatagactggttgtttactgctaacttttgtgaaagactagtttaagtatattaaagctttatggcctgagtgggagccattacgtatggaaactgacctgaccattacttataagcaggtcagagactgggattcaagaaataacgatgttaccattgcaaagacagagaacaaaactcaactgcagagaagactgagaaatgtagtcttctacatttgaaatattacaaatattcttctatacttcaaatattccaaatgtagttttcatggatatttgctgagcacaaactacttttactatgccctccttcacctagaacatgataggcttgataaactgtttctaggagaggcagaa

SEQ ID NO: 706401 - DNA, 1093 bp, Homo sapiens
tctgagcgcacagctactcagagcacaatcaattattccagttcctaaatccccctgggggagaagcttaccccactccatgccattcagaggcatgattgcttaactgatattgccaaattgggtcacaaataatgagaaaagttccatttccctcagctgtgaaggttttgaggcacacaaaatgacactaaagcctagccacttggactacgcatttaggattgtggcacctgtcagtatgaatgtgttgcctaattaagtattctttggataacagtgtcacaggccaggagaaccagtctgccaggtagatctccccttaacctcactggaatttcctattctttgtctttacactgtgagcagaaacaaattgccaattttgttgatgcaagcacgttctcaaacaacttgaaactactcccaaacaccaacagccatgtgagaaagagatgaaacgcagtttgtggaaagtaaattcttgattatgttggaattaaagggtacatactttgctgcactttcaagaactacaggtaagagacacaacagtgttttactcctatgtcaaacaaaaagctggcaatttactgtgcaaaataaacagatggagaaaaatagaaaggtggtatctctgctttttaactatattcctcaagggtcgtcacaaagagagaagtaataattatagcaacggagtgagtgttctcttgccccttggaaagctttatagactggttgtttactgctaacttttgtgaaagactagtttaagtayattaaagctttatggcctgagtgggagccattacgtatggaaactgacctgaccattacttataagcaggtcagagactgggattcaagaaataacgatgttaccattgcaaagacagagaacaaaactcaactgcagagaagactgagaaatgtagtcttctacatttgaaatattacaaatattcttctatacttcaaatattccaaatgtagttttcatggatatttgctgagcacaaactacttttactatgccctccttcacctagaacatgataggcttgataaactgtttctaggagaggcagaa

SEQ ID NO: 706402 - DNA, 1093 bp, Homo sapiens
tctgagcgcacagctactcagagcacaatcaattattccagttcctaaatccccctgggggagaagcttaccccactccatgccattcagaggcatgattgcttaactgatattgccaaattgggtcacaaataatgagaaaagttccatttccctcagctgtgaaggttttgaggcacacaaaatgacactaaagcctagccacttggactacgcatttaggattgtggcacctgtcagtatgaatgtgttgcctaattaagtattctttggataacagtgtcacaggccaggagaaccagtctgccaggtagatctccccttaacctcactggaatttcctattctttgtctttacactgtgagcagaaacaaattgccaattttgttgatgcaagcacgttctcaaacaacttgaaactactcccaaacaccaacagccatgtgagaaagagatgaaacgcagtttgtggaaagtaaattcttgattatgttggaattaaagggtacatactttgctgcactttcaagaactacaggtaagagacacaacagtgttttactcctatgtcaaacaaaaagctggcaatttactgtgcaaaataaacagatggagaaaaatagaaaggtggtatctctgctttttaactatattcctcaagggtcgtcacaaagagagaagtaataattatagcaacggagtgagtgttctcttgccccttggaaagctttatagactggttgtttactgctaacttttgtgaaagactagtttaagtatatyaaagctttatggcctgagtgggagccattacgtatggaaactgacctgaccattacttataagcaggtcagagactgggattcaagaaataacgatgttaccattgcaaagacagagaacaaaactcaactgcagagaagactgagaaatgtagtcttctacatttgaaatattacaaatattcttctatacttcaaatattccaaatgtagttttcatggatatttgctgagcacaaactacttttactatgccctccttcacctagaacatgataggcttgataaactgtttctaggagaggcagaa

SEQ ID NO: 706403 - DNA, 1093 bp, Homo sapiens
tctgagcgcacagctactcagagcacaatcaattattccagttcctaaatccccctgggggagaagcttaccccactccatgccattcagaggcatgattgcttaactgatattgccaaattgggtcacaaataatgagaaaagttccatttccctcagctgtgaaggttttgaggcacacaaaatgacactaaagcctagccacttggactacgcatttaggattgtggcacctgtcagtatgaatgtgttgcctaattaagtattctttggataacagtgtcacaggccaggagaaccagtctgccaggtagatctccccttaacctcactggaatttcctattctttgtctttacactgtgagcagaaacaaattgccaattttgttgatgcaagcacgttctcaaacaacttgaaactactcccaaacaccaacagccatgtgagaaagagatgaaacgcagtttgtggaaagtaaattcttgattatgttggaattaaagggtacatactttgctgcactttcaagaactacaggtaagagacacaacagtgttttactcctatgtcaaacaaaaagctggcaatttactgtgcaaaataaacagatggagaaaaatagaaaggtggtatctctgctttttaactatattcctcaagggtcgtcacaaagagagaagtaataattatagcaacggagtgagtgttctcttgccccttggaaagctttatagactggttgtttactgctaacttttgtgaaagactagtttaagtatattaaagctttatggcctgagtgggagccattacgtatggaaactgacctgaccattacttataagcaggtcagagactgggattcaagaaataacgatgttaccattgcaaagacagaraacaaaactcaactgcagagaagactgagaaatgtagtcttctacatttgaaatattacaaatattcttctatacttcaaatattccaaatgtagttttcatggatatttgctgagcacaaactacttttactatgccctccttcacctagaacatgataggcttgataaactgtttctaggagaggcagaa

SEQ ID NO: 706404 - DNA, 599 bp, Homo sapiens
caagacacacatacaaaagcttttggactctcagaagtccaaccttgactccagaacttcctgagcagcccagcagaaggatagagayccacaaaagtgcccaggttgacctcaaggatgaaagaatttgcatatccaagggatttagaagtcagagagctaccatttggattttttccattgcagatgacagaaacactatcaaaatggcttaaacaaaacagaattcatctgctcacttgactaaaagattcaagaatgagtgacctcagaccccttcaaatgcaaaactcaagacccatctttaaaattcaatttatttctctgaatccctggactctgtttcctctcctttggcttcgtttgtaggcaacatccacattcttagagtggaagctgtggaagacgtaatccaacaaagattttcatgagtaaagcattgcttaatttttaaaagataactgcctaggacagataatcaggttaaatgtattatgtgagttaatgtcctttaaatattttgagttgtttcttcctgagttacttgcagccaaaagcgctccaactgatatagcacataataaatagcattactagtt

SEQ ID NO: 706405 - DNA, 599 bp, Homo sapiens
caagacacacatacaaaagcttttggactctcagaagtccaaccttgactccagaacttcctgagcagcccagcagaaggatagagacccacaaaagtgcccaggttgacctcaaggatgaaagaatttgcatatccaagggatttagaagtcagagagctaccatttggattttttccattgcaratgacagaaacactatcaaaatggcttaaacaaaacagaattcatctgctcacttgactaaaagattcaagaatgagtgacctcagaccccttcaaatgcaaaactcaagacccatctttaaaattcaatttatttctctgaatccctggactctgtttcctctcctttggcttcgtttgtaggcaacatccacattcttagagtggaagctgtggaagacgtaatccaacaaagattttcatgagtaaagcattgcttaatttttaaaagataactgcctaggacagataatcaggttaaatgtattatgtgagttaatgtcctttaaatattttgagttgtttcttcctgagttacttgcagccaaaagcgctccaactgatatagcacataataaatagcattactagtt

SEQ ID NO: 706406 - DNA, 436 bp, Homo sapiens
gcccaccttggcccctcaagttctgagattacaggcatgagccactgtgcccagccattaatgactttaagttaattagaacmctctggtggctctgtaacaggagatggagatgcagtaagaaatccctttcacagttcgctacaaggtgaacaaatctgggggtgtcctctagggaaagtctgtctccctgctctctgtctccactgagaacctgctttagagcagcctcctcttctcttccccagtgacagggagcctggtgggaaagagacgggtgacaagaggggcgagagggcagtgttccaacacacacatgagcaaatacccagattcaaacataaacctaagtttatggaaaaattaatgctcaaagacgtaaagggtcttgctcaaggtcacgaggctggcaagtggggtttgaaccaggtggaac

SEQ ID NO: 706407 - DNA, 1097 bp, Homo sapiens
taactaacctgggctctgcctccactggctggcccctccttcctccttagctgacctccctgggcctcagtttcctcatcttaagaatggggttactatcaaggacactgcaagctgtcatgtgrattaagattaatgaaggtaaaatgcatactcggtgtctggtttagggcggtgcacaatgagtattcatggaatcagaaacgtgctgtcatatgaggccctgggatgttcttccattgcctgcaaaacttgactatgaaaatccagggcagtgggtcctcatgaatccagtttccaccatcagccctctaaagggttcccctgtggataaaacaaattttatagtctgtttgcagctgcattcactgagattcataaagaatcataagctgggctataggagttatcagctggtgttgtctgtttagacgattagtgaattaagggcttttttctttgacttcgacagggaccatactccagtgggccattaacagatgctatttgggactgatggccacaggctgtctgtctcagcagcgaggaacccctcaaataggcactgttcttggattactcacaggctgagttctgaccctgcagtgtcactgcagagcaggcagccaaccttccctggaggaaggggagggaaagggaagatatccgagctgctttgcaggggatctgctgccgtcatggagcccaggaagcagatggctgctttgtgttttggaggctatctgcatgggctccaggaaggtattttgaccaaggtgaccggattgtgcagcagccttggacatctttggtgagatcctcattttttcattcatttgacaaatgtgtgttaggttgttaagccctgggcgacagcaaacactggggtatagagtctgaccctgttctagggttgccagatcaaacacaggacacccagttaagtgtgaatttcaaataaacaaggaatagtattttagtataaatacaagtacaggccaggcgcagtggctcacacttgtaatcctagcactttgggaagcagaggtgggcagattgcctgagctcaggagtttgagaccagcctgggcaacacg

SEQ ID NO: 706408 - DNA, 622 bp, Homo sapiens
gtaacctaaaacaataaacagctagatgcgtggtaggcatattctgttattggcagagaactcagaatttatgtttcttaaaatccaaaccaacaatatctgccctaaggcatacaaatatttgactcttttgacattcatttttctttgataaaataagcattggggagcaatgcagctcatatgctgccgggtttagtctttgaatatgaaagtcagarcagaatgagtactgaattgtgaagcttatacacagcaggaactttgactgacaagaattccacaattctagataaagtttgaaaggaatcattggcttcatttagaactgatctatgggaatattctttaaaaacacttgcagttttgtaacaattgtccttcatgtaaattacatttgatttcttctcaaaattaaataatgatctgttttttctgtcactgtagttttgtgttttctagaaattatataagggaactcatgaagtatgtagcctttaatatctggattttttttcatttaacatgctgattatgagatttatgcaaattgttagatttatgttctgttgggttgttgaataatctaaagggatgtttttaatgtaatgcactaaagcac

SEQ ID NO: 706409 - DNA, 622 bp, Homo sapiens
gtaacctaaaacaataaacagctagatgcgtggtaggcatattctgttattggcagagaactcagaatttatgtttcttaaaatccaaaccaacaatatctgccctaaggcatacaaatatttgactcttttgacattcatttttctttgataaaataagcattggggagcaatgcagctcatatgctgccgggtttagtctttgaatatgaaagtcagaacagaatgagtactgaattgtgaagcttatacacagcaggaactttgactgacaagaattccacaattctagataaagtttgaaaggaatcattggcttcatttagaactgatctatgggaatattctttaaaaacacttgcagttttgtaacaattgtccttcatgtaaattacatttgatttcttctcaaaattaaatratgatctgttttttctgtcactgtagttttgtgttttctagaaattatataagggaactcatgaagtatgtagcctttaatatctggattttttttcatttaacatgctgattatgagatttatgcaaattgttagatttatgttctgttgggttgttgaataatctaaagggatgtttttaatgtaatgcactaaagcac

SEQ ID NO: 706410 - DNA, 595 bp, Homo sapiens
tgcccctcttaatgatggatgtggccaggcacggtggctcacgcctgtaatcccaacactttgggaggccgaggcgggtggatcacctgaggtcaggagttcragaccagcctggccaacatggtgaaaccccaactctactaaaaatacaaaaattagccgggcatggtggcgggcacctgtaatcccagctactccagaggctgaggcaggagaatcgcttgaaccaaggagacagagtttgcaataagctgagatcacgccactacactctagcctgagtgacagagagagactcctcctcaaaaaaaaaaaaaaaaagtgatggatgcggagaggggacagcaagccatgaccaagaagtgtccagtctcacatcatcccaggacaggctgtggagtttggaagggggcaggacaagaaccagagtgaccttggggtgtcttcattgagctcctctcccagcactggccacaggctgccgagtccttcccaattctcctgccagagcccaagaccagtagtctttgcccatagcccctgaagtctgtggcccaggtcagacagacactgcccggcagcctctacagattca

SEQ ID NO: 706411 - DNA, 627 bp, Homo sapiens
cctaagtccctctgagccctcttgggcctccagaccagtggctggatttagcaaagccgccagccctaggcaccttcctcccttagtcccctgtccttcctgtcacctctccttaagccaacaacaaaacaccatggacagggtggcttaaaaacaaattcatcttctcacaattctggaggctggaagtccgagatcagggtggtggcatggtcggggttctggtgacggctttcttcctggcctgcaaatggccaccttgtcactgcgtcctcacaagatctttcctcagtccatggagagagatctctatctacctatccctccctctcttgctgctcctcctcctcctcctcctctctcatctttcttctcctatttgattagaagcctgcccttggccagggtggctcacgcctgtaatcccagcactttgggaggctgaggtgggtggatcacctgaggtcaggagttygagcccagcctggccaacatggcgaaaccccatctctactaaaaatacaaaaattagctgggtgtggtggtgtgcacctgtaatcccagctactcagaaggctgaggtaggagaacagcttgaacccgggaggcagaggttgcaatgagctg

SEQ ID NO: 706412 - DNA, 627 bp, Homo sapiens
cctaagtccctctgagccctcttgggcctccagaccagtggctggatttagcaaagccgccagccctaggcaccttcctcccttagtcccctgtccttcctgtcacctctccttaagccaacaacaaaacaccatggacagggtggcttaaaaacaaattcatcttctcacaattctggaggctggaagtccgagatcagggtggtggcatggtcggggttctggtgacggctttcttcctggcctgcaaatggccaccttgtcactgcgtcctcacaagatctttcctcagtccatggagagagatctctatctacctatccctccctctcttgctgctcctcctcctcctcctcctctctcatctttcttctcctatttgattagaagcctgcccttggccagggtggctcacgcctgtaatcccagcactttgggaggctgaggtgggtggatcacctgaggtcaggagtttgagcccagcctggccaacatggcgaaaccccrtctctactaaaaatacaaaaattagctgggtgtggtggtgtgcacctgtaatcccagctactcagaaggctgaggtaggagaacagcttgaacccgggaggcagaggttgcaatgagctg

SEQ ID NO: 706413 - DNA, 917 bp, Homo sapiens
gggcaacccagtgaaaccccatctctactaaaaatacaaaaattagccaggggtggtgcttgcctataatcctagccactggggaggctgaggcaggagaatcacttgaaccaagaggcacaggttgcaatgagctgagatcatgccaccgcactccagcctgggcgacagagcaagactccatctcagaaaaaaaaaaacaacaacagatggggaaactgaaagtgcatagcataaaatgcggactaattctgaaatcaccaatatgtatctgtgcttgggaaatagaggcatacacaggaatgcagatgcccacacactcacattcacactcacactcactctcacactcactctcacactcactctcactcgcactctcacactacaccgagatgctcacacactcagcctccccatgcccaggcccctgctctttgttaatcatargaagaccgtggacaacccacctggaaactgggtgcccacagacccagactgaaggtgataaaagagggtggctggcttgggggctgaggaccctggctgcagaagactaacgcaggtgtgtgccctctgcctagggcccagattttggctacgtgacccgggagcccctctttgagtctgtcaccagccttgactcatttggaaacctggaggtcagtcccccagtgaccgtgaacggcaagacatacccgcttggccgcatcctcatcgggagcagctttcctctgtaagagaagccaggctggggctaggggctgtgggagtggggaagtcactgtttctcttttggggtggcctgggttgctcacacatggagcaagtggctgggggaattattccctcccacgacttcctgttaagaggccgacactcttggaaagaaaatcaagctagcctttatatctttg

SEQ ID NO: 706414 - DNA, 917 bp, Homo sapiens
gggcaacccagtgaaaccccatctctactaaaaatacaaaaattagccaggggtggtgcttgcctataatcctagccactggggaggctgaggcaggagaatcacttgaaccaagaggcacaggttgcaatgagctgagatcatgccaccgcactccagcctgggcgacagagcaagactccatctcagaaaaaaaaaaacaacaacagatggggaaactgaaagtgcatagcataaaatgcggactaattctgaaatcaccaatatgtatctgtgcttgggaaatagaggcatacacaggaatgcagatgcccacacactcacattcacactcacactcactctcacactcactctcacactcactctcactcgcactctcacactacaccgagatgctcacacactcagcctccccatgcccaggcccctgctctttgttaatcataggaagaccgtggacaacccacctggaaactrggtgcccacagacccagactgaaggtgataaaagagggtggctggcttgggggctgaggaccctggctgcagaagactaacgcaggtgtgtgccctctgcctagggcccagattttggctacgtgacccgggagcccctctttgagtctgtcaccagccttgactcatttggaaacctggaggtcagtcccccagtgaccgtgaacggcaagacatacccgcttggccgcatcctcatcgggagcagctttcctctgtaagagaagccaggctggggctaggggctgtgggagtggggaagtcactgtttctcttttggggtggcctgggttgctcacacatggagcaagtggctgggggaattattccctcccacgacttcctgttaagaggccgacactcttggaaagaaaatcaagctagcctttatatctttg

SEQ ID NO: 706415 - DNA, 917 bp, Homo sapiens
gggcaacccagtgaaaccccatctctactaaaaatacaaaaattagccaggggtggtgcttgcctataatcctagccactggggaggctgaggcaggagaatcacttgaaccaagaggcacaggttgcaatgagctgagatcatgccaccgcactccagcctgggcgacagagcaagactccatctcagaaaaaaaaaaacaacaacagatggggaaactgaaagtgcatagcataaaatgcggactaattctgaaatcaccaatatgtatctgtgcttgggaaatagaggcatacacaggaatgcagatgcccacacactcacattcacactcacactcactctcacactcactctcacactcactctcactcgcactctcacactacaccgagatgctcacacactcagcctccccatgcccaggcccctgctctttgttaatcataggaagaccgtggacaacccacctggaaactgggtgcccacagacccagactgaaggtgataaaagagggtggctggcttgggggctgaggaccctgrctgcagaagactaacgcaggtgtgtgccctctgcctagggcccagattttggctacgtgacccgggagcccctctttgagtctgtcaccagccttgactcatttggaaacctggaggtcagtcccccagtgaccgtgaacggcaagacatacccgcttggccgcatcctcatcgggagcagctttcctctgtaagagaagccaggctggggctaggggctgtgggagtggggaagtcactgtttctcttttggggtggcctgggttgctcacacatggagcaagtggctgggggaattattccctcccacgacttcctgttaagaggccgacactcttggaaagaaaatcaagctagcctttatatctttg

SEQ ID NO: 706416 - DNA, 917 bp, Homo sapiens
gggcaacccagtgaaaccccatctctactaaaaatacaaaaattagccaggggtggtgcttgcctataatcctagccactggggaggctgaggcaggagaatcacttgaaccaagaggcacaggttgcaatgagctgagatcatgccaccgcactccagcctgggcgacagagcaagactccatctcagaaaaaaaaaaacaacaacagatggggaaactgaaagtgcatagcataaaatgcggactaattctgaaatcaccaatatgtatctgtgcttgggaaatagaggcatacacaggaatgcagatgcccacacactcacattcacactcacactcactctcacactcactctcacactcactctcactcgcactctcacactacaccgagatgctcacacactcagcctccccatgcccaggcccctgctctttgttaatcataggaagaccgtggacaacccacctggaaactgggtgcccacagacccagactgaaggtgataaaagagggtggctggcttgggggctgaggaccctggctgcagaagactaacgcaggtgtgtgccctctrcctagggcccagattttggctacgtgacccgggagcccctctttgagtctgtcaccagccttgactcatttggaaacctggaggtcagtcccccagtgaccgtgaacggcaagacatacccgcttggccgcatcctcatcgggagcagctttcctctgtaagagaagccaggctggggctaggggctgtgggagtggggaagtcactgtttctcttttggggtggcctgggttgctcacacatggagcaagtggctgggggaattattccctcccacgacttcctgttaagaggccgacactcttggaaagaaaatcaagctagcctttatatctttg

SEQ ID NO: 706417 - DNA, 917 bp, Homo sapiens
gggcaacccagtgaaaccccatctctactaaaaatacaaaaattagccaggggtggtgcttgcctataatcctagccactggggaggctgaggcaggagaatcacttgaaccaagaggcacaggttgcaatgagctgagatcatgccaccgcactccagcctgggcgacagagcaagactccatctcagaaaaaaaaaaacaacaacagatggggaaactgaaagtgcatagcataaaatgcggactaattctgaaatcaccaatatgtatctgtgcttgggaaatagaggcatacacaggaatgcagatgcccacacactcacattcacactcacactcactctcacactcactctcacactcactctcactcgcactctcacactacaccgagatgctcacacactcagcctccccatgcccaggcccctgctctttgttaatcataggaagaccgtggacaacccacctggaaactgggtgcccacagacccagactgaaggtgataaaagagggtggctggcttgggggctgaggaccctggctgcagaagactaacgcaggtgtgtgccctctgcctagggcccagattttggctacgtgacccgggagcccctctttgagtctgtcaccagccttgactcatttggaaacctggaggtcagtcccccagtgaccgtgaayggcaagacatacccgcttggccgcatcctcatcgggagcagctttcctctgtaagagaagccaggctggggctaggggctgtgggagtggggaagtcactgtttctcttttggggtggcctgggttgctcacacatggagcaagtggctgggggaattattccctcccacgacttcctgttaagaggccgacactcttggaaagaaaatcaagctagcctttatatctttg

SEQ ID NO: 706418 - DNA, 633 bp, Homo sapiens
atctacataaaatttgtattatttttcttgagtcagttttgtccccaagcctagcctctccaacaaaaagagggaaatattggaagcagcagttctcgctccagaacagacttttattaaactattcctttccagtaattgtttcctattatatattaaatagcaagtcctacaggtttattatgtaaagctgtagttttgtacttgaaactggcttataaacatagtctgcagatcacattttatgggaagaaaaaaatatacccatgtagcaaggaattatctgaactagcagcatagctcttacttaaattcacttacactcgagcatgagctgggtctacataatcaaagtgaagtggagaattagagtaatttgagataattcagaccagaaaagtctaccccagaacctttcacctaattgcatcaattatctaattgaaggaaaccttggggaattggggcttgaatcattctgataattgatttaattttcatttagtttgygtatgaaaatacacccacacacattctaccttgaagctttctgtttagtaacaggcaaaagcagcctccatctctggaaatgatataatttgtcacttgtggtttcctcatgttggcatatcc

SEQ ID NO: 706419 - DNA, 633 bp, Homo sapiens
atctacataaaatttgtattatttttcttgagtcagttttgtccccaagcctagcctctccaacaaaaagagggaaatattggaagcagcagttctcgctccagaacagacttttattaaactattcctttccagtaattgtttcctattatatattaaatagcaagtcctacaggtttattatgtaaagctgtagttttgtacttgaaactggcttataaacatagtctgcagatcacattttatgggaagaaaaaaatatacccatgtagcaaggaattatctgaactagcagcatagctcttacttaaattcacttacactcgagcatgagctgggtctacataatcaaagtgaagtggagaattagagtaatttgagataattcagaccagaaaagtctaccccagaacctttcacctaattgcatcaattatctaattgaaggaaaccttggggaattggggcttgaatcattctgataattgatttaattttcatttagtttgcgtatgaaaatacacccacacacattctaccttgaagctttctrtttagtaacaggcaaaagcagcctccatctctggaaatgatataatttgtcacttgtggtttcctcatgttggcatatcc

SEQ ID NO: 706420 - DNA, 633 bp, Homo sapiens
atctacataaaatttgtattatttttcttgagtcagttttgtccccaagcctagcctctccaacaaaaagagggaaatattggaagcagcagttctcgctccagaacagacttttattaaactattcctttccagtaattgtttcctattatatattaaatagcaagtcctacaggtttattatgtaaagctgtagttttgtacttgaaactggcttataaacatagtctgcagatcacattttatgggaagaaaaaaatatacccatgtagcaaggaattatctgaactagcagcatagctcttacttaaattcacttacactcgagcatgagctgggtctacataatcaaagtgaagtggagaattagagtaatttgagataattcagaccagaaaagtctaccccagaacctttcacctaattgcatcaattatctaattgaaggaaaccttggggaattggggcttgaatcattctgataattgatttaattttcatttagtttgcgtatgaaaatacacccacacacattctaccttgaagctttctgtttagtaacaggcaaaagcagcctccatctctggaamtgatataatttgtcacttgtggtttcctcatgttggcatatcc

SEQ ID NO: 706421 - DNA, 1329 bp, Homo sapiens
tcccatcatggcctcccaaagtgttgggattacaggcgtgagccactgcacctagccttaggttttaaatcccatctcagctacttactatcatctgtgtttccatgggaacaatttgtcacctcccagagctcagttgtcacacttttgaaatgggtttcaaaacaaacactcattagtaataatggaccaagcaatataccctcataggaccctaaatcaagggtatcaaatcaaatccatcagaaggacagccccaccccaaccccaaccctacacaaacaagtagcagatcacacttctttgtaacaaatgattgtcatttggtagcagaatcacctttaccttattccctcttgagagtcctttctcttaagggaacccgagatcagctactgctgggcagacttagagcccacatggagactcggtcttcattcctcctctcctgcttctatttcctcacacctccttatctgccctccatatttactaagttctcatcaaagtttaatttataccggtgcaggagctttcagggactatagtgtcttctattagcagcactagaaagcaagcaatctgagaagccacatgagagatgagaggaagggaactagctcggcagggcatactcctggtttcacatgcaataaggaaaagaaatttttttcacttggagtcagaactctctgctgagatacctatagatctttcccgagtttgctgactttatcaccctatttagtactagtggcatgctttaaattaatgatttgcagctaatatacagaatgatagaatctggattcaaagattgagggagtgaatctaatgagacaaaatttaacccagaaaaaattagaagcttctatacttgagttaaaactaaaaagatttacagaagtggattaacagcttgaagtatgaaataagggaggggtctagttgactgcaacttaaactggattcaattgtgtgatatggcattcrcaaaatctactataattttaggatgcatccatagatgtatagcacctattctaaaatgaaggaggtggtaagatcactccattctgcactaggcagtatattcagtgttttcagagacatttacacattcaggaatgtgtagaataatgaatgactttgaaaaaatatgtcacatcagaaatggctgaaataactggggaggttaaaccccccaaaaaagtcttggtgagaacataattctttaaggattatgtgagatggcatattgaaaatacttagtgcaatgcctggcataaagtacacaattaatcttaatattaaaaggatgttaattag

SEQ ID NO: 706422 - DNA, 1329 bp, Homo sapiens
tcccatcatggcctcccaaagtgttgggattacaggcgtgagccactgcacctagccttaggttttaaatcccatctcagctacttactatcatctgtgtttccatgggaacaatttgtcacctcccagagctcagttgtcacacttttgaaatgggtttcaaaacaaacactcattagtaataatggaccaagcaatataccctcataggaccctaaatcaagggtatcaaatcaaatccatcagaaggacagccccaccccaaccccaaccctacacaaacaagtagcagatcacacttctttgtaacaaatgattgtcatttggtagcagaatcacctttaccttattccctcttgagagtcctttctcttaagggaacccgagatcagctactgctgggcagacttagagcccacatggagactcggtcttcattcctcctctcctgcttctatttcctcacacctccttatctgccctccatatttactaagttctcatcaaagtttaatttataccggtgcaggagctttcagggactatagtgtcttctattagcagcactagaaagcaagcaatctgagaagccacatgagagatgagaggaagggaactagctcggcagggcatactcctggtttcacatgcaataaggaaaagaaatttttttcacttggagtcagaactctctgctgagatacctatagatctttcccgagtttgctgactttatcaccctatttagtactagtggcatgctttaaattaatgatttgcagctaatatacagaatgatagaatctggattcaaagattgagggagtgaatctaatgagacaaaatttaacccagaaaaaattagaagcttctatacttgagttaaaactaaaaagatttacagaagtggattaacagcttgaagtatgaaataagggaggggtctagttgactgcaacttaaactggattcaattgtgtgatatggcattcacaaaatctactataattttaggatgcatccatagatgtatagcacctattctaaaatgaaggaggtggtaagatcactccattctgcactaggcagtatattcagtgttttcagagacatttacacattcaggaatgtgtagaataatgaatgactttgaaaaaatatgtcacatcagaaatggctgaaataactggggaggttaaaccccccaaaaaagtcttggtgagaacataattctttaaggattatgtgagatggcatattgaaaatacttagtgcaatgcctggcataaagtrcacaattaatcttaatattaaaaggatgttaattag

SEQ ID NO: 706423 - DNA, 647 bp, Homo sapiens
gtgtgttagtgcgcgggcaggctcgcgtggtgctggggttgctgtgtgagcggccctcgtggctcgggaggtgctgtgtttgcgcaggcgtgcgcccctggcgtcgggactggtgagagccacggcgggcgcgcgcgcgtgcgtgatggtgggggcggtgcagggaggggtttgctactgcgcgcaggttgttatctatttctgtgttatatttgaaaatgttctaatgaaaaggaaaataaataattaaggaaaggcgacaataacagataaaggggcactgtcagaaatattttggctttccgtactgatttaattactttaaaaatacacttcctacgttttcctccgtgccaaaatcctrtcgtaaaccacagccctccaatgattcagagccaaacccttccatcgccgcattagcaactccaaagggaggcttctttcaagttctctagtatcgtcctccctcccctcctccacacctaccccctcccttcaaggttgcgtgcagttctcttggcacaaatacaattttcctgtgagaatatctatctacgacagccttcccctccgttagggactccggatttctgtggcgactgaggcgctcttacctttgcgtcctgatctccaagcaagcacactga

SEQ ID NO: 706424 - DNA, 1547 bp, Homo sapiens
tcaagcacctgctttgggacagatacttcatacttggagtttcctttaatccttttaacacttttaggaaggtattgcttattatagatgagaaaactgaagccccgaaaagtttaggtggcttacacagggtcacacagccagtcaatggaggaactttatttgaactcaaatttgtctgactcttaagtctgaccttttaaccattatgctttgcttgctcctaaaatttcacactttctctctcattgccaaatctagtggcattcatcttttagatgtcagaaaatttgtgaacactctgctattctcatgccccactgttatagggtttgaatttttatgctacaagcatgcttctgcaatcagaaaaattaataaagaattatctttcaaaatatttaaagtaaaaaatgtatctcaaagaatattaaatggcacatgagaaactgtaatgaaatatttaaacatatattatagatttagacataatatcttttaaaagtaaaaaactctgctcacccaatagaaaatgggcaaagtacatggagcagtaactcacataagaaactatatacatacatatatatacacacatatatatgtgtatatatatgtatatatgtatatatacacacatatatgtrtatatatgtatatatgtacatatatacttatatactatatgttataataaaaacatattaatagatgccatgtatacatatataatatacttacacatacataaatataaatacatatatagtcataggctctaaatgacattacgtaaatggcatcctatcctatgtttcattcagcaaaatgttctttttttcattcaatagtatgtcctggaaatctatccatattattacctatagatctagttcatatgtagctgctgcacctattgcagactctgaacatactgcaatgtattccctaattatagagatttaggtttccagtgctttactgttataaacacgctgaaatggcctttcttgttcatgcctccttgtatatctgtgtatttcttaggattggtgactagaagtggaattgttgggtcatgaggtgcatttaggggcactgccaaactggcttctctaatggacatttgtcatctgaattcttgtgagactttgactggtctggtctagtcaagcctttgaggctaagcctgcatgcctttgctgatgctgctacttctgtctagactgcccttcccttctctgctcagcaaaattctattaaatcattaaaactcaactaaagtaccacttactctcagatgagttaagtgttctttcctggttctcctgaagtatccggtgacttagacttcattatcatgtactaaaactatgtttaagcatgtatatcctttataagttaatgaactgctcaaagacatttgtggcttattcatcagcatatacaggacaaaggacagaacactcattcaatatatgtttgttgaaccaaatatcaaggactgactcatctcctctgttccaacctctgtcacccatacctca

SEQ ID NO: 706425 - DNA, 1547 bp, Homo sapiens
tcaagcacctgctttgggacagatacttcatacttggagtttcctttaatccttttaacacttttaggaaggtattgcttattatagatgagaaaactgaagccccgaaaagtttaggtggcttacacagggtcacacagccagtcaatggaggaactttatttgaactcaaatttgtctgactcttaagtctgaccttttaaccattatgctttgcttgctcctaaaatttcacactttctctctcattgccaaatctagtggcattcatcttttagatgtcagaaaatttgtgaacactctgctattctcatgccccactgttatagggtttgaatttttatgctacaagcatgcttctgcaatcagaaaaattaataaagaattatctttcaaaatatttaaagtaaaaaatgtatctcaaagaatattaaatggcacatgagaaactgtaatgaaatatttaaacatatattatagatttagacataatatcttttaaaagtaaaaaactctgctcacccaatagaaaatgggcaaagtacatggagcagtaactcacataagaaactatatacatacatatatatacacacatatatatgtgtatatatatgtatatatgtatatatacacacatatatgtgtatatatgtatatatrtacatatatacttatatactatatgttataataaaaacatattaatagatgccatgtatacatatataatatacttacacatacataaatataaatacatatatagtcataggctctaaatgacattacgtaaatggcatcctatcctatgtttcattcagcaaaatgttctttttttcattcaatagtatgtcctggaaatctatccatattattacctatagatctagttcatatgtagctgctgcacctattgcagactctgaacatactgcaatgtattccctaattatagagatttaggtttccagtgctttactgttataaacacgctgaaatggcctttcttgttcatgcctccttgtatatctgtgtatttcttaggattggtgactagaagtggaattgttgggtcatgaggtgcatttaggggcactgccaaactggcttctctaatggacatttgtcatctgaattcttgtgagactttgactggtctggtctagtcaagcctttgaggctaagcctgcatgcctttgctgatgctgctacttctgtctagactgcccttcccttctctgctcagcaaaattctattaaatcattaaaactcaactaaagtaccacttactctcagatgagttaagtgttctttcctggttctcctgaagtatccggtgacttagacttcattatcatgtactaaaactatgtttaagcatgtatatcctttataagttaatgaactgctcaaagacatttgtggcttattcatcagcatatacaggacaaaggacagaacactcattcaatatatgtttgttgaaccaaatatcaaggactgactcatctcctctgttccaacctctgtcacccatacctca

SEQ ID NO: 706426 - DNA, 1547 bp, Homo sapiens
tcaagcacctgctttgggacagatacttcatacttggagtttcctttaatccttttaacacttttaggaaggtattgcttattatagatgagaaaactgaagccccgaaaagtttaggtggcttacacagggtcacacagccagtcaatggaggaactttatttgaactcaaatttgtctgactcttaagtctgaccttttaaccattatgctttgcttgctcctaaaatttcacactttctctctcattgccaaatctagtggcattcatcttttagatgtcagaaaatttgtgaacactctgctattctcatgccccactgttatagggtttgaatttttatgctacaagcatgcttctgcaatcagaaaaattaataaagaattatctttcaaaatatttaaagtaaaaaatgtatctcaaagaatattaaatggcacatgagaaactgtaatgaaatatttaaacatatattatagatttagacataatatcttttaaaagtaaaaaactctgctcacccaatagaaaatgggcaaagtacatggagcagtaactcacataagaaactatatacatacatatatatacacacatatatatgtgtatatatatgtatatatgtatatatacacacatatatgtgtatatatgtatatatgyacatatatacttatatactatatgttataataaaaacatattaatagatgccatgtatacatatataatatacttacacatacataaatataaatacatatatagtcataggctctaaatgacattacgtaaatggcatcctatcctatgtttcattcagcaaaatgttctttttttcattcaatagtatgtcctggaaatctatccatattattacctatagatctagttcatatgtagctgctgcacctattgcagactctgaacatactgcaatgtattccctaattatagagatttaggtttccagtgctttactgttataaacacgctgaaatggcctttcttgttcatgcctccttgtatatctgtgtatttcttaggattggtgactagaagtggaattgttgggtcatgaggtgcatttaggggcactgccaaactggcttctctaatggacatttgtcatctgaattcttgtgagactttgactggtctggtctagtcaagcctttgaggctaagcctgcatgcctttgctgatgctgctacttctgtctagactgcccttcccttctctgctcagcaaaattctattaaatcattaaaactcaactaaagtaccacttactctcagatgagttaagtgttctttcctggttctcctgaagtatccggtgacttagacttcattatcatgtactaaaactatgtttaagcatgtatatcctttataagttaatgaactgctcaaagacatttgtggcttattcatcagcatatacaggacaaaggacagaacactcattcaatatatgtttgttgaaccaaatatcaaggactgactcatctcctctgttccaacctctgtcacccatacctca

SEQ ID NO: 706427 - DNA, 647 bp, Homo sapiens
caaaagaagccaagttatatgatgagagacatttttctgaattgtgaaagaaccagaagttagttgtcatgtcaaataattaatttattcattaacttcccctaatttaaaattcaataatcttgttatcccaaataggatcagttctcatcaattcatttattacagaacaatttagattttcattagtttagagctacttttcttcccttctatcaacttaaaatattttttaaaatggtgtgaattgtttaacgctgattccattggccaacaacaatataactttcytgaatagactatcagagaaaaggtacaatgtatggttcaatgtcatttttcaatgaaataaagagctgaactgaaaataagtaaaatagatgtcagacatggtggaggccaagcagatactctggatgaaacggagaagaagacccctgtagctgcagatttgagaacaaaccagaaatgttcattttcttacatgcaaatcaaaatttttggtttgcaaacagttggaaggaggtaaacagtgtaaggacaaaaactttcctggactcatttggtcttcctcctgaaatgctaagattcttgaaggcaaggaaagtgtggcggttcactgtcatattccaagtgcctggaactat

SEQ ID NO: 706428 - DNA, 1532 bp, Homo sapiens
catcctcaggtggcctcccagagaaactgtccttgggaagtggtctggaaagaagactctaaaatataagttgggaatctgattactcatcagctagcaatgaggaccccagggctggtggtgaatgggactggagaagccgtgacttgctgttgtgttgcgattgataacactttcactggcactaaactgggatagtgttaccacaggaaggaaattccttgccattagccttttgaaaacagattgggaaatggtcgttataagaactaaggtgttagctgttgctgggcatgaactcttgggaggaaggcaatgagaaactaagagtgattcatcatgagttaaagttcagctggaagccagaggacttcttggcagcactgcagattcttatttcttggagccacagggcagaaggaatagagaattgggtcctgggcatcatagaagagtagcagaatcacagcggagcatgaatctcagtttcaatggctgctatgctgggatagggccctgatggggaagttgtgggaccctgaaatgtggaaggagacatttgggtcaaaccactcaaagattgtcagttgacttcagagttactggggacaattgcagtggcatcgctacttgtcgctataaatatcctccccaagccaaaagaagaaacagaaaaggaaaagtaaattctacacaatccaggccctaaatattgcttgaagagagaatgccaaactgcaaaatggctgagtcaaaagggaacactcacctaaccctagggcacagtctctcactaggctcccatgccactgatgcagcacgtcacagaaggcatcctgcagtttgcctgccagcctagacaacctaaaatgcatttccagacttagcatatgtgccaggatgccatgtcagacacactgaaagaacccaaaaatggcagccctctctcagccccagtgggtggttggaagtctaagaaaagactcaaccttgtccagatggtacagactcatctcatcctgtgcctccttgagaagtacaactatgaacccaagaaatatcatgaggagcaggcataggagaacttccaaggtggaagagcgaggtaagaacctgaggactgaggaacagcccagcagccaaacagcagggactctatgcccaaataccagcccccagccacagaaagtgatgaagggaggacatagaaaagaggaggtctcaagtcaataaatataaatcccgcacttwaagaaactacaaaaagtagggcaaagtaaacccaaagaaagcaggagataggaattaatttaaaaaaaaaaagagagaagagagcagataattaatgaaactgaaaacacaaaaacaatacaaaaacccattgaaacaaagagtcaatcttttgaaaacaccaataaaatgggaaaaaactctagcatgactgatgaaaaagaaaagagaaatgacacatttttagtatcaggatgaaacgtgggataccattgcagaccctgcagacaccaaaagggtta

SEQ ID NO: 706429 - DNA, 1532 bp, Homo sapiens
catcctcaggtggcctcccagagaaactgtccttgggaagtggtctggaaagaagactctaaaatataagttgggaatctgattactcatcagctagcaatgaggaccccagggctggtggtgaatgggactggagaagccgtgacttgctgttgtgttgcgattgataacactttcactggcactaaactgggatagtgttaccacaggaaggaaattccttgccattagccttttgaaaacagattgggaaatggtcgttataagaactaaggtgttagctgttgctgggcatgaactcttgggaggaaggcaatgagaaactaagagtgattcatcatgagttaaagttcagctggaagccagaggacttcttggcagcactgcagattcttatttcttggagccacagggcagaaggaatagagaattgggtcctgggcatcatagaagagtagcagaatcacagcggagcatgaatctcagtttcaatggctgctatgctgggatagggccctgatggggaagttgtgggaccctgaaatgtggaaggagacatttgggtcaaaccactcaaagattgtcagttgacttcagagttactggggacaattgcagtggcatcgctacttgtcgctataaatatcctccccaagccaaaagaagaaacagaaaaggaaaagtaaattctacacaatccaggccctaaatattgcttgaagagagaatgccaaactgcaaaatggctgagtcaaaagggaacactcacctaaccctagggcacagtctctcactaggctcccatgccactgatgcagcacgtcacagaaggcatcctgcagtttgcctgccagcctagacaacctaaaatgcatttccagacttagcatatgtgccaggatgccatgtcagacacactgaaagaacccaaaaatggcagccctctctcagccccagtgggtggttggaagtctaagaaaagactcaaccttgtccagatggtacagactcatctcatcctgtgcctccttgagaagtacaactatgaacccaagaaatatcatgaggagcaggcataggagaacttccaaggtggaagagcgaggtaagaacctgaggactgaggaacagcccagcagccaaacagcagggactctatgcccaaataccagcccccagccacagaaagtgatgaagggaggacatagaaaagaggaggtctcaagtcaataaatataaatcccgcacttaaagaaactacaaaaagtagggcaaagtaaacccaaagaaagcaggagataggaattaatttaaaaaaaaaaagagagaagagagcagataattaatgaaactgaaaacacaaaaacaatacaaaaacccattgaaacaaagagtcaatcttttgaaaacaccaataaaatgggaaaaaactctagcatgactgatgaaaaagaaaagagaaatgacacatttttagtatcaggatgaaacgtgggataccaytgcagaccctgcagacaccaaaagggtta

SEQ ID NO: 706430 - DNA, 631 bp, Homo sapiens
cttgaagatgtcaagtctttgagacaccagcagcatgggtgtccctagaaggctgagaggctgtcttcagttccgattttttgagggcttcttggcagcctgatgctggctgctctctctgtacctctcarcacttcaatcctccttctatttgtcagagggggtcctcatgtgagcccttgtgtagggcgagactctgagaggatccttggtggccaagggccaaaagtagatagaaaccccaccctgggaagatgagtgagggtaagtgcaagggcatagcctggcatgtagtaggtgcttaataaataacccctgtgactgtaatcatgaggtttggtcattactgcttctggagctgcatagctattctttaggcaacagaacaaagaggcacacaaacaccaaggaaaggctcaaaccctactcaccgcagctgccagaaaaaacccaaatgataaaaggagcagcaaccaccatgtttggcgaactggctttcaagtaagatcacaggggaagctggaagcattttggaagaaggagggaaaagatacctcagtgacatctgggagtgctgagggagggaggcttctggggctgaggagtgaggatttgctgggactccagcacg

SEQ ID NO: 706431 - DNA, 631 bp, Homo sapiens
cttgaagatgtcaagtctttgagacaccagcagcatgggtgtccctagaaggctgagaggctgtcttcagttccgattttttgagggcttcttggcagcctgatgctggctgctctctctgtacctctcagcacttcaatcctccttctatttgtcagagggggtcctcatgtgagcccttgtgtagggcgagactctgagaggatccttggtggccaagggccaaaagtagatagaaaccccaccctgggaagatgagtgagggtaagtgcaagggcatagcctggcatgtagtaggtgcttaataaatarcccctgtgactgtaatcatgaggtttggtcattactgcttctggagctgcatagctattctttaggcaacagaacaaagaggcacacaaacaccaaggaaaggctcaaaccctactcaccgcagctgccagaaaaaacccaaatgataaaaggagcagcaaccaccatgtttggcgaactggctttcaagtaagatcacaggggaagctggaagcattttggaagaaggagggaaaagatacctcagtgacatctgggagtgctgagggagggaggcttctggggctgaggagtgaggatttgctgggactccagcacg

SEQ ID NO: 706432 - DNA, 2027 bp, Homo sapiens
agatagggtttcaccatgttggccaggctggtctcgaactcctgacctcaggtgatctaccctcctcggcatcccaaagtgctgggattacaggtgtgagccaccatgcccagcctgaattcatttttgtaacaattttgaacaataagaagttggaagatgataaaaaacctaatcatttaaatatctgatccttgctggaacccataaatcaattctagaactctggactttcaattcactgaattagtaatttctttcttagtgtctgtctttttaaagatgatcactttatagtcaataatagcacagatccttttatttcattttgtaaaggcccagtttcattagaagcacagaatgtcatgtgtacaaaagaagaaaacattctgatgaaaatttttatttttaacaatctgttttccagctgtccaaacaactagtggccaccagggcacccgcagtctcctcccttgtgtccctgaagctcatcaagagttgctcaacagcccgcagaaccacgtgcctgtctcattgtccttatcttcccatttcaaggtttgaaccaacccttgagtacagtccttaccgagtcagcccygagtgccttagggaaagaagtgagaccgggcatatcccctgggaggggaaacatgttgcagcacatcatgacaaaaatatcaagacagaagtttataaaatgtgctaggaaaatcgaaggaagagggtgggggtgggaaaacttcagagaagcagcgacaacttgtgctggacctgaaggatgaataagagctgccagaggggacgggcgcggtggctcacatctgtaatctcagcattatgggaggctgaggtgggaggaatgcttgagcccagcaggttgagactgcagtgagccacgactgagctactgtactccatcctggccaaaagagagagccctgtgtcataaataaatgaataaataaataaatttttaaaaaaatgtttgccagaggaagaacgtggtggtattcaatccatgaagtacaggaggcttgatgcccatcattttgagggaattctaaaattttaagtagtgaaaagtggcagggaataccgtgggatagggaggagaaacagaaaggagagcagtgaatagtggttaaaactagtggcaggttggggtagactggaacagagtggagatttgatcctgaaggcagtaggaagccactagaggtttataagcagtgcgggtaaatggtcccagttctgttcagataacaggggagcagaaaattgaaaagaggtgaggagacttgggaatggctaaaacactagctgagaagccactgcattagtcccagggagaaatgacgagggcccaagacttcatccaatgctgaggcaatgggaacagagagatcccgacagatgtccacatgcagagcacgcagcaggtggtggagactgatgtgtgtcaggtgaagggaaaggaactctaagaaggtacttaatcatttgtgaaactgagagaagagtcaggaagtcaatggagatgtggggactacaggaggagaaagaggtttgggagggaaaggacgggatgagtttgaggcatgctcagcttaaagtgcctaatggtcagtctagcagagatgtctgcctagcattagagaatggatctggagctccagaaaactgatatgggatggatcttgtattctctcacacaagaagacaaagttcaattttgattcaagagatcacagaaccattgtaattgcaaaacaatggagcaatactccttctattgatggataaaagcaggaaagctaatctggcagctgaaaaagatggcccagtgccaggtcagactgagacattttttggttttgttttaggggttctttgtgttttggagggaattgcaattttatttccttgtttgttgtggtcatctagatattaactgtctcctccccctcccaaggatgtactcaattcctaggatctggtatagacttactaatcactggtatgca

SEQ ID NO: 706433 - DNA, 1157 bp, Homo sapiens
gaatcatggtctttctgagatttaggaatttggagattctttaatctagctgcttatattcaatttaaagatctgagcccctgattggtttaaagccttgttacccagtctggtctgaagacaagcagtaccagcatcatctggaagcttattagaaatgctgatgcttgggctccatcaggcattctgattcagaatttgctgcttacaagatcccaagtgacatgtatgcatgtttttgagagcgctgggttaaatgatctaccgaggtatatggttcagaaatagcaacaaccaataactaaacttctgattttccaaaacaagatctctcttctacattattacacaayatcttcccttctcaagaggaaaacagctctgttatgaataatggatgcccaggctccactgcaaactcatttcttggggtggtgttcaggcattgtatttttaaaagcttccaagtacagccagggttagaagagtctcaagtagtcactatagtatagtgatcagggaaggtttcacgaaagagagctaggtatttggtcttgaaggaccagatggattcagaggagctaagggtattccagatgaggtatggcatggagtgggtgggaaatgccaggagaaaaagaggacatggcagcaaagagtgttttagaaagcaggcaatccagatttctagatggaaactcctaattattaaatgctgaggtctgtcaaagatgaaactggaggctggacacaccaaatatctgtatgacagagctgtacatctagacggtggacatctagcatccctgtctatatgcaagtcagctggctgcaagaccacgtgctgctgaaaatctcactgtggtcatgacagtccacccagtggctcagaccctgagattctgttcacacttcctacactcttccttactcgtctgtgttcttccaactcctcatcttgcctaattcctcaggcagcacctcatcctgtaagtcttcatttccaggcttaagagatgtcagccatctgtgtctttattgtacagccagcacaagtgaacacttgaacacaggcatccctgcattgttgttctgaacctttatgtgtattaacaactaatttcttggtgatgactgactcatgaggcagagaatga

SEQ ID NO: 706434 - DNA, 1157 bp, Homo sapiens
gaatcatggtctttctgagatttaggaatttggagattctttaatctagctgcttatattcaatttaaagatctgagcccctgattggtttaaagccttgttacccagtctggtctgaagacaagcagtaccagcatcatctggaagcttattagaaatgctgatgcttgggctccatcaggcattctgattcagaatttgctgcttacaagatcccaagtgacatgtatgcatgtttttgagagcgctgggttaaatgatctaccgaggtatatggttcagaaatagcaacaaccaataactaaacttctgattttccaaaacaagatctctcttctacattattacacaacatcttcccttctcaagaggaaaacagctctgttatgaataatggatgcccaggctccactgcaaactcatttcttggggtggtgttcaggcattgtatttttaaaagcttccaagtacagccagggttagaagagtctcaagtagtcactatagtatagtgatcagggaaggtttcacgaaagagagctaggtatttggtcttgaaggaccagatggattcagaggagctaagggtattccagatgaggtatggcatggagtgggtgggaaatgccaggagaaaaagaggacatggcagcaaagagtgttttagaaagcaggcaatccagatttctagatggaaactcctaattattaaatgctgaggtctgtcaaagatgaaactggaggctggacacaccaaatatctgtatgacagagctgtacatctagacggtggacatctagcatccctgtctatatgcaagtcagctggctgcaagaccacgtgctgctgaaaatctcactgtggtcatgacagtccacccagtggctcagaccctgagattctgttcacacttcctacactcttccttactcgtctgtgttcttccaactcctcatcttgcctaattcctcaggcagcacctcatcctgtaagtcttcatttccaggcttaagagatgtcagccatctgtgtctttattgtacagccagcacaagtgaacacttgaacacrggcatccctgcattgttgttctgaacctttatgtgtattaacaactaatttcttggtgatgactgactcatgaggcagagaatga

SEQ ID NO: 706435 - DNA, 791 bp, Homo sapiens
atttttagtagagacggggtttcaccatgttggccaggctggttttgaacacctgacctcaggtgatccacccgccttggcgtccccgcttcccccttaagccacaagtgaggaccagaagaccagttggcaaggctcagggcrtgtccccagccagaggtcagaggtctgtggtacccgagaccaggtgtggaatcagaggtaggaaagtctaaatgaggtactgctcagggggcttctgccaaaagtgtgaggacgtctgctggtagaggctacatgggcaccatttcatgccaaagcttcaacctaggaggggccagggcgagcccaagtgcaagacaagggtggcagagaagcaagcagccaccttccccttcccactgtcagccagaggaggcccagacaggggaggagaggagctcaagtctgagtgacatttggagtttttggttttgatatacaactggatatgcatttttaattttaggggctattcttatgattgaaagtgaccagaggaattaaaaaatatatgtgttagagggactagatattaactgagaatgagagggaactattataaacttcatccaagggcaaggaatgaacgagccccacagtgcaggcttgaccaagcaatgggcaaggaacactgtctcctgaccacaccccgttcccactgtgcaatacactggctttgccaccagcattccaacagagccacagcatggacacaccaccttcgggagagttcaacattacagggctagagttccgtggtacgtatttgt

SEQ ID NO: 706436 - DNA, 791 bp, Homo sapiens
atttttagtagagacggggtttcaccatgttggccaggctggttttgaacacctgacctcaggtgatccacccgccttggcgtccccgcttcccccttaagccacaagtgaggaccagaagaccagttggcaaggctcagggcgtgtccccagccagaggtcagaggtctgtggtacccgagaccaggtgtggaatcagaggtaggaaagtctaaatgaggtactgctcagggrgcttctgccaaaagtgtgaggacgtctgctggtagaggctacatgggcaccatttcatgccaaagcttcaacctaggaggggccagggcgagcccaagtgcaagacaagggtggcagagaagcaagcagccaccttccccttcccactgtcagccagaggaggcccagacaggggaggagaggagctcaagtctgagtgacatttggagtttttggttttgatatacaactggatatgcatttttaattttaggggctattcttatgattgaaagtgaccagaggaattaaaaaatatatgtgttagagggactagatattaactgagaatgagagggaactattataaacttcatccaagggcaaggaatgaacgagccccacagtgcaggcttgaccaagcaatgggcaaggaacactgtctcctgaccacaccccgttcccactgtgcaatacactggctttgccaccagcattccaacagagccacagcatggacacaccaccttcgggagagttcaacattacagggctagagttccgtggtacgtatttgt

SEQ ID NO: 706437 - DNA, 791 bp, Homo sapiens
atttttagtagagacggggtttcaccatgttggccaggctggttttgaacacctgacctcaggtgatccacccgccttggcgtccccgcttcccccttaagccacaagtgaggaccagaagaccagttggcaaggctcagggcgtgtccccagccagaggtcagaggtctgtggtacccgagaccaggtgtggaatcagaggtaggaaagtctaaatgaggtactgctcagggggcttctgccaaaagtgtgaggacgtctgctggtagaggctacatgggcaccatttcatgccaaagcttcaacctaggaggggccagggcgagccyaagtgcaagacaagggtggcagagaagcaagcagccaccttccccttcccactgtcagccagaggaggcccagacaggggaggagaggagctcaagtctgagtgacatttggagtttttggttttgatatacaactggatatgcatttttaattttaggggctattcttatgattgaaagtgaccagaggaattaaaaaatatatgtgttagagggactagatattaactgagaatgagagggaactattataaacttcatccaagggcaaggaatgaacgagccccacagtgcaggcttgaccaagcaatgggcaaggaacactgtctcctgaccacaccccgttcccactgtgcaatacactggctttgccaccagcattccaacagagccacagcatggacacaccaccttcgggagagttcaacattacagggctagagttccgtggtacgtatttgt

SEQ ID NO: 706438 - DNA, 1015 bp, Homo sapiens
catattgagttcaccattacgtctggacacgaacttgaatttatggactgccagaggtttcacagaagaactagtccttgcaactagctcagctcaaaataggttaagaaatatgagcgcacggggcgtatctggctaacttaatcatcaaaagaatttcttgtaaataagaaagaaaaataaaactgtagctttcattcaagtaaaggctacactttgcttcctcacaacaaatcaaaaacaaaaatagaagctttgtagaggaacaagcaaggtgtatgctggacagtacctcattctgaagcgctgttggtgttaactgccaaacagtgctaaaagaaatagaaagtagaatcttcaggctgcctttttctgccctatataaacatgtttattcaatggcagctgtctgcagataaactcaaaaaaagtcacagcaacacatgaattctgaacttgaattaaaggggagaaagtgaggattgtaatgactttttcagtgactaccaggagacaacaccaggataaatcattcaattaactataaragaaattcggcattattactgcagcttaaaaatagaactttgtttagaatatattaattttgaggatccaactcatcttaagtcaatgaaatttcactaaccactaaatcctttctgctctttaggatttgtctattcaacatataaccctgtttagttttattaaatatcttggagtcgaatttccaggaagtatatagaactaactagacacatatcaggagacctaaaggaaaaagaaactggcacaaacctcaatttttttctttttttttttttttttgagacagagtctctccctgttgccaggctggagtgcagtggcacgatctcggctcactgcaacctccacctccctggttcaagcaattctcctgcctcagcctcccgagtagctgggactacagttgtgcaccatcacactcagctaatttttgtatttttagtagagacggggtttcaccatg

SEQ ID NO: 706439 - DNA, 1561 bp, Homo sapiens
acccattattgtaagatacgtttgtgttataaactgaattgctgtatttcatatttcaatgttaatatttttcttcatgttaaagagcgaaagttttttttattcatttgtttgcacataaataacaatggccttaagaaatactgttttatggaaaaggaaaacacaaaaacagtatgtgaaagctatagcaaaggaaaaatttggcagtaagaaatccctgcaaaagtaaacctccttcgttaatgtgctctaaaatctggttgatgaccacactctattttaagggtaaaatgtcacaaacaatgagtacgtattctcaatagttgttcaatgtggttgtccacactgtgcatgatacactctgtaaaatattaaataaaaaagtatagcaatgatatcatagcaggatgccagctgtgttggcaggtaaaactattaaaatcaacagcaggttattgcttaaaatatgttgaaaaattatcatagtaccaaagagaaatggcagttttgtctttagatttctaacaatttaacatcacctttaataaaatctgttactatttcataaatataaaatgaaatctttcaagcaaaaatatctattgaaataaaagatttcattcattctaggcaattatagttcagaatttaaaaagtatgcagcagtttcagctagcatatgttaaactctcagatatrgccagtagccatgacaaaaataagttaccatatctactaggtaaatagtgactttagaacataaaattttatgaacaccttaatgaataccactcaaaccccagtgaaacgctaaccttaggatatttgtatttggctttctatgactgtgattaattatgccatttgtaagagtcacaaattaaatttcaatgtacctgtacaaaaatataaaaagacaaaaatattccacaatcacaaaacaacatatgtattttcaaagtgttttctaaaagatgtcctgactttaagaataaacaatgaaaaaaaaaagatttgacaatcagatcattctttttttgtttttttttgagatggagtctcactctgttgctcaggctggagtgcagtggcaccatgtcggctcactgcaacctccgaatcagaccactcttatagctctgaaactcagaacttggccaacataaaagtatctaaggatgacagccaaaatccatccaagctatctggtgcatcttaaattttgagcaggtagaaataagaaacttctataaaaatgctggtaccctaaaaccctacacaaccaaattgttcctttttgtctgagctcaggcctatccaaaatcaaatgacaacctttagaataatccctgaaagcaaacaagcaaccagggcaggtggcctatgtatcctatagcctatgcagatggccacagagtggatggtgaaatcaagcacagatgaccaaggacaaaagcttccaacatttgaggttgattcaacatgatttgtaagcagataaaatttggagcccttctgagcactcctcagcagaggaatgactaaatagaccaatatg

SEQ ID NO: 706440 - DNA, 1026 bp, Homo sapiens
tgacttggacagttttgaggagtactggacatatattctgtagaatatccctcaaytgaaatttgtctggtgtttctctcatgactgaactggggttatgagatttttgctcatgtgtttttaatcccaaactttaatcccaaattaaacagaagtaattgaagtttgacaatttaaacttccaaaactagcaacaggttttctgctcattgtctagttaagaaactgctttgagataccaaatcatttcttaagaatgtgatcaccaccatcaaatggattaactcaaacatgtgtcatttacattgtatacaaaacagtcctaaaattaatagttatgggctttatcttaaacagtttttagactgttaactattttatttcaactgctaatgtcattttgcaggaggctttgagagtcatttaaaattcttactagcatttgttccatttttcagacaaatagattgcagggtcttaaatgacatacctagcaattacatttttctataaaatagtaaccagaaaaggtaaaagccacacatttgcctgataatctccagaaatgtaattatagaagtcctagattctgccacaacatcaacaatgtgaagtaatgattttttcaaaaaaggatcagtcagtaagatgtgctacagactgctatatgctacagtgtttaagttaataaaccatgtttgatctagtaaattatttgatgtttattatattatattctaaaacaccacagatttttttctctaaatatttgatgctcagaaaaatatcagtactatatagtactttctatatgttattcaaaaccgtccccatacaagaccactcataatttgcacatgtaaaataactgattgcattgaatcactgtgacttttacatatatagtgggtagtactggctgtctaccagcatcctttcccatcttcctatgtactttcttgattgacttcacaaatgagcatattccattcccccagcctcagttactagttgaaatacgacctt

SEQ ID NO: 706441 - DNA, 1026 bp, Homo sapiens
tgacttggacagttttgaggagtactggacatatattctgtagaatatccctcaactgaaatttgtctggtgtttctctcatgactgaactggggttatgagatttttgctcatgtgtttttaatcccaaactttaatcccaaattaaacagaagtaattgaagtttgacaatttaaacttccaaaactagcaacaggttttctgctcattgtctagttaagaaactgctttgagataccaaatcatttcttaagaatgtgatcaccaccatcaaatggattaactcaaacatgtgtcatttacattgtatacaaaacagtcctaaaattaatagttatgggctttatcttaaacagtttttagactgttaactattttatttcaactgctaatgtcattttgcaggaggctttgagagtcatttaaaaytcttactagcatttgttccatttttcagacaaatagattgcagggtcttaaatgacatacctagcaattacatttttctataaaatagtaaccagaaaaggtaaaagccacacatttgcctgataatctccagaaatgtaattatagaagtcctagattctgccacaacatcaacaatgtgaagtaatgattttttcaaaaaaggatcagtcagtaagatgtgctacagactgctatatgctacagtgtttaagttaataaaccatgtttgatctagtaaattatttgatgtttattatattatattctaaaacaccacagatttttttctctaaatatttgatgctcagaaaaatatcagtactatatagtactttctatatgttattcaaaaccgtccccatacaagaccactcataatttgcacatgtaaaataactgattgcattgaatcactgtgacttttacatatatagtgggtagtactggctgtctaccagcatcctttcccatcttcctatgtactttcttgattgacttcacaaatgagcatattccattcccccagcctcagttactagttgaaatacgacctt

SEQ ID NO: 706442 - DNA, 1406 bp, Homo sapiens
tcaaaagcgcattcttcagaggaatgaggaggccagggcacagatgttgctcagtaaagaagccaatggcaactggggaatggttgcaatggtgaaaaaaatctgatcaaacaatgcttttacatgggatgaaggagagagcagggcttgaaacaaagaaatcagcctggatggcactaaagcccagaagattccttttctctgtactatttgcggatgtgcttcttctttggggtgggcattcsaagtggttccccttaaagctacgtgaagaagggccagagcctcgttgacaccagattcagtgagttataaaagcatgctatcagttcaaatctttgggattaattgttcttttggtgaagatggagagaaacaagtttgttacccaaccaagagatggggccaacatggcaaggataggagcaggctggggttcaggagctcaccccaagcaccctagttatcagttctaaggcaacaagccagctcagagacagcctccccaggtaggtagacagtgctgagccctgctggtgctacgtaagcttggctcagggcctgttggggtgaaattctagggcactggagtgggtggggatgtcagagaggaagtgtactttgagagaacatctggtgacaagatcaaccccttcatgagtaaactgaggccaagagcagagaagaataacagccaatcttgccattcatttgattcatattactcaaaatgaatggacaattgcaggcctcttgaatttcagtgcagtgccattcgttctgagctctttactcataagaatagaatttaagggttgtcagggcctgaatctaattctgtgatgataaaagtgtgagctgtatgatgccaaattgcctgctacccactcatgtagctggagttagtatgtatctacaggtttgtttcttcccaaaaggctttcccaaactccttctgctgagcatgcgtaactccttggttttcttttaagagaaagaatgcactgctccattccatgaaatctaagtggggctgttagtcagtcttctacccgcttagccacaagattgagggcatgtgacctgagtctagccaatcaaaatattctctcctggccacagtgattggcttggatatgggcaaggccaaacatagccaaacctagccaatcataatattctctcctggccacagtgattggcttggatatgggcaaggccaaacatagccaaacctagccaatcagaaaccactccaggacttgtctactaaagttagctgggaggccaagcttaataatcttcataatctgagaagcctttgcttcaaaacgagatgtttcagtagttgaactatcaactacaaacctagaatgactttacagctccctgccaccatatctcac

SEQ ID NO: 706443 - DNA, 599 bp, Homo sapiens
tgtctgtcccattaattttacaaaacattttgtttgtgggtggggatggggaatcctgtaaactctttgaggtcaggggcgaggacgattttatcaccatatccctaatacgtaacagagcctgaagcactagctactcaataaatatgtgcagaatgtaattattaactcggttgaggaacctggggatcagatgatgcrtgacccatccaagtgctggggttggtggactggaactcaggtcttctgacaccttttatttttccttatactgtcactgctgtgctaaaatggaaaaaaaaaaattgaaggcctgtctgaggtaatcaaaaacattggaacataaaggaggaagaggaaggcaagtggccttcgtttccattggacaaagctaatcagtctgtatgaatagccaagggtcttgtttctagataaaagaaaactctccaatcagttctaatccaagagcatcgctggcagtgagagattgtaaaagcgaaatattcactttgaaaaatgaaacctattaaattcagggcattgtaatttcccattgtgagactgttgtaccagcgattaaattctattgtgtgtctaca

SEQ ID NO: 706444 - DNA, 1931 bp, Homo sapiens
acacacacatccacacaggtgagcacagtcgtgtgcacctgcacgttacacaggtgaacttttctcatccagtcctgaggtttccactgcatcttaaacacttagccgaggtgtgtcaggaccagcaatgttgtctttgcggccctttgatggtcccctttgcagtcagtcatcccagccatcaaataattgaacacctgagattcctttcagcaaatcatagccattggtagatgcacaaatatttaaaaaaaaaaaaaaaaagkccaggcgcggtggctcatgcctgtaatcccagcactttgggaggccgaggcgggtggatcacgaggtcaggagatcgagaccatcctggctaacacggtgaaaccctgcctctactaaaaatacaaaaaattagccaggcatggtggtgggcgcctgtagtcccagctacgtgggaggctgaggcaggagaatggcgtgaaccccagggagcggagcctgcagtgagccaagatcacgcccctgcactccagcctgggcgacagcgagactccgtctcaaaacaaacaaacaaacaaaaaacatgctgggcacagtggctcacgcctgtaatctcagcacttttggaaggccgaggcgggcagattgcttgggtccaggagttcaagaccagcccgggcctgggcgacatggcaaaatcccatctctgcaaaataataaaaaattagccaggtgtggtggcacacacgtgtagtcccagctacttgggaggctgaggcaggaggatcacttgagcccaggaggttgaggctgcaatgaactttgatcgcaccactgccctccagcctgggtgacagagtgagaccctgtctcaaaaaaaaaaaaaaaaaagcaaaactatgaatgattccaggctatcagaatctactaggacttagccttggggcctgcgtgtgcctggccatagccacctattcgctgtcatggagacatctcacagtcacccggtggacaccccagcaatccaacgagagggtgcgaggaggctcccccaacgtccagcctctgtggcacctgctaagcactaactaatcatgtttgatagcaaccatcttatgtaaagactttccggctgggtgcggtggctcacgcctgtaaccccagcactttgggaggccaaggcgggcggatcatgaggtcaggagattgagaccatcctggataacacggtgaaaccccgcctctactaaaaatacaaaaaaatagctgggtgtggtggcgggcgcctgtagtcccagctactcacaagactgaggcaagagaatggcgtgaacccgggaggcagagtttgcagtgagctgagatcacgccactgcgctccagtctgggcgaccgagagagactccgtctcaaaaaaaaaaaaaaaaaaaaaaaaacactttccatgtccccataacactacacagatggagagatgagccacacgaggtgcagaatccaagcaccgaaggggttcagcagctacccagggccacacagctaatgagtgagtgacaaacccaggagtccaactttggagtctccaacccctcaagccctctgcttttctgccctttttgtcattattcaagatgcttcactgggaaggggagaggggggaagagggggagaagaaaagcgtaatggaaaccacatggtattggtgggggccactcaagaatagtgcttcacggttacaggacacataaaacagcagaaaccttctgcagctgcatactgccacggaaatcaaactggcagaaacacaattctccttatctcctaaagaaattatttggagggctggccccagggaaattcaggcaaagaaataaaaggggaaaatgaaggcagacgtaaacttgctgaatttatcattgtgtcatgctggaagctgagggaagtgt

SEQ ID NO: 706445 - DNA, 1931 bp, Homo sapiens
acacacacatccacacaggtgagcacagtcgtgtgcacctgcacgttacacaggtgaacttttctcatccagtcctgaggtttccactgcatcttaaacacttagccgaggtgtgtcaggaccagcaatgttgtctttgcggccctttgatggtcccctttgcagtcagtcatcccagccatcaaataattgaacacctgagattcctttcagcaaatcatagccattggtagatgcacaaatatttaaaaaaaaaaaaaaaaaggccaggcgcggtggctcatgcctgtaatcccagcactttgggaggccgaggcgggtggatcacgaggtcaggagatcgagaccatcctggctaacacggtgaaaccctgcctctactaaaaatacaaaaaattagccaggcatggtggtgggcgcctgtagtcccagctacgtgggaggctgaggcaggagaatggcgtgaaccccagggagcggagcctgcagtgagccaagatcacgcccctgcactccagcctgggcgacagcgagactccgtctcaaaacaaacaaacaaacaaaaaacatgctgggcacagtggctcacgcctrtaatctcagcacttttggaaggccgaggcgggcagattgcttgggtccaggagttcaagaccagcccgggcctgggcgacatggcaaaatcccatctctgcaaaataataaaaaattagccaggtgtggtggcacacacgtgtagtcccagctacttgggaggctgaggcaggaggatcacttgagcccaggaggttgaggctgcaatgaactttgatcgcaccactgccctccagcctgggtgacagagtgagaccctgtctcaaaaaaaaaaaaaaaaaagcaaaactatgaatgattccaggctatcagaatctactaggacttagccttggggcctgcgtgtgcctggccatagccacctattcgctgtcatggagacatctcacagtcacccggtggacaccccagcaatccaacgagagggtgcgaggaggctcccccaacgtccagcctctgtggcacctgctaagcactaactaatcatgtttgatagcaaccatcttatgtaaagactttccggctgggtgcggtggctcacgcctgtaaccccagcactttgggaggccaaggcgggcggatcatgaggtcaggagattgagaccatcctggataacacggtgaaaccccgcctctactaaaaatacaaaaaaatagctgggtgtggtggcgggcgcctgtagtcccagctactcacaagactgaggcaagagaatggcgtgaacccgggaggcagagtttgcagtgagctgagatcacgccactgcgctccagtctgggcgaccgagagagactccgtctcaaaaaaaaaaaaaaaaaaaaaaaaacactttccatgtccccataacactacacagatggagagatgagccacacgaggtgcagaatccaagcaccgaaggggttcagcagctacccagggccacacagctaatgagtgagtgacaaacccaggagtccaactttggagtctccaacccctcaagccctctgcttttctgccctttttgtcattattcaagatgcttcactgggaaggggagaggggggaagagggggagaagaaaagcgtaatggaaaccacatggtattggtgggggccactcaagaatagtgcttcacggttacaggacacataaaacagcagaaaccttctgcagctgcatactgccacggaaatcaaactggcagaaacacaattctccttatctcctaaagaaattatttggagggctggccccagggaaattcaggcaaagaaataaaaggggaaaatgaaggcagacgtaaacttgctgaatttatcattgtgtcatgctggaagctgagggaagtgt

SEQ ID NO: 706446 - DNA, 1076 bp, Homo sapiens
cactatttctcaagctacatttttttcccacataatggattgtagacatcttttcaggtcaaaaacagttgttttacattgttatttttaatggttgaggagaattttgatacatggatgtgttttaatttatttaatcacagagttatagttcataacctcaggcctgatcacataactgtccaacttacaacctttcaagggcccaacactggatgaagtccaaatctactgtctaaaaatcatggtccttctcagtctgatctcaaatagctgttcttatttcgtctcctcctcactccttcccactcatccctctgaagctatacagtaggtgacactccatttttccccactgtccaggttaagataatgcctatgactgtaacagatgaccccrtatctcagaagctcaacacaacagaaattgagacctcatttctgctcacataaaggagtatctgtagcagcacggggaggagagctctgctccaggcagtcattcagggacacaacggacctttaacaagatcatctcagacatcaacattcaaccagcagatgaggggaaagagagaagaaaggatctcaccagaggggtcaggcccagacacagaagtggtatattccattagcccactttccatgagccatgattcaggaatatgctggaatacctgcaaaggagctggcaaaggtatgggacctgtgctcagctatccaggcactttgcatggtaagtgcatctgttcatctgcctgggatacctctccttcactccagctttcagtctgctcaaaggtttgccatgggagaccctccctgctctgggctgagtcaggggctctctctgggcgcccacggcagatagtcagacacctccaccggaacacctgctctcccacattagaatagtgatgaggccgggcacagtgactcatgcctgtaatcccagcactttgggaggccgaggtgggcagatcatgaggtcaggagatcgagaccatcctggccaacatggtgaaaccccatctactaaaatacaaaaaattagccaggtgtggtggcggacacct

SEQ ID NO: 706447 - DNA, 1076 bp, Homo sapiens
cactatttctcaagctacatttttttcccacataatggattgtagacatcttttcaggtcaaaaacagttgttttacattgttatttttaatggttgaggagaattttgatacatggatgtgttttaatttatttaatcacagagttatagttcataacctcaggcctgatcacataactgtccaacttacaacctttcaagggcccaacactggatgaagtccaaatctactgtctaaaaatcatggtccttctcagtctgatctcaaatagctgttcttatttcgtctcctcctcactccttcccactcatccctctgaagctatacagtaggtgacactccatttttccccactgtccaggttaagataatgcctatgactgtaacagatgaccccatatctcagaagctcaacacaacagaaattgagacctcatttctgctcacataaaggagtatctgtagcagcacggggaggagagctctgctccaggcagtcattcagggacmcaacggacctttaacaagatcatctcagacatcaacattcaaccagcagatgaggggaaagagagaagaaaggatctcaccagaggggtcaggcccagacacagaagtggtatattccattagcccactttccatgagccatgattcaggaatatgctggaatacctgcaaaggagctggcaaaggtatgggacctgtgctcagctatccaggcactttgcatggtaagtgcatctgttcatctgcctgggatacctctccttcactccagctttcagtctgctcaaaggtttgccatgggagaccctccctgctctgggctgagtcaggggctctctctgggcgcccacggcagatagtcagacacctccaccggaacacctgctctcccacattagaatagtgatgaggccgggcacagtgactcatgcctgtaatcccagcactttgggaggccgaggtgggcagatcatgaggtcaggagatcgagaccatcctggccaacatggtgaaaccccatctactaaaatacaaaaaattagccaggtgtggtggcggacacct

SEQ ID NO: 706448 - DNA, 819 bp, Homo sapiens
tgctgggaccatctaaggtaagggtgtccaatcttttggcttcctggggccatattggaagaagaagaattgtctggggccacacatgaaacacaatgatagctgatgagctagaaaaaaaatcacaaaaattcttatgttttaagaacatttatgaattttgttggcccatgggctgtgggttggacaagcttgatctaagggttatttcttttgttgaatcctgtggggactacggacattagattcacacttttatcgccagatccaagcactgattagttatcaagtcaggagttaacaaatatttgtggaaggaaagggtgaggacggaaaggaaaaattgagggagaaagagaaagggaaaaagattagagcctacctccaataggtgactataaatattttgttgttgtttttagttttcattctgcattgtcactttgggtaaggatagagtgtttttgtgctgttgaagaaatagcattaacagatgagttttcaggtgtcttaaaactgaactctgcctataagatggacacagttgtccaaactactttaaaaaacaatagattcagttttataytcattcacttaaagggtagggtagatacttgtcaaatgtggttttgagggtttacactggaaagaaaaatctcatcaaaaatatgaagcaaggcctcccttctcttttcattctcatttggaagaaaggggagaacatcttattttagtcttttttaaagagcataacttattcaaaggctttgttacactctgcaggacactacccgtatttaagttaaaaaaaaggattca

SEQ ID NO: 706449 - DNA, 819 bp, Homo sapiens
tgctgggaccatctaaggtaagggtgtccaatcttttggcttcctggggccatattggaagaagaagaattgtctggggccacacatgaaacacaatgatagctgatgagctagaaaaaaaatcacaaaaattcttatgttttaagaacatttatgaattttgttggcccatgggctgtgggttggacaagcttgatctaagggttatttcttttgttgaatcctgtggggactacggacattagattcacacttttatcgccagatccaagcactgattagttatcaagtcaggagttaacaaatatttgtggaaggaaagggtgaggacggaaaggaaaaattgagggagaaagagaaagggaaaaagattagagcctacctccaataggtgactataaatattttgttgttgtttttagttttcattctgcattgtcactttgggtaaggatagagtgtttttgtgctgttgaagaaatagcattaacagatgagttttcaggtgtcttaaaactgaactctgcctataagatggacacagttgtccaaactactttaaaaaacaatagattcagttttatactcattcacttaaagggtagggtagatacttgtcaaatgtggttttgagggtttacaytggaaagaaaaatctcatcaaaaatatgaagcaaggcctcccttctcttttcattctcatttggaagaaaggggagaacatcttattttagtcttttttaaagagcataacttattcaaaggctttgttacactctgcaggacactacccgtatttaagttaaaaaaaaggattca

SEQ ID NO: 706450 - DNA, 819 bp, Homo sapiens
tgctgggaccatctaaggtaagggtgtccaatcttttggcttcctggggccatattggaagaagaagaattgtctggggccacacatgaaacacaatgatagctgatgagctagaaaaaaaatcacaaaaattcttatgttttaagaacatttatgaattttgttggcccatgggctgtgggttggacaagcttgatctaagggttatttcttttgttgaatcctgtggggactacggacattagattcacacttttatcgccagatccaagcactgattagttatcaagtcaggagttaacaaatatttgtggaaggaaagggtgaggacggaaaggaaaaattgagggagaaagagaaagggaaaaagattagagcctacctccaataggtgactataaatattttgttgttgtttttagttttcattctgcattgtcactttgggtaaggatagagtgtttttgtgctgttgaagaaatagcattaacagatgagttttcaggtgtcttaaaactgaactctgcctataagatggacacagttgtccaaactactttaaaaaacaatagattcagttttatactcattcacttaaagggtagggtagatacttgtcaaatgtggttttgagggtttacactggaaagaaaaatctcatcaaaaatatgaagcaaggcctcccttctcttttcattctcatttggaagaaaggggagaacatcttattttagtcttttttaaagagcataacttattcaaaggctttgttacactctgcaggacactacccrtatttaagttaaaaaaaaggattca

SEQ ID NO: 706451 - DNA, 839 bp, Homo sapiens
aatgtatttttccttgcagaattagaggtagaatctggcccttttccttctaagtgaaactgactagaaacagattcacaaggcataggtaaatcacaagacagctttaatattggtcctattttcccgagaccaaataagttgaagaaaataagaatggagagactcttatccaataaaagattattatttttcacagtataggcargtgtaaaacacagtctacagaaaaataagggtggtattattcgtccaatttaagggtccattcagaaaccgtatcaatctttatccttttcacaaagaaaagactgcacatcatcaggaaacttcaatagggtcaacaaacagcacaaaccataaagtggagagtattagttgtctaccaaaagatactctccttttattcctgcatgcaggaataaatggaatattccagcctccttttcatagtggacttcttttccccatggaatttaatgtgataggtgtcccttatggacctaagtcttaggaccgtgtgtatgcttccatgttatctttccccttatcaccagctggaatggcagctgaccctgtctctgccatgcagaagatgacagtcctagaggataatactgcaatcaatggaaagaaccttaattcctgaataacttcatggagcagaattgaaccattcaatttggattgttatgtaaaggacaaaaccagttctatcttctttaacttactgaatcattgttccctttgttacaccctaattcagactaatacttcctgttaactgaaactgtcaaagaaataccatcatcagtacttcctttcattatccttgatca

SEQ ID NO: 706452 - DNA, 607 bp, Homo sapiens
cagtttttgagaaaatatttttgacttaaaaatgatatacacagttcaatcacacgcatacagatacacacacatacacacayacatacacaccagaataaaagcatttggtaatatggtatgtatttaccacataccttttaaagaaaataaataaagaaattaaagaaaataaagaaaaataagaaacgaaacaagaaaaaaaagaagaaaataaagagaagaaagaagaggagagacaggaaaaaagtgtgggtcacacccaggaaagcaatgcaggatattcctgtatggcaggaaggattgatggtgtcaggaggaaggcatgtgagaaaagacctccccatttgagaatcactgggagaatgtgtgaaaaacgcaataaagacatgttacctctttaaaacaataatgtgctaatatagtgaagccaaaaaagacagagacagaaagaaagaaaagttgatggctaacctaaagaaaataaaggaagaaagttgtgtaaaaggctacgatacaaatggaaaaaaattaaatctctggcatggttttaagcaattgatagtgagaaaagagaatgtattctgtcatagcacaatgcatgact

SEQ ID NO: 706453 - DNA, 607 bp, Homo sapiens
cagtttttgagaaaatatttttgacttaaaaatgatatacacagttcaatcacacgcatacagatacacacacatacacacacacatacacaccagaataaaagcatttggtaatatggtatgtatttaccacmtaccttttaaagaaaataaataaagaaattaaagaaaataaagaaaaataagaaacgaaacaagaaaaaaaagaagaaaataaagagaagaaagaagaggagagacaggaaaaaagtgtgggtcacacccaggaaagcaatgcaggatattcctgtatggcaggaaggattgatggtgtcaggaggaaggcatgtgagaaaagacctccccatttgagaatcactgggagaatgtgtgaaaaacgcaataaagacatgttacctctttaaaacaataatgtgctaatatagtgaagccaaaaaagacagagacagaaagaaagaaaagttgatggctaacctaaagaaaataaaggaagaaagttgtgtaaaaggctacgatacaaatggaaaaaaattaaatctctggcatggttttaagcaattgatagtgagaaaagagaatgtattctgtcatagcacaatgcatgact

SEQ ID NO: 706454 - DNA, 2862 bp, Homo sapiens
ccaggtatggtgggctgcacctgtggtgccagctaatcaggaggctgaggtaggaggatcagttgagccatgaggtcgaggctgcagtgagctgtgatcgcaccactgcactccaagctggatgatagagtgagaccctgtctcaaaaaaaaaaaaaaaaaagaaagaaaattttaaaaaggtatttaaaagagttcacagccgggaatccaaacagctgttgaagagaaacagttctgttatttttatcgtaagctcttctaaattatttattattatgttttcatgtacaatatcgataaatttttaagataatttttgaagacagagatttaatgacatttcttccatgaaacaatctgaagacttaagtggytttcttctgtacttccatagaacccacccagtacatacctccagtgtggcactgattttatgctatacatatgactgtgtgttcatctcctccaccagactgtgagtcccattggagtaggaactaaattttattcaacactctgtcttcatcacctcgtgtagtatcttgtacagagtagataatgattaaatgtttagttaatgagtaaataatcaaccatattgcacagtctatattaaagttaatatttaaatccgttatgggaattaatagatattcatcagatacactactgaattccttctttacatcattgcatgttttaactttctaataacagtataatgggatagagataatgtaaagctacatgtttccaagccaccagcattttatcagacaccccaaacttgaaccattaatgtaatattcaaaattcttcacaactagattttgaacactattctgaagttggttacaagtccatctggttttaaatcaacttatcatgttcaaaaatgttaatatctctcactagctcacagcatgacactatcagctttaatttggtattatttcatagcaatgttgcaattaaaatttggtccacattgatcagtaaaagttaaagggctaaattaattaatggaaatagtaaaagggcaaaatattaatatgatgacacaacctaaatccttagagtgtagagaggcactgttattttgagattatccatgttgatttgcagaagaacagaaggagaaatctgtgaatagaactgaatttcaacacacaaaattgtatgtcaacatttttttaaataattactaaaaatgatgaccacaagtgagtctcattatagatgtgaaacttctgactaacagacctaacaatgactaaagacattacaaataagctgtgaagaaaatgtacagcagctgtattagaactatgccttccaggttggtgtgtggatttatctcaaaacctaataaaaaaccatgactcattttctgttaaagtgcataaaaagctttatacaccatatcatatcaagtagataattttttaactttaaaatatttttctgataaatgataaattttatttgaatacataagaaacaatataatattcaaataattcaacatatttgaataatatatggcaacttaagatcaatcaaagcagttggtgacagggaatattcttatctttggagggtttgcctgactttcagagttccaacataaacccaatccagaaataaaattagagagtcttacatttgctatttataaacctccattacttacagttcacttgctcttgagaataaatttcagggttacacgtagcaggtgttttgaactccattttagatagacagaacatgagagagggtagaataagaaaccaatgtcaaagttattaagtattagaatgaagtataggatttgggtcttttgaagttctatagtctttctactaactgctaacttccagctcttttcagctactaaaatacacatatcctatcaggtctcaattaggagttattttgtaaaatacttaaatgtgttatgagccatgattatagcctacctgcattataagcatcaaaagccccttttattgtcaaactgcagtccatcaaccattagtagttggtaaatagcttagtgagtctcaaccagtaaatttttaaatagaatataatagaatagaaactatcagagtgtatcacaagtaataagggtattttggaaaattttttgtttcagctgtgtatgtgtgtatgtagatacatgtatttgtggcctaggtcatgatgtgtgtttcttactgtgggttgagggaagagcatactgaaaactaccactctaagacagataacaagattaagaacttaggtcaagttggaattcgtttaccaaagtggttaatgggttactcaatagaactgagaacttcacaggaagttttcaatgaaggaagcctgggaaaagagaaaattacagtgcatggctgctgactaaaatcctgagaagaagattgcagtggggaatgtggaacaaccatagggcagcatgagttgctgaggactagaactaaggaagctgaaagcagtcacacagagaaacagtgatttgagttagcaataatttcacctctgtatattatagaactgtgtcagccgggcgcagtggctcacgcctgtaatcccagcactttgggaggctgaggtgggtggatcacagtacaagagatcaagaccatcctggccaacatggtgaaaccccatctctactaaaaatacaaaaattagctgggtgtggtggcatgcgcctgtagtcccagctactcaggaggctgaggcaggagaatcacttgaacccaggaggtggagattgcagtgagctgagatcatgccactgcactccagcctggcgacggagcaagactccatctcaaaaataaaa

SEQ ID NO: 706455 - DNA, 1341 bp, Homo sapiens
atacacacttaaaacaaagagaagattatgtatgtacaaaggggagctgggattcaagtcttgctttgtgtaattagagtccttgtttctttctttctctttctcttttttttttttttgagacagagttttgctcttgttgcccaggctggagtgcaatggtgtgatctcggctcactgcaacctccacctccactgcaacccccatctcccaggttcaagcgattctcatccctcaccccctcacccatgcgccaccacgcccagctaatttttgtatttttagtagagacagggtttcaccacgctggccaggatggtctcgaactcctgacctcaggtgatccgcccacctcagcctcccaaagtgctgggattacaggtgtgagtcaccaagcccagcctagagtgcttgtttctaagtactatactatattgccttttccaaatgaatgaatgcacaaacacagattggtggttctcagactggcctattctcttcttggcaatgttgggactctggttaaaacaatctgttgaccaggagatgcattcttaaagagcatttcagcctttttcattgaacttggaattgcaaggtacatactcttagccattgaagctacctgcatagtgcgaaaatgctgacagggaggcagattaactcatggtccccacaaaccatcacctccctcctcagaraacaagcctctaggctgtttcccacatccccttactgtatgtagctccaggagtgacaacttagtaggacctgtacttagttctttcttctccttaaccagcaggaatgaaagagacaactataaaagtccagctctggcccgactcccataaccctgctgagttgggaatacagctcctggaatatatatatatatatatatacacacacacacacatatatatatatacacacacacacatatatatatatatatacacacatatattttttttttttccagaaaaatccctctggggtatgagcactattttcagttctggttcaacttttcattgagattctatgtggataagaggatcttgtagtgaaaaaaagataaaaagcagtgttttcatctgagtgtgagaaaccatgtgtgcctagaggtgggagaactgagtgttcagaaggcagaaaaaatataactggaagaggggcaccagagaaggaagagaaaataaaaataaaagaaggaaagtaggtgactgtggtaagaaatgactgtgatctggcctggcttcaagttctattgggactaagaccgcccacctggggaaggagtgtgtctgtctattcagtcactggtccgtcaccac

SEQ ID NO: 706456 - DNA, 1341 bp, Homo sapiens
atacacacttaaaacaaagagaagattatgtatgtacaaaggggagctgggattcaagtcttgctttgtgtaattagagtccttgtttctttctttctctttctcttttttttttttttgagacagagttttgctcttgttgcccaggctggagtgcaatggtgtgatctcggctcactgcaacctccacctccactgcaacccccatctcccaggttcaagcgattctcatccctcaccccctcacccatgcgccaccacgcccagctaatttttgtatttttagtagagacagggtttcaccacgctggccaggatggtctcgaactcctgacctcaggtgatccgcccacctcagcctcccaaagtgctgggattacaggtgtgagtcaccaagcccagcctagagtgcttgtttctaagtactatactatattgccttttccaaatgaatgaatgcacaaacacagattggtggttctcagactggcctattctcttcttggcaatgttgggactctggttaaaacaatctgttgaccaggagatgcattcttaaagagcatttcagcctttttcattgaacttggaattgcaaggtacatactcttagccattgaagctacctgcatagtgcgaaaatgctgacagggaggcagattaactcatggtccccacaaaccatcacctccctcctcagaaaacaagcctctaggctgtttcccacatccccttactgtatgtagctccaggagtgacaacttagtaggacctgtacttagttctttcttctccttaaccagcaggaatgaaagagacaactataaaagtccagctctggcccgactcccataaccctgctgagttgggaatacagctcctggaatatatatatatatatatayacacacacacacacatatatatatatacacacacacacatatatatatatatatacacacatatattttttttttttccagaaaaatccctctggggtatgagcactattttcagttctggttcaacttttcattgagattctatgtggataagaggatcttgtagtgaaaaaaagataaaaagcagtgttttcatctgagtgtgagaaaccatgtgtgcctagaggtgggagaactgagtgttcagaaggcagaaaaaatataactggaagaggggcaccagagaaggaagagaaaataaaaataaaagaaggaaagtaggtgactgtggtaagaaatgactgtgatctggcctggcttcaagttctattgggactaagaccgcccacctggggaaggagtgtgtctgtctattcagtcactggtccgtcaccac

SEQ ID NO: 706457 - DNA, 1068 bp, Homo sapiens
tgacagtgattgtggggaggtcaccaattacatagaagagaaaagcagcactccattgccactagacaccactgactcgggcttagatgacaaggaagatattgaatgcttttttgaggcctgtgttgagggtgactctgatggagaggagccttgtttctctagtgctcctccaaatgaatctgcagttcccagcgaagctgcaatgccactacaagcaacagcatgttcttctgagttcagtgatagttctctttcagctgatgatgcagatacagtggctctttcaagtccttcctctcaggaaagagctgaggttggaaaggaagtgaatggtttgccccaaacttccagtggctgtgcagaaaacttagagtttactccttcaaagcttgacagtgaaaaggaaagttccggaaaaccaggtgaatctggaatgccagaagaacataatgctgcttcagccaaatctaaagttcaagacctctccttgaaggcaaatcagccaacagacaaggccgcattgcatcccagccccaaaactttaacctgtgaagaaaatcttctaaaccttcatgaaaaacgacatagaaatatgcataggtagaatgtaccccctccccaagcatgaaaatcatctcactgaaaggtacgtatagtcctcatgccrtatatgtatttaaaatattgagttcaggtcagcaaaaccatggcaggagaaaaggctagtcagaatgaccagttacggcagacagttatctgaataagacatttaggtagaagaaatgctctcaacaatgaaagtaactgtgaagcaaaagaaaaaaaaaacagggaaaattgacattcttagtgacattatctttattacataattctggcaagaatacaaaatttgaggaagtagttgaacaatttaaggcctcaaattcttccattgagggagaataaaaagcttatccaaatcgcaattatactccatgatcaaaatgcatgcatagtaacaatgctctccacttcagtttcctgcacagagagctgtccgttctcttcagtgcctgcagatga

SEQ ID NO: 706458 - DNA, 1377 bp, Homo sapiens
ttaagtagttgtgctgagtgcagtggcatgcacctgtagtcccagctacgtaggaggcttgaggcaagtggattacttgagcccaggaactcaaggctatagtgtgtgttcatcatgcctgtgaatagccaactgcrctccagcctgggcaacacagcaagaacctgtctcaaaaaaaactttaaaaaattatgtagtagtgccaaattcaacagaaatagctgtgtttagaggtgtttgtttaggttgggaaatggaaaacaaaataaatgaaacttttacattggaaaccttttttaaaggagaaaactgagtttcattacattaattgctgcgcctcaagtcttttttccttcctacattgcatactctgacagatattacataattgcataactatttttactatgtgcagacatgacattacaacagccctgatatggtgcatcataatgaaaccataattagagtagtcatgatgtattatggcaatgatccacatcgtcactaaagtgcattggaatgcacagaaaaccctttgagatgtgtagattttcaatgtaatatagcacaactctgaagtttcatagcatggaggagaaattgcaattatgcccatgctgctggtagcaaggattaaaatgcacatcttcgatatctaccgaagaaagtctgtattgatgaaggaaatttttgagggtgatatttatcttgaagtttatgtcttttaaaaaaatttacaggaaggacgttgttgaaatatgaacctaaccacataaattctatagtagaagtctcctgtatttatcagataaaaagacttgaaagtttcattctgtacctcaaattcaatgaaacgcctctctaaagtaggatggattgaagacagttttagaattttcagttaaccctgccctttcttttggttctctgtagcccatcttagcttagattatacagcttacattttatgtggttgtgtctttgctccattgttgttctctcaggtttttctgcatgagaatcttgtttctgaatcttgttctagcgagtgacagcttcttcttaacttggtgattttcagtcttggcatttcttttacctgggataatgtaattgttatggctgatcttatgaatgtggatccaaagaagctcaactttctaaaacagagaggaaatttaggctctatctcccaggccaatcctcattcaatgcttcatttgcccataatatatcccagccaggtagacttctcatctctgcctgaacacctctgatgaatgggaacccactatctctcatgctgtgttcctactcaagcttcagcatttgacccccagtctgacctctgaggtcagatggaacaaattaata

SEQ ID NO: 706459 - DNA, 1377 bp, Homo sapiens
ttaagtagttgtgctgagtgcagtggcatgcacctgtagtcccagctacgtaggaggcttgaggcaagtggattacttgagcccaggaactcaaggctatagtgtgtgttcatcatgcctgtgaatagccaactgcactccagcctgggcaacacagcaagaacctgtctcaaaaaaaactttaaaaaattatgtagtagtgccaaattcaacagaaatagctgtgtttagaggtgtttgtttaggttgggaaatggaaaacaaaataaatgaaacttttacattggaaaccttttttaaaggagaaaactgagtttcattacattaattgctgcgcctcaagtcttttttccttcctacattgcatactctgacagatattacataattgcataactatttttactatgtgcagacatgacattacaacagccctgatatggtgcatcataatgaaaccataattagagtagtcatgatgtattatggcaatgatccacatcgtcactaaagtgcattggaatgcacagaaaaccctttgagatgtgtagattttcaatgtaatatagcacaactctgaagtttcatagcatggaggagaaattgcaattatgcccatgctgctggtagcaaggattaaaatgcacatcttcgatatctaccgaagaaagtctgtattgatgaaggaaatttttgagggtgatatttatcttgaagtttatgtcttttaaaaaaatttacaggaaggacgttgttgaaatatgaacctaaccacataaattctatagtagaagtctcctgtatttatcagataaaaagacttgaaagtttcattctgtacctcaaattcaatgaaacgcctctctaaagtaggatggattgaagacagttttagaattttcagttaaccctgccctttcttttggttctctgtagcccatcttagcttagattatacagcttacattttatgtggttgtgtctttgctccattgttgttctctcaggtttttctgcatgagaatcttgtttctgaatcttgttctagcgagtgacagcttcttcttaacttggtgattttcagtcttggcatttcttttacctgggataatgtaattgttatggctgatcttatgaatgtggatccaaagaagctcaactttctaaaacagagaggaaatttaggctctatctcccaggccaatcctcattcaatgcttcatttgcccataatatatcccagccaggtagacttctcatctctgcctgaacacctctgatgaatgggaacccactatctctcatgctgtgttcctactcaagcttcagcattygacccccagtctgacctctgaggtcagatggaacaaattaata

SEQ ID NO: 706460 - DNA, 1645 bp, Homo sapiens
gggctgttactgctttgtagactttcctctagatgtttttagtgaacatatggatacatttctgttagatttatgtctacaagtggaattggtgagtcagaggagtacatatgttcagttttagtagatattgccaagcaattttctaaaagtagttgtgccagttaatagaccaccatcagtgtatagaagtgccggttaaattcttggtattgaaccaagaattcaattcttggtattgaaccaagaattcaattcttggtattgaaccaagaattcaattcttggtattgaaccaagaattcaattcttggtgtataaaagtagttgtgccagttaatagaccaccatcagtgtataaaagtgctggttcaattcttggtattgcaacacttgataatgtacagttttcattgtaaccatcctaatggatatataccagaatcatagaataattttactttgtgcttctcaggcgattgatgaagctgagtatttgaatawcttcttttttaaaggttttattctcttttattatatttaaatgtattttcagctatttctgcatttaatttggcagagagaaaatgtctcttgacttcctcatctctcttgaatgtatctggagacaacaagtaaatcaaacagtatagaaatgaaaaacacaaccaaaggtgggaagcaaagaagatgatgggaaagggaagatgaaagtagaatgaattactcactcttgtagctgaggttaaagataaattttaaataataaaagtatcatgtgtaaacttttaaagaagacacatctcagatagggtcacaaagtaaaactcaattatatggtgtttgtaagaatggacaaaccagtgaattcaagaggaaagaaagcggtgcagaaacagcattgtgtgagctttaaaaaagagcactttatcacgacaaagggtgcaactaacaattaaaatcagacatgatatcaactttcgtaattgaaaaaaacaacaaaactgttcgaaatagcaggagacaaagccacacacatttgtcacagaaaattttaactcttctttctcattctgtgaaagctcacatagacaaaagtaagaacatagcatatttatataacataatgaaaatttgctctaaccaatacagaccagggaaaagattgctgatcatgcaacaaaagactaccttttatgttaggaaaggaggttcattgaaaacataagacaacatcataacacagcaggaaagggggcaaaggacgtgaacacaatccatagaaatagagtttcaaatgctttctgtacatgtgaaagtatattcaatgtcattgaaatacaataaatgcagattttaagaatagtgaaatgggtatacgtatacatgttcgtgggtacatcaagcagtggaccttagatttatgtatttggctgcatgtagatgatacctcaaagttctttaaaaacaggatgtccttttcacctgttgggcaaagaacaaaattgattatacagtatattgatgagggtgtgaggcaaggggtgcttgtataagttgttagtagaactgctattactacccttttgtaatagtgtttttgaggtagtgttacttttgatttaacaacgtatgaacttaatct

SEQ ID NO: 706461 - DNA, 1645 bp, Homo sapiens
gggctgttactgctttgtagactttcctctagatgtttttagtgaacatatggatacatttctgttagatttatgtctacaagtggaattggtgagtcagaggagtacatatgttcagttttagtagatattgccaagcaattttctaaaagtagttgtgccagttaatagaccaccatcagtgtatagaagtgccggttaaattcttggtattgaaccaagaattcaattcttggtattgaaccaagaattcaattcttggtattgaaccaagaattcaattcttggtattgaaccaagaattcaattcttggtgtataaaagtagttgtgccagttaatagaccaccatcagtgtataaaagtgctggttcaattcttggtattgcaacacttgataatgtacagttttcattgtaaccatcctaatggatatataccagaatcatagaataattttactttgtgcttctcaggcgattgatgaagctgagtatttgaatatcttcttttttaaaggttttattctcttttattatatttaaatgtattttcagctatttctgcatttaatttggcagagagaaaatgtctcttgacttcctcatctctcttgaatgtatctggagacaacaagtaaatcaaacagtatagaaatgaaaaacacaaccaaaggtgggaagcaaagaagatgatgggaaagggaagatgaaagtagaatgaattactcactcttgtagctgaggttaaagataaattttaaataataaaagtatcatgtgtaaacttttaaagaagacacatctcagatagggtcacaaagtaaaactcaattatatggtgtttgtaagaatggacaaaccagtgaattcaagaggaaagaaagcggtgcagaaacagcattgtgtgagctttaaaaaagagcactttatcacgacaaagggtgcaactaacaattaaaatcagacatgatatcaactttcgtaattgaaaaaaacaacaaaactgttcgaaatagcaggagacaaagccacacacatttgtcacagaaaattttaactcttctttctcattctgtgaaagctcacatagacaaaagtaagaacatagcatatttatataacataatgaaaatttgctctaaccaatacagaccagggaaaagattgctgatcatgcaacaaaagactaccttttatgttaggaaaggaggttcattgaaaacataagacaacatcataacacagcaggaaagggggcaaaggacgtgaacacaatccatagaaatagagtttcaaatgctttctgtacatgtgaaagtatattcaatgtcattgaaatacaataaatgcagattttaagaatagtgaaatgggtatacgtatacatgttygtgggtacatcaagcagtggaccttagatttatgtatttggctgcatgtagatgatacctcaaagttctttaaaaacaggatgtccttttcacctgttgggcaaagaacaaaattgattatacagtatattgatgagggtgtgaggcaaggggtgcttgtataagttgttagtagaactgctattactacccttttgtaatagtgtttttgaggtagtgttacttttgatttaacaacgtatgaacttaatct

SEQ ID NO: 706462 - DNA, 1645 bp, Homo sapiens
gggctgttactgctttgtagactttcctctagatgtttttagtgaacatatggatacatttctgttagatttatgtctacaagtggaattggtgagtcagaggagtacatatgttcagttttagtagatattgccaagcaattttctaaaagtagttgtgccagttaatagaccaccatcagtgtatagaagtgccggttaaattcttggtattgaaccaagaattcaattcttggtattgaaccaagaattcaattcttggtattgaaccaagaattcaattcttggtattgaaccaagaattcaattcttggtgtataaaagtagttgtgccagttaatagaccaccatcagtgtataaaagtgctggttcaattcttggtattgcaacacttgataatgtacagttttcattgtaaccatcctaatggatatataccagaatcatagaataattttactttgtgcttctcaggcgattgatgaagctgagtatttgaatatcttcttttttaaaggttttattctcttttattatatttaaatgtattttcagctatttctgcatttaatttggcagagagaaaatgtctcttgacttcctcatctctcttgaatgtatctggagacaacaagtaaatcaaacagtatagaaatgaaaaacacaaccaaaggtgggaagcaaagaagatgatgggaaagggaagatgaaagtagaatgaattactcactcttgtagctgaggttaaagataaattttaaataataaaagtatcatgtgtaaacttttaaagaagacacatctcagatagggtcacaaagtaaaactcaattatatggtgtttgtaagaatggacaaaccagtgaattcaagaggaaagaaagcggtgcagaaacagcattgtgtgagctttaaaaaagagcactttatcacgacaaagggtgcaactaacaattaaaatcagacatgatatcaactttcgtaattgaaaaaaacaacaaaactgttcgaaatagcaggagacaaagccacacacatttgtcacagaaaattttaactcttctttctcattctgtgaaagctcacatagacaaaagtaagaacatagcatatttatataacataatgaaaatttgctctaaccaatacagaccagggaaaagattgctgatcatgcaacaaaagactaccttttatgttaggaaaggaggttcattgaaaacataagacaacatcataacacagcaggaaagggggcaaaggacgtgaacacaatccatagaaatagagtttcaaatgctttctgtacatgtgaaagtatattcaatgtcattgaaatacaataaatgcagattttaagaatagtgaaatgggtatacgtatacatgttcgtgggtacatcaagcagtggaccttagatttatgtatttggctgcatgtagatgatacctcaaagttctttaaaaacaggatgtccttttcacctgttgggcaaagaacaaaattgattatacagtatattgatgagggtgtgaggcaaggggtgcttgtataagttgttagtagaactgctattactacccttttgtaatagtgtttttgaggtagtgttacttttgatttaacaacrtatgaacttaatct

SEQ ID NO: 706463 - DNA, 947 bp, Homo sapiens
tcaccaaactatccctacctctgtgttccaaacgagattctactttggcacagtgtttctttggagaatgaccctcttagcctttatcccaamagaaagataagaaaacctatattcattaagatgtaggcttcctatttcaatagagaaatgacaccggttggcagagctatttctggtggaacaccgaaagtggcacagggtctgaatgtttgtgtcccctcaaaatttatatgttgaaatctaaactcccaaggtgatgctattaggtggtagggcctctagaagatgatcaggtaataaggacagagcccacgtgagtggaactagtgcccttatataaaaagccagagagagctgccttgccctttccaccctgtgagggaactgcaggaaggcaccatctataaggaagcaggccctcaccagacactgaatttgccagaaccttgatgctgggcttctcagcctcctcaactgtgagaaataaatttctgttgtttattagacatgtggtttaaggtatttttgttaaagcaagccaggtagactaagagtcttgctaaccactcctctccctctttttacttcattccaacactaggctggacttccaggaagctaagcaagcaggaaacatgggcccagaagacagcttactgaagagggaccatggaaaagtttagcaatgctaccaacttagaattattgatcaataattttgttagacaagacgaaaccatagaaataggtaatattgtgttattttgttaatttttgctttttcctagcttctataatcatggaagaacttgagcatgattgtcttttcacataaaggggggaaaggggggtgtatgtcttgaatgatgtgtggttcacattgtggccgatccctacaccaagtgcccaggagtggagtcatataactcacaggcaaaatgcca

SEQ ID NO: 706464 - DNA, 947 bp, Homo sapiens
tcaccaaactatccctacctctgtgttccaaacgagattctactttggcacagtgtttctttggagaatgaccctcttagcctttatcccaacagaaagataagaaaacctatattcattaagatgtaggcttcctatttcaatagagaaatgacaccrgttggcagagctatttctggtggaacaccgaaagtggcacagggtctgaatgtttgtgtcccctcaaaatttatatgttgaaatctaaactcccaaggtgatgctattaggtggtagggcctctagaagatgatcaggtaataaggacagagcccacgtgagtggaactagtgcccttatataaaaagccagagagagctgccttgccctttccaccctgtgagggaactgcaggaaggcaccatctataaggaagcaggccctcaccagacactgaatttgccagaaccttgatgctgggcttctcagcctcctcaactgtgagaaataaatttctgttgtttattagacatgtggtttaaggtatttttgttaaagcaagccaggtagactaagagtcttgctaaccactcctctccctctttttacttcattccaacactaggctggacttccaggaagctaagcaagcaggaaacatgggcccagaagacagcttactgaagagggaccatggaaaagtttagcaatgctaccaacttagaattattgatcaataattttgttagacaagacgaaaccatagaaataggtaatattgtgttattttgttaatttttgctttttcctagcttctataatcatggaagaacttgagcatgattgtcttttcacataaaggggggaaaggggggtgtatgtcttgaatgatgtgtggttcacattgtggccgatccctacaccaagtgcccaggagtggagtcatataactcacaggcaaaatgcca

SEQ ID NO: 706465 - DNA, 947 bp, Homo sapiens
tcaccaaactatccctacctctgtgttccaaacgagattctactttggcacagtgtttctttggagaatgaccctcttagcctttatcccaacagaaagataagaaaacctatattcattaagatgtaggcttcctatttcaatagagaaatgacaccggttggcagagctatttctggtggaacaccgaaagtggcacagggtctgaatgtttgtgtcccctcaaaatttatatgttgaaatctaaactcccaaggtgatgctattaggtggtagggcctctagaagatgatcaggtaataaggacagagcccacgtgagtggaactagtgcccttatataaaaagccagagagagctgccttgccctttccaccctgtgagggaactgcaggaaggcaccatctataaggaagcaggccctcaccagacactgaatttgccagaaccttgatgctgggcttctcagcctcctcaactgtgagaaataaatttctgttgtttattagacatgtggtttaaggtatttttgttaaagcaagccaggtagactaagagtcttgctaaccactcctctccctctttttacttcattccaacactaggctggacttccaggaagctaagcaagcaggaaacatgggcccagaagacagcttactgaagagggaccatggaaaagtttagcaatgctaccaacttagaattattgatcaataattttgttagacaagacgaaaccatagaaataggtaatattgtgttattttgttaatttttgctttttcctagcttctataatcatggaagaacttgagcatgattgtcttttcacataaaggggggaaaggggggtgtatgtcttgaatgatgtgtgsttcacattgtggccgatccctacaccaagtgcccaggagtggagtcatataactcacaggcaaaatgcca

SEQ ID NO: 706466 - DNA, 402 bp, Homo sapiens
cccatctctactaaaaatacaaaaattggcygggcgtggtggcacacacctgtaatcctagctactcagaaggctggggcaggataattgcttgaacctgggaggcaggggctctagtgagccgaggtctgcactccagcctgggtaacagagtgagaccctatctcaaaaaaaataaaaaataaaaaagatatctatctttaagttctagtcctcccccaaacggatacatcaaggttaatttttttttttaactaaaagaatctccaaacgagttctctattactttaaattagaagggaaacatgtacttaaataagtacaaacttatttaagtttgaactctatgacttcatcaaaaactaaataaaagctttatgtttaagttttatttaatgctgt

SEQ ID NO: 706467 - DNA, 659 bp, Homo sapiens
aataatttttttcggagctccgaaaatagtcaaaggtctatagtggtcaaatgaatgcctaatcaagaaaaagccacattcaaaacattaggaaatgtgatgtttttactcacttttgcctcacccatttcccaacgtggcataatgcagcagtgaaaaagcaacaacccagttcccaattccttccctcaaaatagagggagcagagcagacattttttcattgttctaacttgtctgggggtggcctgaaagactgattgcaggacacaaaatcaatgcgcaaaaatcagatctctttctgtacatcgataattgacattctacaaaggaaatcaagcaaacaatcccagttataagagcatcaaaaacataaaatgctttggagtaaacaacctaagaggtaagacttgtacactgaaaactataaaattctgctgaaggaaaaagaaaaataaatagagakatctctcatgtttatggattagaatacaatttctattgttatgatgtcaatactacccaaagtgatcaacagcttcagtacaattcctatcaaattcaaatttctgatgacattttttgcagaaatagaaaaatccatgctaaaattcatatggactctcaagggatgctgagtattcaagacaatcttgaaaa

SEQ ID NO: 706468 - DNA, 610 bp, Homo sapiens
ggatttagcagagaagatttaaagcagcagctattataactatgctcaaggatgtaaagcaaaatgttgtatatgtgaacaaataggaaatctcagcagagaattagaaactttaaaaaagaatgaaatgaaaattttacatctgaaaatacaatatctgaaacaatcttgaatagatttaacagatcagatatgacagataagtcatttaatttgaggatagattaatagaaattatctaatctgaagtagagaaataagttattgtatatgaaagttctctgtaaacttcagtgctctatgtaagtttcagagtttattactccaggttkctttcatatgtaaagggaagaggtatgtttgggtcttctgatctgcagcttccttaatgtcctgtcctgtcatgtctgtgtctaagctttataccctctggtttctttatttttatttttttatttttttttgagacagagtctcgctctgttgcccaggctggagtgcagtggatctcagctcactgcaacctctgcctcctgggttcaagtgattcttctgcctcaacctcccaagtagctgggattacaggcatgtgctaccacacctggctaat

SEQ ID NO: 706469 - DNA, 1163 bp, Homo sapiens
ccacatgcaaaagaataaaattgtactcctatctcacactatatagaaaattaactcaaaaagatcaaagacctaaatttgagagctaaaatgtaatagagtctaattccattttttgatgttcgactgcaaataacttttaagcctatccatgactcttcccttcttccacatgtctgggaaagctgataaagctcagatgctgtcacctttagtgtcatcaggggattgaaattgaaacacataagctcctgtttgtctgcaggaaccctcgccctggcccaatcccccacaatagaaatctctagccagtctcctttccttgcctttcaatccattttcagacaagcttgagaagccttccctgctttcatccaaaatcctcataataaaactttttcacactgttgaggtgtgtgtgtgtgtgtgtgtgtgtatgtgtgtgtgtgatcatcagtcttgacatctaaatcaaattttgagtggtaatctagcctgtacctatggagtagtcacaaaagttgatgctgtgagccagactgtatcaatgttgaccaccaccactagggatcttccttctcttgttcttgtcttaactgggtacaaaccactgcacctagcatgtaggatatttcctctgcttgctggcaagcttgcactttgagttttgctgtactgygcaacatgtgtcgagtcctacaaaacccctgttaaaaatttagctccaataggccaggtgcggtggctcacacctataatcccagcactttgggaggccgaggcaagtggatcacgaggtcagaagattgagaccatcctggctaatacagtgaaaccctgtctctactaaaaacacaaaaaaattagccgggtgtggcggtgggcacctgtagtcccagctacttgggaggctgaggcaggagaatggtgtgaacccaaggggcggagcttgcagtgagccaagatcgcaccactgcactccagcctgggcaacccagcaagactccgtctcaaaaaaaaaaaaaaaatagctgaaataggtcagaagtttttatatttgcatttggggataaaagtacagtattggggccctccataaagtggtcttggctcatgtgtctcaggctggacctatctgtgtatcttagaatccagctgtacca

SEQ ID NO: 706470 - DNA, 1163 bp, Homo sapiens
ccacatgcaaaagaataaaattgtactcctatctcacactatatagaaaattaactcaaaaagatcaaagacctaaatttgagagctaaaatgtaatagagtctaattccattttttgatgttcgactgcaaataacttttaagcctatccatgactcttcccttcttccacatgtctgggaaagctgataaagctcagatgctgtcacctttagtgtcatcaggggattgaaattgaaacacataagctcctgtttgtctgcaggaaccctcgccctggcccaatcccccacaatagaaatctctagccagtctcctttccttgcctttcaatccattttcagacaagcttgagaagccttccctgctttcatccaaaatcctcataataaaactttttcacactgttgaggtgtgtgtgtgtgtgtgtgtgtgtatgtgtgtgtgtgatcatcagtcttgacatctaaatcaaattttgagtggtaatctagcctgtacctatggagtagtcacaaaagttgatgctgtgagccagactgtatcaatgttgaccaccaccactagggatcttccttctcttgttcttgtcttaactgggtacaaaccactgcacctagcatgtaggatatttcctctgcttgctggcaagcttgcactttgagttttgctgtactgcgcaacatgtgtcgagtcctacaaaacccctgttaaaaatttagctccaataggccaggtgcggtggctcacacctataatcccagcactttgggaggccgaggcaagtggatcacgaggtcagaagattgagaccatcctggctaatacagtgaaacsctgtctctactaaaaacacaaaaaaattagccgggtgtggcggtgggcacctgtagtcccagctacttgggaggctgaggcaggagaatggtgtgaacccaaggggcggagcttgcagtgagccaagatcgcaccactgcactccagcctgggcaacccagcaagactccgtctcaaaaaaaaaaaaaaaatagctgaaataggtcagaagtttttatatttgcatttggggataaaagtacagtattggggccctccataaagtggtcttggctcatgtgtctcaggctggacctatctgtgtatcttagaatccagctgtacca

SEQ ID NO: 706471 - DNA, 1067 bp, Homo sapiens
ggtgtctttatctttcaggtgagatcagaatggtttacaagcatttttggctgcaggtactgtgtgtttccttgtatgtgaagccaccatgagaatgtaccacatggttcccatttatatttgagttgcattttttaaatgctttgttttgttttgagatggagtctcactctgttgcccaggctggagtgcggtggcatgatcttggctcgcagcaacctccgcctcccaggttcaagcaattctcttgcctcagcctcctaaatggctggaattacaggtgcgtgccaccacgcctggctaatttttgtatttctagtagagataggattttgccatgttggccaggctggtctcaaactcctgacctcatgatccaccctcctcagccttaaatgcttttaaatgcacagaaattctagtgaattaattgtaccttacctaaaactgggcagaaacacatcagcaaagccaagaataaaaattcaaatcctcagattgctaatccagtgaacctactgaccccaggagccaaatatgcacaaggcatctttctatctttcagtgacaacgcataacataggttctgaaaggagtcaacattaagtgcatcctttcaccagctttgaaactctccttaagaggagtagctagccatgcactttatgttgctgataagcatcccaaaaattatatttttatttgtaggtgctttgaaggaaaacaattaggaaaaatatgtgaacaaggacagagaagtggtagacttcttaccttatacaaattctgagaacatacttaataataaaggtaacagtgaaagatggtcttgcatatacttattgcagaaaggatccaaccrctgttttatcgcaaattatcatatatacaatcctccccaatcataattaaccatcaaatgtgaatcagcagacatgaatatttcttgacatatattaagaaataaaaaataaggttacgttatttttatttgaaaagaacctatgtttcgttacctaaaaagaacccatattctggctggcgatattagaaaaagataaatgaaa

SEQ ID NO: 706472 - DNA, 1067 bp, Homo sapiens
ggtgtctttatctttcaggtgagatcagaatggtttacaagcatttttggctgcaggtactgtgtgtttccttgtatgtgaagccaccatgagaatgtaccacatggttcccatttatatttgagttgcattttttaaatgctttgttttgttttgagatggagtctcactctgttgcccaggctggagtgcggtggcatgatcttggctcgcagcaacctccgcctcccaggttcaagcaattctcttgcctcagcctcctaaatggctggaattacaggtgcgtgccaccacgcctggctaatttttgtatttctagtagagataggattttgccatgttggccaggctggtctcaaactcctgacctcatgatccaccctcctcagccttaaatgcttttaaatgcacagaaattctagtgaattaattgtaccttacctaaaactgggcagaaacacatcagcaaagccaagaataaaaattcaaatcctcagattgctaatccagtgaacctactgaccccaggagccaaatatgcacaaggcatctttctatctttcagtgacaacgcataacataggttctgaaaggagtcaacattaagtgcatcctttcaccagctttgaaactctccttaagaggagtagctagccatgcactttatgttgctgataagcatcccaaaaattatatttttatttgtaggtgctttgaaggaaaacaattaggaaaaatatgtgaacaaggacagagaagtggtagacttcttaccttatacaaattctgagaacatacttaataataaaggtaacagtgaaagatggtcttgcatatacttattgcagaaaggatccaaccgctgttttatcgcaaattatcatatatayaatcctccccaatcataattaaccatcaaatgtgaatcagcagacatgaatatttcttgacatatattaagaaataaaaaataaggttacgttatttttatttgaaaagaacctatgtttcgttacctaaaaagaacccatattctggctggcgatattagaaaaagataaatgaaa

SEQ ID NO: 706473 - DNA, 649 bp, Homo sapiens
ttttaccctcacaatgaccttactcatatactcactcactatgtaaaaaagtagggccgggcacagagtctggccacctgctcttgcagctcatctgtgccccgtcgctcattcgtgtccaatcccatatgcactacttccagtttacaatggattccttatgrgcccaccaaatcttatgacttggcggttctgacaaaatccagcctgaccaaaaggtcattatatattccagcattaccagggcacagtagcttcagggagctgtatttgtgattggcgtgtaattctctactgcaaagggcatgactttgtgccagaccctgggcatctatatgtgatttttctactggagtttgtgatacacacctttacccactgtagatacttccagtatcacagtctgcaggtcacaggacccaagtggcagggctgctttcgccacagcctgcacctgcaacagacccctttccttctctgggcccctatcaaatctggaaatattccatggttgttagcaaatgattaaagcagtattcctaagtctagaatatactgtccccaagaacccaaagctacctaccaagtgttttgcttccttcttagtagcaggaggtggaagatattataatttgtcgtttactttgga

SEQ ID NO: 706474 - DNA, 649 bp, Homo sapiens
ttttaccctcacaatgaccttactcatatactcactcactatgtaaaaaagtagggccgggcacagagtctggccacctgctcttgcagctcatctgtgccccgtcgctcattcgtgtccaatcccatatgcactacttccagtttacaatggattccttatgggcccaccaaatcttatgacttggcggttctgacaaaatccagcctgaccaaaaggtcattatatattccagcattaccagggcacagtagcttcagggagctgtatttgtgattggcgtgtaattctctactgcaaagggcatgactttgtgccagaccctgggcatctatatgtgatttttctactggagtttgtgatacacacctttacccactgtagatacttccagtatcacagtctgcaggtcacaggacccaagtggcagggctgctttcgccacagcctgcacctgcaacagacccctttccttctctgggcccctatcaaatctggaaatattccatggttgttagcaaatgattaaagcagtattcctaagtctagaatatactgtccccaagaacccaaagctacctaccaagtgttttgcttccttcttagtagcaggaggtggaagataytataatttgtcgtttactttgga

SEQ ID NO: 706475 - DNA, 1140 bp, Homo sapiens
ttccctaagtcaatcatgttgagcatccatgttggcttctgtgttagaaaatccaaatgcttttgaaatctccccattcatttcaattctaacttaatcctaacagttttttttaaaaaaattacttcttgccttagttgaactaagaaagttcagcatactggcgttgtttttgtagatactgtttaatggctacttattaaatattacaatacaaatttcaaagtgtatctttattttgtttagttctacttttcccttttttacatctctttcccttccctagaaaatagaaagaaagaaagaaaaagaggaaattcatctggacttgcttctaagatatattgatactggaaaagttaggcaagatggcttgggaatcttcaaccagactgattttttttttttttttaagtagaaatatggtaaggggccagtattgtcattctgcctttcagttcttccataaaagttttgtgtgcatgtgtgtgtgtgtgwgtgagagagagagagagagagacagacagacagacagagagaggaatcaggagatatactgtatgtaaaataatcctcctggtcctcttcatgaagattttgtctgtttatttttaaaatagccattggttccagattcccagagctgattttcttagattagctatttgtactcagaggtagagccctgagcaatattattcttcaattaaaatcaagaacttgactttaggaggaagcatgttatgtttatataacatctgcaatgcatagaaaatattcaccacacatatctgaagacaaagcttcaattgtttaaatgttcttttcacttcatagatactaaggcatgttgatcttctatcgagcttaattttttaaaaagcttgttacctactttcatctccaaggcattttaaataaatacagagctaatgctgtcttccttgtaactacctccttgatttaaaggtaaaattaccttttgtaaagtattgcaggctgccatctcaccctcatacatgtgcattttctctacaagcactccaccaagtccccaccactaccagtccccaccactatcacaggcaaaagtgctgcaaaagttaagaggaatatgactgcatacagagtttaatataa

SEQ ID NO: 706476 - DNA, 1140 bp, Homo sapiens
ttccctaagtcaatcatgttgagcatccatgttggcttctgtgttagaaaatccaaatgcttttgaaatctccccattcatttcaattctaacttaatcctaacagttttttttaaaaaaattacttcttgccttagttgaactaagaaagttcagcatactggcgttgtttttgtagatactgtttaatggctacttattaaatattacaatacaaatttcaaagtgtatctttattttgtttagttctacttttcccttttttacatctctttcccttccctagaaaatagaaagaaagaaagaaaaagaggaaattcatctggacttgcttctaagatatattgatactggaaaagttaggcaagatggcttgggaatcttcaaccagactgattttttttttttttttaagtagaaatatggtaaggggccagtattgtcattctgcctttcagttcttccataaaagttttgtgtgcatgtgtgtgtgtgtgtgwgagagagagagagagagagacagacagacagacagagagaggaatcaggagatatactgtatgtaaaataatcctcctggtcctcttcatgaagattttgtctgtttatttttaaaatagccattggttccagattcccagagctgattttcttagattagctatttgtactcagaggtagagccctgagcaatattattcttcaattaaaatcaagaacttgactttaggaggaagcatgttatgtttatataacatctgcaatgcatagaaaatattcaccacacatatctgaagacaaagcttcaattgtttaaatgttcttttcacttcatagatactaaggcatgttgatcttctatcgagcttaattttttaaaaagcttgttacctactttcatctccaaggcattttaaataaatacagagctaatgctgtcttccttgtaactacctccttgatttaaaggtaaaattaccttttgtaaagtattgcaggctgccatctcaccctcatacatgtgcattttctctacaagcactccaccaagtccccaccactaccagtccccaccactatcacaggcaaaagtgctgcaaaagttaagaggaatatgactgcatacagagtttaatataa

SEQ ID NO: 706477 - DNA, 1257 bp, Homo sapiens
gctaagaacatggctattttttatgaaaaaaaaataatttagagggtagaaccaatagcccagagtggagagccaagagtcacagtgaatcattcttaaacagtacaactgagccctaatcaagtaccagtaccttttgcccagcttgatttcaagcttttartggaccaatgacttctgtgtctctcctttcctccttttttttgggagtgtctatagcagttatcctgtacttgctccaccattgtgcatttggtgtttgttaaggcagataatttttcttttttagtttatagctcttgagattacaaggaactgtacgtaaggggctgtatttgaggaactgtacccaagaagttcatccatacctggacctcaagcctcagcctgatgttgtaggtcttgagggagtgcatgagtgtattttgctgctgtggctagagggtggactgtggtattttgcattttccaaaactgacctcagcaatatttgtggtcccacatgctcttctaaactttgtcacttcccaacaagagttagagtttatttcccctccccctgaacctgggctgtactttgcactgttgaatagaatgtggtgggagtgaaactatgggacttccaaggtgaggtcataaaagatagtactgcttctgcctagctcactcaagaacccagcccccatagtgtgaggaggcctaggacagttacagaagccatgtgtaggtgttctggctccagcaaaagtcttatctgacaacatcaactacatgttagtgggtgagtattcgtatgattttagtccccagactttgagacaccctagctgatgctgaggggagcagagatgaagtatccccctgagacctgtccacatattgttgttttgggttactaagtattggagtaatttttaaatatagccatagtaactgaaataattaggttcatagtttttaggtttatttttatgttaacttttggtaataaaattatgttggctttgtgaaatgaattgggaaacatttcatctttttatttggtatgaaataatttaaataacactataaatacccattctttaaaagttaggtaaaactcagatttaaaggtttttttgggtataatgctattattactattgttatttaaaataatggttacctttccatttttttctttgctaattagtcattttgggtctgcttcttggttcaatttggattatttgtattctctaggaaattgtacatttt

SEQ ID NO: 706478 - DNA, 1257 bp, Homo sapiens
gctaagaacatggctattttttatgaaaaaaaaataatttagagggtagaaccaatagcccagagtggagagccaagagtcacagtgaatcattcttaaacagtacaactgagccctaatcaagtaccagtaccttttgcccagcttgatttcaagcttttaatggaccaatgacttctgtgtctctcctttcctccttttttttgggagtgtctatagcagttatcctgtacttgctccaccattgtgcatttggtgtttgttaaggcagataatttttcttttttagtttatagctcttgagattacaaggaactgtacgtaaggggctgtatttgaggaactgtacccaagaagttcatccatacctggacctcaagcctcagcctgatgttgtaggtcttgagggagtgcatgagtgtattttgctgctgtggctagagggtggactgtggtattttgcattttccaaaactgacctcagcaatakttgtggtcccacatgctcttctaaactttgtcacttcccaacaagagttagagtttatttcccctccccctgaacctgggctgtactttgcactgttgaatagaatgtggtgggagtgaaactatgggacttccaaggtgaggtcataaaagatagtactgcttctgcctagctcactcaagaacccagcccccatagtgtgaggaggcctaggacagttacagaagccatgtgtaggtgttctggctccagcaaaagtcttatctgacaacatcaactacatgttagtgggtgagtattcgtatgattttagtccccagactttgagacaccctagctgatgctgaggggagcagagatgaagtatccccctgagacctgtccacatattgttgttttgggttactaagtattggagtaatttttaaatatagccatagtaactgaaataattaggttcatagtttttaggtttatttttatgttaacttttggtaataaaattatgttggctttgtgaaatgaattgggaaacatttcatctttttatttggtatgaaataatttaaataacactataaatacccattctttaaaagttaggtaaaactcagatttaaaggtttttttgggtataatgctattattactattgttatttaaaataatggttacctttccatttttttctttgctaattagtcattttgggtctgcttcttggttcaatttggattatttgtattctctaggaaattgtacatttt

SEQ ID NO: 706479 - DNA, 631 bp, Homo sapiens
aaattttaattgaaaaaacccaacattgtataaattattaagttcttaagttcttaagcccttttatacttggtcctgtgatcctggggtggtgactctgtggaccccattttgactttataagctgctttctgttggggtataccagtagggggtttaaaagggagactggtaggccgggtgagaaaggasttgattctttccatgggcttgcagctttctttctgccttctgtctgttcctgtgagcatcagtcctgcaacacttcctcaccaggcaggtaaaattccctcctatatatatattttgagattgcgtctcctctgtagctcaagctggggtgcagtggtgtgatcttggctcactgcaacctctgcctccgcagaaaattcttgtgcctcagcctcctgagtagctgggattacaggcatggggcaccacacctggctaattttttgtagagacgggattttgccatgttggcaaggctagtcttaaactcctggcctcaagtggtccaccagtcttggcctcccaaagtgctgggattatagacatgagccactgtccctggtctcctcctatagtttatctaaagctagtatgcaaattttccaacacccgaagaaaa

SEQ ID NO: 706480 - DNA, 631 bp, Homo sapiens
aaattttaattgaaaaaacccaacattgtataaattattaagttcttaagttcttaagcccttttatacttggtcctgtgatcctggggtggtgactctgtggaccccattttgactttataagctgctttctgttggggtataccagtagggggtttaaaagggagactggtaggccgggtgagaaaggacttgattctttccatgggcttgcagctttctttctgccttctgtctgttcctgtgagcatcagtcctgcaacacttcctcaccaggcaggtaaaattccctcctatatatatattttgagattgmgtctcctctgtagctcaagctggggtgcagtggtgtgatcttggctcactgcaacctctgcctccgcagaaaattcttgtgcctcagcctcctgagtagctgggattacaggcatggggcaccacacctggctaattttttgtagagacgggattttgccatgttggcaaggctagtcttaaactcctggcctcaagtggtccaccagtcttggcctcccaaagtgctgggattatagacatgagccactgtccctggtctcctcctatagtttatctaaagctagtatgcaaattttccaacacccgaagaaaa

SEQ ID NO: 706481 - DNA, 1134 bp, Homo sapiens
ggccattctcaggggtatttcccccttcaggcacttctgatgctttctgtgggctgaagcagggacaagtcaccttcagggaatccaacatgaggggaagctagttgttcacccttttccagtgtagaaactgtgaatcagggggaatgtttctagtgtagaaaccatgaatcagggaaaattttccacatgcttggtgtcaggcagattggaggaaagggtgttgcagatattgaaacctgagtctcttagtgattgcttggattttttttttcatgtttctgtggtgttgggaactgactcatcctcatatttgagttctgggatattgctggtgaaaatcttggcgctctatatttgcttttggctttctctgtgtatgtgttatggggtgggtgtgggtgtggaatgaaaccagcttgcttctctgccaccattttggtattagaagtcattacatcttatttcttcaatctaactgtaattttgtacacattaatttacctctcttcatcccccttcaccccctaccctaaccactttcatatattctctatgtgaatatgactttttccagagtgactgtggacaaattctggcattcagaatcaagtgtacaaaatggtgagtaaggttggcaatggagtttcttagagcagccccacaatgtgctatgctttttttttctcactgtttatttcttagcttattgaccctatctatttgccttcaagttttgttctttgggccttttagggattctgtgggctagctaataaccttctacaaagccttttctgctaaaaatatctcagttcaatactattgtttgcaagtataagcctgactaatggagagtttcaggtggtaggtgttgcaccccgcccccccaccaaaaaaatgataaatacctcctctgctaaaatatacatgtagagattggragtgttggtcttcactcagtatttgtaaaaaaaatggattaacagacctagagaatgtgcacaaccgttggttgtgacagcaaaatattctactgtactagtcaacctgtgagtttcaagcctcaaatgctatatgacacattggatgcataattaagctgcagcattgcattaatatcaataactagca

SEQ ID NO: 706482 - DNA, 929 bp, Homo sapiens
ggaggggaatgcaatggtgacaaaagaacctaacaagcttgtttcagatatgtgatataacttcactaaagggatgggggaaaaggtgctgacctgaataatttttggaaaacagtgttttaactagaaactgtaagattaaagacaaaagtgtacataaatgctgcagytggtaaagttgtttctcacaggggtattggttagcaattctgaaactgctgtacgtgtatactggaaactgacaaataagtaaatgtattaccatacatttggtgattgatgggagccaagtttctcactattggagaagaaggttgcagaaaagcaagaggatagaatgaaccatgtggtactgaattagatttggagacaccaatatgaaattatatttagtttaatatagatactgctgggctttgtagcaggtggctagtttcatagtgtgcggtgttctcatttttccctcaccttcacccacccagaccacaacccaaacacaattgtctttatttttctgcctgtctttttgccagtagcgaaaatgttatttgttcatgcctgagataggttgttaacacaaaattctaatgaactagtccaaacgcttaacttttgtagctggaagaccttcaaacattttaaacaaagaaaaaaatcttgtttttttcttttccttttggatagcatagagaactttttattttttgtgaagtagaatgtgagtccttttgggtatattggaatttctctggggacaattttgaaagaaactactgtatacatcaaaagaacataaggatttctgttgtccaactgtcttcaaaattttacctaaagtgttccattaaaaaaggctactaagtagaactactaaaatgaataataaaaaatataaaaatgaataatgaaaaaatacaaaaaaaataaaa

SEQ ID NO: 706483 - DNA, 623 bp, Homo sapiens
aagataccaaagttaaagaaaataagatttcctgattaaaataagtacttgtcaaactaataataaatataattaatatatttaactaaatatttgaattttgtgagaaatgttaaytattttgctggcatttcatgggaatgttggttttacgaaatagagttgtgtttgaaattacaaaggagtatttatgtttgtgtgattgttaattttaggtgtcaactttcctggattaaggaatacctgaagagctaataaagcattatttttgggtgtgtcagtgagggtgtttccagaggagaatggcatgtgagttggtgaactgagtggggaagatacacccttagagtggtcaggcactatccaactgctgggagcacagataaaacaaaaaagcagaaaaaaagagaatttgttttttctctctgctggaaccaggacacccttcttcccctgcacttgaacatcagaacttcaggccctctggccttttcattccaagacttgcaccagcagccccctcgctcacaggccttcaatattggactgagatttacattacttgcttctttggttctgaggttttcaaatttggactgagccatgctaccagcttagctggg

SEQ ID NO: 706484 - DNA, 623 bp, Homo sapiens
aagataccaaagttaaagaaaataagatttcctgattaaaataagtacttgtcaaactaataataaatataattaatatatttaactaaatatttgaattttgtgagaaatgttaattattttgctggcatttcatgggaatgttggttttaygaaatagagttgtgtttgaaattacaaaggagtatttatgtttgtgtgattgttaattttaggtgtcaactttcctggattaaggaatacctgaagagctaataaagcattatttttgggtgtgtcagtgagggtgtttccagaggagaatggcatgtgagttggtgaactgagtggggaagatacacccttagagtggtcaggcactatccaactgctgggagcacagataaaacaaaaaagcagaaaaaaagagaatttgttttttctctctgctggaaccaggacacccttcttcccctgcacttgaacatcagaacttcaggccctctggccttttcattccaagacttgcaccagcagccccctcgctcacaggccttcaatattggactgagatttacattacttgcttctttggttctgaggttttcaaatttggactgagccatgctaccagcttagctggg

SEQ ID NO: 706485 - DNA, 663 bp, Homo sapiens
atttctctccttatattactttcctgcttcttctgccttatgattttctggttattgctctttatccttaaagtgggttttgttatggtttctggggcagctgctctagaagcttgtagtacatgtcatactaggagtcaacctcaccactttgcctgctcggagaatattctttgctatagtaaagagataagaaagagaagctgaaaagcatgstgaagagagtgatgcataaggagtcaggaagtctggattataccgtgcatatgctgggtaaacgttggtaagtccctagcctcatggaggtctcaggtttacctatttatacatagaaggtgctaaactagataacgtctaagaggtctgatgtgctggattctgaaaatgtcatcttaacttgcaacacagagaattattttttgtgtgtgggaatagaggatagtaggacttgagctagtgattgaccgactggaataaattagctctcttgtttcctagcacattgcatcatgtttctattcttagagtctctaatcaatgcctgaaaatacagattggagaccctgcttcccaaaataactttctactgtgtgagcatatagtgtctgcacactgaaaataattgactgtattgtgagctgaaaaactctgaataaacttttt

SEQ ID NO: 706486 - DNA, 622 bp, Homo sapiens
ttgcatttgctgaggagtatttaactttcaataatgtgatcagttttagaaaaagtgccatgtggtgatgagaaaaatatatattctgttatgtttgggtggagagtcctgtagatatctatcaggtccacttgatccagcgctgagttcaggtcctgaatgtctttgttagtttctgtctcgatggtccgtctaatattgacagtgcrgtgttaaagtctcccactattattatgtgtgagtctaagtctctttgaaggtctctaagaatttgctttatgaatctgtgtgcttctgtactgggtgcatagacatttaaaatggttaaatctttttgttgaattgaaccctttaccactatgtaatgttcttctttgtcttttttgatatttattggtttaaagtccgtttttcaggaactaggaatgcaaccctaagtaggaacctttaaaacctctggtcctattcagcttgccatattcatattccctatctggcaagaagtagattctcccaattttcaaattgttcatacataaaaagcttccccataaacagaagacatatgacacgtaattatttcccaacagcgatgatttaaatagagtaatcttgtatatta

SEQ ID NO: 706487 - DNA, 597 bp, Homo sapiens
taagttatactgtaagtctggaaaatgtgaatcactcttgggaaacagatgtggggcaatggcagtttcatattggcttttaaattgtactgaataggttgttacttattcctctgcactaattgtaaaatagactgatataatgaaccagtttgaatcactaaacttgagctttaacctgggattatggtgagtaggtcattctgcctacaaaaattaaaagaagggtacttttaaagtgtatgctatattgatatttctggattcaggtgtcattaattatttgaacatattttctagctctgtttagataatagtgtgtgaatgagatatgctcatgcccattactctaattttcccaattggttattaccaaggtagggtawcaattgagtttgcaggtttatcagtcacttgcagcactgtttatattatgttggcttccttaaaactcatgtcatggaaccaatttaattttctactcaagagcgctgtttaatttacattcagtgtgttctgttgtttgagatttaggctttttcagaacatagttttagcagaacacttcctgaggcaggtaataaattctaagttgca

SEQ ID NO: 706488 - DNA, 2318 bp, Homo sapiens
tgaaaggtgtgagagaaggagaggaggcgagaatggctctactgtatttatcctttacctgatacactagtgccaaatttatgaaataaacaaaatccagccctttttttccacacttagcatccacatccttgatgacctctattctcagttcttttgagggctttgctcttagctggctaagattattagctgcatggaagttactgcaatggttgggtattaataagctctagagtcagacaaatcttcctggggtttaatcttggattctcttctctatgacttaaggtaagtcagttaatatctctgcaccttagttgaatcaagaatakataaccatcatgagctgagtcctttgccttctcttgctgcatcttcacaacagatctgtgaagtgaggtttattgcactttatagattagcaaaccaatacacagaggcattaagtgattttcccaaggtcacacagcttgcaaatctcagaggcaaggattcaaaagtcggtttgaatccaaagcctatactcaaataaatcaaatatagcatttaaaatctggatgttgcttgccttttatagtgcttgctttttttgacagactcaactatcgtaaaagttaaactgattatgtatgaaagataatctgtgagttcatttctaagaaacagtaaaagtgattcttctcgctccatgcaggcaaatccttcttagaggatatatgcaaatgtagtacagaattagaaagccttacttatactctggggccagggaaatagctttcaggagtggatataaagaacgctatatattgaatggggaaggtagagacgatagcagaaaaggctcaggcataaagaataggagtggaaatccctatttaaaaggagaatatgaaaaaaataaatgtaactaaaaacaagtgtatgggaatatgcaacctcactactactgaaagtgatataattaaacaataaatgagactgcactttactaccagttaaataagaaaaacatttttaagaataatgcccaaaactggtgaatatgcattgaaatctggtcctgcatgcattactctgggcaatctaaagtgaaaagtaatttgaaatacatgagggactgtaagagtattcatattcttaaatcaagaattccccttctgagaattcattcccagataatcaatcaagatattagggaaaaaatgaagctgttctctgtagaattatttgaatgacagctctgaaaatgtagctgtccaacagttggggaatggttaaatcaattttaatacctttactttctagaattttgtacatatattgaaacttgtgacatatacatttttaaaaatgcagattgaaaattgaagtactgatacatgttacaacatggatgaactttgaaaccatgctaagtgaaaggtggtcggcacaaacaaccatatattgtatggttacatttatatgaaataattagaataggcaaatctatgaatacataaagtgatgaatgattgcctgggactaggtgtgtggggtggggtgcaggaatgaggagtgactgctagtgggtacatggtttctttttgaggcgataaaaatgttctaacttatattgggatggtgctcgcatgactctctgaatatactaaaaaccattgaactgtacactttcaatgggcagattatatctcaaaaaagtcacatctcaataacaaagctttttaaaaatacaagttgagtatatactgtaattaaaactaagctacataaatacatgagagacagactagaagtgaatataatgaaatgctaacaatggtttggttcagaaagtggatttgtgggtgaaaatttttgccttctcttactgtcccaaatgtttataatatgattagatttctttgattattaaaaaatagatacaattagcaaacaggagaatcctctcctttgcatttctctctcccctccaccaaaatccaatcttcttataactttccagaatcaagagtcagaattagcaccgtccagcagccctcaaaatcccttctagccatttcaggccattcgatacaattctctgaatggaaaagacaactatattaatagatttaatacctttcaagaatatacagatgaaaaattctggcatactgaatatacatgtgttctcatttttaggaagtgatagaagcaattgcggagtgtgcatttaagacttcaccttttccaattctcctttcgtttgagaaccatgtggattcgtaagtattcaacacattcaggaatgagtctttttcccgaatagggca

SEQ ID NO: 706489 - DNA, 590 bp, Homo sapiens
gccactgcattccagctctgacgacagagtaagattccttctcaaaaaaagaaaagaaaaaaaaaagaaaacccatataatgtgcccactccattggcttaataaaattagttttggcaaatattcctttatgcccctctttaagtcaagcccttctcccatccctcaacccaggaaaccactgatttactttctataaatttctttggcttttctagaattttatatgaatgggtcacacaatatttattattttgtgtctggcttctttcgcttagcataatatttgtgagactggcctatgttattgtgtgcaactatagytctgattgccgagaaatattccactgtatagacagaatacaaccaatttacccttttaccagttgataaacatttgggttgcttatagtttggggccattatgaataaggctactatgaatattcatatacaaatattttgcatggacatatgctttgtcctcaaccaaaaaggacagatttctctttggtgcttcctgccattccatggaaaacataaatattctctgttaatttgacttactacagaaactagtctttctcata

SEQ ID NO: 706490 - DNA, 955 bp, Homo sapiens
tatttgttcatgaatagattcttctgtgtagtgtatcacagtgagttctaacttgcaaagtcttaacactgctcactcgagttaagccagcagtagacttccctttaacttatttggcatggcttttcctcttgrgccatgatgatctcagctacattagtgtgcaacttgtacacagagaatgttaaggaaatgacctgaataaatctctttcaagtaaagggccagactcaggcttctggtatttgtgtctaaaaactgggatgaaccatatctggttccatcattgtatgatcctggtgacctcattagcccctctaaactttggtatttccttctatggagagagacatttaacttcccttcctacatcctcagggtttggaaatctcacaagtgccaccaaattatgagatagtataaccatatagcatacagttatcaaatataaatattaatactaagtatctgaaaacatgtacatttgtcttttgttttctgctgaatagtgcctgggactcacaaggtatgtctttacactagactaaaggaaaggtctttaattttatgaaaagttgcatgaaaatggaaaagtcacttacttcttttaagattcaaatttcctatgtaagaaataggtatgatgagaatatttacctccagaattttctcagaaactaaaagaaaagaataagtacttaaaaaaatcaagtcataaaaatgaaagttgctcctgaagttactgtaggtgatacgtcaatttattttcatgttacttaaatagtgtttgttacccctgactaatattagagtcaggatcccagtctataaaaatggaaggtttcagaatttcaacaaagaacatatgaaagtcatgacctgaataactttggtaaagtagaagcaaactctggatttgcaaagagaaagaacaccaaagaactaatggaaaaca

SEQ ID NO: 706491 - DNA, 955 bp, Homo sapiens
tatttgttcatgaatagattcttctgtgtagtgtatcacagtgagttctaacttgcaaagtcttaacactgctcactcgagttaagccagcagtagacttccctttaacttatttggcatggcttttcctcttgggccatgatgatctcagctacattagtgtgcaacttgtacacagagaatgttaaggaaatgacctgaataaatctctttcaagtaaagggccagactcaggcttctggtatttgtgtctaaaaactgggatgaaccatatctggttccatcattgtatgatcctggtgacctcattagcccctctaaactttggtatttccttctatggagagagacatttaacttcccttcctacatcctcagggtttggaaatctcacaagtgccaccaaattatgagatagtataaccatatagcatacagttatcaaatataaatattaatactaagtatctgaaaacatgtacatttgtcttttgttwtctgctgaatagtgcctgggactcacaaggtatgtctttacactagactaaaggaaaggtctttaattttatgaaaagttgcatgaaaatggaaaagtcacttacttcttttaagattcaaatttcctatgtaagaaataggtatgatgagaatatttacctccagaattttctcagaaactaaaagaaaagaataagtacttaaaaaaatcaagtcataaaaatgaaagttgctcctgaagttactgtaggtgatacgtcaatttattttcatgttacttaaatagtgtttgttacccctgactaatattagagtcaggatcccagtctataaaaatggaaggtttcagaatttcaacaaagaacatatgaaagtcatgacctgaataactttggtaaagtagaagcaaactctggatttgcaaagagaaagaacaccaaagaactaatggaaaaca

SEQ ID NO: 706492 - DNA, 990 bp, Homo sapiens
agaacactcccactgggcttacggtgttctccagactgacaaagaatcagccaagatgtttcgtggtttatcaccaaatgattgtcacatagtgtcttttccaatcaactggaacatatctcaagaaatgaacaggttatgagagaaagcaccaccctacagaggaataatataaaatactgcctcaaccctgccacacaactgacccagtctggggtgtctttaaccacagggaataatttgggttgattctttccatccgtagacagtatttcctacatgtatctttgtaacttcaaagttttgtagggttccagcaaattcatcctgtgacaataatctagtgtagattaatccacaggttaacccacaaatcctggattcagcagcctccggctccaccagctcagatgaccatgtagaggacaagccttccttcgtgcacacaggttagaagcaaggctgcaccctcatttgctggggactaaactggagagaagacagtgataggggtcttgaggacccccacatccatttctccatgggagaacacattcccatgccatggtatggcttcccagagctgtatgggtttgagggagtgggattctaacatagagaaatgaggttccagggaacccaactcatcataaaagacagaggggtgtttgtgatgctataaaaaccagtcaccataaaaaagaataagatcttgtcctttgcaggaacatggatggagctgggggccattatcctgagtaaagcaattcaggaacagaaaaccaaatacctcatgttctcacttgtaagtgggagctaartgatgacaactcatggacacaaaggggaaaaacagacactggggcctacttgagggcggagggtgggagaagggagacaatcaggaaaaataattattgggtactaggtttagtacatggatgacaatataatctgtacaacaaacctcttgtgacatgagtttaccta

SEQ ID NO: 706493 - DNA, 578 bp, Homo sapiens
ctggtcccaagattggcctcagacctcttatcccatcatcaccatctgttccttatgaccaaagtctctctcttccctggccagctacacaatcagatatatttcagcaacttccctctgccctcctttctctgaagtatagattcctgtaggagtttcccaaagatctttgtggctcatagtcatgaggaataaaaaacaaaaatgttttctcctccaatgtcctctttattcattttgtctctgtaaggaatggcaaggtcaaacagatataagaggtgaggctgtgtatgtgaaagaccccaagcaaaattcactaaatttcaaagaaaaattagatgatatgccagacgcggtggctcacacccgtaatcccagcactttaggaggctgagtagggcagatcacctgaggtcaggaattccagaccagcctgaccaacatggagaaaccctgtctctactaaaaacacaaaattagccgggcrggttggcacatgcctttaatcccagctactcaggaggctgaggcaggagaatcccttgaatagtgacatgggaatctcaacaaggaggacc

SEQ ID NO: 706494 - DNA, 578 bp, Homo sapiens
ctggtcccaagattggcctcagacctcttatcccatcatcaccatctgttccttatgaccaaagtctctctcttccctggccagctacacaatcagatatatttcagcaacttccctctgccctcctttctctgaagtatagattcctgtaggagtttcccaaagatctttgtggctcatagtcatgaggaataaaaaacaaaaatgttttctcctccaatgtcctctttattcattttgtctctgtaaggaatggcaaggtcaaacagatataagaggtgaggctgtgtatgtgaaagaccccaagcaaaattcactaaatttcaaagaaaaattagatgatatgccagacgcggtggctcacacccgtaatcccagcactttaggaggctgagtagggcagatcacctgaggtcaggaattccagaccagcctgaccaacatggagaaaccctgtctctactaaaaacacaaaattagccgggcgggktggcacatgcctttaatcccagctactcaggaggctgaggcaggagaatcccttgaatagtgacatgggaatctcaacaaggaggacc

SEQ ID NO: 706495 - DNA, 1477 bp, Homo sapiens
aacgtatgtaatttagacataatcagggaagacaggaaaaacagaactgaatcctttggaaagtcatcttcgagagatgttcctgctaacccttgcttatctttcattttattcccttaaaagagtaaactgctgaagacagaggaagaaaaatcctgccttgttattgaatggtatggattcacattcacatcaaggtttttttttttttttttttttttaatcgtggaggatttactcagggtaaagacagaaagccacactcctacgacagstcctgagctcccaggggaaggatagaagggaagctgtgtagctgtcttttctcactatgttccttcttctcccgcctagggtgattgggaggattaggggagataacacaagtaaaatgggggcgcagtgcctggcagaaagcactcagtgcatctgccatcttcaaggtcactctgccctctgggcccattcctccttcctccctctcctcacccccagccagcacattaaaggtcacaggtctggagaaagtccttctctgccactgtgcaacagggaaatgtttctcccagccaagtgcccctgtcatgtgggcccacccaactaatttcttctgagcccctatagaacttacagtgaagactgtggttagtcctggatgattatatcttctgctttagaagggagctttgaaaacagcctcacaattacagaaaaaaccaagccagtttttgtgtcaagaagacccaatttcgttttctcagccttgaaaaaaaatcaatttgaacttgctgctggctgagttatatgttcaagctcagaccgagctgtaattggaaaggagtctgtcttttgtaatccccaggccaaaaggggaaatgaaaatctttttcaaatggcagagtaaggcaggaaatgttctctttattgtactcccataaaaaaataaacctacccagtaattataccacacacacacaatagtccaggccctcacccaggaagccacaacctgagatgaaggagtcagtggttattttcaaaaagggaatttttccaagccctaccatattttctctcacaagttcctttgcatttacaagagacagattgcccaccctgcttttctgcctgactggtggaagtcagacaacctgcatactggtcccagttgttctgcaagatgaatgtgcccttgagcaagtcactgtctcgatctggcattctgcacccttacctatgaaatgaagggacaactagacaatgcctacatctgaattctctgattctctttatgctcacttgttcattgggcacaaaggagtcagaggtgatccctgcttatgaaaagctctaatgtaaattctccactttatgtctaggagaaaaaactgaaagtggccattataaaaatacaaaactgccccattggtggactccaaaataaatgaggtacagaaattgttctttttcctctact

SEQ ID NO: 706496 - DNA, 622 bp, Homo sapiens
cccacaacctggggcttgtgattggcatccaaagtagggtaagtcttgtgggactgagcccttaacctgtgggatctgacactatctccaggtagctggtgtcagaattgaattgaattagaggacatgcagctgaagtgtctgctagggaatctgcagaatgggatgcttggtgtgtagggagacaacccccacacacctggtcacagaaagtgttctgtattcagtgactgtgacagtattgagcatagccagagaaaaagttgcttttccccaccaccccctcaccggccctcagaccaccttacaaagaattgtacatatctcaacttatcagagacctacaacaacttgcaagggattcttagttcattctcagttttcagatgggcaatccaactcagaagtcaggtgatttgctcaaggtaaaaatgcaggtctcttgaaaccaaagtttgtgytttggttaagggcttgagctttggctgggcacagtggctcaagcctgtaatcccagcactttgggaagccgaggcgggcagatcacaaggtcaggagatcgagaccatcctggctaacatgttgaaaccccgtctctgctaaaaatacaaaaaattagcca

SEQ ID NO: 706497 - DNA, 622 bp, Homo sapiens
cccacaacctggggcttgtgattggcatccaaagtagggtaagtcttgtgggactgagcccttaacctgtgggatctgacactatctccaggtagctggtgtcagaattgaattgaattagaggacatgcagctgaagtgtctgctagggaatctgcagaatgggatgcttggtgtgtagggagacaacccccacacacctggtcacagaaagtgttctgtattcagtgactgtgacagtattgagcatagccagagaaaaagttgcttttccccaccaccccctcaccggccctcagaccaccttacaaagaattgtacatatctcaacttatcagagacctacaacaacttgcaagggattcttagttcattctcagttttcagatgggcaatccaactcagaagtcaggtgatttgctcaaggtaaaaatgcaggtctcttgaaaccaaagtttgtgttttggttaagggcttgagctttggctgggcacagtggctcaagcctgtaatcccagcactttgggaagccgaggcgggcagatcacraggtcaggagatcgagaccatcctggctaacatgttgaaaccccgtctctgctaaaaatacaaaaaattagcca

SEQ ID NO: 706498 - DNA, 1263 bp, Homo sapiens
tagcctctgagttcttcttgcctcctaagggtgctgggcacagtacaagccctcaacaaatacttgttgaataatcagtgagtctaatccagaggtttcaaactgttcttgaaactgctcrgtggacatacttcagaggtctctgcagagggagggagtgtgaagagactgagcagatggagctctgcccagcagcttgaccttcagtcagatgcagagaactgcaaagatgctgagatgacagcctgtggcttgtacttgatggaataggaagctgagctattggggtcagggtctaagatgccattgagtagcaatcttggtctcttccatgctcatcaacgtgaggcattctctctctttctctctttctttcttttttgagttggtgtcttgctctgtctcctaggcttgagtgcagtggcgggatctcggcttgaacctccacctcctcggttcaagggatcttcccatctcagcctcctgagtagctggaattataggcatgcaccaccatgaacatgagacattttctagaaatgcaatccagcatcagaaggccagttttctgctgatcttaacacaagttgcagttaaactttccaaccaggaagtggggcggaaagttagaatcacttcaaagagtccctccttgctaagttaaaattagttgtcaaacccatgccatcattgaccaccattgcagaagtttctgtcttttttattattttccttcacattaaacctgtttatctggccttgaaagtagatagcgctcagaactgctgtgatgatcacttctgctctcttaggggcatgcaggatacaagcattctgcctccattttcaaggtcagcccttcccagtttctccctgaaacggcttggattgcggcagtcagagagagaagatgccaaagttctgccaccctgtatctctctccagacaaaaagaatgaataggatgtgtaagatcggcagggtgagttggcaggcaagcaggagacccaggagagccaatggtgtagctctagtccaaaggccagcaggcttgagactcaagaagagccaatgtttttgttccagtccaaaaagaggaaaaagccaatgtcccagttggaaggcagtccagcgaaggaattctttcttccttggaaaagagtcaacttttttgttttattcaggctttcaactgataggatgaggcctacccacattaaagaaggcaattagctttactctgcccactgatttaaatgttttt

SEQ ID NO: 706499 - DNA, 1263 bp, Homo sapiens
tagcctctgagttcttcttgcctcctaagggtgctgggcacagtacaagccctcaacaaatacttgttgaataatcagtgagtctaatccagaggtttcaaactgttcttgaaactgctcggtggacatacttcagaggtctctgcagagggagggagtgtgaagagactgagcagatggagctctgcccagcagcttgaccttcagtcagatgcagagaactgcaaagatgctgagatgacagcctgtggcttgtacttgatggaataggaagctgagctattggggtcagggtctaagatgccattgagtagcaatcttggtctcttccatgctcatcaacgtgaggcattctctctctttctctctttctttcttttttgagttggtgtcttgctctgtctcctaggcttgagtgcagtggcgggatctcggcttgaacctccacctcctcggttcaagggatcttcccatctcagcctcctgagtagctggaattataggcatgcaccaccatgaacatgagacattttctagaaatgcaatccagcatcagaaggccagttttctgctgatcttaacacaagttgcagttaaactttccaaccaggaagtggggcggaaagttagaatcacttcaaagagtccctccttgctaagttaaaattagttgtcaaacccatgccatcattgaccaccattgcagaagtttctgtcttttttattattttccttcacattaaacctgtttatctggccttgaaagtagatagcgctcagaactgctgtgatgatcacttctgctctcttaggggcatgcaggatacaagcattctgcctccattttcaaggtcagcccttcccagtttctccctgaaacggcttggattgyggcagtcagagagagaagatgccaaagttctgccaccctgtatctctctccagacaaaaagaatgaataggatgtgtaagatcggcagggtgagttggcaggcaagcaggagacccaggagagccaatggtgtagctctagtccaaaggccagcaggcttgagactcaagaagagccaatgtttttgttccagtccaaaaagaggaaaaagccaatgtcccagttggaaggcagtccagcgaaggaattctttcttccttggaaaagagtcaacttttttgttttattcaggctttcaactgataggatgaggcctacccacattaaagaaggcaattagctttactctgcccactgatttaaatgttttt

SEQ ID NO: 706500 - DNA, 1263 bp, Homo sapiens
tagcctctgagttcttcttgcctcctaagggtgctgggcacagtacaagccctcaacaaatacttgttgaataatcagtgagtctaatccagaggtttcaaactgttcttgaaactgctcggtggacatacttcagaggtctctgcagagggagggagtgtgaagagactgagcagatggagctctgcccagcagcttgaccttcagtcagatgcagagaactgcaaagatgctgagatgacagcctgtggcttgtacttgatggaataggaagctgagctattggggtcagggtctaagatgccattgagtagcaatcttggtctcttccatgctcatcaacgtgaggcattctctctctttctctctttctttcttttttgagttggtgtcttgctctgtctcctaggcttgagtgcagtggcgggatctcggcttgaacctccacctcctcggttcaagggatcttcccatctcagcctcctgagtagctggaattataggcatgcaccaccatgaacatgagacattttctagaaatgcaatccagcatcagaaggccagttttctgctgatcttaacacaagttgcagttaaactttccaaccaggaagtggggcggaaagttagaatcacttcaaagagtccctccttgctaagttaaaattagttgtcaaacccatgccatcattgaccaccattgcagaagtttctgtcttttttattattttccttcacattaaacctgtttatctggccttgaaagtagatagcgctcagaactgctgtgatgatcacttctgctctcttaggggcatgcaggatacaagcattctgcctccattttcaaggtcagcccttcccagtttctccctgaaacggcttggattgcggcagtcagagagagaagatgccaaagttctgccaccctgtatctctctccagacaaaaagaatgaataggatgtgtaagatcggcagggtgagttggcaggcaagcaggagasccaggagagccaatggtgtagctctagtccaaaggccagcaggcttgagactcaagaagagccaatgtttttgttccagtccaaaaagaggaaaaagccaatgtcccagttggaaggcagtccagcgaaggaattctttcttccttggaaaagagtcaacttttttgttttattcaggctttcaactgataggatgaggcctacccacattaaagaaggcaattagctttactctgcccactgatttaaatgttttt

SEQ ID NO: 706501 - DNA, 1736 bp, Homo sapiens
catgattattcatagggtcattatccatagtagccaaaagttggaaaccatccaaatgtctatcagctgacgaatgggtacacaagatgtggtatacccatacaggggaaacttactcaactataaaaagggatgaagcactgatacatgctacaacatggatggaccttgaaacctaatgctaagtaaaagcaatcacaaaaggccacatattgcattactcattttttwatgaaatgtccagaataggcaaatctagagagacagaaagtagattagtggttgccagaggctgggggtagaggggaatgggaagcaactgctactaggaaaggagtttctttttggggtgatgaaagtattctggaattagataatggtgtcagttgcacaagctgtatatatactaaaagccacagtgaaatggtaaatttaaaatagtaaattttgtggcatgtgaatcatatctccgtttttcaaaaatgctcagaagcccatggaatgcatgacaggtgtgaaagtacatgatattctctgttcagataaagagaaatgaactgtgagcgtaccctgggacctcagcctgatggtactcacttgtgggcacaggcgtcttcagcagaaatgtggagcccacatgctggcctctctaggtagcacttggcttggcctctcaggaatcttcttctggctgctggtgaacttcatggtgctccctctcccaacagctccccaggcatggcagacgcattgcagaatcagatacacacagccctgcattagaaacataggagcttgctgtttgccagagcagagagagcctcaagctgccatcgctgtgagcttgctgacctcctagtgcattagctttttgcacaaagcactgacactgaccaccagggggttgtcaaaagatgtggccaggaagctgtcagcccattgcacctcttatacaagggagcgcttgttctgctaaggatttcagctaccttggcccttctttctcaccttcattctcactcagatgactgttgtcacctcattctaatgacttgtgtgccagaagcatcctatgcattttggagggcttttgcgttaaaaagggaacagcagctacagtatcttgcttttaaatagctcctcccagcctacaaaggcttgctctgttgttatcccaagtgattctcatcatagccttgtgagtgagacggacgttatgtccattctaccaagaagaaatctggttaaattactggattgagataaattgcgattataatccagatcagatgaggtcagatttcatgttctttctgctctatactgagactgcctctatgctgaaatctggatctcagaaaaatatgttgattactatacattttaggtttgatattaaggcttcttagacattttccaaatgaacgaatatatcttaaagcttaatttcagcaattttgtcaggttagaatttcaagtatatcttacatttcttaaaaaaaatttgaactggttatataattaggatagggcatgtccttttgaatagtgaatattcattttgctcagaaatagcagaaaatggcttatttaactaatgtgcacttagaggaacctcaatcaggagcagatagctacatcagttttgaaattgaaatgcttgaatttatttggatatcctggttacagagagttgttttggaaaatccaaatgcctgggccttattcctggacag

SEQ ID NO: 706502 - DNA, 1736 bp, Homo sapiens
catgattattcatagggtcattatccatagtagccaaaagttggaaaccatccaaatgtctatcagctgacgaatgggtacacaagatgtggtatacccatacaggggaaacttactcaactataaaaagggatgaagcactgatacatgctacaacatggatggaccttgaaacctaatgctaagtaaaagcaatcacaaaaggccacatattgcattactcattttttaatgaaatgtccagaataggcaaatctagagagacagaaagtagattagtggttgccagaggctgggggtagaggggaatgggaagcaactgctactaggaaaggagtttctttttggggtgatgaaagtattctggaattagataatggtgtcagttgcacaagctgtatatatactaaaagccacagtgaaatggtaaatttaaaatagtaaattttgtggcatgtgaatcatatctccgtttttcaaaaatgctcagaagcccatggaatgcatgacaggtgtgaaagtacatgatattctctgttcagataaagagaaatgaactgtgagcgtaccctgggacctcagcctgatggtactcacttgtgggcacaggcgtcttcagcagaaatgtggagcccacatgctggcctctctaggtagcacttggcttggcctctcaggaatcttcttctggctgctggtgaacttcatggtgctccctctcccaacagctccccaggcatggcagacgcattgcagaatcagatacacacagccctgcattagaaacataggagcttgctgtttgccagagcagagagagcctcaagctgccatcgctgtgagcttgctgacctcctagtgcattagctttttgcacaaagcactgacactgaccaccagggggttgtcaaaagatgtggccaggaagctgtcagcccattgcacctcttatacaagggagcgcttgttctgctaaggatttcagctaccttggcccttctttctcaccttcattctcactcagatgactgttgtcacctcattctaatgacttgtgtgccagaagcatcctatgcattttggagggcttttgcgttaaaaagggaacagcagctacagtatcttgcttttaaatagctcctcccagcctacaaaggcttgctctgttgttatcccaagtgattctcatcatagccttgtgagtgagacggacgttatgtccattctaccaagaagaaatctggttaaattactggattgagataaattgcgattataatccagatcagatgaggtcagatttcatgttctttctgctctatactgagactgcctctatgctgaaatctggatctcagaaaaatatgttgattactatacattttaggtttgatattaaggcttcttagacattttccaaatgaacgaatatatcttaaagcttaatttcagmaattttgtcaggttagaatttcaagtatatcttacatttcttaaaaaaaatttgaactggttatataattaggatagggcatgtccttttgaatagtgaatattcattttgctcagaaatagcagaaaatggcttatttaactaatgtgcacttagaggaacctcaatcaggagcagatagctacatcagttttgaaattgaaatgcttgaatttatttggatatcctggttacagagagttgttttggaaaatccaaatgcctgggccttattcctggacag

SEQ ID NO: 706503 - DNA, 1736 bp, Homo sapiens
catgattattcatagggtcattatccatagtagccaaaagttggaaaccatccaaatgtctatcagctgacgaatgggtacacaagatgtggtatacccatacaggggaaacttactcaactataaaaagggatgaagcactgatacatgctacaacatggatggaccttgaaacctaatgctaagtaaaagcaatcacaaaaggccacatattgcattactcattttttaatgaaatgtccagaataggcaaatctagagagacagaaagtagattagtggttgccagaggctgggggtagaggggaatgggaagcaactgctactaggaaaggagtttctttttggggtgatgaaagtattctggaattagataatggtgtcagttgcacaagctgtatatatactaaaagccacagtgaaatggtaaatttaaaatagtaaattttgtggcatgtgaatcatatctccgtttttcaaaaatgctcagaagcccatggaatgcatgacaggtgtgaaagtacatgatattctctgttcagataaagagaaatgaactgtgagcgtaccctgggacctcagcctgatggtactcacttgtgggcacaggcgtcttcagcagaaatgtggagcccacatgctggcctctctaggtagcacttggcttggcctctcaggaatcttcttctggctgctggtgaacttcatggtgctccctctcccaacagctccccaggcatggcagacgcattgcagaatcagatacacacagccctgcattagaaacataggagcttgctgtttgccagagcagagagagcctcaagctgccatcgctgtgagcttgctgacctcctagtgcattagctttttgcacaaagcactgacactgaccaccagggggttgtcaaaagatgtggccaggaagctgtcagcccattgcacctcttatacaagggagcgcttgttctgctaaggatttcagctaccttggcccttctttctcaccttcattctcactcagatgactgttgtcacctcattctaatgacttgtgtgccagaagcatcctatgcattttggagggcttttgcgttaaaaagggaacagcagctacagtatcttgcttttaaatagctcctcccagcctacaaaggcttgctctgttgttatcccaagtgattctcatcatagccttgtgagtgagacggacgttatgtccattctaccaagaagaaatctggttaaattactggattgagataaattgcgattataatccagatcagatgaggtcagatttcatgttctttctgctctatactgagactgcctctatgctgaaatctggatctcagaaaaatatgttgattactatacattttaggtttgatattaaggcttcttagacattttccaaatgaacgaatatatcttaaagcttaatttcagcaattttgtcaggttagaatttcaagtatatcttacatttcttaaaaaaaatttgaactggttatataattaggatagggcatgtccttttgaatagtgaatattcattttgctcagaaatagcagaaaatggcttatttaactaatgtgcacttagaggaacctcaatcaggagcagatagctacatcagttttgaaaytgaaatgcttgaatttatttggatatcctggttacagagagttgttttggaaaatccaaatgcctgggccttattcctggacag

SEQ ID NO: 706504 - DNA, 650 bp, Homo sapiens
tgatccactaactcattcattgattactttgttcatccttcctttgtcatatattaatgtagcacttaggatttttaagagagcttgaaagtaaaaggttaggtattaatctgttttctgttactacaacaaaatacctgagactgggtaatttataaacaacagaagtttattttctgatagttctggaggctgggaagtccaagatcaaggcatcagtattagggaacaaatgctgtgtcctcacatggtggaggagcaaaagagcaaaggggcctaagctggttgtctccagcccttttgtaaagcactaatccatgcatgaggtagagccctcatgacttaatgacttccccaaaggccccccttcttaatacccccacaatggggactaagcttcagcatgaattttggagacacattcaaaccatagcaggcattgacatataaaggtgmcttcaaattgtaaaacttcataaaaatgttatattggaagtacttttttgtttcattttgtccattcattcataaaatgtaaggtaattactgtgtgtggcccaagacctgtgctaagaactgtgtggatttaaataagaactagccgccattctctaggagctcacagttcagtggaaaagaaagagacacat

SEQ ID NO: 706505 - DNA, 1333 bp, Homo sapiens
gtggcactattcacaatagtaaagacttggaaccaacccaaatgcccatcagtgattgactagataaagaaaatgtggcacatatacaccatggaatactatgcagccataaaaaagatgagttcatttcctttgtagggacatggatgaagctggaaaccatcattcttagcaaactaacacaagaacagaaaaccaaacgctgcatgttctcactcataagtgggagctgaacaataagaacacatggacacagggaagggaacatcacacaccaggrcctgttgggggttggggggctaggggaggatagcattaggagaaataccaaatgtagatgacgggttgatgtgtgcagcaaaccaccatggcacgtgcatacctatgtagcaaacctacacattcggcacaagtaccccagaacttgaagtataataaaataaaaaattaaaaatctaaaaacaatttcttaatggtaaaagtgcctgagaaataaagatagaaaactattgctcaaaataaataaataaatgttttaaatcactgaattgtaaagaaaaaaatgatatttttcataccaagccctaaaatgtttaccactcattaacccatactaaaagattattaaaggatggactgtgcaaaaagaaacaaattcaaaaggcctgagttacaagaaacaaaattcatcataaaacaagtcttaattagctattgactatacaggttctcctaatttttgttaacaaaatgtaaaaattaaaatgagatgaaaataacaggagagttgctcaatgactagttacagcatgctaaggcctatgtcctatacggtaagattaaaatactgaaaaatcttaaacattcttagaaaaatatataggtaaatatttatattttaaaattaagagtagtatactaccccccactgctaaatttgactggctaaaaaaatacgggtaatttgtaatgcataaaatattggaggggaaaacttaaaaaaagaaaaataaagcagaaaatacaaaataagatgatagaaacaagacattattgtttgcagtagtataaatcagtaaacaatataacaattgccaaaaggagaatggataaatgtttgtacagttgttcgatagtaaacaataaagcaggtcatgtgaatgaacaagaggagcaggtgtcagtgggctacagtcgaaggaaaaagaaagtttcaaaatatacatatggtatggtaatatttatctaaatttctaaagtataaaaccacaggaaggaaaggggaactgagattggccaaacctaacaaatttgtccaaagttaatattttca

SEQ ID NO: 706506 - DNA, 638 bp, Homo sapiens
ttattctaagaatacatgattatgaaatattttcaagcctaacagaaataaagataacagtataattattcttgataaccccaaactgaagagaactcaaaggcccgcaaaattggaaaatgggttgtaaaagctgtgatatagtcaaataattgaaaactactcaaaaatactacaaaaaaagacaccaaaagtatgtattgtatgatcacwtccatataaagtttcagaatgggcaagatcaatctgtagtgatagaaacaagaataatggctggagggtgacgggaattgattgttaagtggcatgagaaatttctggggtaatgtcaatgttctatggcctgtgggtggctcaatcatgtatttttatcaaaagtcattgaataatgattaaaaattgtgcatttcatcttatctaaagtataccaaaattaaaaacaaggaaaaatactctcaaaaaatatggaaaagtaaactttcgcacattagtctcaaaaaccaatgatttctgatgttctttttacgctatcaatgtctttcattttgaatcatctaggtttttctgtattactgtgcttcacctcagagactgaatacttaacaaaatgcagaatatgaatttcagtgaagtaatgg

SEQ ID NO: 706507 - DNA, 628 bp, Homo sapiens
attttttaatacattacttttgatgttacactatcttaggatttaataacatttaagcatgtaagaataaagttacaggccttttgtgagttaatgattttatattagactaaagcaattctaaacatataaaaatataatatgtagcagggagaaaataagccttttcacaattactctatcaagagtaaatatgctattatgatgacatactatttttgaatgtacataataagattatgtatctctcagtttattaatgaaaatattctggtactcaataatactaagtgattcaaaaattttcccttgattttttaaaactgtcacaattttctgattagaaaaggacaaaaacagaatacctgatataagctttttgaaaacaatrcttctctttaaattttgcttttaagagaaaaaaataacattggtagaggagaaaattaaatattaagaaaggagtgtcagtagcaatgctgctgccaaatgcatttacacatcactaaactttcatgcaataagatgtttttgttttttctttttcaattcattagtgcaatgctgtggaaacaagctatcagtacaaacaagaaaaatatttttgttaaagtgattcagattctta

SEQ ID NO: 706508 - DNA, 2244 bp, Homo sapiens
tgaaggtcattttaaatctgtttgttggttcaaataatgcttaaaatcaatagtatttcctgcctatctccacacttgattcaatgggtaacgttgatgcattctacagcacatagaatctttactgctgaaagtcacctttatcaaaagaaatagcattaaggccttatttatttttgttttaaagctttactttgattgatttatagcttaccaatacctatttctgattgatgttttttgggtgtaaaatatactaatataattatggattataatctggtataaagaatgttttacagatcttagtgaatcctcaatgtatcttttttttaacaaagtcaagtagcttggggaaatagaaaatagtcatctattaaatgtcartcacaggtagatttttacacacacatacacatatactcaaattatgtataactgtttgtagggagccctgttttcaattattcttgctttctttcttcagctccaaaggcattttgatcctgcctctgtaaaacatgctatttatagcatctgtggtttaaatctctgatttgtccttgcccaccagtagcagcacggagagaattacaatggatattctaccttaatatattataccatattatttgtttaaatttcacatatgttttgtcttggatcaaaaggacaaatagatacggagtgacattttattattataattgtttctataaatttatactcaagactctttgtgtgtacgtatatagacatgcatacacacacatatataaatatatatattcatatatatgaattcaaatgtgtgtgtgtgtctgtgtatatatatgaattcaagaagtacagcgcaattttgttacctggctacattgcatagtagtaaaatctaggctttttggtgtgtatatattttagctttttggatataatcacagctacttctcgtctcaaaattctgaatgattttaacagttatattaatttgactttgacttatttttttaatcttactactttaataaaaaaagatcacctgattttataattatttgtttcaaagtgcaacattatatttttgtgtaataaaaacaaacatgagtgatcatgtctctcacaacaacctcaaactccaaggctcaagtcatcctcccatctcagcctcctgagtagctggggccacagacgcatgccatcacgaccaactaatttttgtgtattttgtagagacagggttttgccatgttgcccaggctggtctcaaactccttggctcaagcaatccactcacctcatcctcccaaagtgctaggattacaggtatgtcacttctgttattgatattagtcatccaaaaaagcagtcaataagtaaaccaataaaaaatatgttttgacataaaaccatttctaaaatatgtaattaggttcaatttctacatttactcatgaccatttatgaacaaaaaatttaagaggaagaatctctttttcatggcactaaaattccatggtgttgtgcggtacttaggtcccattataaaatctaagtttaagtgtgttcttcacacagcagactatggttagtatctggaaattaggttactatgcagttctgttaaagtgtataaggacttgcacatttgtacatgaatttgatgaaaacaaagtgtataattatgcataattaccactgactttttaaaaacaatataaatggttgataggtttcattaacagtttttattgaaattgcattatcagaagtcacaatattacgtctttgttcatgttccagctattatcaaagattcatgtcaaatgatagtaaattaatatgatgtaaaacaaattgaataaatgatactaacattaagcagaaatactaattaataaagcagtacatttatataagttccttataatgccttacatataaaataaattggggctttgcctctaacctaaattgttataagttaaatgttaattttgaaataattcattatatccttttatgtatcatattgataacaaacaaataagaaatatataaatgtcagtacaatttggaaaaaatacaaaatgttagacatttgctataaatataatggggtttttattttttttgtcaatttttttaaaattatactttaagttccgggatacatgtgcagaacatgtagaattgttccataggtatacatgtgccatggtggcttgctccgcccctcaacctgtc

SEQ ID NO: 706509 - DNA, 1229 bp, Homo sapiens
tgactgaagaaatcagggaaatttccagaaggtctgatgggagccatgtcttttggtgactaaaatggatatgtctcctgttattggataatgatgatgaattcctgattgaatatcctgtctgtactgaattctttctgtgccatttagaaaagctaaacttgtttcatttgcccaggtggtgtctattcctggtccctttgccaatctgtgtccatgggtgtttgtgcatcagtgcttgcagcttgatagagactgtcaaaatagcatctgaaaggctctttcaccagagggtgccagaaagttatgatgcttctgaactcttcctggtatgttaaacctgcttcaaagtggcaaaacttggtggacaatatagtgttgaattgcacataaaaagagagcaactgcaatacatcaccaaagtgctctggtacctacaggtatttgggatgcaattccttcccaaggagtgtggtctgagtagcttcatgtggggtcttccagtacaagaatattcaatctccactgccaaactagccaccctcagatctcaggatgaaaacctttcccatcatttctatgttagccatgaatgaggattgcagtgcctttgctggactattggaagttggctctcttcacttttcagggtctattccaaaaaccaagtcacacggtttatggcgtatggcaaatatacatgcagataggaataatctggggtcatgttgagttgagacagtatctaaaatatgccaagaattcaatgccagaaaatggaaactgaagaaattcatagttgagagtaggcaaagcagtaataggatagacagcagcatttgtcaaagcagaagaaatgtcaaatactaactgagaagttgctacgatcagtggccaagtgagtctagtttcttgatcatccataattttgtcatcaaagagaaatttatgcatgggtttccctttcatacaatatcctatttttcctatattactgggcataaagagggagaatttaaaagtttcgggcatttaagagaaaataatggtcctcttatcccattcttctagacatgcagatatcacagacaattcaaatgtcaaaaaatattaagaagacttatgttaggttgtycacttattatttttctcaacaagagcattaacaactctcatatgcttgtattatggttttaagtaaagaatattctgttgccaaaaaaatagaa

SEQ ID NO: 706510 - DNA, 1569 bp, Homo sapiens
ttttcttctttatactttaatgcagtgacttaatatcttgaggtaaatgctattagattatttttattttgtgtgataactatgctgactttgaaacaggatagctgtcatattccatctggcatactgttgctgttagaatctgttttgtctttatgtaacccaagattcaagggtcacacttttttcttttgtttgttgtcatttacccactttatcctctgagctaacatgctatagcacaaagtccttcctgcatttgtattaaacagtatggaaagttatttatttyatctctgattagcaaccgatttattttagtgccattctcattaggccagccttgggggttcactctccagcttctttagtgctctgtactttgctactgcaggaggtttatttgcattggggtgtctgaaaagctccttttacaatgaattgacttgtaactcctgaaaattagaaatttgaaataagcagcctatttcatactgtaccattaagttaatttttgcttactttcacatataacatttgaatttaatttctgctgtgtaggaaaaggtaaagcagattgattggaggaaggaatgaatacgcatagcttcttaggatcacatggcattctatagcctaagaacaccaatgggcttttctgtggtgcaagagccatattaagatttgataccagtttgaagatggtggcgtgagagtgtgaaaacttgcactgaatctcaaaatttgccctgaatcctttctatgtgatgtaatcaggatctttttagttgtcaacaattaagtaaggtcttgggaatgtacctgtagtgttttctgttgtcacagtgtaaaattggaataatgatcacggttgctgtcatggccaacatcatcatcatcatcatcatcatcatcatcatcatcatccacaccattcattgcagagcagcggtgtgagcattcctggatacttgttagaccaggtgttaaattacatgtcacttcttgatttggtgttggggaaaggacatagtatacataatttcatccaatgaactaaaatgaattgtgtacctttgcttgatattgtgtatcactttatactggagataaaaagatacaaaagtcataggccctgcctttatatttatagttaagaaagagaaacagatacaaatagataattctaataatatatgatatgcactttgggacacagatgaggggatttgggtcagcttggatattgaggccaaactaacttttgaagaggaagtaaggataaatagattaaaatggtaaaaagggtgatggcttaaagaaagcaagcaactatcaactactaaatagaaaaagggagaaattctgtggacagtgacatttaaaagtcctcagagaatagacggatcatgaactctaggcctgttttaaaaattaaatttacgaagctttattgtataagttggagggaaaactaaagatggtgagaacagttaggaaatgtttcattagtccaaacaggagatttagttctaaatggcagagagaataaagagtagagaaagaaat

SEQ ID NO: 706511 - DNA, 1569 bp, Homo sapiens
ttttcttctttatactttaatgcagtgacttaatatcttgaggtaaatgctattagattatttttattttgtgtgataactatgctgactttgaaacaggatagctgtcatattccatctggcatactgttgctgttagaatctgttttgtctttatgtaacccaagattcaagggtcacacttttttcttttgtttgttgtcatttacccactttatcctctgagctaacatgctatagcacaaagtccttcctgcatttgtattaaacagtatggaaagttatttatttcatctctgattagcaaccgatttattttagtgccattctcattaggccagccttgggggttcactctccagcttctttagtgctctgtactttgctactgcaggagrtttatttgcattggggtgtctgaaaagctccttttacaatgaattgacttgtaactcctgaaaattagaaatttgaaataagcagcctatttcatactgtaccattaagttaatttttgcttactttcacatataacatttgaatttaatttctgctgtgtaggaaaaggtaaagcagattgattggaggaaggaatgaatacgcatagcttcttaggatcacatggcattctatagcctaagaacaccaatgggcttttctgtggtgcaagagccatattaagatttgataccagtttgaagatggtggcgtgagagtgtgaaaacttgcactgaatctcaaaatttgccctgaatcctttctatgtgatgtaatcaggatctttttagttgtcaacaattaagtaaggtcttgggaatgtacctgtagtgttttctgttgtcacagtgtaaaattggaataatgatcacggttgctgtcatggccaacatcatcatcatcatcatcatcatcatcatcatcatcatccacaccattcattgcagagcagcggtgtgagcattcctggatacttgttagaccaggtgttaaattacatgtcacttcttgatttggtgttggggaaaggacatagtatacataatttcatccaatgaactaaaatgaattgtgtacctttgcttgatattgtgtatcactttatactggagataaaaagatacaaaagtcataggccctgcctttatatttatagttaagaaagagaaacagatacaaatagataattctaataatatatgatatgcactttgggacacagatgaggggatttgggtcagcttggatattgaggccaaactaacttttgaagaggaagtaaggataaatagattaaaatggtaaaaagggtgatggcttaaagaaagcaagcaactatcaactactaaatagaaaaagggagaaattctgtggacagtgacatttaaaagtcctcagagaatagacggatcatgaactctaggcctgttttaaaaattaaatttacgaagctttattgtataagttggagggaaaactaaagatggtgagaacagttaggaaatgtttcattagtccaaacaggagatttagttctaaatggcagagagaataaagagtagagaaagaaat

SEQ ID NO: 706512 - DNA, 1569 bp, Homo sapiens
ttttcttctttatactttaatgcagtgacttaatatcttgaggtaaatgctattagattatttttattttgtgtgataactatgctgactttgaaacaggatagctgtcatattccatctggcatactgttgctgttagaatctgttttgtctttatgtaacccaagattcaagggtcacacttttttcttttgtttgttgtcatttacccactttatcctctgagctaacatgctatagcacaaagtccttcctgcatttgtattaaacagtatggaaagttatttatttcatctctgattagcaaccgatttattttagtgccattctcattaggccagccttgggggttcactctccagcttctttagtgctctgtactttgctactgcaggaggtttatttgcattggggtgtctgaaaagctccttttacaatgaattgacttgtaactcctgaaaattagaaatttgaaataagcagcctatttcatactgtaccattaagttaatttttgcttactttcayatataacatttgaatttaatttctgctgtgtaggaaaaggtaaagcagattgattggaggaaggaatgaatacgcatagcttcttaggatcacatggcattctatagcctaagaacaccaatgggcttttctgtggtgcaagagccatattaagatttgataccagtttgaagatggtggcgtgagagtgtgaaaacttgcactgaatctcaaaatttgccctgaatcctttctatgtgatgtaatcaggatctttttagttgtcaacaattaagtaaggtcttgggaatgtacctgtagtgttttctgttgtcacagtgtaaaattggaataatgatcacggttgctgtcatggccaacatcatcatcatcatcatcatcatcatcatcatcatcatccacaccattcattgcagagcagcggtgtgagcattcctggatacttgttagaccaggtgttaaattacatgtcacttcttgatttggtgttggggaaaggacatagtatacataatttcatccaatgaactaaaatgaattgtgtacctttgcttgatattgtgtatcactttatactggagataaaaagatacaaaagtcataggccctgcctttatatttatagttaagaaagagaaacagatacaaatagataattctaataatatatgatatgcactttgggacacagatgaggggatttgggtcagcttggatattgaggccaaactaacttttgaagaggaagtaaggataaatagattaaaatggtaaaaagggtgatggcttaaagaaagcaagcaactatcaactactaaatagaaaaagggagaaattctgtggacagtgacatttaaaagtcctcagagaatagacggatcatgaactctaggcctgttttaaaaattaaatttacgaagctttattgtataagttggagggaaaactaaagatggtgagaacagttaggaaatgtttcattagtccaaacaggagatttagttctaaatggcagagagaataaagagtagagaaagaaat

SEQ ID NO: 706513 - DNA, 819 bp, Homo sapiens
tggagagatatggatttatttttttcttgttatccgtgatgtaactatttgcatagctctcattatcttgatctctctgcctctcgtgggcatatacatcaaaagaaacatttattgttaagctcataaatggtaggtcatgttccctagctgcctttcactccttcatagctggtagtacataatgacaaatctaattactacttttgctattgatggccatgtgtgctcctctgtagataggcatcatacaggcaggccccttaataactttgccacaggacagatgaacgtcaacaacttctcagtatgattaagtagaggcttttcttctgctcctttgtctttttttcactgcagcttagcaataaaaagaaaactggtagtgttgaaagacaatagtagccaaatccacaggagctgcttaaatgaaatatcaagcactacctcttcagtataagtggtttccacatagccatccattgtgaacccctagtaggctgaagcaaagtgtctaatgaattagtatgcttactcctacatctaaaatcagtcatatgaagaaggtcctgaaagcaaccacaatgaagcatgagcagatgttcacttttccattgtttgcatttgactaccatgtaagatttaaatcacatacattctacatgtatgaaggamaaaagagctatgtagtgacaatttatcaagatgaatctatttgtaaaaacttagtagatttaacatattgacagatactcaatttaaattctaaagtatgtaaattttgtcaaaattaagagtattatgattatattcatgata

SEQ ID NO: 706514 - DNA, 819 bp, Homo sapiens
tggagagatatggatttatttttttcttgttatccgtgatgtaactatttgcatagctctcattatcttgatctctctgcctctcgtgggcatatacatcaaaagaaacatttattgttaagctcataaatggtaggtcatgttccctagctgcctttcactccttcatagctggtagtacataatgacaaatctaattactacttttgctattgatggccatgtgtgctcctctgtagataggcatcatacaggcaggccccttaataactttgccacaggacagatgaacgtcaacaacttctcagtatgattaagtagaggcttttcttctgctcctttgtctttttttcactgcagcttagcaataaaaagaaaactggtagtgttgaaagacaatagtagccaaatccacaggagctgcttaaatgaaatatcaagcactacctcttcagtataagtggtttccacatagccatccattgtgaacccctagtaggctgaagcaaagtgtctaatgaattagtatgcttactcctacatctaaaatcagtcatatgaagaaggtcctgaaagcaaccacaatgaagcatgagcagatgttcacttttccattgtttgcatttgactaccatgtaagatttaaatcacatacattctacatgtatgaaggaaaaawgagctatgtagtgacaatttatcaagatgaatctatttgtaaaaacttagtagatttaacatattgacagatactcaatttaaattctaaagtatgtaaattttgtcaaaattaagagtattatgattatattcatgata

SEQ ID NO: 706515 - DNA, 819 bp, Homo sapiens
tggagagatatggatttatttttttcttgttatccgtgatgtaactatttgcatagctctcattatcttgatctctctgcctctcgtgggcatatacatcaaaagaaacatttattgttaagctcataaatggtaggtcatgttccctagctgcctttcactccttcatagctggtagtacataatgacaaatctaattactacttttgctattgatggccatgtgtgctcctctgtagataggcatcatacaggcaggccccttaataactttgccacaggacagatgaacgtcaacaacttctcagtatgattaagtagaggcttttcttctgctcctttgtctttttttcactgcagcttagcaataaaaagaaaactggtagtgttgaaagacaatagtagccaaatccacaggagctgcttaaatgaaatatcaagcactacctcttcagtataagtggtttccacatagccatccattgtgaacccctagtaggctgaagcaaagtgtctaatgaattagtatgcttactcctacatctaaaatcagtcatatgaagaaggtcctgaaagcaaccacaatgaagcatgagcagatgttcacttttccattgtttgcatttgactaccatgtaagatttaaatcacatacattctacatgtatgaaggaaaaaagagctatgtagtgacaatttatcaagatgaatctatttgtaaaaacttagtagatttaacatattgacagatactcawtttaaattctaaagtatgtaaattttgtcaaaattaagagtattatgattatattcatgata

SEQ ID NO: 706516 - DNA, 596 bp, Homo sapiens
gcagacttgatccatttgaccaaggtcagcatttaatttcatacctgaaatatcatatagtttacattgtatgtattctagagcctagattttattccatgaaattctcattcattagtgtctgtaatttatttttacccatgagtaaagctttaatcttttatgcaatcatgacaagccaaagcagaacaaattatgatatatctttgtacaataatatctgacagaaattgcccacagtaaatataaagaaaaatgcattcagaaaaaaccaattaacrtcttataattgagtaaagatttcataacctgtattgttttcaaaagattttaaagcttgatacttaataaccataagttgaaataaatgaatggtttcattcattttgtggcaaaccatttaataatgcttttcatcctgtagtgattcttagctgtctaggtaaaaacaggttttcattactggagaaaatatgaaatctgaaatgttattacacagagaagaaaacatgtaggtattgagaaaacaattagaattttaactatttctgtccatattttgattaagaatataactgtataggatatattataca

SEQ ID NO: 706517 - DNA, 2593 bp, Homo sapiens
taaacaacagaaagattctttgtaattgaaaggaacaataaagttgtaattagtggacctgatggtaaattttcttaagctactgatgatcactgagctcacaggtgtacctgtaagactgctattcgtttattcaataagtatttattgaatgcttactgcttgctagagactgtaactaggaagaagaatgcagacaattttgcttgatgaataaaaaccaagggtaaattttgaattatttattaattggcttttaaaagagctcttttccatggatttcccatggtggtctcaagggattatatcttcaggaattcctactctacaatacttttttataaaaacaggctgctaacactaatctgagtcttactatgtgccagtctctgtactaagcactttatatgaattatcccgttccatcctcataacaccccattgtgaagatgaggatctggagacacagagaggtaaagtcattttgcctaaggccatacaattgcagaactgagctccaggcctaggtagttaatcatgccactgtgctcctacacatggtttccaaatagcacccccttaatctcccctctgtataggggacagtcaatctccatatgcctttgcagagcttggctctggttcaagatttagcccttatgtcttcctgctgacacctcatttattactctttgtgttcagatagtctgaagtctcccacaatcccaccattggatatccagagattctttgcacagtgctaacttcctgctgtaaatgtgaaaagacagaaataataatttaggacccctgcaaaaagaagaacaagacagttctatggagcatgtcgatcgaggtgagaaactgggcacattgggcccacacgaagcccatgagatcatagtgtcctttaaggcctttgggggaatgaaaataagcctcctcattctgaagaaatgaaaccccatggtgaagggatgtctgcttcacttgactcagcagtccccctttcgaccacagaccattgactctggcaggcttcagatgaaacttcctccagcctgcctcatcaaagggaagcctgctactgtgcagggaggctttgaggcttgaagaggagaaagaatataaagtgaggaactgatgggtctcaaaggacatctctcccaacaaaaagcaaaagaacacgagtataaaagacccatgatttctctaagagtacgtaaaaaatacaggttgctagtttgtcatatcgtaaatgttttcccccctgactctgaagccatcatgagctgaaccaagtctgaattaaaagaggcttcaaaggaagcttaacagttggtcacaaggggtaaatttccctctactgcaaaagggaaggctccccggagggtgctaagtggtagggtcccttcagtagcttaacacagtcgaaaatcataactcttcacaggccagagctggacgccaccaccaccttcaccaacttgctcaaagtcgcagtaaaacaagaatgcaaacccacagctgtcatctctgatgacggatttactgacttcggatggccgcttctctttttaatatttcctcttccagccagcatgtgaatgacagagacacacaccactgaggttcagaaaactcttcccacaactgctgagcttctgaataaagagtcaccttctctgagagtgggacacctttgaacagcgcacatttgcaaacaaggcaggaggagaatatttgggctcctccgagggttactcatgtcccagctgcctatctgcccaggagcacttccatgaggattagtttcaatcccccaaaaaggaagaggaatgtccacactgttaccattaactaggacttttgactgccatcagggaaattgtatgtgtctatttagtaagcattttaatagtgctatgtgccaagcagtgttctaaatgccttatgactataaattcacttcgtcatactagcaagmcattataccaacaaggaaactgagacataggtatgtttagtgactttccctaagtcacatggatggtaagtggcaaagccatgtacccgacccagctctggctccagagtccaagctctttatcaccctgagactctattgattctctggttcctatgcaaacaaaattcatgtcccccctattacataagctcttcctctagttatgatatgcccagcagggctcatgagttatgaatgcttcaaggtactattctacaaagtggctcaagatgactgagggaaaggaggaagaaaaggaagcggaggaccactgcgattacactgttggcagttaactggaggctttgtttcctttcctatttttccagttgccatcaggaaatgagggagcttctgattcatctgctgcttggggtgagacctgttacatcctttgtttgcaggcacccctggctcttttatgtccccactggtttgctacttggtctccgtacttctgaaatgtccctggatgctgtttcattatgtagagtcaggcaaaagacagacggatgtgtgtgtgaggcggcgatgaagctggcaccaggtctgctgtgtctgtgg

SEQ ID NO: 706518 - DNA, 2593 bp, Homo sapiens
taaacaacagaaagattctttgtaattgaaaggaacaataaagttgtaattagtggacctgatggtaaattttcttaagctactgatgatcactgagctcacaggtgtacctgtaagactgctattcgtttattcaataagtatttattgaatgcttactgcttgctagagactgtaactaggaagaagaatgcagacaattttgcttgatgaataaaaaccaagggtaaattttgaattatttattaattggcttttaaaagagctcttttccatggatttcccatggtggtctcaagggattatatcttcaggaattcctactctacaatacttttttataaaaacaggctgctaacactaatctgagtcttactatgtgccagtctctgtactaagcactttatatgaattatcccgttccatcctcataacaccccattgtgaagatgaggatctggagacacagagaggtaaagtcattttgcctaaggccatacaattgcagaactgagctccaggcctaggtagttaatcatgccactgtgctcctacacatggtttccaaatagcacccccttaatctcccctctgtataggggacagtcaatctccatatgcctttgcagagcttggctctggttcaagatttagcccttatgtcttcctgctgacacctcatttattactctttgtgttcagatagtctgaagtctcccacaatcccaccattggatatccagagattctttgcacagtgctaacttcctgctgtaaatgtgaaaagacagaaataataatttaggacccctgcaaaaagaagaacaagacagttctatggagcatgtcgatcgaggtgagaaactgggcacattgggcccacacgaagcccatgagatcatagtgtcctttaaggcctttgggggaatgaaaataagcctcctcattctgaagaaatgaaaccccatggtgaagggatgtctgcttcacttgactcagcagtccccctttcgaccacagaccattgactctggcaggcttcagatgaaacttcctccagcctgcctcatcaaagggaagcctgctactgtgcagggaggctttgaggcttgaagaggagaaagaatataaagtgaggaactgatgggtctcaaaggacatctctcccaacaaaaagcaaaagaacacgagtataaaagacccatgatttctctaagagtacgtaaaaaatacaggttgctagtttgtcatatcgtaaatgttttcccccctgactctgaagccatcatgagctgaaccaagtctgaattaaaagaggcttcaaaggaagcttaacagttggtcacaaggggtaaatttccctctactgcaaaagggaaggctccccggagggtgctaagtggtagggtcccttcagtagcttaacacagtcgaaaatcataactcttcacaggccagagctggacgccaccaccaccttcaccaacttgctcaaagtcgcagtaaaacaagaatgcaaacccacagctgtcatctctgatgacggatttactgacttcggatggccgcttctctttttaatatttcctcttccagccagcatgtgaatgacagagacacacaccactgaggttcagaaaactcttcccacaactgctgagcttctgaataaagagtcaccttctctgagagtgggacacctttgaacagcgcacatttgcaaacaaggcaggaggagaatatttgggctcctccgagggttactcatgtcccagctgcctatctgcccaggagcacttccatgaggattagtttcaatcccccaaaaaggaagaggaatgtccacactgttaccattaactaggacttttgactgccatcagggaaattgtatgtgtctatttagtaagcattttaatagtgctatgtgccaagcagtgttctaaatgccttatgactataaattcacttcgtcatactagcaagacattataccaacaaggaaactgagacataggtatgtttagtgactttccctaagtcacatggatggtaagtggcaaagccatgtacccgacccagctctggctccagagtccaagctctttatcaccctgagactctattgattctctggttcctatgcaaacaaaattcatgtcccccctattacataagctcttcctctagttatgatatgcccagcagggctcatgagttatgaatgcttcaaggtactattctacaaagtggctcaagatgactgagggaaaggaggaagaaaaggaagcggaggaccactgcgattacactgttggcagttaactggrggctttgtttcctttcctatttttccagttgccatcaggaaatgagggagcttctgattcatctgctgcttggggtgagacctgttacatcctttgtttgcaggcacccctggctcttttatgtccccactggtttgctacttggtctccgtacttctgaaatgtccctggatgctgtttcattatgtagagtcaggcaaaagacagacggatgtgtgtgtgaggcggcgatgaagctggcaccaggtctgctgtgtctgtgg

SEQ ID NO: 706519 - DNA, 873 bp, Homo sapiens
ggcaccctctagtgataatactaaagatcacaatcaaaaatgattgtgcccggagtagcagtaccacttgaaactttgggtttaggttgtgatctaccaaaaaataaattaaactcattaatatttctatttaggaaaattctgacaagcaattttataacaagatcacattattaattataaagcttcgaaagtacttagtgacaaaaactaacagatcaggttaactacatgagacttttcaggggaaaaaagccatacaaaagcaaaaaaaaaaaagagagagagagagaaagaaatgggacagaaactatccttgactaacattttaaaggtaagattatttactaacattattttctgaaattacattattagattagcattcacttcctactaatctcctgaagccatctcactaaaaattatgctttcaaaacaaattaatgagcttaattcattttctatgagtgtatgttttgacttactttgttaayttttttgacatggaattgttagctttcaatgctgctgcaaaggcttccttatattcttctaattcagttgtaacctcttcataagcagttttcatttctgagaatttacattccacatctttaagtgtgagttcctttttatttagtgaagccatattatccttgtttaactgctctaattgtttttcatattgtgcttgttcctaaaacaaaggaaaagaatacacttttaaaacaattataacctaattattatatgtttgttgcctttcattttgagtcagtgattcaaagagcaattgtgaatatgttagtaaaagaggctgaagcttaaaatatttatcagcaagatcaaaactaataactgaattcagaa

SEQ ID NO: 706520 - DNA, 873 bp, Homo sapiens
ggcaccctctagtgataatactaaagatcacaatcaaaaatgattgtgcccggagtagcagtaccacttgaaactttgggtttaggttgtgatctaccaaaaaataaattaaactcattaatatttctatttaggaaaattctgacaagcaattttataacaagatcacattattaattataaagcttcgaaagtacttagtgacaaaaactaacagatcaggttaactacatgagacttttcaggggaaaaaagccatacaaaagcaaaaaaaaaaaagagagagagagagaaagaaatgggacagaaactatccttgactaacattttaaaggtaagattatttactaacattattttctgaaattacattattagattagcattcacttcctactaatctcctgaagccatctcactaaaaattatgctttcaaaacaaattaatgagcttaattcattttctatgagtgtatgttttgacttactttgttaacttttttgacatggaattgttagctttcaatgctgctgcaaaggcttccttatattcttctaattcrgttgtaacctcttcataagcagttttcatttctgagaatttacattccacatctttaagtgtgagttcctttttatttagtgaagccatattatccttgtttaactgctctaattgtttttcatattgtgcttgttcctaaaacaaaggaaaagaatacacttttaaaacaattataacctaattattatatgtttgttgcctttcattttgagtcagtgattcaaagagcaattgtgaatatgttagtaaaagaggctgaagcttaaaatatttatcagcaagatcaaaactaataactgaattcagaa

SEQ ID NO: 706521 - DNA, 873 bp, Homo sapiens
ggcaccctctagtgataatactaaagatcacaatcaaaaatgattgtgcccggagtagcagtaccacttgaaactttgggtttaggttgtgatctaccaaaaaataaattaaactcattaatatttctatttaggaaaattctgacaagcaattttataacaagatcacattattaattataaagcttcgaaagtacttagtgacaaaaactaacagatcaggttaactacatgagacttttcaggggaaaaaagccatacaaaagcaaaaaaaaaaaagagagagagagagaaagaaatgggacagaaactatccttgactaacattttaaaggtaagattatttactaacattattttctgaaattacattattagattagcattcacttcctactaatctcctgaagccatctcactaaaaattatgctttcaaaacaaattaatgagcttaattcattttctatgagtgtatgttttgacttactttgttaacttttttgacatggaattgttagctttcaatgctgctgcaaaggcttccttatattcttctaattcagttgtaacctcttcataagcagttttcatttctgagaatttacattccacatctttaagtgtgagttcctttttatttagtgaagccatattatccttgtttaactgctctaattgtttttcatattgtgcttgttcctaaaacaaaggaaaagaatacacttttaaaacaattataacctaattattatatgtttgttgcctttcattttgagtcagtgattcaaagagcaattgtgaatatkttagtaaaagaggctgaagcttaaaatatttatcagcaagatcaaaactaataactgaattcagaa

SEQ ID NO: 706522 - DNA, 1165 bp, Homo sapiens
tatctatatgaaggtccaactttgattctgctttgttttggctttcttttttgtattacttttctccaaagagtaaaatacacacttgttttattctcttattcctacagcacctaacataattcttactaaaaaatataatttaatgaagaaaattattatataatacattttgttgatacattattttctacatattatgtgtcaattttgttccttactatcctcagctggaatccatttgaagagacagaactgtattgtgtagattcaagcaatacatagtaggataccatacatactgtagggtttggctctgtgtccccacccaaatatcaccttgaattgtaatctccataatcctcatgtgtcaagagcaggaccagatggaagtaagtagatcatgaaggtggtttcccccatgctgttctcattatagtgagcgagttatcttgagatttgatggttttataagcatctgacatttcccctggttgcactcattgagtcttgccaccctgtgaagaaggtacctgcttctcttgcattctgccatgattgtaagttttctgaggcctccccagaactgtgagtcaattaaacctattttctttatagattactcagtctccagtcttgggtatgtcttcatggcagtgtgagaatgaactaatactcatataatrgatactaacaagtaaatctttatttaccacttattagaagcttgacttaaccaattatcaaattttatataagctttaatgttattgggaaatatccttttcctgtaaaaataaatgagattacctacctgaagtaccttaggcctttctaatattttcaattttcattaaatgtttatttttatgtatctatagatatcttgaatatgtattgtaaatattatatgtatgtagaatatatgtattctagtatttcttccagatagcacttaaaaaccagtgtttgcatttttgcatgtgagcaagcaattcctacttacaatgatggaagaaatagataccctggaagaaggaaaattaaattcatgctttcaaagcatccttcccaacaaatccaattcatcttttgcacagaaggaataattagatgaagatatattttaagtcagattgttagtattttggccacatggctacat

SEQ ID NO: 706523 - DNA, 621 bp, Homo sapiens
taatgctcctgtcttctgtcccttcaaggtggttcagtcaggtggcaaaaacattgaacttgctgtcatgaggcgagatcaatccctcaaggtaatcaccaagtttgtctgctttctttacctgtcagttttctcccatgatcagggctgagcagtaccagttycgaaggaaacatcatagggccattctgtggttttaacattaggaaaatgtctttctgaggctccccatacgtcaaagagaagattcccatcttcctctgattagatggtccacgcgtgttctctgggcatgctgagcggctgccagtcagatctgctgctgctgctactgctgcttaatacttgtctaggtcaggccagcatcctcttgtttttcttgaggttcctctccaaagaggctgtatgagcagcagtgccaaagcctggccgccctccccagaagagggcgctggttccttggcaccttgtgtggcttaggtaaccatgaagtttttttctatagattttaaatcctgaagaaattgagaagtatgttgctgaaattgaaaaagaaaaagaagaaaacgaaaagaagaaacaaaagaaagcatcatgatgaataaaatgtctttgcttgta

SEQ ID NO: 706524 - DNA, 621 bp, Homo sapiens
taatgctcctgtcttctgtcccttcaaggtggttcagtcaggtggcaaaaacattgaacttgctgtcatgaggcgagatcaatccctcaaggtaatcaccaagtttgtctgctttctttacctgtcagttttctcccatgatcagggctgagcagtaccagttccgaaggaaacatcatagggccattctgtggttttaacattaggaaaatgtctttctgaggctycccatacgtcaaagagaagattcccatcttcctctgattagatggtccacgcgtgttctctgggcatgctgagcggctgccagtcagatctgctgctgctgctactgctgcttaatacttgtctaggtcaggccagcatcctcttgtttttcttgaggttcctctccaaagaggctgtatgagcagcagtgccaaagcctggccgccctccccagaagagggcgctggttccttggcaccttgtgtggcttaggtaaccatgaagtttttttctatagattttaaatcctgaagaaattgagaagtatgttgctgaaattgaaaaagaaaaagaagaaaacgaaaagaagaaacaaaagaaagcatcatgatgaataaaatgtctttgcttgta

SEQ ID NO: 706525 - DNA, 656 bp, Homo sapiens
caggtaatgaaaggagaactcatgcagctggtgtgtctcctcgtcctctctgagggccacttttaaggtcacctggaaacccattagactaaaatgggatgctctgagcctagaaccagccatgtctttgtttttctgcgtgggtccagggtgcagcttgctcatggctgtgtaacatgctctacggtgcctgagaacctgaacgctcctgagctggggagcttggaggcagcaggaaggtggcaaaggggccactgcttatgatacaggtgttatctgtgagctgggtttttaaaagaactttgtatccagtttctgagagcagagccattcatcccagaagggtggcccacagggagaacccgggtctgctggccgcacttcacccgaccaattgggtcagccacctygttccatcacctgatggggcccaagtctccccaaattccaccagcctaagtgtgtgctccagacctggacatgatgcagaggtgacttgggcagaagagtcaacaggattcttagagcatcagaaaagaaaattttaaaggtttgcatgtttatttataattacaatttacattactccaacagaggagcccccttgctatgttctaattcttagccattaagtcctacaaaaataaacccaagct

SEQ ID NO: 706526 - DNA, 2135 bp, Homo sapiens
tggcccttttgatgactgctagtttcctccacaataaaagaagttctgacctgtgaattcattttttcaatccagtaacaattttgaatacattaactaagcatcatggaccaaataaggagccaattagtcgtattttccatcatctgaataaaataagaataaatcaacttyatcactaaacttaaaaggttgtcttccttggcaaagaagtctattttgttctgccaactcaagttccttttggagagtaagaaagttgggttatctgtgacctgaaaccaactgggtttcattttccttttccctttgggaaggctagtcaagggagctggtaccattctgcagtagcactacacccaagattactttaaaaacttcttagagcactaactaaaaattataaccccacacagtatttattttcataagtagatgctatttatttttccttcttcatttattctttattttcctttctcgctcatctagatattgggatgatgtgacgaacgcatctactcaccaagctatcatctttggtaaatagacctcacagataatcaacttatcagctagttacaacaagccagaaaagagacaaccatgagtgagtctgtaatcttagtgcaaacactctccaaccatgtttgttttttgtgaaagtgcatcctttcccctcaagcatttagtttttggtagaggtcagcttaaaaatattgcaagaaacacacacaccaaacacatcaccattgtgtgcctcttgagtgagtgggtacatcaagcctaacaagaaataaggttcatcctgcagatgtttattggaaaaggacatctaatctttgacattttcatgtgcacttttgtgggaaggtggtttcaaaggagaaaatgaaatacaacttgtaacttgaaatgtgtcactatagcttgggagatttttatatcataaaattaaaaataaaattgggatgcattatgtatttacaatcaaatgtttaaatgtatatacagtatatttttcctcttaaaattgtatctttagagtcagatggcctttcattttcctaattatttgcttacattgttggtaatatatcataatgcatacaagctctaaaaatatcctgtactgaaaatatttctacagctgttgcttttataggattcacttttaaagaaagtagaggaacaagacacctaattatacaaagtaaagataagtaataagcaattttatgtttaaaagctgctaattaactgggcagcaattaaagagactacaaaaacctcagttttaatactcacaggtttttattatgaatatttgttctggtgcatatttttctgtcagactaagtctccaagtgtggaatggcctcctgccacgtatctaaaaatcgattgttcaaaaatcttaattataagaaagtaaacaaagagtgggttgaagcagtgcagagttctaatgaattaatgtaacaaaattcaagcaaagtcaactgtctttaaagccagcaggctcagctctgacagtcatccatcaaactgaaggtctccttaataaatgccaattacagggcatatatgcacaaacgtggctagcataagccataggatcatttccttctgagaaaattagtaaccaagaaaacacccaggcagtgcaaacgaccggcccacccgacagtaaggcttgtccctgatcagaatactaaccagcattatttctttcttactctctctctctctcttttcaacttaggaaaagttcagaaccacacagaattttgtttggggttatacaaattccttcacaatttgtatagaagtctaacataactttttaaaagccatgacatgcccataatgtatacagagtctctgacttccgccgtaagcgaggctttttcctaacttaatcatactcaaatttcaccccttttaaagatcctgattcaaaaatgttcactcattctccacagtccacaaatttataccatctcttcctgtggtattttatgtgcataaattaaaaaagaatggcctccaatgaggattaaaaggttgaaaaaaatcatagactttctaaatttaggttcatttttcttattttaactctcaaaatatgtgtg

SEQ ID NO: 706527 - DNA, 639 bp, Homo sapiens
caggttgttattccccacaaaagagtgctattgcttagataaattggcatggaatcttcctttcatatggaggagaaggcagtggtgatgagaggggaaaggtttactagcaaagctatatccaattacaaatttacttctttttaacttatattgttgttttctcccagcaaatattttcaatgtaaataatagatacatggagcatctcaagtttaccattattgtgtccctttaaagatatttctatcttccaacctttcttcaaataccatgatcaaaaattagcataaatcagaactgtttgatgtctttatgttaactttgcctaggaaaaaaatggaaaagtatggcagaatactttctcaaactataaactagacaagaataccactatgaatttggaagcatgattttcttctttgggtggattctttggttrtcttctgccaattgaagcaaattccttcttagtctttatttaatagcactccttctgccttcgctatagcagcacttatcacaggtgagataaaatgtcaaagctaaagaaaagtaaatgactggaagtgaaatatccaagcagaggttggcatatagacaacgccaaccaaggaggaagtgaactctgagcagtgg

SEQ ID NO: 706528 - DNA, 1215 bp, Homo sapiens
ttttttagcagcatttttcaataaggtgacaatgcattagaatactaatagtatgtatggtattttaagatgtcaagttttcaataaaatgataatgaaaattttgcatttcatttaatagttaaatattcatgaattttcacagcatgatgaactgagtgaaaaataaagaaactgtataatgtataatactaaacatcataaattaagtttcttttcatagaagctattcaagagtgtttaatatatggttcttcgtggatttagaccaatctgagctaaattaaaagcatctaaaaaggaaacttgtttaaaccaatttaacatattttaacacagcatgtttataatgtaacaatataaaagaaaatgacacattacaaacaatatacatatattatataaaaattatgatgactaagtaggagatgtagtcrccaggcaagagtattttgaagaaaataattgtgaaataggagagggagggatgcatgggagagagccaggtgacataaccatgagtaataggatgaaaataagcagtaaaaattgagaatctaagttttgaccaatggtgatctgttccaggtattgggctaatttctagagaacctaggggtgaacaccatctcttccttctggccctggactgatccagtcctaaagcaaatgtttagagtaagaataaaattcttctccaatattagcgattaaaagacttttcttccaaattcaaagtgtgactcagttctttataataaatcatatctatatattctattagttttgattctctataaaggagagatattattatatgtgggattctgtttcattaatcacatatctgcttatatatatccaagatatgtgcttcttttttttgttgctttgttttgttttgttttgttttgagactgagtctcgctctgtcacccaggctggagtacagtggcgcaatcttggctcactgcagcttccacctcctgggttcaagtgattcttgtgtctcagcctcccaagcagctaggattataggcacgtgccaccaggcccagctaatttttttttttttttttttttttttagtaaagatggggtttcaccatgttggccaggctgatctcaaactcctgacctccagtgatccaccccctttggcctcccaaagtgcgggatttataggcatgagccactgcacctggtggatatgtg

SEQ ID NO: 706529 - DNA, 1390 bp, Homo sapiens
ggcataatagttttgtttttctcctaaatacagtacttttttctccattccaccattaaaccagtcatttaaaaggcagaaattctgcttaaagcatctaaatgtttcccaaaagtgcttagcacagcactgcatactgagatgaacacttaaaatacaacctgttcataaagtgggctacattaattccagccaggcatctcaataaacactatttttaaattgatcagatgcacttgaagggcattgctttcacgcccccacactatctccttgatttctttttgtagcccaccactgtacatgagactgctgctgtttttttttcttattatcattattaaatacttgatgttagaatccaagcagcttcttttttcctttgaccatgacgatttcttaaatgtcattgattgaaaccacagagttgaaatgtgttttagggaataaagctttgttggaagaaagtcacctgtgtaaataaaacattataagtagaaccctgcatagttttcctttgcttttggtatgtgcagacctttaatctatagctttcattcttctttataatgtatatcaaatcatgaacatgttcttttttgagaaataaagtgtattctacctctctcacatgatccctgcccctctttctaatcttttgtgatctatagaaacatgagatgttttcaaaccaaatattgagtctatctgaccacaaaatggagatttcctctttagtgaaagtgtgtgttgatggattttatgttgtgcartttaaactgcttctcaaccattaaatatggacacttaaatgcatttaggatttagacatcagcttttagtggcatcagccttcctattttgttctctttttttgcacaagtattaaacacagccaacagtgacttcagattaattcatggatatgaaactcatttgtcacagaacctgacagattttcacaatactaatagaaggccagcatttttcatttaaatattgaacttggtgttgcatagttgaataatgaaaatgattcttctttcttaaaaaattaaaatcaattttggttggcacagaatttagataataattttatactcacttaccttggtatcattctgttagtaaattagattaaatttagaaaagattgttttacttttaaaaataaatccagtctgaaactgcagccatccttggtgatctaaagggttctgggaataagctatttcatattggccctgtaatattactgtcatggtatctacaggtttgatcccattagacagtcttctttgtattatctagtacagactggatgggagaaacaatgtgattggctttgctaattaacctcacctcttgtgggaagacagagtcctcacag

SEQ ID NO: 706530 - DNA, 1390 bp, Homo sapiens
ggcataatagttttgtttttctcctaaatacagtacttttttctccattccaccattaaaccagtcatttaaaaggcagaaattctgcttaaagcatctaaatgtttcccaaaagtgcttagcacagcactgcatactgagatgaacacttaaaatacaacctgttcataaagtgggctacattaattccagccaggcatctcaataaacactatttttaaattgatcagatgcacttgaagggcattgctttcacgcccccacactatctccttgatttctttttgtagcccaccactgtacatgagactgctgctgtttttttttcttattatcattattaaatacttgatgttagaatccaagcagcttcttttttcctttgaccatgacgatttcttaaatgtcattgattgaaaccacagagttgaaatgtgttttagggaataaagctttgttggaagaaagtcacctgtgtaaataaaacattataagtagaaccctgcatagttttcctttgcttttggtatgtgcagacctttaatctatagctttcattcttctttataatgtatatcaaatcatgaacatgttcttttttgagaaataaagtgtattctacctctctcacatgatccctgcccctctttctaatcttttgtgatctatagaaacatgagatgttttcaaaccaaatattgagtctatctgaccacaaaatggagatttcctctttagtgaaagtgtgtgttgatggattttatgttgtgcaatttaaactgcttctcaaccattaaatatggacacttaaatgcatttaggatttagacatcagcttttagtggcatcagccttcctattttgttctctttttttgcacaagtattaaacacagccaacagtgacttcagattaattcatggatatgaaactcatttgtcacagaacctgacagattttcacaatactaatagaaggccagcatttttcatttaaatattgaacttggtgttgcatagttgaataatgaaaatgattcttctttcttaaaaaattaaaatcaattttggttggcacagaatttagataataattttatactcacttaycttggtatcattctgttagtaaattagattaaatttagaaaagattgttttacttttaaaaataaatccagtctgaaactgcagccatccttggtgatctaaagggttctgggaataagctatttcatattggccctgtaatattactgtcatggtatctacaggtttgatcccattagacagtcttctttgtattatctagtacagactggatgggagaaacaatgtgattggctttgctaattaacctcacctcttgtgggaagacagagtcctcacag

SEQ ID NO: 706531 - DNA, 1390 bp, Homo sapiens
ggcataatagttttgtttttctcctaaatacagtacttttttctccattccaccattaaaccagtcatttaaaaggcagaaattctgcttaaagcatctaaatgtttcccaaaagtgcttagcacagcactgcatactgagatgaacacttaaaatacaacctgttcataaagtgggctacattaattccagccaggcatctcaataaacactatttttaaattgatcagatgcacttgaagggcattgctttcacgcccccacactatctccttgatttctttttgtagcccaccactgtacatgagactgctgctgtttttttttcttattatcattattaaatacttgatgttagaatccaagcagcttcttttttcctttgaccatgacgatttcttaaatgtcattgattgaaaccacagagttgaaatgtgttttagggaataaagctttgttggaagaaagtcacctgtgtaaataaaacattataagtagaaccctgcatagttttcctttgcttttggtatgtgcagacctttaatctatagctttcattcttctttataatgtatatcaaatcatgaacatgttcttttttgagaaataaagtgtattctacctctctcacatgatccctgcccctctttctaatcttttgtgatctatagaaacatgagatgttttcaaaccaaatattgagtctatctgaccacaaaatggagatttcctctttagtgaaagtgtgtgttgatggattttatgttgtgcaatttaaactgcttctcaaccattaaatatggacacttaaatgcatttaggatttagacatcagcttttagtggcatcagccttcctattttgttctctttttttgcacaagtattaaacacagccaacagtgacttcagattaattcatggatatgaaactcatttgtcacagaacctgacagattttcacaatactaatagaaggccagcatttttcatttaaatattgaacttggtgttgcatagttgaataatgaaaatgattcttctttcttaaaaaattaaaatcaattttggttggcacagaatttagataataattttatactcacttaccttggtatcattctgttagtaaattagattaaatttagaaaagattgttttacttttaaaaataaatccagtctgaaactgcagccatccttggtgatctaaagggttctgggaataagctatttcatattggccctgtaatattrctgtcatggtatctacaggtttgatcccattagacagtcttctttgtattatctagtacagactggatgggagaaacaatgtgattggctttgctaattaacctcacctcttgtgggaagacagagtcctcacag

SEQ ID NO: 706532 - DNA, 1012 bp, Homo sapiens
gccgattaagaaactggctcagcattacccaaataagatggagtggaagcaggattcgaactcaggtctctgactctatgaccagctgccgacctactgtacaataatgcctgcagttctaaaccaccttgagtcactgtcaccacacttttgggccaattaggacattgaaatccttgctaattcattttgtatcttaggaaatagactttaaggtttcagggtcttatctctgtgtcttagcttttgtgcctatgttgaaagctgtattactttataaaggtttcaaaggactggctgtgctgtgtgtgtgtatgtagaacagaggtgaaatactgtttgctcagaggagtctggagatttttctggcgtttccttgactacgtactctaggatgctagagaatgttctgctagatcattttagcagttatattttactcatttatgaatctttaactttaaactccctccactcagaaatccataaaattggaaattaacctccatttgtggcgagtctgtcaacagctaatccctccccacagccaccacatccttttcactgggtgccagaagtagaggcacccaggccatggtgggcagacagaggggaacctccaaaagatacccgggctctgacatcctcagggrttgccctcagatctgggacacaagctgaagtgatgtcacccaatgccacagcatggaactccctccgtggtgtctgtggtcagactggggcccagaagtgtctccctgtcctggtgttcgatgtcctgatgaagtcagatttcttgggctagggatttggttgccaatgattgccttgtgaactggcagatgtaaaataaacatttctagagctagaagcacagggagcctaaatgctagtggtggccccaggaggggcaggagcaagacctgcatggcagcgacctgggacaacttaggttttgcatttgccaaggcctaatgctacacacacacacacacacacggatacacacaca

SEQ ID NO: 706533 - DNA, 1250 bp, Homo sapiens
agccagcaaaaatctctctttggatagctaaggaatgcagtaaacacgggagatacaaggaatgatacacaactttctatcctcagggtttctgtcgtagatcattgcaatgactctggattacatttttcaggtcagatttggggatttatttgcagaactttacttatctggttttatacagataacctgaaaccccttgattgttcctcttcacctcaaggacccttccacaagccccacatgactgcaggtacacattacccatcttgtcacccactacttacagagctgacatgctgctgcttggccccattgtgctatccctgagtactgtggcattcatcctggctccaatggtgtaaaatgagggggtatgaatgcctttttcaaactcaagactagcaaaagacaaaacccccttttgtttgaagccactggaaatatagtcttagttcttgctcttttagagaaactatggggtgggcccttttctcctctatacccccacccgctggcagcagtagtttttgcatggagtaattgagcaaatccaacgtataaaaggtaggattatcaaagtgaatgaacgaatgcttacctagcagaactgtaagacatggaaaaataggaagacaagctaatgatctagaaattgtatagctttgctgtcttagaatcatggcaaatggaacatatggcattgggtcattttttgcattgatttgaaaagaaaatgagtttattttacaaataaatggagtttgtgtttctgtttgctattcatgactgtaatgtttacttctcttgaaacagaaatctgtcacctaaatattaaatatagagaaagattttttcagctattaatgaagaatttttctttacatgccgtgccttcatccacttcaataamctttttatgcttttccctttgtttgctattattttgtctgatgagtttgtctgtgaacagagacatcttaagagaaaaaaaggaattggtgaaaagacagacatgttaaaattgttatttgcctgagcattagaattttagattaaggcctagaatcaaattcagtttattttctcatagattttatgatacatgttgttttcatttcctattttgagatttaggataggcccagaattgtaataaagttgccatttaaaaaccttccattcattgttatcctagtagacatgtattatttttctcttccaaacatcctgtatttcagataacagaa

SEQ ID NO: 706534 - DNA, 1250 bp, Homo sapiens
agccagcaaaaatctctctttggatagctaaggaatgcagtaaacacgggagatacaaggaatgatacacaactttctatcctcagggtttctgtcgtagatcattgcaatgactctggattacatttttcaggtcagatttggggatttatttgcagaactttacttatctggttttatacagataacctgaaaccccttgattgttcctcttcacctcaaggacccttccacaagccccacatgactgcaggtacacattacccatcttgtcacccactacttacagagctgacatgctgctgcttggccccattgtgctatccctgagtactgtggcattcatcctggctccaatggtgtaaaatgagggggtatgaatgcctttttcaaactcaagactagcaaaagacaaaacccccttttgtttgaagccactggaaatatagtcttagttcttgctcttttagagaaactatggggtgggcccttttctcctctatacccccacccgctggcagcagtagtttttgcatggagtaattgagcaaatccaacgtataaaaggtaggattatcaaagtgaatgaacgaatgcttacctagcagaactgtaagacatggaaaaataggaagacaagctaatgatctagaaattgtatagctttgctgtcttagaatcatggcaaatggaacatatggcattgggtcattttttgcattgatttgaaaagaaaatgagtttattttacaaataaatggagtttgtgtttctgtttgctattcatgactgtaatgtttacttctcttgaaacagaaatctgtcacctaaatattaaatatagagaaagattttttcagctattaatgaagaatttttctttacatgccgtgccttcatccacttcaataacctttttatgcttttccctttgtttgctattattttgtctgrtgagtttgtctgtgaacagagacatcttaagagaaaaaaaggaattggtgaaaagacagacatgttaaaattgttatttgcctgagcattagaattttagattaaggcctagaatcaaattcagtttattttctcatagattttatgatacatgttgttttcatttcctattttgagatttaggataggcccagaattgtaataaagttgccatttaaaaaccttccattcattgttatcctagtagacatgtattatttttctcttccaaacatcctgtatttcagataacagaa

SEQ ID NO: 706535 - DNA, 1250 bp, Homo sapiens
agccagcaaaaatctctctttggatagctaaggaatgcagtaaacacgggagatacaaggaatgatacacaactttctatcctcagggtttctgtcgtagatcattgcaatgactctggattacatttttcaggtcagatttggggatttatttgcagaactttacttatctggttttatacagataacctgaaaccccttgattgttcctcttcacctcaaggacccttccacaagccccacatgactgcaggtacacattacccatcttgtcacccactacttacagagctgacatgctgctgcttggccccattgtgctatccctgagtactgtggcattcatcctggctccaatggtgtaaaatgagggggtatgaatgcctttttcaaactcaagactagcaaaagacaaaacccccttttgtttgaagccactggaaatatagtcttagttcttgctcttttagagaaactatggggtgggcccttttctcctctatacccccacccgctggcagcagtagtttttgcatggagtaattgagcaaatccaacgtataaaaggtaggattatcaaagtgaatgaacgaatgcttacctagcagaactgtaagacatggaaaaataggaagacaagctaatgatctagaaattgtatagctttgctgtcttagaatcatggcaaatggaacatatggcattgggtcattttttgcattgatttgaaaagaaaatgagtttattttacaaataaatggagtttgtgtttctgtttgctattcatgactgtaatgtttacttctcttgaaacagaaatctgtcacctaaatattaaatatagagaaagattttttcagctattaatgaagaatttttctttacatgccgtgccttcatccacttcaataacctttttatgcttttccctttgtttgctattattttgtctgatgagkttgtctgtgaacagagacatcttaagagaaaaaaaggaattggtgaaaagacagacatgttaaaattgttatttgcctgagcattagaattttagattaaggcctagaatcaaattcagtttattttctcatagattttatgatacatgttgttttcatttcctattttgagatttaggataggcccagaattgtaataaagttgccatttaaaaaccttccattcattgttatcctagtagacatgtattatttttctcttccaaacatcctgtatttcagataacagaa

SEQ ID NO: 706536 - DNA, 1205 bp, Homo sapiens
ggagatttatgagctcatataactgcatgtccaaaactagggtgatctagtaccttgatgacattatcatgaacttagcttctttctgttcttctgtttgcccttctatggtgtcagcttcatccaaaggctgacttgcttcagggtggcaagatggctgcagcagttccaggcttcacatttgtgtagtcaaaaaggtgagagcatttcttttcccgcattccaggcaagaatccaaagatttactccggttggacaacttaagtggcagctaacccttgaatcaatccccattcaaggccaggtgagtagaatttattgactgacttaatccaactagtgatcatccgtggaaatgggggtggaattccatcagctacataaggtatatcaggagaatgactatccaaataaaaatctggacagttaagaaggagagaacatagaatggttactgggaaatactttgtatctttgtgttacttaaaaataaaacatatctttggtcaaaagtgatagaatgcccaatggctgaaacgcaggactttattcatctcacttaacatgaaatacgaaggcaggccattccatttagtgtagtggctcaataatgttcccaatgacctggactctttctgctttgtcagactcagtgtttcagcaatggtcacaaatggctgctagagctccaggcattacattctcaaatgtgacccaaacagagaggaggcaggaggaaacaaaagggctctcttcccatgcatctggactctaatggggtgggataatttttctcagaaatcctccagccatctctctcctccatccattggcctgaactggatcatatggcccttgctagctatagaggaggctgggaaagtgaatgcctggagtttttcagtatctgtagtgggaagatgacaaggaaaaagtgaactgagaaaggcyttgggtagtcattcaataatgtcatgttttggtaattctgtgctaaagaactggaggccatgtcctaaggtttttttttttttttttagtgtcaatttagagaatgctaccaggatgtgacgtaaggtctcttagcaaaaatcaggctcataagcagttagctttcacccacactatctttgaatacgatgttcaatgtagcagttaagtattcaagtgctgacatcaatgagaggtttatcagaagcaaattt

SEQ ID NO: 706537 - DNA, 2303 bp, Homo sapiens
tgtggtaacaaaatataatgctgtaaatccttctgagttaagcgaataaaaaggccataataaaggtcaattttactgccatcaatttgcagtgatgggacatttggttgccaaaggaagcaacaaatacaacccagaattatagtatctctgaaaaaaaaaatgtgcttctatggcaagaagtgctttgagaagatttacactgaaacccacagtcagctctgctccaaaataatagtgtggattattacaaattgttctaaccctgtgcagggcagcgcaaaagacaaacgcattgtcgtactgcaatgaaacagattcactatataagagacggaggaggtataatgggtatttgaaatatatgcaaaagtaaaaaggagaaatggtagttttgtgagcaattaatgctatccataattacaacgtgcaaacaaaaaaaccactaggggacaactgcacaataatgaggtttgaaggtattaattctcctctgaaatggcgagaatacaatttttatcaaagcagcaacggtaaaacaatagcacaaaatagaaagatggagattgctactatttattctaggatttttacactggaaaattgaaaattaaaacatcaaagaagtgttaaatacctgcgtgatgccatgacctcatctgcctctcttctttgccctctcgtgtttcatctctcagtttaaactgcactcatagactgaatatctttatatttgactgtaatttatatttacatgcagacccatttgtaaactagagaaaattcaaagtggatatttatttgtacaactagctcctaggccagtagtgacagtcaccatacctaaatactagcccatcaagaaaagaaaaatgctacatggaattaaaaatgtcaaccaagtaagaacactgagggactttctgtcaaaaaggacaggtgatgctattaaatgacctgcttttctaattataattaatttttttgtagcatataaaatgcatgcttagcgaaaatatttggaaaataaggaaatcgttttgatattattaccaagaaataaagactgcaatattttagtgtaattatagctttctggaatccctttctgtgcacatatacacatataaaaacatatttgggatcatattccaaatattgttttataacctgtggtcatcacttaatattagaaatatttctcacacaatctctaatagctacaaagttttctgttaaatagccaaaccataatttatgtaataaatccgtttgttcatttaacaaatacgtactgagcatttgccatgtgacacatgttgtaggcgctaatgtggcaaagacaaataagaaatattttctgacctcagggagtaaagtgatcactatgatccttaataatttgaaccacactgtgtgtaattgattgccaatctcagaggagagggactatcattttagacagttcaggaaaggcttcagaggggaagtagccattgatatggattttgtaggtgaataaaggttaaaagagcaactgagttggatgagaattttagacagagagaagaacatatataaagttatggagacaggaactggattatgaggttgccacacaaggaaaattaagtcctgctcaacttttaacaattgttaattgtaatatttgcagatgcctgtaaaagtgatttgactaggctttatctaatcagtggagctctccctttctttctcacatctaactttaaaaatcatcgttttatttatgcttctggttcctcccaagtatggtcaaaaccatctgtttgatgtcaaaaaggagaagaaaaaaatttctagaaacaggtggattctgaacaatacttgaaatacttcatatcaattgggaaggcagatataatttagcaaactggcttttattctaaaatatgttggtggtaattattacaaagagggaaagacaaacactaaaaacgtaacatttggtagaaatgaaacagatcccaaatacccagtatgttcaaagttatccaaagagcattattggctcttgaaatccagactgtagcacaacagataataatgatggcaccaaaagggctctttgggattatgtgcaaaaaactcttttgagactcttgaatctgtacatcaaatttttatataatatttytgttctccatgtctctttggagctatttggatttatcctttgattacctactccaaagttcacttgactttggtgtgattaccaacagtcagttatttcagtctatttcaagatgtgacaccttgac

SEQ ID NO: 706538 - DNA, 1040 bp, Homo sapiens
attaaccaaagacctctatttaagaaaacaaaacttctcttcatattaatttcactggctccagtaacatttcttcccaagttatgtattaatgaatcatggtcaagacatctggtatatgactcccatctaatcaaagaagcccaaggttcaaagcatagtcttccaaagggaatacatgtgaaaagactggcttaactcaggatgctttttttctctttattttatgatgtcctaataccttgagtcatattaatcatatcataggcccatcaatattacttgcactgttattttaacttggcagattatctcacccaacagcaatgattgagcatctacatgaaaaatgacaaggtttcaaaaaccctggttttcattctattcctcatatrtgcactgccagttatctataaaaataagttaatagtcaaaagggaacacacctagctatcaaattcacaagatatagaatacagcaacctgatcatctaaacatggactatgacccttcaagcaaaacagtgttatatatgataattaaagatagttaatttatatgaaaaaatggaaaacaaaaccttggaatagcaacaatactttgctctgacctctacagtagctctacgtgagtaaatacacagatttatatctgaaaagatgcaagaaaggcccttcaaataacaacttactttatcagaatgtcagtgttattgactcagtataattttgatattttaatgttttatagaagtatgccatatactcatagagtgataacattgtaaaaggctttagatatcaaataaactagggctctccagtttgaggaaatggatcaggaaaatgaagcccaaagagctgcagtgccttgttcaaaaatttcacagctaattatcaatagtggagtatatgtcttatcatgcacatctccttagaatctattacctagtcctctaaattgggttatttgaggacacaaatatcacatatccactgtgcatgtactgtgtaatgctaaagtaaatccatcatcctca

SEQ ID NO: 706539 - DNA, 1547 bp, Homo sapiens
ccagtaaaggacattccagtaattaaagtccccaacaagtatatcttttatctctgccaatttttaaaattaaatgtcaggactatagtattaatttcttatcctgatgaggaagtccacagtagctgtaaaggtactattacctagtgattaaaggcatatattctggaagcagactcaggttcttatctgtccctaccaccttgtaggtggactgtgataggtaaattacattccttgccccagtgtcctcattttttttaaaggtgaacaatagcaatacatgtctcatgcaattgttagaagaactggataaaaccatctgtgtaatgcttctggcctacagcctggaacatagtaaaagctcaattaatggcatctgttttttaattatccaccttgttccctctagagttttcctctttgtaataatttcattggtattccatgaattatgatggattcaaaactctcagttggttaatttatattctatatcacaaaagtcagtggaaaatacaagacacttacmccactcagagattcttaagcatacaacctcagttaacccttgtatgtattccttaaactagttcacataatctcattttttgtcagttgcataattccttcccatattatctccagacttttataaggtagaatatctaaaccatgtatgatgccaactataactattatttatttcatttgcattttccttcacattatgatgtcataatgtgtatgcgactggtataccttgtcgtataccagtaatcaagagtgatgcatttgcactttggactcagctgtatcctttggtcaatctccaactgagttcttgtctgatctcacatttatggtactaagaacataaggactcagtagtctcatccttatttatactgttacctcacaaaatcttatcaacttgttcagtttttcataaattttatgacataactcaagttatttttcttacttatgtatcactgttttctttgatttaatggaattcccttctcaacagtattgtgtgctcaacggctaccatctgcctataataatatccattctattgcatgcttatttataatttttttattcttatgtaactacaaacttagagagaaatttgcaagcaccataaaaaacacttttccgaattatatgaaagtaaaatgctggtacaaacctacagattcgagaagctcaatgaatcccaaataggataaactcaaagaaaattatgcccagtcacttcacaatcaaacagaggaaaaccaaagataagaaacatttttaaaagtagccagaggaaggccgagcatggaggatcatgcctgcaatcccacactttgggaggctgaggtgggcagatcacttgaggccaggagttcaagagcagcctgggcaacatggcgagacccccatctctactaaaaataccaagctgggtgtggtggtacatgcctgtagtctcagctacttgggggctgaggaaggagactcacttgaactcgggaggtgaaggctgcagtgag

SEQ ID NO: 706540 - DNA, 1237 bp, Homo sapiens
tgacaaaatgaatttaactccaaacattttttgaaacaaaacattattagtgaaaatcatattttactctattattgccagtggctaagtttcatttccctcgccaagcttaacaaggtggaaactttgytaattctaggctatttttttgaaacctggaaacctctctgcctctatttttctcctcctcctagagtggccccagcagagaatgcggtaaccacgttcacccctgtaatgtccttcaagattttgcaaatgttagcttttggttcccatttaagtgaaagggcttctgagggaatgtgatgactcacagatgagagatggattgcgtcctccatggtagggacagaatggctgttagaagcgaagatctttatatgttcctgcaaatgtacccagcagcacattgttctgctgaatgtacatgtcaaaggtatttccgttccctttccatcctatattttcccaggttagaaatacctgctttataaagcaggtattataaatgttctgtaaaatacaaagcacaatacaaaagaagacagcagatgtaggagtaagtaaacagcaggaaaacgttgcttacaatgaaatgattaaaaagcccattctaaaacaaaattttcaatgcatcttaaatatttatgttactgtggtaatgacctcaacagtctttgaccaagctaaatatgctttagaaatatgttgatatctgcaaagtgtgaatattcaaaattgccatgatttgggaaaaggaaagtaaaacactctcagtatgaggagcttttcccatggaatgtgaactgcaaggtggtgagaagggttaggtgtgatgtggtgagatcatttttagaccagtgtgtctattattagctttattacactcccactgggcattataatttcctgaaattcatcatttaattaaggctatgggttttgattaaatttttttaaatgtcaaacagcataatatttatagtgaaaaagaaaactgcttggtggatacacattggttagcaggacgaggcatcttagggattcagcatggagtcagctgtggatggggttttagtttctgtctttgaattgaccttcacatagtgtctacctcttgagagttcaggggatgttggagagataattaggtaaaacaggaagatcttctcaggatacatgagggagttaaataaaaatgcaggagcaattacaattttagttatttgtaact

SEQ ID NO: 706541 - DNA, 621 bp, Homo sapiens
ttagaacaaataaattagaaaagggttttaactaccaataggtaggaaatatttttaatttacaatattttaaaagagccatcctgagaatggattctccacactatttcaatttctgtttgggtggtacgtgaacattcatttcttcttttgayccatggaaactgaagacaaatttcttcattctctgattctctctctcagttgccaatttctttctatatacgcatctgtttgaaaagatgggtatcaaaaattccatctttttatctatattcaattttcatttgaaaccccaaggcctggatttccttcatggacatattgatttgatttggaatgccaacttcatttaccaagtaattacatggtgaaaatagaaatctacacggtacgtttatgttcagttagatgaccaaagcttcttatttagcataaacagagtttatttttccttaaaattaagagaattacaggtctgaatacaaagatatactttacataatacacgccaggccaagcatggtggctcatgcttgtaatcccagcactttgggaggccaaggtgggcagatcgcctgagctcaggagttcgagaccaccctgggtaacatggtgaaa

SEQ ID NO: 706542 - DNA, 1356 bp, Homo sapiens
attgcattagtattttatctgtattttcaaatttaatcattttgttaataatatcagataggcaatattgccttctctttataagtatgaaaactgaagctcttagatgttaaaaatttgcccaaggttaaatagtatgtggaaaggttagaattgcaaagcagagatatctaatggtaaaatatcattctttacattttgggacactattatcctacaggtactgtgtgtaaataaaagttcggatatatctaatatatgactatgtacsctcttctactcatggatacagttatcttttgcatattgtcaacataaaaagaattgtattggccaggcgcggtggctcacgcctgtaatcccagcactttgggaggtgaggtgggcagatcacgaggtcgagagatcgagaccatcctggccaacatggtgaaactccatctctactaaaaatacaaaaaattagctgggcatggtggcgtgcgcctgtagtctcagctactcagaaggctgaggcagaagaagtgcttgaacccaggaggtggaggttgcagtgagccaagatcgcaccactgcatgccagcttgggtgacagagcaagactgttgcaaaaaaaaaaaaattatattaacaaaatgtagtggatatttaactatcagtgcttaaaagaaaggagtgaatagtttcttccatttgcactttcattctaatgaccaggcacttctttttattactttgtctattctctaatcctcacatgaatataaagtccaagcctttggaaaccaaatgataaagtgtagctggactttttgaccattatcttcattcctatctgtctccaataggtaaatggatttgggaccaaaatataagccttagaaaccaaaacaaatgaggcattagcaaagtaaaactttgcaaacctagacttacagattcttgagagacttcaaagctcaggatgaagggaaaagtttacttctgaggaaagtgagtagagaaggcatttgaaaaggtcacagcaggttctaatgcagaggcaaagccaagtttaatggcactccattcacactcagagaagatgtctacctgaatctatctagtcatcctttcattcattgattcattccagaaatatttactgaccactttctaggtgacctttgttgataacagtagtttcctgtcagtttaagggcagaagccaaatgagtcagtcactgcaaaaccacgaggggtaggagtttggaaggatactattacagtcaattcaaatgaaatctgttccttcttttatttaggaaatgccctccaatctccatatctataacttgacttgtcttttaaaattat

SEQ ID NO: 706543 - DNA, 1366 bp, Homo sapiens
agaaacatgcaagtatatttaatgcaatccgcaaatattccagccaagcatttaaagcattggtatttcaattaggttttccatttatttaatcawtttatatttattaagtacccactctgggctaggtgctgtgctaactgtgggtgcaaaacattcaacacaacaagcatgacctagaagacacgaaatacataaatgtgattagctttatgagaaaaagaaatgcagtgttctgtaggacagtgtcacagggaccaaccaaggctgcaggtacaggaagcaggggcaaaggaagtttccccaagagaatggacacccaaatgggacctgcaagatgtgggacagtcatccaggttgggaggggcagagtatggtaggtgggagaagtatttccagttgagggaattgcccaaagccctaaagggctggtggactaagggaggagagaatttttgagaaggtggcttgaagaggtaggcaggggttagatcatctaagagttcaaggaccattatatattttagaatttttgtgagagaagtgaaatggcctgaaaacataatattttcagtctattattctggtagctatgtggcgaatatattaaaggggtgaaattatttggagtgaggagacctaggaaaaattctatacagtgagagaggaggacttggactagaacaggggatgaggggaaaaagaaagttggacattttgagagagttttagaggctggaagcagcaggtcttggtgatcaatcttgtgggaggatgatgaagatgaggaaagaattagggaaacctccaggtttttggcttaaacattaaattattgccctaaaattaaacacaaagaaagcaaaagtaacatttcaggtttatactcctgtactactggaaaagaaacagtgtaggcaagaccaatcaggaaaagagacagtgtaggcaagaccaatcagaaagagagctggcatccctggaacgggacagagagtaaacagccgatatgtttcacagtgggaataataccagacctcaatgtctgcctttgaacaatttgcttcatctttttttcccatgtgcctttcctatgcttgctcttctcaacctattttgagatcttcaactgtttcagtctaaatccttctctccgtcacggtctgcatccaacaccatcccctcagcaaagtggctcctgatccctcctctaacaagtcctttctccttctcctgagctttcctggcatttgctccctactttggctgacaaggtcatccttactaacctgtcttatttaccccaccaaattgtaagccctttgaggcagaaattatgctctacagttgtttcgcagttgtaatc

SEQ ID NO: 706544 - DNA, 639 bp, Homo sapiens
aagtagataatgtctaaaattgatgatcaggaaatagcagtataagcatattatttagaattacagaattaaataccaaaagaaatagataaaagtgttaaaagtggttgcatttggggtacaaagccaaagaactgcttgtataagccttgtagtcttgatttcttaaaagctatgtttatgtcatattttgattagaataggaatatgttacaaaaaaagttcggggtattagtgtgctcataaaattgttaaggaaaaacatttcaactttgagaggctgaggtaagtgaattgcttgagcccaagagttcaagagcagcttgggcaacatggcggaaccctgtctttacaaaaaatacagaaaattagccaggtgtggtggtgcacacctgtaatcccaggtactcagaggctgaggtgtgaggatcacytgaacctgggaagtcaaggctgcagtgagccacgatcatgcatgccactgcactccaaccgagtgacagagtgagaccctgtctcaaaaaaaaaaaaaaaaaagcaaagcatttcagtgaatggtttgaatgctgcttattacaaggtgctgtcctggggcctttgagaaataccagagagaaaaaaacagatacctgcccagag

SEQ ID NO: 706545 - DNA, 803 bp, Homo sapiens
tataacaagacttcaaaatatataaaaatatataaaactaaaattgacagaattacagggagaaattggtaagttcactagaatagaaaatttcaacacatctcagagtctgagagatcaagtagaagacaaaagaatagtaaaatggaaaaaatttgaactacaaaattaacaactttggtctaatggacatccaacaactaaaaaacaagcatacttttcaagcaatcatgaaacatttacaraaacaggttataatctaggtcataaagcaaatctcaacaaatattaacagatcagtcttaacatgtacctattttctgtccacaattcaaattcaattaaaacaggaatcaataaacacagaatttaaaaatatacacgctaggaaatgggaaaaaaaagcctcatacatatgttagtcgagaaagaaatcataattaaaaattaaaaatacatagaacttaacaaatctttctatggtgctttaaaattataaaacattatttcatttgatcattgcaataatcctatgagctacatagaacccacaatatctctgctcaacagcacaaacacagcagaaatgttacaaactggctaggcacagtggctcatgcctgtaatcccagcactttgggaggctgaagtgggcagatcacttgaggtcaagagttcgagaccagcctggccaacatggtgaaaccccttctctactaaaaatataaaaattagctgggcatggttgtacatgcctgtaatatcagctactcaggaggctgaggaacaagaattgcttgaac

SEQ ID NO: 706546 - DNA, 803 bp, Homo sapiens
tataacaagacttcaaaatatataaaaatatataaaactaaaattgacagaattacagggagaaattggtaagttcactagaatagaaaatttcaacacatctcagagtctgagagatcaagtagaagacaaaagaatagtaaaatggaaaaaatttgaactacaaaattaacaactttggtctaatggacatccaacaactaaaaaacaagcatacttttcaagcaatcatgaaacatttacaaaaacaggttataatctaggtcataaagcaaatctcaacaaatattaacagatcagtcttaacatgtacctattttctgtccacaattcaaattcaattaaaacaggaatcaataaacacagaatttaaaaatatacacgctaggaaatgggaaaaaaaagcctcatacatatgttagtcgagaaagaaatcataattaaaaattaaaaatacatagaacttaacaaatctttctatggtgctttaaaattataaaacattatttcatttgatcattgcaataatcctatgagctacatagaacccacartatctctgctcaacagcacaaacacagcagaaatgttacaaactggctaggcacagtggctcatgcctgtaatcccagcactttgggaggctgaagtgggcagatcacttgaggtcaagagttcgagaccagcctggccaacatggtgaaaccccttctctactaaaaatataaaaattagctgggcatggttgtacatgcctgtaatatcagctactcaggaggctgaggaacaagaattgcttgaac

SEQ ID NO: 706547 - DNA, 596 bp, Homo sapiens
tggcacccttctttaaatatccaatcagaatgccagtagaaacttctttcttctgatataagagtgccactgaatatattgctaagcttgaagcagaggctaaacggtctggtgggaatagttttcaggagagaggtgaacatcttctcattagtttgtgattgttgtggttcaagttcttaaaaggttgaaaatttcgctaggtccttctccatctcagcatattgttctttaagcctttccatggcttttctgtgctcttcatccacttcagcccttttgttgggttgctccttcatgaagttgtcccactggagcatatgctgtttctcactagctactaagtggtcactatgaatctgagaaaagaaaattagaaagtcacaygacattttccagacaattatttcataacgttatctcttgatacttggttaccgtaacaatcagctggtaagtcacaaggaaaaagttgtgttataatatccaaaaaaagatgacacattagaaacatctaaggcttctctcattaaaattaaacatggatattctcatttcttaaattttaaaagtgggctgggcacagtggctaatgc

SEQ ID NO: 706548 - DNA, 596 bp, Homo sapiens
tggcacccttctttaaatatccaatcagaatgccagtagaaacttctttcttctgatataagagtgccactgaatatattgctaagcttgaagcagaggctaaacggtctggtgggaatagttttcaggagagaggtgaacatcttctcattagtttgtgattgttgtggttcaagttcttaaaaggttgaaaatttcgctaggtccttctccatctcagcatattgttctttaagcctttccatggcttttctgtgctcttcatccacttcagcccttttgttgggttgctccttcatgaagttgtcccactggagcatatgctgtttctcactagctactaagtggtcactatgaatctgagaaaagaaaattagaaagtcacacgacattttccagacaattatttcataacgttatctcttgatacttggttacygtaacaatcagctggtaagtcacaaggaaaaagttgtgttataatatccaaaaaaagatgacacattagaaacatctaaggcttctctcattaaaattaaacatggatattctcatttcttaaattttaaaagtgggctgggcacagtggctaatgc

SEQ ID NO: 706549 - DNA, 975 bp, Homo sapiens
gaagttcttacagtcactccaygctatcgtttcctagtttcccacttgtaatagtaactgctaggcattcttacttttttttttttttttgagatggagtttccctcctgttgcccaggctggagtgcaatggcacaatcttagctcactgcaacctctgcctcccgggttcaagcaattctcatgcctcagcctctcaagtagctgggattacaggcaaccaccaccacacctggacaatttttgtatttttagtaaagacaaggtttcaccacactggccaggctggtcttgaactcctgacctcaggtgatccgcccacctccgcctcccaaagtgctgggattacaggcatgagccaccggcgcccggcccattcttacattctttacaacaatcagtaaagaaaaaagggggggggggcgcctatacattcatgtattgacaatactgcagtctttacatacaaataaaacccagctacctggaaataacatttatctgaaccttagttgagaatgtgctaagacctttaagtcatgcaaacgaagaagatgctacaaagtccatttacaaatactgcacatgaaaagcccttctgattccgagcctacttgacctacattacatacaattctaaccagcttagttaactggtttctaagacgacaccctatgaaaaagtcacaagttagaaaatgaaaaggctgataataagggaagaataacaggcatcagccttatagcaaaagaggaggcagatacaaaaacttaaaacacacagtatctgagggcagttggtacagaaacatagcacagtgtctctctttctcattccctaatgacatcaccatattcaccataatataaaatctgatattctcagtaacgcctgattcctacaaaattattctgtaacatttaataaattttttaaataacataaaagtatagaatatctttttaaagatttcc

SEQ ID NO: 706550 - DNA, 621 bp, Homo sapiens
cccagtgttatgggagcactggggaaggagtcaggctgcttcccaggggaggcggcacttgccctgagaggggaaggttagataagagtggggatggataaggaagcagggaagatgttttggtcattgggaccagcagtgcaaaggccctgaggtgagcccagcatcttctggtccatgtctcgctgggaggcagccagccaagtccgcggtgaatgcagccctgccccctcttctaggcagatgtggctggtgggtgctatgttggatgagactggtgtagagggctggtggtggggcaggggtgtggcaggaggcccagtcagggcccagatggctcctgagtgggtggtggggtctggctgcccagagcatccggtctgccttctccgcttggcctctgcccgtcagcttgttggttgccatgtctgtgtctgcttctccscagcatggctcactctttcggggagagctaccgggtgggcagcacctctggcatccacgccatcaccgtcttctgctcctgggactacaaggtgacgcagaagcgggcctcccgcctccagcaggacaatattcgcacccggctgaaggtgagtggccccggagcaccaagctggc

SEQ ID NO: 706551 - DNA, 590 bp, Homo sapiens
tgaggctatatttctccatactttattaatacgtcaaaaggttagaaatgtgaattccaggatgcctatgttgtattgaatgaaatgaaaatttctagtgtccagaccactgtacctgctytttaaattgccaatcctcactgtaagtccttggtcataattgctgaagatattgatagagaagctcgaagtacattcatttttaataggctaaaagttggtcttcagatcatagcagtcaaagctccagattttggtgacaacagaaagaaccaacgtgaagatacagctattgctactggtggtctggtgtttagtgaagaggggttagccctaaattttgaagctatttagcctcgtaacttagaaaaagttggagaggtcattttgaccaaatatgatgctatgcttttaaaaggaaaatgtttttccttttaaggctcaaattgaaaaatatattcaagaaatcgttgagcagttagatgttacaactagtgaatatgaaaaggaaaaactgaatgtatgtctggcaaaactttcagatggagtagcagtgctgaaggctggtgggacaagtgatgtcaaagtga

SEQ ID NO: 706552 - DNA, 662 bp, Homo sapiens
tattttaactgtaagtaggagaagacatctgaaatttaactatgatcagaaattcagattacaaaaactttgtttgctgtgctgtttgtaataaaataattccaccagccccttttggaaaaaccttcaaacggatccatgaatacaagccacttaagacacgcttttacactcacaaagacatactaggtaagtgactttatcgttttcctttgttctaatgcttcatagccttatgtgtcattctttctgttacatagacttttatcagcttttttctcttcagagttgcttgtccctacagggatatttgaggagaatatgggttggaatacagcttctccacttacagttgtatgtattgggcagggtatttagcctctcaatctgtttccttatgtggaaataaatatactaatacctatcttacaggttgttatgagactttaatgaagtatttgtatctattataaatcctggcacataayagtaaatgtgagttcattttgcccttggccatacttgagcacctttcagtatgtgtaggagaggaaatattatctctaaataacaccctaattggatgggcacagtggctcacacctgtaatcccagcactttgggtggtcgaggtgggcagatcacttgaggccaagagttca

SEQ ID NO: 706553 - DNA, 662 bp, Homo sapiens
tattttaactgtaagtaggagaagacatctgaaatttaactatgatcagaaattcagattacaaaaactttgtttgctgtgctgtttgtaataaaataattccaccagccccttttggaaaaaccttcaaacggatccatgaatacaagccacttaagacacgcttttacactcacaaagacatactaggtaagtgactttatcgttttcctttgttctaatgcttcatagccttatgtgtcattctttctgttacatagacttttatcagcttttttctcttcagagttgcttgtccctacagggatatttgaggagaatatgggttggaatacagcttctccacttacagttgtatgtattgggcagggtatttagcctctcaatctgtttccttatgtggaaataaatatactaatacctatcttacaggttgttatgagactttaatgaagtatttgtatctattataaatcctggcacataatagtaaatgtgagttcattttgcccttggccatacttgagcacctttcagtatgtgtaggagaggaaatattatctctaaataayaccctaattggatgggcacagtggctcacacctgtaatcccagcactttgggtggtcgaggtgggcagatcacttgaggccaagagttca

SEQ ID NO: 706554 - DNA, 1177 bp, Homo sapiens
gaaaaagtttgccaacccctggtatagagaaatgttcataaaatgataggtgtaaagggcagaacattaaaaaaaaaacccaacatgcttacagatattatgactgcaatttcyttccagctagtttcgatcagccgcttatgttattccatttgatgatggctgatgagtgtcactgcttcctgtgcttcagtcactgccctgcctacctcctgtgcactgacaacccaggggtgcatcaggtaaccctaccttcaagaagttcacagtttaggcaactggtataaaatattactggagagaaaatagaacttatttataccaatttctttgaaaagaaagcagaaactagaaaattacgaagagtacactttatcatgaagaactataaaaatgaattctaatgatagaactataaggagaaattataaaatccaaattttatattatgtgctctatcaaaaaaagatgaaaaataaatgattagaacaaaatacactctgtttaaatgtgtgtgtatgtatctatttatctatctatagtgtatacatacacacaaataaataattctatatgtagaatgagaaaatatctattatttttcatggtatatggaactctaatatgtgttaggttccaaagtgtattacatacaacacatttcaaagaatcaatataacacagcccaagttctctgattacaatgcaattaaaattttaaatcaacaataaaagtatcatcaatgctcctttcctttaatatgcttggaaatataatgggccaaaagtggaatcaaaattaatttttgaaaattatgtaaatttagaataaattagaaatcagtatactgtatatcacaacttttgtgaaaagctaaattaatatttaagacaaatgcatagctttactgaatttattttaataagaatttaaaataaattgatatgattgaaaatttgtaaacaacttgttaacattaatgcaagaattaagcaagtttgttttaacaagattaatattcaagaaagttgtttcttatttaccaataatagccaattactaaaaaaactaacaaaaacattatattaacaatagcaacacttctgtaagatacagtaataatctatcaaaagatgtgtcacatatgaaaataattacaaaagtgccattgaagtg

SEQ ID NO: 706555 - DNA, 656 bp, Homo sapiens
tgttacatgtattcaggactttttcatgtaatattatatgctaatattcagcctttagttatgagtcacaatagttcagcaattttgactgatgtctaatatttcattgtgtgactatatctaatattccatttatttatccactctcactgacatgaaatgtttttgttcttatagttctgtaaccgtgagcagtgcagctatagtctgtctgtatatgtgcaagaatttctttcaagaatattcctagaaatagttatcaaggttattgatttactaagatctccactttagaaagcagtagcaaaatggatttcaaagcatttgcaccaatttttcctttctcagttatacagagaagattctgcagattccatcatatccatcacctgcaatgttcaaaatcgccaatygaaagtataaaaaatatgactttgtggtcttggctcaccaagtatgctgatcagatctttatacgtttatcgaccttattgttcacatgtttgcctgtttttcaaaatttattggatttttatactacttctctattagatggttatcttaaatatcttctcttagtttataacctttcttttcacttatttaaggtgtttgtggattaattttaataaggtaaaattttttgccattagttt

SEQ ID NO: 706556 - DNA, 656 bp, Homo sapiens
tgttacatgtattcaggactttttcatgtaatattatatgctaatattcagcctttagttatgagtcacaatagttcagcaattttgactgatgtctaatatttcattgtgtgactatatctaatattccatttatttatccactctcactgacatgaaatgtttttgttcttatagttctgtaaccgtgagcagtgcagctatagtctgtctgtatatgtgcaagaatttctttcaagaatattcctagaaatagttatcaaggttattgatttactaagatctccactttagaaagcagtagcaaaatggatttcaaagcatttgcaccaatttttcctttctcagttatacagagaagattctgcagattccatcatatccatcacctgcaatgttcaaaatcgccaatcgaaagtataaaaaatatgactttgtggtcttggctcaccaagtatgctgawcagatctttatacgtttatcgaccttattgttcacatgtttgcctgtttttcaaaatttattggatttttatactacttctctattagatggttatcttaaatatcttctcttagtttataacctttcttttcacttatttaaggtgtttgtggattaattttaataaggtaaaattttttgccattagttt

SEQ ID NO: 706557 - DNA, 656 bp, Homo sapiens
tgttacatgtattcaggactttttcatgtaatattatatgctaatattcagcctttagttatgagtcacaatagttcagcaattttgactgatgtctaatatttcattgtgtgactatatctaatattccatttatttatccactctcactgacatgaaatgtttttgttcttatagttctgtaaccgtgagcagtgcagctatagtctgtctgtatatgtgcaagaatttctttcaagaatattcctagaaatagttatcaaggttattgatttactaagatctccactttagaaagcagtagcaaaatggatttcaaagcatttgcaccaatttttcctttctcagttatacagagaagattctgcagattccatcatatccatcacctgcaatgttcaaaatcgccaatcgaaagtataaaaaatatgactttgtggtcttggctcaccaagtatgctgatcagatctttatacgtttatcgaccttattgttcacatgtttgcctgtttttcaaaatttattggatttttatactacttctctattagatggttatcttaaatatcttctcttagtttataacctttcttttcacttatttaaggtgtttktggattaattttaataaggtaaaattttttgccattagttt

SEQ ID NO: 706558 - DNA, 620 bp, Homo sapiens
atcgtgggcataattcctggcctccacacctacttggaagttttttgagttttaaaagaagaaaaaatataaaaagtattgaaaattttataaatacaagtatgattactattccacagggatttactttatctcaccccatcacaactctcagccttttcagagaaatatcaggatatatttacagcattaacgttcttgctagatcataagaagatttttataaagattttaagaagatatatatttgtgtgtatatacacacatatatgtatatataaaaccttaacagatggtagtctttggtaaggaatcagttaaaatatgatagaatgcaaactgtgcttttttaaatttcaaacatgtaataactatcttaacagtaaagattcattgtattctaatatttaataacatttataaggacttctttatattgcttcaatgaaacaatggttaatccatacattaaagattcaattatattatattatgtccttaatccccatttgaggtgtaaatttyctatcactaagaccatttaacatttttaagaaatgcttgattatttgacaaccaagggagcagtagttgtaatacaatgaccacattttccaaag

SEQ ID NO: 706559 - DNA, 620 bp, Homo sapiens
atcgtgggcataattcctggcctccacacctacttggaagttttttgagttttaaaagaagaaaaaatataaaaagtattgaaaattttataaatacaagtatgattactattccacagggatttactttatctcaccccatcacaactctcagccttttcagagaaatatcaggatatatttacagcattaacgttcttgctagatcataagaagatttttataaagattttaagaagatatatatttgtgtgtatatacacacatatatgtatatataaaaccttaacagatggtagtctttggtaaggaatcagttaaaatatgatagaatgcaaactgtgcttttttaaatttcaaacatgtaataactatcttaacagtaaagattcattgtattctaatatttaataacatttataaggacttctttatattgcttcaatgaaacaatggttaatccatacattaaagattcaattatattatattatgtccttaatccccatttgaggtgtaaattttctatcactaagaccatttaacatttttaagaaatgcttgattatttgacaaccaaggsagcagtagttgtaatacaatgaccacattttccaaag

SEQ ID NO: 706560 - DNA, 620 bp, Homo sapiens
atcgtgggcataattcctggcctccacacctacttggaagttttttgagttttaaaagaagaaaaaatataaaaagtattgaaaattttataaatacaagtatgattactattccacagggatttactttatctcaccccatcacaactctcagccttttcagagaaatatcaggatatatttacagcattaacgttcttgctagatcataagaagatttttataaagattttaagaagatatatatttgtgtgtatatacacacatatatgtatatataaaaccttaacagatggtagtctttggtaaggaatcagttaaaatatgatagaatgcaaactgtgcttttttaaatttcaaacatgtaataactatcttaacagtaaagattcattgtattctaatatttaataacatttataaggacttctttatattgcttcaatgaaacaatggttaatccatacattaaagattcaattatattatattatgtccttaatccccatttgaggtgtaaattttctatcactaagaccatttaacatttttaagaaatgcttgattatttgacaaccaagggagcagtagytgtaatacaatgaccacattttccaaag

SEQ ID NO: 706561 - DNA, 832 bp, Homo sapiens
taagtttattttttaatttttattttttgtgggtacatagtaggtatatatatttatgggatacatgagatgttttgatacaggcatgcaatgtgaaataagcrgtatccatcccatcaagcatttctcctttgtgttataaacaattcaattactctcttttagttatttttaaatgtacaattcagttattacagactgtagtcaccctgttatgctatgaaacagtaggtcttattcattctaactacttttcgtacccatcaaccatccccatctcctccccagcccccgactactcttcccagcctctggtaaccgtccttctactctctatgtccatgagttcaattgttttgatttttagatcccacaaataagtgggaatatgcaatgttctgtgcctggcttatttcacttattcagaaagacagctgagtgtcctctacacccttgcccaagcaactgctagctatttatttatttatttatttatttatttatttatttattcatatattcatatttatttttctttccttccttccttctttctatgttcttttttctttttcccttcttcctttctttcttccttccttccttcctttttctttctttctttcttcctttctctgtctctccctccctccctctctccttccttccttccttctttccttccttccttctctctctctctctccttctttctcttttttcttgttttcattcttcctagaatgaagattctattactgaagaagccaccacttgcaaccctgagacaaccacgagcagaagctactcagatccagaccacaggctgttt

SEQ ID NO: 706562 - DNA, 832 bp, Homo sapiens
taagtttattttttaatttttattttttgtgggtacatagtaggtatatatatttatgggatacatgagatgttttgatacaggcatgcaatgtgaaataagcagtatccatcccatcaagcatttctcctttgtgttataaacaattcaattactctcttttagttatttttaaatgtacaattcagttattacagactgtagtcaccctgttatgctatgaaacagtaggtcttattcattctaactacttttcgtacccatcaaccatccccatctcctccccagcccccgactactcttcccagcctctggtaaccgtccttctactctctatgtccatgagttcaattgttttgatttttagatcccacaaataagtgggaatatgcaatgttctgtgcctggcttatttcacttattcagaaagacagctgagtgtcctctacacccttgcccaagcaactgctagctakttatttatttatttatttatttatttatttatttattcatatattcatatttatttttctttccttccttccttctttctatgttcttttttctttttcccttcttcctttctttcttccttccttccttcctttttctttctttctttcttcctttctctgtctctccctccctccctctctccttccttccttccttctttccttccttccttctctctctctctctccttctttctcttttttcttgttttcattcttcctagaatgaagattctattactgaagaagccaccacttgcaaccctgagacaaccacgagcagaagctactcagatccagaccacaggctgttt

SEQ ID NO: 706563 - DNA, 832 bp, Homo sapiens
taagtttattttttaatttttattttttgtgggtacatagtaggtatatatatttatgggatacatgagatgttttgatacaggcatgcaatgtgaaataagcagtatccatcccatcaagcatttctcctttgtgttataaacaattcaattactctcttttagttatttttaaatgtacaattcagttattacagactgtagtcaccctgttatgctatgaaacagtaggtcttattcattctaactacttttcgtacccatcaaccatccccatctcctccccagcccccgactactcttcccagcctctggtaaccgtccttctactctctatgtccatgagttcaattgttttgatttttagatcccacaaataagtgggaatatgcaatgttctgtgcctggcttatttcacttattcagaaagacagctgagtgtcctctacacccttgcccaagcaactgctagctatytatttatttatttatttatttatttatttatttattcatatattcatatttatttttctttccttccttccttctttctatgttcttttttctttttcccttcttcctttctttcttccttccttccttcctttttctttctttctttcttcctttctctgtctctccctccctccctctctccttccttccttccttctttccttccttccttctctctctctctctccttctttctcttttttcttgttttcattcttcctagaatgaagattctattactgaagaagccaccacttgcaaccctgagacaaccacgagcagaagctactcagatccagaccacaggctgttt

SEQ ID NO: 706564 - DNA, 1095 bp, Homo sapiens
ccccccycccccattgcctggttggtgtgaatgtcacctcattatcacacaccagccaaacttgccaggcaatgccgtgacgggaaccctcctaacatcccttggccccccacaaagcctcaagtgccatgaggtggcctcccccagcccaccacagcccagatgttccccaggatctgcagtgaggagcatggagggtcctggtgcaccccattatcactgcactggtaaacaacagcagcaatgacatcagtctgcaaaaccaacacatgcatatttcatctatataaacagtgcatataatatgacatttcttttcaaaactctctaactgctcagaaattcaaatgagagcctgtaccacccttggactggagactaatgagggcatcataaatatttgattaaagccaggccaaattcttgggattttcacctcacaaaattttcaggagcaactgctcgaagatttcttgaatatcataaggactttggggagacagcaaaaggcagcttccttctcaagaaattttccaaatgcttctgctgttgcatagatgggtggctgatatttctcttgaatattgttgggcatgcagatccctctgagctttaaaatcatctcttgccttggcctcttggtcaatgggcttgtgtttgtcattaagaggcaatgagacggggaaagagtacgaatcagacaacatggctcgtaggttcactagcccaatttctggctgtcagcctgggaagaggggttgagcattccttggccccagtgttttcctctataaatgatgagaaaataaatggttggcaaagcaacaacagcttttgcatactagaaattgataaagaaaatgtagtagattgggaatactagttaacatgccaggctaaacagcctgatcacctcagggaattctgtgttgaaactctccagacaatactattgatcagattacaaaatggaaaaccccatttgcaaagtcatctgtctcaaaagatttaattatgtttataactttagtcctgtagatcacacttttaatagaaatgaaataatgcaaactatggagaaaataattatttgga

SEQ ID NO: 706565 - DNA, 1095 bp, Homo sapiens
cccccctcccccattgcctggttggtgtgaatgtcacctcattatcacacaccagccaaacttgccaggcaatgccrtgacgggaaccctcctaacatcccttggccccccacaaagcctcaagtgccatgaggtggcctcccccagcccaccacagcccagatgttccccaggatctgcagtgaggagcatggagggtcctggtgcaccccattatcactgcactggtaaacaacagcagcaatgacatcagtctgcaaaaccaacacatgcatatttcatctatataaacagtgcatataatatgacatttcttttcaaaactctctaactgctcagaaattcaaatgagagcctgtaccacccttggactggagactaatgagggcatcataaatatttgattaaagccaggccaaattcttgggattttcacctcacaaaattttcaggagcaactgctcgaagatttcttgaatatcataaggactttggggagacagcaaaaggcagcttccttctcaagaaattttccaaatgcttctgctgttgcatagatgggtggctgatatttctcttgaatattgttgggcatgcagatccctctgagctttaaaatcatctcttgccttggcctcttggtcaatgggcttgtgtttgtcattaagaggcaatgagacggggaaagagtacgaatcagacaacatggctcgtaggttcactagcccaatttctggctgtcagcctgggaagaggggttgagcattccttggccccagtgttttcctctataaatgatgagaaaataaatggttggcaaagcaacaacagcttttgcatactagaaattgataaagaaaatgtagtagattgggaatactagttaacatgccaggctaaacagcctgatcacctcagggaattctgtgttgaaactctccagacaatactattgatcagattacaaaatggaaaaccccatttgcaaagtcatctgtctcaaaagatttaattatgtttataactttagtcctgtagatcacacttttaatagaaatgaaataatgcaaactatggagaaaataattatttgga

SEQ ID NO: 706566 - DNA, 1095 bp, Homo sapiens
cccccctcccccattgcctggttggtgtgaatgtcacctcattatcacacaccagccaaacttgccaggcaatgccgtgacgggaaccctcctaacatcccttggccccccacaaagcctcaagtgccatgaggtggcctcccccagcccaccacagcccagatgttccccaggatctgcagtgaggagcatggagggtcctggtgcaccccattatcactgcactggtaaacaacagcagcaatgacatcagtctgcaaaaccaacacatgcatatttcatctatataaacagtgcatataatatgacatttcttttcaaaactctctaactgctcagaaattcaaatgagagcctgtaccacccttggactggagactaatgagggcatcataaatatttgattaaagccaggccarattcttgggattttcacctcacaaaattttcaggagcaactgctcgaagatttcttgaatatcataaggactttggggagacagcaaaaggcagcttccttctcaagaaattttccaaatgcttctgctgttgcatagatgggtggctgatatttctcttgaatattgttgggcatgcagatccctctgagctttaaaatcatctcttgccttggcctcttggtcaatgggcttgtgtttgtcattaagaggcaatgagacggggaaagagtacgaatcagacaacatggctcgtaggttcactagcccaatttctggctgtcagcctgggaagaggggttgagcattccttggccccagtgttttcctctataaatgatgagaaaataaatggttggcaaagcaacaacagcttttgcatactagaaattgataaagaaaatgtagtagattgggaatactagttaacatgccaggctaaacagcctgatcacctcagggaattctgtgttgaaactctccagacaatactattgatcagattacaaaatggaaaaccccatttgcaaagtcatctgtctcaaaagatttaattatgtttataactttagtcctgtagatcacacttttaatagaaatgaaataatgcaaactatggagaaaataattatttgga

SEQ ID NO: 706567 - DNA, 1704 bp, Homo sapiens
ttagtttatcccttgagcaagtcagtaggtctagcattgtactacacagtagtccccacatgatgaatggtcttcctaaacccttgggaagttcttgggctcagtccagaactgtcgctctgatgcctcctccactccactatccagaccaacgctggtctgggaccccagtgggtacctctccatctcttctgttcccagatctgataactcacccagggattgtctctgactttccagtcttgttatcttgatagcaagattgattcagtggcttcctctacctgcttcaatgccaccaaatattatatctgaactagtccagccccccagatctcacatcatggtgcagagtgtcacaagtgttgtacccctagattaaccataacagtgtggcaggaatctaaacaattccttccagataaataaggaggtaccaagatggagagtttcatagcatctgtattctttataaataaggtcaaatacaggtaaacttttggaagtgatctattatagtctatttctagctgggctaatggcgggagggggtgggatgagctgtgtagtggactttggctggacattcagtactccagttacctactgttgcataacaaagactccaaaactcagtggcttaatacaacgatttactgtgactacaactcatgagtctgtgagtcaagaatttggaacatatatacacaggaaatatgtagaaaaaatatataatactattataatatcttttcaagtcttatcaaagtcttacctcctgaagttataattagattagagagaataaaaatcttaactcagattatattaattagcatgtggaaatagactctacagcttagcaacagtacagatcaccagctaacatgcatgttgataacaagatttgtccatcagattacatagggttgttccagaaaccagccctgcattattcaaggaatccagaaaaaataggcaatggaattatgctgatttttaagtataattttccagtagtttaaaaagaataagtttttcatttaaaaagccagcgggatcagcaggcaaataagttctgttttagttggaaatcagtgggtgggaatataaagccacattttttttcctaaatggaactagagaagcaacagatctaacaagttgtaatcagccaaatttctttttttataaatatgtgagtaaggagttggagttctctttttacagtatatatgtttttaatccaacatagcagtaacaaatcacctttgctaatctcacctatgctcatttctttttgtgcacagaaacctttatttgggggaagtcaaaagaacttccttttaaaccttaagaatctatgaaaaatcagagatttaaaagaccaaaatagcccaaggcyatttgcatctgaaggtaaaggagtatgattatctaatagtatctctcctgtcctcctgcccacagggtcctaggctgggcagctcaggggcaccagctccctggactgaggctggaggtctgaaatggtcagttggaacgagttaagccaggggtcaggtaaaactggggacctgagaaaggaaactgggagtcagggaatgagaaagagtatcacccagtggcagcagaatatggatggaatgggttatattggccattgttgttcaccttcgtccaagagcttcacatttctggaca

SEQ ID NO: 706568 - DNA, 586 bp, Homo sapiens
ccacagcctcctcgaggatagcragcccgaattccacgcgggcgatgagccccgaagcgcgcggttgcctctgcccctcccgaaccgagaaggaaagaggggagagggaaacaggagtctgatggaggggagagaaatggaattccagaggcagcccacgggcagacacctgcaagaatggctgtgttctggccctgaagttcttaatagtgagggcccaggatagttcccttggggctgtgggaaaagagggaagttcacgctctcagatgttggaggaattggaagccggaggtgtgatttcttggcctccagcagaaacttggttacagtggccacgttctttctctctctgattgggggtttgctttggaaagttctcatgttcctggaggagctgtcctcccctcgcgtgctgataagggatgaaaagaagttctgctggcgtcccagaactgcaagggcaggcgaaagtttaagaatataaaggagtatcggaccttaaaaagaaacgcttaaagggtagggtagggagaggttaccagggtgtgccactgtgggaagaggctacaatatcgaatttttt

SEQ ID NO: 706569 - DNA, 1303 bp, Homo sapiens
tccggctgagttctcaccctgctaagcttccccaggagctcgagccattcggggaaacagccaggaggaccrgaatgagcaggtctgagccgtgagtcctcctcaatgtgcagggagcaccgaacggagccaagttgcccctggcctggaagccccaccagccctttcacctgtctttctctgctcagggcatttctgacatctggggtgctctgttgagaatcacagaaattctcagccgaaagtggtgctggcttgctgaggcaggcagcctggggtacgttccactctctgtggaaaagtcagagtgctccctgctttcttcatcggtgctcatcccaaccaagccatccagagtggtggttccttcagaggcttgtgttctgggagcatgactgttgggatggaacagtgtctggagaggaacctgccatcccagtcagcgagcctgagtttaaaccagacatgaacagacacatttatcagagaatcccctggcctcccagggcctaatgagaccttcagggcacctccagtcctggaaacacaagcaaacagtggcccctctctgaaaacagctcccttctgtggctgtccctggtgcctgtccctggagagtctctcaactgtgactcagaaatcagctccctgatgtgtgaccaggcccaggattgcaggcaaagagagaaggtgcatgtttccgagacccaaacaatatctgatgagtggggagtaagcccgggctgtgaaactgcatccttggggtccagatcttgggtcttgtacatagtagctatgtgtctttgaagcaatccctgaacctctccaagtctcagttttctggtttgtaaagggtgtttgtaacactgcttcagggatcagagatgatttctgtaagtgattgagataatttcattatatttaccaagctcagctgatattgagagattttcatctcgaagtttccttctctgaactctgagtgtcaacagcctttgttcttggcttggtttttggactcctgattgttaagccttagccgatggactctggggaagttggtttgtgggaatcatcatacttctgctgcttgcatctgcgtgcaatacaacagtccacttcaattatcttcacaactagcatccaacatttaatgtttatggtagagaatttggacagtagagaaaattgtagcctaaagaagaaaatggaaatagttcttttattgccctaaggaaacttctattagcttttttgaacgtatccattttccttacatttatcaggggaaaaaaaatgggtg

SEQ ID NO: 706570 - DNA, 1303 bp, Homo sapiens
tccggctgagttctcaccctgctaagcttccccaggagctcgagccattcggggaaacagccaggaggaccagaatgagcaggtctgagccgtgagtcctcctcaatgtgcagggagcaccgaacggagccaagttgcccctggcctggaagccccaccagccctttcacctgtctttctctgctcagggcatttctgacatctggggtgctctgttgagaatcacagaaattctcagccgaaagtggtgctggcttgctgaggcaggcagcctggggtacgttccactctctgtggaaaagtcagagtgctccctgctttcttcatcggtgctcatcccaaccaagccatccagagtggtggttccttcagaggcttgtgttctgggagcatgactgttgggatggaacagtgtctggagaggaacctgccatcccagtcagcgagcctgagtttaaaccagacatgaacagacacatttatcagagaatcccctggcctcccagggcctaatgagaccttcagggcacctccagtcctggamacacaagcaaacagtggcccctctctgaaaacagctcccttctgtggctgtccctggtgcctgtccctggagagtctctcaactgtgactcagaaatcagctccctgatgtgtgaccaggcccaggattgcaggcaaagagagaaggtgcatgtttccgagacccaaacaatatctgatgagtggggagtaagcccgggctgtgaaactgcatccttggggtccagatcttgggtcttgtacatagtagctatgtgtctttgaagcaatccctgaacctctccaagtctcagttttctggtttgtaaagggtgtttgtaacactgcttcagggatcagagatgatttctgtaagtgattgagataatttcattatatttaccaagctcagctgatattgagagattttcatctcgaagtttccttctctgaactctgagtgtcaacagcctttgttcttggcttggtttttggactcctgattgttaagccttagccgatggactctggggaagttggtttgtgggaatcatcatacttctgctgcttgcatctgcgtgcaatacaacagtccacttcaattatcttcacaactagcatccaacatttaatgtttatggtagagaatttggacagtagagaaaattgtagcctaaagaagaaaatggaaatagttcttttattgccctaaggaaacttctattagcttttttgaacgtatccattttccttacatttatcaggggaaaaaaaatgggtg

SEQ ID NO: 706571 - DNA, 1303 bp, Homo sapiens
tccggctgagttctcaccctgctaagcttccccaggagctcgagccattcggggaaacagccaggaggaccagaatgagcaggtctgagccgtgagtcctcctcaatgtgcagggagcaccgaacggagccaagttgcccctggcctggaagccccaccagccctttcacctgtctttctctgctcagggcatttctgacatctggggtgctctgttgagaatcacagaaattctcagccgaaagtggtgctggcttgctgaggcaggcagcctggggtacgttccactctctgtggaaaagtcagagtgctccctgctttcttcatcggtgctcatcccaaccaagccatccagagtggtggttccttcagaggcttgtgttctgggagcatgactgttgggatggaacagtgtctggagaggaacctgccatcccagtcagcgagcctgagtttaaaccagacatgaacagacacatttatcagagaatcccctggcctcccagggcctaatgagaccttcagggcacctccagtcctggaaacacaagcaaacagtggcccctctctgaaaacagctcccttctgtggctgtccctggtscctgtccctggagagtctctcaactgtgactcagaaatcagctccctgatgtgtgaccaggcccaggattgcaggcaaagagagaaggtgcatgtttccgagacccaaacaatatctgatgagtggggagtaagcccgggctgtgaaactgcatccttggggtccagatcttgggtcttgtacatagtagctatgtgtctttgaagcaatccctgaacctctccaagtctcagttttctggtttgtaaagggtgtttgtaacactgcttcagggatcagagatgatttctgtaagtgattgagataatttcattatatttaccaagctcagctgatattgagagattttcatctcgaagtttccttctctgaactctgagtgtcaacagcctttgttcttggcttggtttttggactcctgattgttaagccttagccgatggactctggggaagttggtttgtgggaatcatcatacttctgctgcttgcatctgcgtgcaatacaacagtccacttcaattatcttcacaactagcatccaacatttaatgtttatggtagagaatttggacagtagagaaaattgtagcctaaagaagaaaatggaaatagttcttttattgccctaaggaaacttctattagcttttttgaacgtatccattttccttacatttatcaggggaaaaaaaatgggtg

SEQ ID NO: 706572 - DNA, 1303 bp, Homo sapiens
tccggctgagttctcaccctgctaagcttccccaggagctcgagccattcggggaaacagccaggaggaccagaatgagcaggtctgagccgtgagtcctcctcaatgtgcagggagcaccgaacggagccaagttgcccctggcctggaagccccaccagccctttcacctgtctttctctgctcagggcatttctgacatctggggtgctctgttgagaatcacagaaattctcagccgaaagtggtgctggcttgctgaggcaggcagcctggggtacgttccactctctgtggaaaagtcagagtgctccctgctttcttcatcggtgctcatcccaaccaagccatccagagtggtggttccttcagaggcttgtgttctgggagcatgactgttgggatggaacagtgtctggagaggaacctgccatcccagtcagcgagcctgagtttaaaccagacatgaacagacacatttatcagagaatcccctggcctcccagggcctaatgagaccttcagggcacctccagtcctggaaacacaagcaaacagtggcccctctctgaaaacagctcccttctgtggctgtccctggtgcctgtccctggagagtctctcaactgtgactcagaaatcagctccctgatgtgtgaccaggcccaggattgcaggcaaagagagaaggtgcatgtttccgagacccaaacaatatctgatgagtggggagtaagcccgggctgtgaaactgcatccttggggtccagatcttgggtcttgtacatagtagctrtgtgtctttgaagcaatccctgaacctctccaagtctcagttttctggtttgtaaagggtgtttgtaacactgcttcagggatcagagatgatttctgtaagtgattgagataatttcattatatttaccaagctcagctgatattgagagattttcatctcgaagtttccttctctgaactctgagtgtcaacagcctttgttcttggcttggtttttggactcctgattgttaagccttagccgatggactctggggaagttggtttgtgggaatcatcatacttctgctgcttgcatctgcgtgcaatacaacagtccacttcaattatcttcacaactagcatccaacatttaatgtttatggtagagaatttggacagtagagaaaattgtagcctaaagaagaaaatggaaatagttcttttattgccctaaggaaacttctattagcttttttgaacgtatccattttccttacatttatcaggggaaaaaaaatgggtg

SEQ ID NO: 706573 - DNA, 2180 bp, Homo sapiens
tatcctaagaaaaagacgatttttgcaaccggcatttaaatttctaattctaatttgcaactggcatttaaaattctaattttcctggaaatctagatatgggattgggtgagggggactcatatctgttttattcctaacacaggcaactttcctgtatctataggaaagttcactgagatacaacagatacgaagtagttaggctggtatgtaactttgtattaagccctcttctcctccaaattctagacattagctcctgtttttgttgctagtctcttgctaagttaagctgctaatgaagctgctatatgagcagaactgactgcggaatttatattttaaaaagaactccagaatgtcctgatatataagggagcactagcctcttctcttgcacctacacttttctgactgggatccaagtgctagacatgatgagaatttccagctccagagtccttttggagtttcccagtaatacatctttccctattctttataagagcaaaaaataaatactacttggcaggcaaattcagaaagatggatgacctgtgctctcttctgtctacactataggcagcaaaattcttgtaattgaaattattctcccaataactttgtctagaattgatcaactgccacctgcctgttgatgaggtcacctgagggtttcagtggtagggtctctggggaagtacaaacgataagcatgctaacgtagccatttattactgcacagccttttatgacaacaccatacttatttttgcagtaatgtaatacattggactttggggatactagactgaaccccacacaaagaggagtaaaatttacaagctggtcactttatgttttgtttttaatttctctgacctaggattttcatactcaattcttacatgatataaaaaatgaagtaattctaatttagatatctcatctacttgtgatatagcaaattcacagaattgcacaaattagctattaaataattataccttttacaacatttgttttattgtgtatatctgggccaaatccatggcacacattccttcatgttcaatggaataatgtatatatatttctcatttacatttaaaaggatattagaaacttgagccagagtttgataaataaaattcagaatttaacagatttcttaagaaattcttaatttcactatttcatcataagcattttacacatttaaaagaaaaataactcagcaggctatttgaatgtgaaattttcactgacacattaaacagtagaatcaatagcacaagtaacacaagcttgtgttttgcacgcattacattggttggtgaccattatgttgttcttaataaaatttacaagttaataagctcgtctttcttattcacgttagttgctataacccctgcagtaaagatagcttcacatcatctaaagcaagcgtatttcttataatacttatttaatggtgcaattaaatctgcctttaatgatacattttacacctgtaagtttttggaaaacaaaggtttttgttatcaggaacagagtaagtagaagacaagttgtagtttttcatttatttattaatttgttttgttgtttaatcaagggagttgtttcagaattggacatatcttgaaaatatttagaaaaaaatctgggtggccttaacaaaagcagtgggaattcagaaaagttttgatgcatgtcctcatcactttttcttaaaagaaaaataattctaagatstttttatctattttctgattcttctttgatatgtagttttctcagtcttcattactttcatttgagatgctctcagctatcttaaattcatattggtgcttaataaatatagtaattgtggattatagccagcaagaaacttagctgtatggtcaaatataatgaagaaaaagacactcaaaatatactcacttttgtctgctaacttgtatttaacttccttaaatgaaatttcaaacccaaattttgactattttggtatttgcagaaaggaacgttaaataaaaatgagatttgccaatgaatccaggagctggtcttttgaaaagattaacaaaatagatagaccactagccagactaataaagaagaaaagagaaaagaatcaaagaggcacaataaaaaatgataaagggg

SEQ ID NO: 706574 - DNA, 1189 bp, Homo sapiens
attaaaacattagagaaatgagctaaagttatcatttataatgttaactgatccataaaggaatacagatgtgtatttgtgactgagataacagcaaatctgaaaatattaacacacaactacatgaaaatattttgatttaaatgtacactaattcctatctaataactcctgcttcatttctgaaacctaaatgctcaatattaataggagaaatatcaggatattaataaaaatcatgtgctaagttaccatcaaataatttctaaaatatgtcatatatgcatgttaatttaaatacgatcaaataatactaaaatatggactggaaaatggctttaaacattttcaatgggtattttgttcctttaggctgcaagaacaatatcttaattttctttacttakaaataaaatgttttgaataaatgctggtctaatatagtcgcatatatgaccatgtgatttttcacctttagttttctttctttcaactcagaatgtgaaaactttgtatcaagtagtctcacattgtaatggtactcaaggtacactgatgacataaggaaaacaaataataaatttcaaaagtcacaagtatttgtatgtgtgtattacaattcaaggaattagatgttatatatttaaatctataatgcataaacttcaacacgcaactgaggactgattcattttgtatgggggaaagggattatttttgtcagagactggtcaataatctaaagaaacatacggcataatatagacacattatatacttatcataatatagacacatcatatacttatagtctgtaaaagactttacttattttaaaaggtgttgtaaaagtctgtagcattttctagggctgaggacaaaaacaacaaaaaattaaaaaacccacttcacttctttccctataccagttgagggctctagggcagagttggggtcagcccaagaggtaatcagtactttttttcatcttggtgccctctagtttcttctttgacctgaagtagagattgctgtaactcagcaacttggaaagcctcttccgtctttccacaagctgagttggcaaggccaccaaaccccatacatggggagtattgattgaggcagctccaggaagtgggaactaagattggtgggaatagttctcctattgcttcacacacttatt

SEQ ID NO: 706575 - DNA, 1056 bp, Homo sapiens
tgcaatcccctaccattgagtgtgggcagagtctggggcttgttctaacccacagaatgtggcaaaggtgatgtgattgcattgcctaagattgtaaactccatcttataaggagactctttcccttgctggctttgacaaagtaagcgtccacattgggaagattcatggaacaaggaattgaggcagtcttaggtcaacagccagccaggaactcagaacagcttctggccaacagctcacaggagctgaaagatactaacagccacatgagcttggaaatggatttttccccggttaaacttcagagcttgaaacagcagcaccagcctataccttgactgtaaaccttgtgaaactctgaatcagagtagacagccaaaccatccctggactcctgacccacagaaactgacatcataaatactgacatcataaaaaataagacaataaatgtgttacaatattgttgcataaccatagctagctaatacaatggagaatttggagcttatcttaaaatcaatggcaagccagctgctaaatattgtcaagcaagaaagtggcttgacatctttcctttaggaaagaaaatctagggctaggcgcggtggctcacgcctgtaatcccagcactttaggaggccaaggcgggtggatcaggaggtcaggagatcgagaccatcttggttaacacggtgaaaccccgtctctactaaaaatacaaaaaaattagccaggcttggcggcaggtgcctgtagtcctggggaggctgaggcaggagaatggcatgaacccaagaggcggagcttgcagtgagccaagatcgcgccactgcactccagcctgggtgacagcaagactccatctcaaaaacaraaaaaaaaaagaagaagaagaaaaaagaaaatctaggaagcaatgtggagaataaataggatgggggaaaatgaaatgcataaaatacagcttggagattattgcaacagtctgagtgagaggtaaaaaagaaaactaaactggtaatacaaaaaatgaagagaaaatatttattt

SEQ ID NO: 706576 - DNA, 397 bp, Homo sapiens
tcattgaaagaaaagagccacaataacaaaaccctatttgtagagactcacctaaaaggaggagccatctggccatactgcttaccagacgtgtgctctatggaatcaaagccctggagacactcattcaaaaataggctcccagacttaattttgcttgacaaacacaatattttctgtctcactcttaaagatttacaatgcatatttgcatattaaaggctctaagaagtcccaaaggcaaagaaacacatctaacttggcttgatataaattttctgaaatatttgacsaaagaatctacttttgcagaataaaaaatagtagcttagtttaggacactctaaatatggcttttggaataaacaagaccatagcagagccatgttttatgatc

SEQ ID NO: 706577 - DNA, 1605 bp, Homo sapiens
gctgttcctggaagtcttaaactatttggtttgaatattttcagaattttatgagacacacacacacacacacacacacacacacacagagagacataccccatgaggatggcagagaagtgtagtaacacatagccaagatctaaagttaattacatgcaggcaggcctgattttttaagtgacacttcggtctgtccattgaacccaatgatttcattctagagttaaaagtagctttactgcagagcggtgagattgtcttgttattggcttttggaattgggacgttctgagttaagagaaaatgcagtctctgacgagcttgaatgataaattcttccagagcttatcatttagtttttattatggctctgtatatttgattgatttgtttcttatgtcttccagagagaagagaaattatttgagttaaaaccatagtaaatcgtatttctgtcaaaacaagattgttatgtacagttcaatttatacaaaataagagcctacaagtggtatttcacagtgaagagtcctaggatctgaggttctgaccttagtgtggctataaagctgtgaggataagttgtggttctcattgggcctcagctccctcatctgggaacagtgttggactagatgaactcagcggacacattcaactttggttctctgtgattgtaggctacttcggaaatggttgctacacacaagacaaaatagggattgagacaattattatttaagcctgaaaatctcttatacttctcttttcagttgtctactttggatatagccctattctgatttttttctgaaggattcaaatgcacaatttatcttgggttaatctctctttctaagcttgacttaaaaaaattttaagccattttcctcatttctttgtaaatcacaaaaccctactaccttttttttttgggggggkgggattgtgatggattttccatttatctatttttcaaggagttgtctttttttgttgataagtgaatttagttatcctccgtgacaattaaacaaagtaaactatgaatctatctaggtagaccacattatcacatttcagggaaaatagcatttgtttttttatttaatgttttatcacctctcccttttagccaacactgccaagtttcttatccgggatactgacagacccttggacaactcagttgagcttcagaaattcagtgattcattccagtgagcaaagctcttagctgactagaggtgtttggcctcttcacgaccataaacttcagccatagttttatttctggactgatgtgtctccatctgctcatatagattttaactggaaacaaagaaataaagccctcaatattataatattcagccgatatgttctcgtgtaagagtagaaaagaggaaaaaacgtatccattcaaaacgtttctctgctttccagaggtttctgaggggtttattaaaagcattcgcgaatgaaaggaaaatccagcaacagttggctgcgtgtttgtttctgtcatgttacagaaggttattaaagaggcagtgtaggttatccttgtccaaaccccaccatcttaaaaataaatttaaa

SEQ ID NO: 706578 - DNA, 1605 bp, Homo sapiens
gctgttcctggaagtcttaaactatttggtttgaatattttcagaattttatgagacacacacacacacacacacacacacacacacagagagacataccccatgaggatggcagagaagtgtagtaacacatagccaagatctaaagttaattacatgcaggcaggcctgattttttaagtgacacttcggtctgtccattgaacccaatgatttcattctagagttaaaagtagctttactgcagagcggtgagattgtcttgttattggcttttggaattgggacgttctgagttaagagaaaatgcagtctctgacgagcttgaatgataaattcttccagagcttatcatttagtttttattatggctctgtatatttgattgatttgtttcttatgtcttccagagagaagagaaattatttgagttaaaaccatagtaaatcgtatttctgtcaaaacaagattgttatgtacagttcaatttatacaaaataagagcctacaagtggtatttcacagtgaagagtcctaggatctgaggttctgaccttagtgtggctataaagctgtgaggataagttgtggttctcattgggcctcagctccctcatctgggaacagtgttggactagatgaactcagcggacacattcaactttggttctctgtgattgtaggctacttcggaaatggttgctacacacaagacaaaatagggattgagacaattattatttaagcctgaaaatctcttatacttctcttttcagttgtctactttggatatagccctattctgatttttttctgaaggattcaaatgcacaatttatcttgggttaatctctctttctaagcttgacttaaaaaaattttaagccattttcctcatttctttgtaaatcacaaaaccctactaccttttttttttgggggggggggattgtgatggattttccatttatctrtttttcaaggagttgtctttttttgttgataagtgaatttagttatcctccgtgacaattaaacaaagtaaactatgaatctatctaggtagaccacattatcacatttcagggaaaatagcatttgtttttttatttaatgttttatcacctctcccttttagccaacactgccaagtttcttatccgggatactgacagacccttggacaactcagttgagcttcagaaattcagtgattcattccagtgagcaaagctcttagctgactagaggtgtttggcctcttcacgaccataaacttcagccatagttttatttctggactgatgtgtctccatctgctcatatagattttaactggaaacaaagaaataaagccctcaatattataatattcagccgatatgttctcgtgtaagagtagaaaagaggaaaaaacgtatccattcaaaacgtttctctgctttccagaggtttctgaggggtttattaaaagcattcgcgaatgaaaggaaaatccagcaacagttggctgcgtgtttgtttctgtcatgttacagaaggttattaaagaggcagtgtaggttatccttgtccaaaccccaccatcttaaaaataaatttaaa

SEQ ID NO: 706579 - DNA, 1605 bp, Homo sapiens
gctgttcctggaagtcttaaactatttggtttgaatattttcagaattttatgagacacacacacacacacacacacacacacacacagagagacataccccatgaggatggcagagaagtgtagtaacacatagccaagatctaaagttaattacatgcaggcaggcctgattttttaagtgacacttcggtctgtccattgaacccaatgatttcattctagagttaaaagtagctttactgcagagcggtgagattgtcttgttattggcttttggaattgggacgttctgagttaagagaaaatgcagtctctgacgagcttgaatgataaattcttccagagcttatcatttagtttttattatggctctgtatatttgattgatttgtttcttatgtcttccagagagaagagaaattatttgagttaaaaccatagtaaatcgtatttctgtcaaaacaagattgttatgtacagttcaatttatacaaaataagagcctacaagtggtatttcacagtgaagagtcctaggatctgaggttctgaccttagtgtggctataaagctgtgaggataagttgtggttctcattgggcctcagctccctcatctgggaacagtgttggactagatgaactcagcggacacattcaactttggttctctgtgattgtaggctacttcggaaatggttgctacacacaagacaaaatagggattgagacaattattatttaagcctgaaaatctcttatacttctcttttcagttgtctactttggatatagccctattctgatttttttctgaaggattcaaatgcacaatttatcttgggttaatctctctttctaagcttgacttaaaaaaattttaagccattttcctcatttctttgtaaatcacaaaaccctactaccttttttttttgggggggggggattgtgatggattttccatttatctatttttcaaggagttgtctttttttgttgataagtgaatttagttatcctccgtgacaattaaacaaagtaaactatgaatctatctaggtagaccacaktatcacatttcagggaaaatagcatttgtttttttatttaatgttttatcacctctcccttttagccaacactgccaagtttcttatccgggatactgacagacccttggacaactcagttgagcttcagaaattcagtgattcattccagtgagcaaagctcttagctgactagaggtgtttggcctcttcacgaccataaacttcagccatagttttatttctggactgatgtgtctccatctgctcatatagattttaactggaaacaaagaaataaagccctcaatattataatattcagccgatatgttctcgtgtaagagtagaaaagaggaaaaaacgtatccattcaaaacgtttctctgctttccagaggtttctgaggggtttattaaaagcattcgcgaatgaaaggaaaatccagcaacagttggctgcgtgtttgtttctgtcatgttacagaaggttattaaagaggcagtgtaggttatccttgtccaaaccccaccatcttaaaaataaatttaaa

SEQ ID NO: 706580 - DNA, 1605 bp, Homo sapiens
gctgttcctggaagtcttaaactatttggtttgaatattttcagaattttatgagacacacacacacacacacacacacacacacacagagagacataccccatgaggatggcagagaagtgtagtaacacatagccaagatctaaagttaattacatgcaggcaggcctgattttttaagtgacacttcggtctgtccattgaacccaatgatttcattctagagttaaaagtagctttactgcagagcggtgagattgtcttgttattggcttttggaattgggacgttctgagttaagagaaaatgcagtctctgacgagcttgaatgataaattcttccagagcttatcatttagtttttattatggctctgtatatttgattgatttgtttcttatgtcttccagagagaagagaaattatttgagttaaaaccatagtaaatcgtatttctgtcaaaacaagattgttatgtacagttcaatttatacaaaataagagcctacaagtggtatttcacagtgaagagtcctaggatctgaggttctgaccttagtgtggctataaagctgtgaggataagttgtggttctcattgggcctcagctccctcatctgggaacagtgttggactagatgaactcagcggacacattcaactttggttctctgtgattgtaggctacttcggaaatggttgctacacacaagacaaaatagggattgagacaattattatttaagcctgaaaatctcttatacttctcttttcagttgtctactttggatatagccctattctgatttttttctgaaggattcaaatgcacaatttatcttgggttaatctctctttctaagcttgacttaaaaaaattttaagccattttcctcatttctttgtaaatcacaaaaccctactaccttttttttttgggggggggggattgtgatggattttccatttatctatttttcaaggagttgtctttttttgttgataagtgaatttagttatcctccgtgacaattaaacaaagtaaactatgaatctatctaggtagaccacattatcacatttcagggaaaatagcatttgtttttttatttaatgttttatcacctctcccttttagccaacactgccaagtttcttatccgggatactgacagacccttggacaactcagttgagcttcagaaattcagtgattcattccagtgagcaaagctcttagctgactagaggtgtttggcctcttcacgaccataaacttcagccatagttttatttctggactgatgtgtctccatctgctcatatagattttaactggaaacaaagaaataaagccctcratattataatattcagccgatatgttctcgtgtaagagtagaaaagaggaaaaaacgtatccattcaaaacgtttctctgctttccagaggtttctgaggggtttattaaaagcattcgcgaatgaaaggaaaatccagcaacagttggctgcgtgtttgtttctgtcatgttacagaaggttattaaagaggcagtgtaggttatccttgtccaaaccccaccatcttaaaaataaatttaaa

SEQ ID NO: 706581 - DNA, 1605 bp, Homo sapiens
gctgttcctggaagtcttaaactatttggtttgaatattttcagaattttatgagacacacacacacacacacacacacacacacacagagagacataccccatgaggatggcagagaagtgtagtaacacatagccaagatctaaagttaattacatgcaggcaggcctgattttttaagtgacacttcggtctgtccattgaacccaatgatttcattctagagttaaaagtagctttactgcagagcggtgagattgtcttgttattggcttttggaattgggacgttctgagttaagagaaaatgcagtctctgacgagcttgaatgataaattcttccagagcttatcatttagtttttattatggctctgtatatttgattgatttgtttcttatgtcttccagagagaagagaaattatttgagttaaaaccatagtaaatcgtatttctgtcaaaacaagattgttatgtacagttcaatttatacaaaataagagcctacaagtggtatttcacagtgaagagtcctaggatctgaggttctgaccttagtgtggctataaagctgtgaggataagttgtggttctcattgggcctcagctccctcatctgggaacagtgttggactagatgaactcagcggacacattcaactttggttctctgtgattgtaggctacttcggaaatggttgctacacacaagacaaaatagggattgagacaattattatttaagcctgaaaatctcttatacttctcttttcagttgtctactttggatatagccctattctgatttttttctgaaggattcaaatgcacaatttatcttgggttaatctctctttctaagcttgacttaaaaaaattttaagccattttcctcatttctttgtaaatcacaaaaccctactaccttttttttttgggggggggggattgtgatggattttccatttatctatttttcaaggagttgtctttttttgttgataagtgaatttagttatcctccgtgacaattaaacaaagtaaactatgaatctatctaggtagaccacattatcacatttcagggaaaatagcatttgtttttttatttaatgttttatcacctctcccttttagccaacactgccaagtttcttatccgggatactgacagacccttggacaactcagttgagcttcagaaattcagtgattcattccagtgagcaaagctcttagctgactagaggtgtttggcctcttcacgaccataaacttcagccatagttttatttctggactgatgtgtctccatctgctcatatagattttaactggaaacaaagaaataaagccctcaatattataatattcagccgatatgttctcgtgtaagagtagaaaagaggaaaaaasgtatccattcaaaacgtttctctgctttccagaggtttctgaggggtttattaaaagcattcgcgaatgaaaggaaaatccagcaacagttggctgcgtgtttgtttctgtcatgttacagaaggttattaaagaggcagtgtaggttatccttgtccaaaccccaccatcttaaaaataaatttaaa

SEQ ID NO: 706582 - DNA, 1125 bp, Homo sapiens
acttctcttatttcatgagagatcttactcacttccagagccacctgtcctactgttccaatcttcactgaatattaatcatggctgtcgtctgagatgaggtggcttttcacagttagtattactggcttcagcccaagaaagaagacttttgtgtgtgtgccagctcccagcctgaaagtttcctccagactcatttttgtagatgttcataaccctgatattaaaatgaaatgaaaaaaagagaaaaaaaaagttttctgttcaaacaggactacattctcatataatttcccaagaaagagtaagtagtcttgtgtggctcaaaatgtctgggtctaatttatttgatagttttgctgggtatacaatttttgactaaagatcactcttaaaaatttgaagttatggtgacatttctccccaggatccaaagtggttgatgagaagccctgtcaactcagcctctctcttgccctgattgtttttgtgagcctaaacacttttaaaaatccacttatgatcatttcagagaggccctagaagacaaatatcagtgatcattttgctttttttgactgaaaatatttatttttgtacctttttaattttatcttaatatcaggcttggatgaacctcctaaggtgcgttaggaagcagatgacaacttctaagtttgacctggcagaaaaaatgtttccttgttgtgctgaagcaaatgttgtaaacttactttgctactggtttcctttgccatgtatcagaacctctgattttcaccatggtttgagctttgcctccatccttggtgttggcaatccctttagctttaaactcatctcttcagtcagtcatctgacaaacgctaagctccttcagctcagccctctaccacactctatcccccctaccccagtgctgtgtttgaacataagaggacacaattgaccaacataaataattcagtagatcccatactctttagcttctgcaaatgaacgtgctatgtctgcttggtctttactaagatctaaatgaattcaggactaagcctttcaaaaacctactacaaaaacatcagtgaatagtataaactttamtaaatattccttgtgtgagatgga

SEQ ID NO: 706583 - DNA, 582 bp, Homo sapiens
cccttaaactctggttcagctccttctcacctcacagyaataaagtaaaagagacaatgcaattagggaattatctgtataacaacgggccgcttaaaaaatacccatggagatgtacaggataggatgaaaagctactgtacttgtcactttatttctttcaaatcctgaaactcttagtgtgtgtgtttgggcggagagagtgtaatgcaagtgaacagtggagattaagacaggagggagtaagacctggacatgatacaaggatgatgataatactttgctgctggttttgtaaacatattttcatagtaaaatatgccctctcaggaagcattgacagatggagtaaagtaaaacaatccactatacctgaaaaccctgcatagtgccagctggacccatttagaagctgtgaagaaatgtcagtcattattaagggtagtcctctgagatcagaaagcaggagattggtttgcaagtgcctcccctgcagggagtccggtaatacactccaagctgaacctgtgaccatcactcattaactctggtgctagtggatcattttgtgtaacaacattc

SEQ ID NO: 706584 - DNA, 582 bp, Homo sapiens
cccttaaactctggttcagctccttctcacctcacagcaataaagtaaaagagacaatgcaattagggaattatctgtataacaacgggccgcttaaaaaatacccatggagatgtacaggataggatgaaaagctactgtacttgkcactttatttctttcaaatcctgaaactcttagtgtgtgtgtttgggcggagagagtgtaatgcaagtgaacagtggagattaagacaggagggagtaagacctggacatgatacaaggatgatgataatactttgctgctggttttgtaaacatattttcatagtaaaatatgccctctcaggaagcattgacagatggagtaaagtaaaacaatccactatacctgaaaaccctgcatagtgccagctggacccatttagaagctgtgaagaaatgtcagtcattattaagggtagtcctctgagatcagaaagcaggagattggtttgcaagtgcctcccctgcagggagtccggtaatacactccaagctgaacctgtgaccatcactcattaactctggtgctagtggatcattttgtgtaacaacattc

SEQ ID NO: 706585 - DNA, 623 bp, Homo sapiens
tgaaggagattcaggaaatgaaactccaaccaggagactggtgaaagcaacccccaggatgaaaattatgcagcacctaggactggagaggaagacagaaaactcaggagtgatgtatccatgaatttgatatattttctcatgtgttttaatgctccaagaatgtgtggataaattgcagtaagtacatagaaaactgagtaaagaaaaaaaaaamccaaaaagtatacatgaatatttgtaatatatgtaatatacatgtatatacatgaatattatgtataatatatgtaatatacatgtatatacatgtaatatatgtaatatacatgtatatacatgtaatatatgtaatatacatgtacatacatgtaatatatacatgtgatatacatgtacatacattatatatacacaaatatatcatagtacatgcatggccaaactgtaagtaaaatctgcatagtcataagaatatatgttaatatttaacctataaagagtggaaaattatgtatgtgggggggaaggggcagaagtgtgtttttttttgttttttgtttgtttggttggttttttctttatctcctacaggaaagaagcagtgtgtttaagagagctaa

SEQ ID NO: 706586 - DNA, 623 bp, Homo sapiens
tgaaggagattcaggaaatgaaactccaaccaggagactggtgaaagcaacccccaggatgaaaattatgcagcacctaggactggagaggaagacagaaaactcaggagtgatgtatccatgaatttgatatattttctcatgtgttttaatgctccaagaatgtgtggataaattgcagtaagtacatagaaaactgagtaaagaaaaaaaaaaaccaaaaagtatacatgaatatttgtaatatatgtaatatacatgtatatacatgwatattatgtataatatatgtaatatacatgtatatacatgtaatatatgtaatatacatgtatatacatgtaatatatgtaatatacatgtacatacatgtaatatatacatgtgatatacatgtacatacattatatatacacaaatatatcatagtacatgcatggccaaactgtaagtaaaatctgcatagtcataagaatatatgttaatatttaacctataaagagtggaaaattatgtatgtgggggggaaggggcagaagtgtgtttttttttgttttttgtttgtttggttggttttttctttatctcctacaggaaagaagcagtgtgtttaagagagctaa

SEQ ID NO: 706587 - DNA, 623 bp, Homo sapiens
tgaaggagattcaggaaatgaaactccaaccaggagactggtgaaagcaacccccaggatgaaaattatgcagcacctaggactggagaggaagacagaaaactcaggagtgatgtatccatgaatttgatatattttctcatgtgttttaatgctccaagaatgtgtggataaattgcagtaagtacatagaaaactgagtaaagaaaaaaaaaaaccaaaaagtatacatgaatatttgtaatatatgtaatatacatgtatatacatgaatattatgtataatatatgtaatatacatgtatatacaygtaatatatgtaatatacatgtatatacatgtaatatatgtaatatacatgtacatacatgtaatatatacatgtgatatacatgtacatacattatatatacacaaatatatcatagtacatgcatggccaaactgtaagtaaaatctgcatagtcataagaatatatgttaatatttaacctataaagagtggaaaattatgtatgtgggggggaaggggcagaagtgtgtttttttttgttttttgtttgtttggttggttttttctttatctcctacaggaaagaagcagtgtgtttaagagagctaa

SEQ ID NO: 706588 - DNA, 2352 bp, Homo sapiens
caccaggaagtccttatcccctcttcacttcaggtttctcatctagaaagagggaattgaataaggtaacaaatgttatgtgctcaggtagtccctgacatatagtagatgtgaaaacaatgctatcatcagtttcccaggcattatcatagctttagccctctggactgcataatgaccttggaatcaaaagaatttggactgaacgacttttccatttttgtatctcaatgaactagagataatagaatgaagttaaactcaccattaaaggctaactcctaatatttttttatcttaaaaatggaaggaaagatgctatgagttcagatttattcctcttcaagcaaattgacaagtttttctatttctaaattaataaatggtagagtggacaattacaaaagaaagacaagctgggcagccacgcactggctggtgacttttgtgtaagttgctttactcctcccagccccagttctttcctctgcccartgggaaacttcaatcccttctttataggcaggtgtgggccctaaggaaatagttgctgagacacagatgtgaaagcattttgcaaactatggagtgctcaaacactcccaggatagtggtggtagcctctgcctccatgagaaccaagaagagcttgttaagaccctcgagtgaggctgcagcacatcaaagcccatagttgcttctggagagagtttgagaagggcccagggcagccttacatgctcccttttgctctgacctttagtaacatttccgaataaaactgtgacatgttgcttatgtttcagactaaagatgaagtaaaaacaggtcaggttgcccagacctaaacaaggagcagatggacaaaaattgcgtcactccctcccatctgtctcagtcctccaggagaaaccctggtgggcatcatccaaaactttggtcccccagacccctgatttctctaggctgagcaaagaagcagattctgggggcagattatggaggggcacagatatcggagacttggagacatatggtcctggatttgcattccagctctctcatagtttgtatatgaaagctgatcctatatcctggtttgcctagtacagtcccagttcagccctactgactctgtggaatgaatattagcatctcctttccctttcgaacgtgttcctgtttggatgagaaattgcaatgtcatcctgtagatatgtgacctttgctgcaatatcttttgaaccccagtttccacatctgaaaaatgggaatcatcatttacatatttcaagatcattgttgataatttacacatgatttaaatggaaatggaaattaaataagacataaagtctatttatttatttaaagacagggtctcactcttttccccaggctggagtgagtgctgggatcgtagctcactgcagccttgaactcctggactcaagggatcctccaacttcagcctgttgagcacttgggactacaggtgcttgtcgccacaccctgctttcttgttattgctgtttgttgagttgggggtctcactttgttgcccaggctaaagctggtaatttaatatcagcattgctctggtttatgcatctatcattttttttcttcaaagtattttaacaaactcttagctgattttgtgacctccagtccagtggttctcagatcttagggaacattagaatcacctgcaggtcttgtgaaaacaaactgatgggccgcactcccagattttctgattcagtgggtttgtggtggggtgagactgtgcatttctaacaagctcccaggtgaagctgtggtctgggaccacagtttgagaaccactgatccagtttctccccatccatccatctctatgcttctgccagaatgatcttttcgaaacactgatcagtccatactgcttacactgcttaaaaccttcaaatggctccctagtggcctcaagaaaaagcctacctccttaggtgggcactcgagacctcacccctcttacctgtcaccctgatctccaggcgcagtgctcggcttgctggcccaggtagctttccctccaagaggcaggctgcactagggaagggcacaggcatcagacaggcctgggtttgaattccagccctggcatgggctctctgctgtgactttaggcaagtaacttacctctcttgtgcatatgggaaaactgaggcttaacaagttcaagaattcttacctctatgtggagctggaaaagctaaatgaactgtctggggagcatgtgccatgcctgctccatggcaggtgatcctcagcctgatgtcttctcagggcctgtctgtttagtctcta

SEQ ID NO: 706589 - DNA, 2352 bp, Homo sapiens
caccaggaagtccttatcccctcttcacttcaggtttctcatctagaaagagggaattgaataaggtaacaaatgttatgtgctcaggtagtccctgacatatagtagatgtgaaaacaatgctatcatcagtttcccaggcattatcatagctttagccctctggactgcataatgaccttggaatcaaaagaatttggactgaacgacttttccatttttgtatctcaatgaactagagataatagaatgaagttaaactcaccattaaaggctaactcctaatatttttttatcttaaaaatggaaggaaagatgctatgagttcagatttattcctcttcaagcaaattgacaagtttttctatttctaaattaataaatggtagagtggacaattacaaaagaaagacaagctgggcagccacgcactggctggtgacttttgtgtaagttgctttactcctcccagccccagttctttcctctgcccaatgggaaacttcaatcccttctttataggcaggtgtgggccctaaggaaatagttgctgagacacagatgtgaaagcattttgcaaactatggagtgctcaaacactcccaggatagtggtggtagcctctgcctccatgagaaccaagaagagcttgttaagaccctcgagtgaggctgcagcacatcaaagcccatagttgcttctggagagagtttgagaagggcccagggcagccttacatgctcccttttgctctgacctttagtaacatttccgaataaaactgtgacatgttgcttatgtttcagactaaagatgaagtaaaaacaggtcaggttgcccagacctaaacaaggagcagatggacaaaaattgcgtcactccctcccatctgtctcartcctccaggagaaaccctggtgggcatcatccaaaactttggtcccccagacccctgatttctctaggctgagcaaagaagcagattctgggggcagattatggaggggcacagatatcggagacttggagacatatggtcctggatttgcattccagctctctcatagtttgtatatgaaagctgatcctatatcctggtttgcctagtacagtcccagttcagccctactgactctgtggaatgaatattagcatctcctttccctttcgaacgtgttcctgtttggatgagaaattgcaatgtcatcctgtagatatgtgacctttgctgcaatatcttttgaaccccagtttccacatctgaaaaatgggaatcatcatttacatatttcaagatcattgttgataatttacacatgatttaaatggaaatggaaattaaataagacataaagtctatttatttatttaaagacagggtctcactcttttccccaggctggagtgagtgctgggatcgtagctcactgcagccttgaactcctggactcaagggatcctccaacttcagcctgttgagcacttgggactacaggtgcttgtcgccacaccctgctttcttgttattgctgtttgttgagttgggggtctcactttgttgcccaggctaaagctggtaatttaatatcagcattgctctggtttatgcatctatcattttttttcttcaaagtattttaacaaactcttagctgattttgtgacctccagtccagtggttctcagatcttagggaacattagaatcacctgcaggtcttgtgaaaacaaactgatgggccgcactcccagattttctgattcagtgggtttgtggtggggtgagactgtgcatttctaacaagctcccaggtgaagctgtggtctgggaccacagtttgagaaccactgatccagtttctccccatccatccatctctatgcttctgccagaatgatcttttcgaaacactgatcagtccatactgcttacactgcttaaaaccttcaaatggctccctagtggcctcaagaaaaagcctacctccttaggtgggcactcgagacctcacccctcttacctgtcaccctgatctccaggcgcagtgctcggcttgctggcccaggtagctttccctccaagaggcaggctgcactagggaagggcacaggcatcagacaggcctgggtttgaattccagccctggcatgggctctctgctgtgactttaggcaagtaacttacctctcttgtgcatatgggaaaactgaggcttaacaagttcaagaattcttacctctatgtggagctggaaaagctaaatgaactgtctggggagcatgtgccatgcctgctccatggcaggtgatcctcagcctgatgtcttctcagggcctgtctgtttagtctcta

SEQ ID NO: 706590 - DNA, 593 bp, Homo sapiens
gaagaaccaatatatacaatggacaaacaatccagtgccggcggggtgaagaggagcgtcccctgtgaatccaacgaggtgaatgagacggtaagattgttaggttctgaagtgaaggcgagagtgaaagaaagacacacagagcgggggcggctcaaacaacaacacaggaatattgcagaccattgtggaagtggggggcccgcttaatgccagagcccaccgccgcttacaggctggggtgcttgtaggtaggggtgggaggggcctgggcagtatggcttgctgccmggcgggatattgataagatgttcttatgatcaggtggtttggtcctttttctggtggaatatcattgtggtgttccttagaacgctgccaagcaagatatgatagggatgtttcttcagttgggcctttgtccgccttgcggacaggtggttaggcaggatgtttctcacggcctgaacccccatgggatgtttcactttgaccaaggtctgcaaaatagcaaagaactgacaaaatggtgcagtttggactcacaggtgaccctacccacgctcctcttcttcttccccatagatccctac

SEQ ID NO: 706591 - DNA, 593 bp, Homo sapiens
gaagaaccaatatatacaatggacaaacaatccagtgccggcggggtgaagaggagcgtcccctgtgaatccaacgaggtgaatgagacggtaagattgttaggttctgaagtgaaggcgagagtgaaagaaagacacacagagcgggggcggctcaaacaacaacacaggaatattgcagaccattgtggaagtggggggcccgcttaatgccagagcccaccgccgcttacaggctggggtgcttgtaggtaggggtgggaggggcctgggcagtatggcttgctgcccggcrggatattgataagatgttcttatgatcaggtggtttggtcctttttctggtggaatatcattgtggtgttccttagaacgctgccaagcaagatatgatagggatgtttcttcagttgggcctttgtccgccttgcggacaggtggttaggcaggatgtttctcacggcctgaacccccatgggatgtttcactttgaccaaggtctgcaaaatagcaaagaactgacaaaatggtgcagtttggactcacaggtgaccctacccacgctcctcttcttcttccccatagatccctac

SEQ ID NO: 706592 - DNA, 593 bp, Homo sapiens
gaagaaccaatatatacaatggacaaacaatccagtgccggcggggtgaagaggagcgtcccctgtgaatccaacgaggtgaatgagacggtaagattgttaggttctgaagtgaaggcgagagtgaaagaaagacacacagagcgggggcggctcaaacaacaacacaggaatattgcagaccattgtggaagtggggggcccgcttaatgccagagcccaccgccgcttacaggctggggtgcttgtaggtaggggtgggaggggcctgggcagtatggcttgctgcccggcgggatattgataagatgttcttatgatcaggtggtttggycctttttctggtggaatatcattgtggtgttccttagaacgctgccaagcaagatatgatagggatgtttcttcagttgggcctttgtccgccttgcggacaggtggttaggcaggatgtttctcacggcctgaacccccatgggatgtttcactttgaccaaggtctgcaaaatagcaaagaactgacaaaatggtgcagtttggactcacaggtgaccctacccacgctcctcttcttcttccccatagatccctac

SEQ ID NO: 706593 - DNA, 1132 bp, Homo sapiens
cattgtttctttccacagtgggtacttattggagtgactaaatcatttttcattttttttgttcctgttatttttaagtcaactttattgagacatttcgacatttttattgctttactatcatccaacaagttaactgttttatcttgacagcattctgtttagaaaagataactggggaaaaataagcctagaaaaatatgaaacatcagcttagcatttcaggaagcatagcaagactatctcattgtgtgctggcaaactttcatgttaatgctacttttttaagggaaatgttcatgggattttaaaaatcttgaaagtaaagataagatgtgttcattacacctagcaatggtggagaaagaactgagatgggcattcacaccccaacttgtatagcatgacatctctcttgttttgtcttcaacctttcctttaataagtgacagaagatcagtaaatgccttcaaaaatttcaggatttgggccacatttatttttttaaaaattctttttgcataaaatcaggatggcttaattcactgttaggccttggttggctgcccaaatatattcttcaaaattatayccatttcttaagtatgtctggagcagcatcaaaacggcatctgaagccaaggctagtgtgtttttgaagccttacacagaaaagatatctaaggatttcagctatgttgaagcaatatttctgtggagaaaatttgtatccaggctgacattttccatcctgggttttctacctgctgtgatgtggaatggccaagatatgaaatctctgaagtcggggttataacgcaactttactggcctccaagggcttgtggctcacagccattgttcacagatgccagatgatctaagaagatcatggaaacctggcacctcactgttttttggctaacaccaccaaagaaaattaattgttattgtttttggaaactgtcatccaatgcacgaaatagtaatatcagcaattatgttttttctgctttttctttttgggggaggttggggtgggaagatgatgaacactgtgattttattatagctgcccccagtggctggttttggggcaagaaaagggtgttacattcctgtggctgaaaaa

SEQ ID NO: 706594 - DNA, 2017 bp, Homo sapiens
tctgactctccaagcctataagggataaaagagagacaggatagatagaaataactggcaacgaggagttactgggctttggctccatgggagacaatagtggtttcatagaaggcaatggtggactcttagtcaactgaagcttgggtggaacttagctgcataattaagaagctgaatctgttttattttatttttctataacataaagagtgtgaaaaggtcattttaatgttcagagagtggcttctcttggaaaatatccccgaacataccatggagcagtgtcaactgtagtataaaatgtcctagaaatcttgcaatttatgagtttaatggcacacctgaggattacgaggttttttccgtccactcataatagcccggtgactgatttagcagagaggaagcaaaatgaacaatcttgatcaccttttaacatttttcctgtcttgctgacttcagagctttaggggtacagcatttgcaggaattgtatgtctttttggcaatactttaaaatcaaactcaaaagatgaagaagaaaaatggttattagatagttataaatatgtcattatttgcaaatggtattgctttgtggatatgaagctcttcattgctcatctgtttttaagttcaacgatccacatataaaggtgtaaggacttattgacattgtgcttcctctctgttgacaccattagcccgagaactaaggacaatggatagctgtatataagttcaagttctgcatctacttcttagtttccctttccatccttcagttgtgtttgttttttttttgaaatctgtaaagtaggaataataataaagttactattctttgtagggttttgaaggattttcttgagataatgtaaagtaccaggcatataattagcctaaatgtaactcaaccgtgtttttttattttaatatacatgtcactacccatctctagtgcagagaatcaacagaatacaaataattttgaagattcatataatattcacacgttgcaaaatcttgtttgtggagccctcattgtagcctgtatgattcaaacgatgccacgtagtcctttaaacatttccagatattaaggaattttacactgttgtgtcactttttaaatgtctgcatttttctgtctctctctctctcaatctctctgaatttgtttatccagtgaataaaattaggaagaagtggatgctgtaagaatatttatgtgtttaaaggttgtggttgccccattatagttacttaccagcagcttcagcacgcagtcagagactgtagaaaaaagaatcattcttttctctgatttgaggatgcatctccagagtgtttctggggtaatggatctaaaatcaaaattttaaatgctagtttttaagtgtgaatttttcttcagcacttttgttctctccttataaccttttatttcattgagttccagagagcagacagcttaggtttcttgatttggcagatcaatgaggaaggataactaaagaaagtttaaaggtatcttttataccaaaatacctcacttctctttcattgcaggtgtagttaaaagcactaatgccataccctagttttctcacctctattcttattatacttgctttctatgcttaagatggcaattaacttaaatatctgagttcatgtagttcatctagtagataaacagtatcagtgctacctggatgtatttttgcatcacttatttgcatgatagtgttcaaaaatttttgtgaatttcaaccacagaaaagacataatagggcaattctcaaaggaaaatatagaaatgacccagtacaagaacagtaaaatatctttccacctgttaatttggtaaagatcagaatgtgtgtgttatggtttgaatgtctatgaccctccaaaattcatatattggaacttraaccccaaggtgatgatattaaatggtatggtctttgggaagtgattaggctgtgagggctttgccctcataaat

SEQ ID NO: 706595 - DNA, 2645 bp, Homo sapiens
tataaatagacaatgggaataaggaaaaaaaacctgttaggaaagaagcttataaagacattcaacctcactggtaatcaaagaaatgcaaggtagataacaagacccatttttcacctattaatttaggaagaaaactggaaatagccaatgttggtaaggctgtggtgaaaccagtattcatcctgcactgccgaaggaaaagtataaattgacacaacctttttgaaaggcaatttggcaagcattaaattatgttcatatccttgacccagaaatcctacttctgggaatttaaagaaatatgcaaaaataaaaaataaaaaaataaaaaaaataaaaaaaaaaggtcacatgcacagaatcatccaccgcagcactgtttattagagttattattaagccagaagcaacctaaatgtcctacaggggatggacacttagtaacagctattaaaacgttaatgatcaaaattcaacggcaataagcagagttgcttataactaaacacaaaaagggtacacagctgcaaccacggaaaaacagttttgtaacagaaaagaatggaaaaagattacacaaaacaggagaatagctatgttagcctggtaaggttatgagtaacttttcttatttctaccctttctgtaatgatgtttcaccatttttacaataatctgtttcagaaagaaaaaaccagctaagccaaaataaacaagttaccttcttcattatcaaaatccgagacatttccatctgccacatccttctctttgaggtagttcagcaaaaactgttcgatgtcttcagctgtggtggtgctcttctcaagagctgctggtctttggttcaaatgacttccctcttctcctaaactttgctcttggaggtgcccaagattacctgtgtctgggaaccactgggctgtaaataaagtgttacaatgatcaccttggctattaacaacaggcatgagtactttatacacagaataagctctctgccctggcctgcacagcccccacatgattcagtccctgcctggctccccggcctcccagttgcccattaactcatccttttccagttcccccaatgcggcaagcattttcctgtttcagaactcttgcataggccgttctctgtgtctggaatacctcccatctacttcacatctggttaactccaaatcacttttcacatctcagaacacatagaacttgcccgataaggccctcccttgactcccctgtttaacttaggtcacttacatgatgtcttatatagcactctgctctttctcttcatatcagctcatcacaatatgtgattatatatttgcgtatctatttatttgtgtgtactattcagtgtctgagcctcccatcagactctatgttccattggtcaccactggaaatctaatatgcccagtgtgggttccagcatctctattccttcaaccaactcagctctaactgcaatcatttttgtatgacagggttccacaaagactcttaggagagcaatttgataactctctcaaaaatttaaacataaaccctttaaaccagcatttttttccaggatttcatcctatcgatatgctgaggcatgtccaaaatgacctacaaagatattgggtgctcaaagtatatgcaaaagaaaaaatacacaagactggcaaacacgtccaagtgacaaaattctgagtacagaatataccactcattagcagaatacaggctttacagagtcttgagaatggatggtctcaccttgtatttctcacataaaatgcttcagaaagctggccattttctctccaaagtcttccctattcggtggtgctcaaatacctctggtaagtcaccacagaataaacttctaacatcactgggtcccgtggttttcaaactgtgccttgaggagccttagggcttcacagaaatgtctcatggatcacaacagggagggcaccaagagacggtgggctacaggcatgggttccagggtctctattccttcaaacaactcagctctaatttcaattatttttgtatatcagggttccccaaaggcttcatttcaaaaaaggctcttaatacttaaagaataaaacaacaacaacaacaaatcccacagcctgaaaatcactgctctggtccagtgccctccttttgcagacagctgggaaaaaaactctgataacctttagcacctgctaatctccttttcatcaaagagcatctgcacagagcaagagcagcagcagatgggagatgacagggccaggcaactggcagtatcagagagcaaatgtgtgaggtgtgagccggaggttcctacacccagggatccattatgacattcttcaaactgcatccccagttgtctatcagctacttagtgcactctaaggsactggttcccaaatagttaaaacctggacccagcatttacactgctaagactagatatgctgcaaagattatttctagattcaaggctggtgacagacattaaaatgtctttgctcacaaatggcttttaaacatatgaaaagaagctcaatctcacgtttaatgcaaattaaaactataataaggtgctatttttctcctattggattagcaaagatcaa

SEQ ID NO: 706596 - DNA, 660 bp, Homo sapiens
ttagagggtctgcagggacactgagctgcccacagtggtgactcacccaggaatatagccttctacagccgcctgcccctccagtctcatttcctcactctgccaaagatgttttctggaatcacctcccaaataaaatacttgtacccacatttttatctaagggtctgcttttggggaaacccaaacgaagacccagttaaagaaaatgaactcatgataatgaccagcctaaacttcccagtggcaacaactgcatcgcctctgattctcagagctaatgtttggtcatgaaaggctgagatttcaatgcaggctaggccttatcacattttaatgcatacttggaaactgcgttaaaataaaaatttctaatttctaatgagctttcaggcgatgccaatgttgctggcccatggaccacactatgaacagcaaaaaactagagggctccaaatcctaattttgtttctgtttgttttttgttttttggagatggagtcttgctctgtcacccaggctagtgcagtggtacaatctcggctcactgcaamctttacctcctgggttcaagcgattctcctgtttcagcctcccgagtacctgagattacaggtgcccatcaccatgcccagctaatttttgtattttcaataaaga

SEQ ID NO: 706597 - DNA, 635 bp, Homo sapiens
aatgaaataaaacagaaaagagagctgatagaatcaagcaactctggggagaaaaccaggcactttcttgccttagggtagtctgactacatttcattgtatgtactttggctttatttgatattttgaaaatttttgtctacctaaataacaagcagagagagcctccctaaaagaaaatgatatttattctggagtaggatattgcaatgggaatatgtgtggcactgcgaactgtgttgtgtgtgtgtgtgtgtgtgtktgtgtgtgtgtgtgtgtgtgtattttgggaggtaataaaaaggcaaaagcttttcatttttaaattttattaatatatttattttatttgcaggggagggcataaacactatctcccactacacagattatgcagttgagtgtcctacacttggggaaatcatgagagtcagcacaaggagcctcccttgggaaaacactttcctgatcctggtgtctctcctgccaggtaagtgtagacaaataaagggaaaaaaaaggaggattacataattgttttgaaataattgtccttggctacaagaatccacaactagggtgacaccagttcgaggctggacaggcagttgctgggcagatgtccttgcagaaat

SEQ ID NO: 706598 - DNA, 1891 bp, Homo sapiens
atttattggagaaataatagagatattttcttttaaaaagcagaataaaaactagaatacctgctattgggagtggaaggccacattctccactcttcatattttcataaaaagaaatctggaacaacaggaagaaaaagctgccttaaaaggagtacatggttcaaaacaaagaaatgcattgtttcgggaggccaaggcggatggatcacctgaggtcgggagtttgagaccagcctgaccaacatggagaaaccttgtctctactaaaaatacaaaattagctgggcgtggtggtgcatgcctataatcccagctactcaggaggctgaggcaagagaatctcttgaacccaggaggtagaggttgtggtgagccaagaccgcgccattgcactccagcctgggcaacaagagcaaaactccatctcaaaaaraaaagaaaagaaaagaaatgcattgtttctcctaccttgctttctgttggatcaaatgacatgtagtccaagtctttgagatctttgtaaaagtatgacagctcttgtactcaaatgactttaagaaggttaagtagacaaattgcattagtgatagaaagcgatgctatgaaggtagggtgctgtagtaaaaaggggtttggcttcagacacagaagaacaaataatgtattatttagcggtatgaggtacacagagcaggcaaattcatagatggaaagtgaaatagaggttaccagggtctgggaggagaaggaatggggagttatttaatgagcacaaagtttatgttggcgatgatgaaaacattttgggagtagatagtggtgacggttatacaatattgtgaatatagttaatgctgctgaattgcaagttgccaatgtttaacatgataaatatgtatattttccagcaataatttcttaaaaggcctggctttgaccaaataatcctgggtttgaagcccagattcctgtatattgaaccccccttcctatacagacaggagccttgtgctgaccaggggccagaggccagagagagctggctgggcctaggcaagaggaagtggcagaggacttggcacaggagctaagtgtgagccaaggggtggtgcagaaattaggaagaattcagtcctggcacaattcactaacaaaataactgtccaaatatgaattgactggcttcaggagatagtgagtttcttattactggaggtattgaaagctgcttacccccttggtaagggcattcaagcatgaagttatctttaatgacctttaaattcccttccaaaagagcaagcacgtgatgtttattcctttaccataatctccttaaactataagacatacagaaatgtcccccaaatgttccacttccagcaaaatggaaaaataatggagaaaaagaactctcaaattatttattcaacctactcccagataagcatattgggatattcaaaaataggaaataaaaaaaaaatccttaggaataagaattatagtcattatataagcttatgaatttgttttcaagagtttcttagatatatatggtacttagaaagagctaattccagcacatttctatctgaaacaggtctagactcaattaactcctgttcaaagcatatatgtattcatttattcattcatgccacaagcaagttgaccttaataggacagatatcctggaacacaaaaagggtaggaaaatgaataagataaaacttctgctaccaggagtccagactagttactgtgttccaagaggttagaaattcagtgtggctgatatattatgcatctatgatggcctttctttttaaaactgtaattttaaaaaattattcacattttgacacctaagaaataattctaagaa

SEQ ID NO: 706599 - DNA, 619 bp, Homo sapiens
aaggcagtcttgtataagaagtaggagcaatatttgtcatcccattgattgcaggggttcagttactagctgcctagattgttgttttcttccttcctccctcatgtgctttccacccaaaattgcacatctgaaaggaatgactctccttggtagagaaggtaaaggggcctattcaaatttctcagcaatgatactagagtaccaataggctctaaaactcatgctggcaagaatggctacgttaccactgtatctccagcacactgcytgctgttgagtacagataagcatcaaatatttattgaatgagggatttaatgatatattatgttttaaaaatcctcaaattaactttttttttttttgagatggagccttgctctgtcgccaggctggagtgcagtggcgcgatctcggctcactgcagcctccgcctcctgggttcaagcgattctcctgcctcagcctcccgagtagctgggactacaggctcatgccaccaagcccagctaatttttgtatttttagtagggacagggtttcaccatgttggccaggatggtctcgatctcttgacctcgtgatccgcctgccttggcctcccaaagtgctggga

SEQ ID NO: 706600 - DNA, 1062 bp, Homo sapiens
ctttattattctgctctaataccagtatttaactttcccagtatctattcctaaatacagctagttatataagctctttaggggatatgtcttaaattyttcttatctttcatttctcttatttttaaaatacatatgtatatacttcattaacatgtaattaaatgattatcctctacggcacaaaaaaatagtacatcattagaatagatgtaatttgaaaattagctattatttcttaactagtacaaataatggaatagcaaaaagctatttttggtcttttagaaatcatattttaaaaagaaggctgcattacctcataaatcttgttaaggtgttttgcatgaacatgcatacggccattccatcctttaaataaaaataagcagaaacacaaaggtataatgcaaatatattacattaaattttttaaattaaggttttagaaagtaatgaagccaaaaatatgtcttttttaaacaatgacatttccatttaaaactctttgatgttgtctgaaatgcaaataatgctgtatttgactgttgatatcctagggctccttgagctcagctttgcatgaggtattagcaaagatgtagggataagagacagatcacataccctagatcactatggagttctactcagggtaatgacaggggaaaggcataagatatacccatctgttatccttaagatgataaacatataagagaagaagggaaagaagggaaaagttatgttaagctttgatttttaaaaaaatatttctaaggctttatcttggtattgccacaacttataattttcacaaacaaatttcctaagagtagtccaaactcattgccttgtcttttttttagctcacatactttcttcaatccagtgtaatctggccctctgccttatcccaaaatctctcctcaaaagcttttaataatctcctacttgtcaaattaaatgacttttccttattcaccttttctctctccataacacgtagtatctttctttaatcagtttcttcattctcatatttgctctcactttctagca

SEQ ID NO: 706601 - DNA, 595 bp, Homo sapiens
gttttatatttatatatgtattgaaattatatatttcataactacctgtattcagtgtaaagtgaggaatgcatttaatactttcacacatacagcatttcctgtttagtctcatatcaagcataaagccaatgactgcttcctcttcgcagaataaaatgtaataatagcagcattctaatgcaatctgcactgatgacagcagagggcactgtcatataaaataacttttttttattgtgcataagaattttgtgcattattgaacactagttttcaagaggctaggatttctgtaaacggtcttatataccaaaaaaactagaaaatctctatttgtgtgagcatgaagtgacatattttaactgatgaattgaaacctgagtcataaattataaaaagaaaaattaatataaaatttactgtttttcataagttagcatactgaaacttttctcattctatttctactactatatgatgccatttatatgaagtcaaaaaaataaaaaatatatttattatagaatatttagsttataaaactataaaggaaagcaagaaagtaattaccataaaattcagggtaaaagcc

SEQ ID NO: 706602 - DNA, 1221 bp, Homo sapiens
atatatatatatatacttccctggaaacttaaattagcccaatggataatatggctagatattctttttccttgcctgtcttattcaaattgccagtttgaccaatgtagaaacactgacttatccagttgtttcagttctgtgaagcttccctattgcaaagctctttacagaaaagtttcaatgtgttgaaataagcgataaaccttggagccagtttcatgtttaaattcagaatatggcacttcctagcagcagagctttgggaaagtgacgtcacagagtattagtttcctcctctggcaaatggacaacagtacctaatttctagagcaattacaatgatagattgaggtaaygctcataactgttagtacagcacctggtgcttagtagatgcccagtgaatgtaagctcatggtatcattccctccctttgctggaccgtggacaatggcaaaggtggtggggagcatttgaaccaactccccatatattccttgggtatatactacaggtgtaacattaaacccagtcctcttagaatacggagacccatcttaaggatgattctttaggaaaacttaaaagagtgagcagatttaaactggtatttgaaagatgatgagctttggtttcagagggcaaaaggaagtcattccgcttatacagtgcatcctgggtggactcactggttctcaatatccattcattctttcttccttttactaatgcacctcctactacatccctgtccctcagtttagctcagatgtggctacctgctacttctatgaccttttttttttctttgcctccaggaacgaccacatgaataagttctgaacaataggatgtgacaagaagcactgttgtggatcacttctcaaaatgaatttacttgttctgtgtgtcttcttcccctctcttgaggattggcatgggagtatgatggggaagagtcatctttgctcataaagacaatgggggatgatgaagcaatagaaagaagaaactgggttcctggtgactttgttgagcacagccacccttcccatccagacagcccaacagctccactcctccttccagttaagccactgctgtttgatctccattattacaactaaaccagtatcttcactaatcatatcctgaggatgtaggtgcaggtgaaaatgagcctaacacatgtggggacagaaaaggaatgggtctgag

SEQ ID NO: 706603 - DNA, 659 bp, Homo sapiens
tccttaatatcattatcacttccatcaccccaatccccagtatcagcaactatctccatactactgccaccatcatttccccccactgttaccaccagtggatatttacctagtgtttactctgctataggcactctgctaagcctctctatattttgtcacatatctgggtttgaactaaggcactgtgactccagaatccagactcttaagtattattccctttttctatcacttggagctctctgaatgttctaggccgccttatccctgtgcccatggaatatcacagacttataaaatgacgcttttcaaaaaacatgcaataatatcaaataatggtgttttcaaaaagttaggctattgagaagtcataaatataatcccaatattttgttacatttacatggaaaaaarttcttaaagaaaatgcaacagaaagttgagaatgatttatttgggtggcataaatatgggtaattctaattttcatcttgagttttaaaaaatatagtttaaatttaggtaatgaatatatattatgtataagaacagaaaaaaaaactggtgtgattgaaagatgtggaaagtatagaaatatattcttccaaagtgttgcaaagaaaaaaatccctcttctgtgtcccataatgggttca

SEQ ID NO: 706604 - DNA, 1341 bp, Homo sapiens
tttggagagaggttgtaagtttggggccagagttaaagccccttggattttggaggctttgcagctgatggtcctcctctttatcctttttctacagggcactgaggaactatttaaagaaaatacaacccaagtatctgcaggtctcattctggtccagccccaaagcagtgttagctgcaggggaaggccttaccctgaggagagggagataggatgtaccagctgatgtgggggagtgaggacacaggattagaggggagtggatactgtgaattgcacctagaaacaacagcgctarggcaggcttcttccccttgaactatgcttccattaggggaagaatgcataaaatgagtaaaataaaagctgcagaccaggcatggtggctcatgcctataatccctgcactttgggaggccatattgtacggattgcttgagcccaggagttgaagaccagccctggcaatgtagcaagatcctgtgtctacaaataataatttaaaaaaattagcctggcatagtgacacatgcctatggtcccagttactcaagaggttaaggcaggaggattgcctaagcccaggaggttaaagctgcagtgagccatgatcatgccactatactccagcctaggggacagagtgagaccctgtctcaattaaaaaaaaaaaaaaggtatattccctgggccaggttttctctctctgtttatctggctaactcaaatttaacctttagggttgagattagatcttacttctcccaggaagccttttctgatctcctaagtctgcattagatgtcattcctctgtgctccgacagatcctgtatttcccccatcatcacagcatttacagtgtgcattgtcattgcttggttacaaggcaatttcctttgctagtctataacttccatggggtagggaccatgtctgtagttcactgtcgtttggtgccaaacatagtacctgatacctggtaggcactcaattatttgttgtttgaatgaaataatagaggcacaagaatagtgctgccatgtacctagaagaggtggaaaattttcatggtggagggtggctccctgaggccaggccttggtatagaggctgatggacagaacagtagctcgtggatttcgggggcagtgatggcttcagacagcctgatacgttaggaggagagaggataccaaaacagcaccttcgaagtcaggagctacgtggaaacagaatggaagacatcagctaaaagacaccctagggacttctgcctctcctcaccctctagcaatataagtgcggaaggagaaagtccccaaatacagtgatgcac

SEQ ID NO: 706605 - DNA, 542 bp, Homo sapiens
cagaggcagggtctggaagcagctccctgggatgccacgtaagctactccatcgctctgagtcacagtgatggaggacttggacgagatggattttgtcaggttccttccagacataggaatttaaagacatgataatttgaagatgttacctaagtccccaggaagagaaagagctttcataaacaatgtaatcatgggagtaattcctccagggatcacaaggayttggctctacctgctgacctttttctgtttgatctttcactccactaagagaatccattatctatagaaaagaagccactttccttagagtcattgggtgaatcattgctccagtgaatggttactgtgatgggtaattctgggtgtcaacttgactggaccacaggatgcccaaataaacactgtttctgggtgtgtttgaggctgtttccagaagagaatagcatttgaatgggtgggctgagtcaagcagacgggccttcccaatgtaggtgtgcatcgttcaatccattgaggacctggacagaacaaaag

SEQ ID NO: 706606 - DNA, 663 bp, Homo sapiens
aattccttcaagggcagcccttgactgaagtaattttcataattacgttgacctgaaaaaatatccttgcaagagacactgtgcccatatatcacagaaatacaggtattgatcatcatgtaaagggaggactgtgccagtgttggctgcagaaggtgggaagatctgcagactctttttgttagaaactgttgcagattaggttccccaggaaacagactctgaaatagagatttgtatgcaggttttttggaggagtgctcttgggatcaatactctggaagaataaagaaagtagaattgggcagagggagaagttgaactttgatatagatgcaacaaaggcctcagcttattccatgggkcacagtggagttggggtagccctagaatgaaccaaatagaggttaaggggtcagtaccttatacattgatgttgaccatcactggacgtgggctgacgcagaagaagggtcagaactttgggtaaaatgactctctttagacaccggcagttcttggaatgaggctctgctgagaattctcagcaatcagtgtttgcagcaggtaggggaataattgtctcagttctgaagagggcattcctcagcatctactgcaaaagcttatttgaactgctgaggaatacagcacaattaatat

SEQ ID NO: 706607 - DNA, 615 bp, Homo sapiens
ctcatatgtaggacaattgttggaagagcatggtagagcaggataattgaagccccagctctttgtccagactgaaagggtagccccaggaaactgaagagtatcagcaagatgtggtgagaaaggacctcagggaaatgactccctgaaagtagcttatgaactctcaggcttgctccttagctacccacttacagatctgattctaaacaacatatcaacgactttgaggtctgagctaaggaatagatcatcacttaatttccatattggccaccgggtgacataaacaggagacagatcagaatagcactacaaatgctttgagggaagaaaacaaacccaaaccgatattgaaactacaacccaggaaaagtcagttggaatttgtrgcctgaatctaactgggtcagctgctgaaacaaaacaaaaatatcagcattctccatgggatttaaataagacccagagtcttatattattcaaatgtctgtgatatgatctaaagtaacttggcatcttaagaataagaagaatctcaactcttatgggaaaagatagtcaacagaagccaacgcggagatgacacacaggttaaaattttctgacaaggtc

SEQ ID NO: 706608 - DNA, 619 bp, Homo sapiens
tgtatcctcaaactttactgatgttgtttatcagttccaggaggcttttggcagaagtgaactcttgttttgtatatttttttttctagtcttccagttttacaggtaagaggatgtatctagtacctgttaatttcttttggcctgaaatggaaatttgactcttatatcctttatatagaaaagtgacctggaaggaacaggcgtaaacatggaggatccagttgggctttgcatttgcatccaggtaagaggaggaaggagcagtagagatggacagaagtggatagttttgagagatatttgggaggtaggatcaatagtagttggtgaccartggattgtgcaggaggaggggcaagggagggagaaaaaagtgttgctgggtgcatggtgacactactccctgacatagcaaactctgaaagggaagctgctgtgcgttgaggtaagatcaagctgggatatgtccaacttgatttggatgggtcaagtgtttatggagtgatagagacttattaaaaggtaatcttgaagatgaaatagtaagaaacaacataggctgtaaagcatagaaaaagaaaaaagctgtgatcacgcttttttatggtaattatgg

SEQ ID NO: 706609 - DNA, 916 bp, Homo sapiens
atcatcccaagaagcctggaattctcccattttacaggtgaggagagggtattcagaatggctaagggactcaccccccttaaggaggagcatgcactctcatcaaagaatgtcccaaagttgaacagaaggtcagagtcaaaagcttgtgctcctcctactgcagcctgtggaggtctttttccctagtcaagacatcggaatgtggggtacaagggagaggaaatggacttggcatgctctctgtctattccttgagaaaggttatacacacatatgcacgtgcacacacatgcacacacacacattcacatgctcgctcgctctcttttcttatatcaaactttgcaggcttcaaaatcattcccaaatctttctgattttttttaaatttttaaatttttttgagacagggtctccctctgttgcccaggcttgagtgaagtggtgtgatctcggctcactgcaacctccccttcccaagttcaagcaattctcctgtctcagcctcctgagtagctgagattacaagcgcctgccaccatgcccggctaatttttgtatttttagtagagacagggtttcatcctgttggccaggatggtctcaaactcctgacctcaagcgayccacccgccttggcctcccaaagtgctgagattacaggtgtgagccacccagcccggccccaaatctttctgttttaaatgtgtgcgtttaaaatgaccacacacatcgctttttctcccagaagatatatcttaaaacctatttaaatgggctcatggtttttaaacaggaatatgaagtcatttcttcacattcttcttaaaggcaggttgcttcatgatcattgcccaggactaaacatttttcaagatggattttgttttactttaaaagaatcataactcca

SEQ ID NO: 706610 - DNA, 916 bp, Homo sapiens
atcatcccaagaagcctggaattctcccattttacaggtgaggagagggtattcagaatggctaagggactcaccccccttaaggaggagcatgcactctcatcaaagaatgtcccaaagttgaacagaaggtcagagtcaaaagcttgtgctcctcctactgcagcctgtggaggtctttttccctagtcaagacatcggaatgtggggtacaagggagaggaaatggacttggcatgctctctgtctattccttgagaaaggttatacacacatatgcacgtgcacacacatgcacacacacacattcacatgctcgctcgctctcttttcttatatcaaactttgcaggcttcaaaatcattcccaaatctttctgattttttttaaatttttaaatttttttgagacagggtctccctctgttgcccaggcttgagtgaagtggtgtgatctcggctcactgcaacctccccttcccaagttcaagcaattctcctgtctcagcctcctgagtagctgagattacaagcgcctgccaccatgcccggctaatttttgtatttttagtagagacagggtttcatcctgttggccaggatggtctcaaactcctgacctcaagcgacccacccgccttggcctcccaaagtgctgagattacaggtgtgagccacccagcccggccccaaatctttctgttttaaatgtgtgcgtttaaaatgaccacacacatcgctttttctcccagaagatatatcttaaaacytatttaaatgggctcatggtttttaaacaggaatatgaagtcatttcttcacattcttcttaaaggcaggttgcttcatgatcattgcccaggactaaacatttttcaagatggattttgttttactttaaaagaatcataactcca

SEQ ID NO: 706611 - DNA, 916 bp, Homo sapiens
atcatcccaagaagcctggaattctcccattttacaggtgaggagagggtattcagaatggctaagggactcaccccccttaaggaggagcatgcactctcatcaaagaatgtcccaaagttgaacagaaggtcagagtcaaaagcttgtgctcctcctactgcagcctgtggaggtctttttccctagtcaagacatcggaatgtggggtacaagggagaggaaatggacttggcatgctctctgtctattccttgagaaaggttatacacacatatgcacgtgcacacacatgcacacacacacattcacatgctcgctcgctctcttttcttatatcaaactttgcaggcttcaaaatcattcccaaatctttctgattttttttaaatttttaaatttttttgagacagggtctccctctgttgcccaggcttgagtgaagtggtgtgatctcggctcactgcaacctccccttcccaagttcaagcaattctcctgtctcagcctcctgagtagctgagattacaagcgcctgccaccatgcccggctaatttttgtatttttagtagagacagggtttcatcctgttggccaggatggtctcaaactcctgacctcaagcgacccacccgccttggcctcccaaagtgctgagattacaggtgtgagccacccagcccggccccaaatctttctgttttaaatgtgtgcgtttaaaatgaccacacacatcgctttttctcccagaagatatatcttaaaacctatttaaatgggctcatggtttttaaacaggaatatgaagtcatttcttcacattcttcttaaaggcaggttgcttcatgatcattgcccagractaaacatttttcaagatggattttgttttactttaaaagaatcataactcca

SEQ ID NO: 706612 - DNA, 2394 bp, Homo sapiens
acagctgaatagaaaagttttgagagtttctgtcttccaaccagatgcacaaaaaagtaccgtgtctattcagattgtttcagcataaatggagcatttataaaatggaaggcaatcttgggcaatgactgtttttccacgtatcttcatttcttcaggtggatcaggaaacaataacaggattgctaggagaaacctaggaattatattaaattaaaacatgttttaattagttctgcttctgtgattggaatttgcttgagtttaagattaataaaatttttgctgcttatattttaggtacaattgaaaaatctgattctaaaattaaaatccacatctctccttacatatccttaggaagcagtgtatctgtgcatgcaaacatgaagagaaagagacttctatggcatctctttattttctttgctattgctttaatgcattttaaaattaatgtacattaattgggaacaaagaaacaaaagcacatttctttttatcataaataacatctccatatttaacaaaaatcttaaatcattattttacctttttacaaatacaatacatgcaaaactttttttgcaaacaataaagttaacagaaatatatggcactaccataacaacatacagctgccattctactgactctcaggaacaaaataaaaacaagacttaccaagatgctctgggttttcttctgttagtgttaaaacttcagatttataatctcatctatattatatagattttagccatgataatgtccatctgtggtacattgttaaaaaccatgggacttcgtgtcggttcaaactgtatatatagtatgcacattttgtgaatgtgtatctacagaatatatataatgtagatgagagatttagtgacttttgatatgagtttggtgcaggtggattactgaggccaagtgaggtacatactaattcagtagtttaaatgcaggcattcaatattctttacgatgtccagatatgtatagtacctgtcccatgcagtgtacgcactgtcatgttaaatccagaacttacacatcagagcctgtgatattttatttgtagacaatcaacttgaatctttaaattattactggtaggtgattataaatctgctttaccctttatctaaaaaactaaatccttgtggcattaagattttctttctccaaccccagtttctgtttcttagagacacattgctggtcaaccaattgaatggtaatatttaggggaaagacagaaataattcctaccatctggattttttccagaattgggaagggagaaaaactatccccaaagacaattaaaatccattctagcaagatgatgcaatgacctgcaaagaaaaatgcactccaggcacacccaggggcacagtgaaaaggctctccacagggtggtcactgagtacttcaatgagcagaataggggtgggaggatcgatatgataggatatcatgacttgacactggactcaggcgtattaacattccagccagtactgccacaccttgagtgtgtcatcttgaaaagatttgttttcttattccaatttgcatttttattaagtacacaatacattttattgacagaccttgaaagataggaaaatattctcaaaaaaacataaaaatgtgactatcagaaaaaatctaatgatatatttaatttgttattcttatttttatttgttattyttatttttatttgttcttctcctgagaatgtgtaataagtgtctgtggtctgtaccttccgggggtggtttcaagcagaatctcagggcttagttttagggatattcctgggtgagaaggaaaaattcttttactttatacctgcagagaaattgatacagttccacaagaaattgtggtagatcaattggtgatttacaaaaaaaaaaaaaaaaaaaaaaaaaaaaaaatctgtttctcttttctgtacggtggagtatttgtgatagtggataaatgtattctgtaggtgggtgcagtggctcatgcctataatcccagcaatttgggaggctgaggcaggtggatcacctgaggttgggagttcgagaccagcctgaccaacatggagaaaccccatctttactaaaaacacaatattagccagttgtgatggcacatacctgtaatcccagctactggggaggctgaggcaggagaatagcttgaacccgggaggcggagggtgtggtgagccaagatcatgccattgcattccagcctgggcaacaagagtgaaactccatctcaaaagacaaaacaaacaaacaaaaactaaatgaataaccttgactggaaattagagacctgagcccgttgactgcaggctaaggccaatcttgacctgtc

SEQ ID NO: 706613 - DNA, 2394 bp, Homo sapiens
acagctgaatagaaaagttttgagagtttctgtcttccaaccagatgcacaaaaaagtaccgtgtctattcagattgtttcagcataaatggagcatttataaaatggaaggcaatcttgggcaatgactgtttttccacgtatcttcatttcttcaggtggatcaggaaacaataacaggattgctaggagaaacctaggaattatattaaattaaaacatgttttaattagttctgcttctgtgattggaatttgcttgagtttaagattaataaaatttttgctgcttatattttaggtacaattgaaaaatctgattctaaaattaaaatccacatctctccttacatatccttaggaagcagtgtatctgtgcatgcaaacatgaagagaaagagacttctatggcatctctttattttctttgctattgctttaatgcattttaaaattaatgtacattaattgggaacaaagaaacaaaagcacatttctttttatcataaataacatctccatatttaacaaaaatcttaaatcattattttacctttttacaaatacaatacatgcaaaactttttttgcaaacaataaagttaacagaaatatatggcactaccataacaacatacagctgccattctactgactctcaggaacaaaataaaaacaagacttaccaagatgctctgggttttcttctgttagtgttaaaacttcagatttataatctcatctatattatatagattttagccatgataatgtccatctgtggtacattgttaaaaaccatgggacttcgtgtcggttcaaactgtatatatagtatgcacattttgtgaatgtgtatctacagaatatatataatgtagatgagagatttagtgacttttgatatgagtttggtgcaggtggattactgaggccaagtgaggtacatactaattcagtagtttaaatgcaggcattcaatattctttacgatgtccagatatgtatagtacctgtcccatgcagtgtacgcactgtcatgttaaatccagaacttacacatcagagcctgtgatattttatttgtagacaatcaacttgaatctttaaattattactggtaggtgattataaatctgctttaccctttatctaaaaaactaaatccttgtggcattaagattttctttctccaaccccagtttctgtttcttagagacacattgctggtcaaccaattgaatggtaatatttaggggaaagacagaaataattcctaccatctggattttttccagaattgggaagggagaaaaactatccccaaagacaattaaaatccattctagcaagatgatgcaatgacctgcaaagaaaaatgcactccaggcacacccaggggcacagtgaaaaggctctccacagggtggtcactgagtacttcaatgagcagaataggggtgggaggatcgatatgataggatatcatgacttgacactggactcaggcgtattaacattccagccagtactgccacaccttgagtgtgtcatcttgaaaagatttgttttcttattccaatttgcatttttattaagtacacaatacattttattgacagaccttgaaagataggaaaatattctcaaaaaaacataaaaatgtgactatcagaaaaaatctaatgatatatttaatttgttattcttatttttatttgttatttttatttttatttgttcttctcctgagaatgtgtaataagtgtctgtggtctgtaccttccgggggtggtttcaagcagaatctcagggcttagttttagggatattcctgggtgagaaggaaaaattcttttactttatacctgcagagaaattgatacagttccacaagaaattgtggtagatcaattggtgatttmcaaaaaaaaaaaaaaaaaaaaaaaaaaaaaaatctgtttctcttttctgtacggtggagtatttgtgatagtggataaatgtattctgtaggtgggtgcagtggctcatgcctataatcccagcaatttgggaggctgaggcaggtggatcacctgaggttgggagttcgagaccagcctgaccaacatggagaaaccccatctttactaaaaacacaatattagccagttgtgatggcacatacctgtaatcccagctactggggaggctgaggcaggagaatagcttgaacccgggaggcggagggtgtggtgagccaagatcatgccattgcattccagcctgggcaacaagagtgaaactccatctcaaaagacaaaacaaacaaacaaaaactaaatgaataaccttgactggaaattagagacctgagcccgttgactgcaggctaaggccaatcttgacctgtc

SEQ ID NO: 706614 - DNA, 647 bp, Homo sapiens
attcttaatatgaggaagtaatatcactaatatggaatatgatgtacttttgttttatggttatttttccttttattgatatacaataatttacatatttrtggggtactgtgagtgttttctacatgcaaagagtgtgtaacaatcaaatcagggtaattggggtatccattaccttgagtgagtatcatttttatgtactggtatcatttcaagtcctctcttctagttactttgaaatatacataacattgtggctaagtatagtcacactatctgttgtcaaacagaacttatttctttatctaaccgtatgtttgtactcataactgtttccaatgctttgtaagcctagagtacagcctcatcaggaatatcaaagcttatctttttgtaaattatctccttatcaggttaagttttagagcttttcctaaatgacatctgagagtcttaggtgtatttcaacataaagcaatgtgaaagacaatcctcagttgttaactattgacttcccacagattaagaaaggttattactcagcacagctattatgttcctggggacgggtgagatggcgtgagggattgggtaaggtaatagttatacagaaatgaatggcccagctacctaaggattgtgctaaa

SEQ ID NO: 706615 - DNA, 574 bp, Homo sapiens
tgaagctgtcagggagagaggttgagttgccggcagtctcacatgtagaagtggtgaagtgggaattcagacccacccctgcgggctcctcagccaggcctgctcttagcatcccagtgtgctgctctgtgacgagccccagtattgggatccactctccagatgaggtttgaagagttccgaagtggaacgtctttctgggttggctggctgtagaggggttggtgactccagtgtcctgtggtggtagacagtctccagccaagggcatgtacttctcacctccctgcctcgtgaatctggtcagtctggtgtcaaacttgaaccagtagactgctgtggatgtgacactgggcgtggtgcaggctctgtccttgaggggcctggtagccccacctgggtcccctggggcccaactgccaygctagaagacgtccaggctgctctgctggagaaagaaaccgtgtggggttgcctggagggtgagacatgttggaggggagggagggagaggccaaggcctcagacaggtgagagagccccagccgcgaggcacctgtggtctcaccatggg

SEQ ID NO: 706616 - DNA, 574 bp, Homo sapiens
tgaagctgtcagggagagaggttgagttgccggcagtctcacatgtagaagtggtgaagtgggaattcagacccacccctgcgggctcctcagccaggcctgctcttagcatcccagtgtgctgctctgtgacgagccccagtattgggatccactctccagatgaggtttgaagagttccgaagtggaacgtctttctgggttggctggctgtagaggggttggtgactccagtgtcctgtggtggtagacagtctccagccaagggcatgtacttctcacctccctgcctcgtgaatctggtcagtctggtgtcaaacttgaaccagtagactgctgtggatgtgacactgggcgtggtgcaggctctgtccttgaggggcctggtagccccacctgggtcccctggggcccaactgccatgctagaagacgtccaggctgctctgctggagaaagaaaccgtgtggggttgcctggagggtgagacatgttggaggggagggagggagargccaaggcctcagacaggtgagagagccccagccgcgaggcacctgtggtctcaccatggg

SEQ ID NO: 706617 - DNA, 1164 bp, Homo sapiens
tgcatatctcgtcaaagggagtcatgggggtggcatggttagagcatgctggctgagggcaggaggccagaggtgtctgcgtctccctcgtccatctcgttctcccctcccgccttccttcccctttcccctctctcccttctttctgtcccaccaggatttctttaaggtttgtgtttcatcaccatcatcctgtttgaaagtttttttttgttgttaatccatcagtctttctcaattcataattaatttcttccaacctccctccctgctcccatccttggcagcctgggggcagcaggttgggaactaccaccaatgttgcaccttcttaatattcttttatgtatctcttctcaaagatagaattagtttggtctgaattatacatacaatcatagaatcaaagtgacttgaaacttagaaggtgcattttcttttagggtttaattcactcagaggtcctccaacccagcctctcattcagtaaagacttcccttcagcaacagatggtaaatagattctgcagaatgagtaattccttcatttctgtctgaatggtttgtttagaagcaaacacaatgattccctctccttattaaatttgttgggagaacatcaggatcatactaagttactgtccaaagctacaactgtgaagagggggtgcacrgtgacaaaaaagagaaatgtcgcttgacatttcagaattcaggcccagtatcatcggtgccctcataacattacacgccaaaccctttaataaaactgtcaatccagattgttaaaacactgagcggtttgctcaggagatagaatatttatcatactgaggttcccagtttttaatgagccaaatatatttccttatttttttcatgatctttaatttatcaacttaaccatttttaagtgtacaggtaagtggtattaagtacattcatattattgtgcagccatgtccaccgtacatccacggagctctttcaacttgcagaactgagactctgtgcccattaaacacaactcccactccccactctcccagctcctggcaaccaccattctactttctgtctccgaatctgactactctagatacttctattagtggaatcatacagtatttgtccttttgtgactggctcatttcacttaacata

SEQ ID NO: 706618 - DNA, 1164 bp, Homo sapiens
tgcatatctcgtcaaagggagtcatgggggtggcatggttagagcatgctggctgagggcaggaggccagaggtgtctgcgtctccctcgtccatctcgttctcccctcccgccttccttcccctttcccctctctcccttctttctgtcccaccaggatttctttaaggtttgtgtttcatcaccatcatcctgtttgaaagtttttttttgttgttaatccatcagtctttctcaattcataattaatttcttccaacctccctccctgctcccatccttggcagcctgggggcagcaggttgggaactaccaccaatgttgcaccttcttaatattcttttatgtatctcttctcaaagatagaattagtttggtctgaattatacatacaatcatagaatcaaagtgacttgaaacttagaaggtgcattttcttttagggtttaattcactcagaggtcctccaacccagcctctcattcagtaaagacttcccttcagcaacagatggtaaatagattctgcagaatgagtaattccttcatttctgtctgaatggtttgtttagaagcaaacacaatgattccctctccttattaaatttgttgggagaacatcaggatcatactaagttactgtccaaagctacaactgtgaagagggggtgcacggtgacaaaaaagagaaatgtcgcttgacatttcagaattcaggcccagtatcatcggtgccctcataacattacacgccaaaccctttaataaaactgtcaatccagattgttaaaacactgagcggtttgctcaggagatagaatatttatcatactgaggttcccagtttttaatgagccaaatatatttccttatttttttcatgatctttaatttatcawcttaaccatttttaagtgtacaggtaagtggtattaagtacattcatattattgtgcagccatgtccaccgtacatccacggagctctttcaacttgcagaactgagactctgtgcccattaaacacaactcccactccccactctcccagctcctggcaaccaccattctactttctgtctccgaatctgactactctagatacttctattagtggaatcatacagtatttgtccttttgtgactggctcatttcacttaacata

SEQ ID NO: 706619 - DNA, 2525 bp, Homo sapiens
ttcttttaagcttagaaatgcttgtctcaaccagagatcaggtaagtaatacttaattacatattactctgatacttggttggtttgcttgattttgatatttaactcttcatccacctgaatctgtttttttttttttttttggcagagtctcactctgtcaccaggctggaatgcagtggcgcaatctcagctcactgcaagctctgcctcccgggttcacgccattctcctgcctcagcctcccgaatagctgggactacaggctcatgccaccatgcccagctaatttttgtatttttagtagagacggggtttcaccacgttagccagggtggtctcaatctcctgacctcatgatccgcccgccttggcctcccaaagtgctgggattacaggtgtgagccactgcacctggcctatttggtatttttgagaagtgcagctctaagttggttttatccccttcccccaattcctaaccagttgttcaggtgagacaaccatttgttatttctttggtttcagagaagctgtatctatctatctgtggtgtatccctctcaaacctcccctcattctgggttgggcccaggaggagggtatccaacccagacctggtggagaggagcagctttttttaaggccagtagtgctcaatatttataaactccttctgtatcagctcatgagacatttcacagttgtactcttcgcctgcttggctgtgtgactgagaggagctgggcgtggggtgatacagcagcgagcaggtgaggtatcggggcaagcccaccagcatctctcccgtgtcatctgcacttcagtattggattcctccccgtggacccagtgctcagaaaatccaaggccagtcttggtgctaccacttgcttagacaaatcactgagttgtctgtgtcagccagtttctccgctgtatttaagtatgatcagtgtgaactaaaaacctatttggcctgcctgttgtgaggcttaaatgagaggaagtatctgagagtgtttcaaatcatctaaagcattgccctcacataatttcaaagcaatattaatgtattaatttgagcctttaggtgctaagggttgtaagatgyaccatcattttgtcaattttaagatgcattccccatttcagagatgtcggaacaggaaaagccatgcatcctggaattggtgtttggtcctgactctcatggggggtgagaaatggtagagacagtgtcctagactcgggggtggggatgcgaggggtgtagaggaagacagtcatggatacccatattttattctctaatgatacagaatcttcattttgggccgattcctgtggctctattttctctttgtaattctactttgcgatgcatgtttcagaagagaaaccattttccagctttcttcatctcatttccgttgtgctaacagagaaactctgaattcatctgaggtgctttttacttttctttcggtgaattgtcaggcatgagccacagaagccatccgaatcaggtttctgtgtggaaatcacacggcggggaggtggaggcacaaaatgatcttaatgacatgcacatcttcctgctcccttgtggagctgagtgtggggggccctttgcagtctggcaggctcggctctggatttgaattcagtctctgccatttatcacttgagggatctcagatgaatgctctttccctttccctttccttgagacacagtctccctgtgtcacccaggctggagtgcagtggtgtggcagcctcgacctcctgggttcaagcaatcctcttgcttcaccctcctaagtagctgggactacaggtgtgcaccaccacgcctggctaactttttcattttttttttttttatagatgggggtctcactgtgttgcccaggctggtcctgaactcctggtctcaggcgagctccccacctccgcctcccaaagtgttaggattacaggcgtgagctgctgtacctggccaagtgctctctttctgatccttagttttctcttctgtaaagtgaggataaaaggatatattctggagcgttgtcaggagaattgaatgagctgcatgtgtaagccctagcagagtttcctgggtatagaggaggcacttagtcagcgtcacctccttcccatcttctcaggagttggagggtgacagagcagaggaaatttaggttttcactcttctgggggtgggtcaggtaactatgatcgaacctgcacgcattgttttagtgccacgttgattgggtcgcgcctgatcatttgcttctggtctgactgtcccagatccctgtcagcacatgtctggcaccagccatcctctgataaccctgccatagagctccaggagagagtggggcctgttcctggtggcctgagttgttgaattgtactctttagacatcgaacctaatgtttcaaaacacacattcattcgtgaggcctgtctgccgcgctttctctcccggatgtgagttccagcacatg

SEQ ID NO: 706620 - DNA, 2238 bp, Homo sapiens
tggctcacgcctgtaatcccagcactttgggagcccgaggtgggtggatcaggagttcaagaccagcctgaccaatacggtgaaaccccatctctactacaaatacaaaaattagccgggcatggtggcacacacctgtaatcccagctactcgggaggctgaagcaggagaatcacttgaaccttggcagcagaggttgcagtgagccaagatcacgccactgcacgcaagcctgggtgacagagtgagactctgtctaaaaaaaaaaaaaaaaaaaagaaagaaagtaggaaggaaggaagaaagagaaagagaaagaaagacagacaaagaaagaaaaagaaagaaagaaagaaagaaagaaagaaagaaagaaagaaagaaagaaagaaggaaagaaagaaaggaaaggagggagagagagagggaaggaaggaaggaaaaagagaaggaaaggaaggaaggaaggaaggaaagaaggagaactggattcgtgtagctcttctatcagcttgttcccatcttaagtgttaacccaccccaaatcactccccttgcttcttatggtatgttttagattaattcaatgaattatgaaatgagggagttgtaaattggtctgtgagcctttctgtcctatggcctctggggcagcctaccaggcagtgttcttgggagtccccattactgcgaggtaattccccacggtgaaagtctaggcgccagcactcaggagccctgtgggggctgctctcggttgcccagcctattctctatggagtggcctgggagagaggtatcttactctggggttgtcaaatataaaagcttaaagttgtccattgggcaaatcacgtggccagccccaagccaaaggcagggaaggtcactctgtcccccacgaggccctagcaatggtgtggtttcttggcactctacattaaagggaagcttctacgaaaagggttcataaccatggcaccactgacatctggtcctggagaattctccatggtggggcctgtcctgggcattgtaggacatttggcagcatctctggcctctacccattagttgccagttacatcctcactcttcccacctcattgtgatgaccaaaaacatctccagacattcccaaatgtttcctggcaggcaaaattgcctgtagttgagaaccacagacttagaccatttatttgctctatagactaaggtgcagtcacctcatttcagccctccttgcctgtattttctttctaggtcagatggccctgccatgtggtgcacacatgctattctccaggtgcctgcttggacccaagtgggagcccagccaggcagtgccctgttgctcacacctgtcatccctccatggaggcagatcagacactcagcaaaatattcaccttgaaaaagcaacagtgatgactggcttgggttttcccagttttattcatgtcttaaatgtcttgccttagtgtttctgttaagtgagttgatttgggatttgagaaatagagtcagattttgtgtgactcctgaccccaccactaactcctcactgaatttgggcaaatgaattcacytaacttgcaaatatgaaatgaggcacaatggcctgccctcatagtgtgatggcaccgggtcagtgtgaagggctgagaccatgacccgagggtgagtgcccaccacgggttagccaggagcccccaagcctctgcaggagacaggccgcaccaccctagtcctcacatcaggatctgatgggaacacaaagacctgcctacaccaagatggggtttctccatgtttgccaggctggtcttgaactcccggcctcaggtgacccacctgccttggcctcccaaagtgctgggactacaggcgtaagccaccgcgcccaggctgaaatactttaaactattcccagcagtacctctggtgtcttaggtatcttcttctagggcagaggccagatttggtccttggctttagaattccagagccctgagtacgaaccagccccatccctcactggctagagaactggagtttctctgagcttcactgctccataaaaacagagcaataacagccataccttgctttatttatttatttatttatttatttatttatttatttatttgaagaatcagtaaaagaatgcaataaaaatgcctggcataatacacggcaaactccccaaaatgctcctgaaggtgcttttacaa

SEQ ID NO: 706621 - DNA, 894 bp, Homo sapiens
tccctcctaccaagtctcttcagatggctgaccttaatgcagcaagattcccagaggagggagggattgctatgggctggagactcaaagagggctccctggaggaggtgagctgggcagtaaaagtaggtagtgtttggcaagattgcaattcagagaaggagatgcttcatggtagacgctggatgacagatgagctgttatgtgcagaaaggggccaaagagagagcaggtggccatagggaagaaatgtagttcctgtccccatggggctgccaggctggttcaagaacctcaatgccccaacttccttacctgaagggtggggactaataatggcacccatcacaagtgctgctttgcccccagggagctcctcgatcttaggtgtcatgttcattcagctgaattcctctgttagttgctctataattggtgtctatttttattaatgttgataatacaccaagctcatgtatgtrgatcatccaggggctgaaggtaaagaagcacctcttagtagctcacttgtcctaagagaattccagctacaaaaagtgaggagctccttgggcaaggcctggtgcaggcagccttgctacgagggggacagttcctgcccttcagagggaaagtccaactaggaaaagcaaatcaaggggagcactctctccagggacgcccagttgctgaagaattattgttggcccagctcattgtaaatgcaaccacgttagtttttgtgaacatcgcttgttataccagcccaggggctgttgcttccagctggaaagctggccgaggagaaatgggtagtaaagtatttcataaaattggtttgagaattgaggggccagcttcacatcaaggcatgaagagaggcaccgggcctga

SEQ ID NO: 706622 - DNA, 2323 bp, Homo sapiens
taaatcctaggtattgtgttaatttaggcttaaacatcagtaggcacgctaggtcgaattgtgaatttctgaagactttgcagagtaaacaataaatgctcctacacaaaacttgcaggcaaatttgaaaaaatacttggactcacaataatctatcctgcactagaataaattcacccatattcaccaactctactcccacattttcagaacaaggaccctgtcttttctaactttttcttcccagtgctgagcacagggcaggcactcaaatataaaatgactgctcccttggaaactaagtgagcattttgtaaattgtttaaatgacaggccacacttgcaaataggaaatgagaaaagagtttaatacatctcttcaggggcttatctgattcaccttagatgtgggccacgtagaacatctgcactttaagttcctcttgttctaaaaagatctactatggcctaaaaactctactcttaagttagccaaggaactagacaattgcagctaagtaataaatcagrctcattctgatgttaaaaaaaaaaaagttccttttttttaatcactttcttgaactaagatcacagatctgccacctgccttcaactctgcagatcgtggggcgtggggtaaaggggtcctagaggatgacctgcaacgtcactaggaaaagaaaaggtgtgacagaaacttatactggaaaagtccaataaaaatgcctattgcggctgggtgcagtggctcacacctgtaatcccaacattttggaggcctgaggcaggaggataatttgaggccaggaatttgagagcagcctgagcaacaaagtaagatcctgtctctattaaaaaaaaattaattgaaaaaaaatgtctaccccaagctctaataaaaactctggcttaagatggcaactgctaaagccataagcagctgtttcatcctcatctatttctgttttagatgaaatgtaaactaaattcaatatttctaacaaactagaaatattggttatatgggccataccctgaggagttttatcgataaaaccattgacaagccaggcatggtggtaggcacctgttgtcacagctactcaggaggctgaggtgagaggatcacttgggcccagaagcttgagtctagcctgggcaacacagcaaacataacaagactctgtctctttaataacaaaacaaaacatggacaggtgtgtgaagtaaaacacaaaaccagcaagcttaagacaggaagatttctatctgtgcttcttcctacctccactgccaattgttggcagaaattcttttctgaagtatcctgggctaggtcatcatcccaacccaaccatccccattgatattgctctttctccaccagttctcactcagtcatcatcacagccatctccacagggtggaggaacaggccattgcacactgtgtcttggcacatggtggaggtaacgggaaggggcggaaagaaagctgtgcacagtgtcctacaaagaagagagtttttcatgctgtgtttatgctaagataaaaaatgcagatgcttccacgtattatggataaatcctcctttaaataatcccataagatattatgggaataagcctttccttatgagaaagacaagccaaactagacaaatgaagaatctggcaaagtgtagaccacctagcccagtccttcagctcatgacctcacacagatttctaacagtaagaaggtaggcagtgtcagagaacaaagaaaatcctcctgggcctggacaggccactcctcagccaggcaaaagcaaaagcaaacaaccatcaaaagcaaaacaaacaacaagcaacaataataataccaacaaacatcaaccaacatcaatgaccataaacagcaagcaacaaccactggcaaacaatttaagtaagcaacaatagcccacgacaagagccaacaacaacagagctctcctagcaaaaagattttcgaaagcaaaataaagggaacagcatattcaagatagcagaaatgaagtgttttgctctattctgcttacaataagaagctagtccaagaaaacatgaccttaagaaaaacagatagaaatatgacagagagagagagagagagagagagagggaggaaacaattgacatgtgagtggaaactcagaattagattctatattagaaggagaaagaatacaatctacacttcaaataatcaaatgggtaaaatcagaaagcaaacatgaaatgcagtcatagaatgaaagtgtcaagaataaatagatgaaaataatgtaggagaagat

SEQ ID NO: 706623 - DNA, 2323 bp, Homo sapiens
taaatcctaggtattgtgttaatttaggcttaaacatcagtaggcacgctaggtcgaattgtgaatttctgaagactttgcagagtaaacaataaatgctcctacacaaaacttgcaggcaaatttgaaaaaatacttggactcacaataatctatcctgcactagaataaattcacccatattcaccaactctactcccacattttcagaacaaggaccctgtcttttctaactttttcttcccagtgctgagcacagggcaggcactcaaatataaaatgactgctcccttggaaactaagtgagcattttgtaaattgtttaaatgacaggccacacttgcaaataggaaatgagaaaagagtttaatacatctcttcaggggcttatctgattcaccttagatgtgggccacgtagaacatctgcactttaagttcctcttgttctaaaaagatctactatggcctaaaaactctactcttaagttagccaaggaactagacaattgcagctaagtaataaatcagactcattctgatgttaaaaaaaaaaaagttccttttttttaatcactttcttgaactaagatcacagatctgccacctgccttcaactctgcagatcgtggggcgtggggtaaaggggtcctagaggatgacctgcaacgtcactaggaaaagaaaaggtgtgacagaaacttatactggaaaagtccaataaaaatgcctattgcggctgggtgcagtggctcacacctgtaatcccaacattttggaggcctgaggcaggaggataatttgaggccaggaatttgagagcagcctgagcaacaaagtaagatcctgtctctattaaaaaaaaattaattgaaaaaaaatgtctaccccaagctctaataaaaactctggcttaagatggcaactgctaaagccataagcagctgtttcatcctcatctatttctgttttagatgaaatgtaaactaaattcaatatttctaacaaactagaaatattggttatatgggccataccctgaggagttttatcgataaaaccattgacaagccaggcatggtggtaggcacctgttgtcacagctactcaggaggctgaggtgagaggatcacttgggcccagaagcttgagtctagcctgggcaacacagcaaacataacaagactctgtctctttaataacaaaacaraacatggacaggtgtgtgaagtaaaacacaaaaccagcaagcttaagacaggaagatttctatctgtgcttcttcctacctccactgccaattgttggcagaaattcttttctgaagtatcctgggctaggtcatcatcccaacccaaccatccccattgatattgctctttctccaccagttctcactcagtcatcatcacagccatctccacagggtggaggaacaggccattgcacactgtgtcttggcacatggtggaggtaacgggaaggggcggaaagaaagctgtgcacagtgtcctacaaagaagagagtttttcatgctgtgtttatgctaagataaaaaatgcagatgcttccacgtattatggataaatcctcctttaaataatcccataagatattatgggaataagcctttccttatgagaaagacaagccaaactagacaaatgaagaatctggcaaagtgtagaccacctagcccagtccttcagctcatgacctcacacagatttctaacagtaagaaggtaggcagtgtcagagaacaaagaaaatcctcctgggcctggacaggccactcctcagccaggcaaaagcaaaagcaaacaaccatcaaaagcaaaacaaacaacaagcaacaataataataccaacaaacatcaaccaacatcaatgaccataaacagcaagcaacaaccactggcaaacaatttaagtaagcaacaatagcccacgacaagagccaacaacaacagagctctcctagcaaaaagattttcgaaagcaaaataaagggaacagcatattcaagatagcagaaatgaagtgttttgctctattctgcttacaataagaagctagtccaagaaaacatgaccttaagaaaaacagatagaaatatgacagagagagagagagagagagagagagggaggaaacaattgacatgtgagtggaaactcagaattagattctatattagaaggagaaagaatacaatctacacttcaaataatcaaatgggtaaaatcagaaagcaaacatgaaatgcagtcatagaatgaaagtgtcaagaataaatagatgaaaataatgtaggagaagat

SEQ ID NO: 706624 - DNA, 2323 bp, Homo sapiens
taaatcctaggtattgtgttaatttaggcttaaacatcagtaggcacgctaggtcgaattgtgaatttctgaagactttgcagagtaaacaataaatgctcctacacaaaacttgcaggcaaatttgaaaaaatacttggactcacaataatctatcctgcactagaataaattcacccatattcaccaactctactcccacattttcagaacaaggaccctgtcttttctaactttttcttcccagtgctgagcacagggcaggcactcaaatataaaatgactgctcccttggaaactaagtgagcattttgtaaattgtttaaatgacaggccacacttgcaaataggaaatgagaaaagagtttaatacatctcttcaggggcttatctgattcaccttagatgtgggccacgtagaacatctgcactttaagttcctcttgttctaaaaagatctactatggcctaaaaactctactcttaagttagccaaggaactagacaattgcagctaagtaataaatcagactcattctgatgttaaaaaaaaaaaagttccttttttttaatcactttcttgaactaagatcacagatctgccacctgccttcaactctgcagatcgtggggcgtggggtaaaggggtcctagaggatgacctgcaacgtcactaggaaaagaaaaggtgtgacagaaacttatactggaaaagtccaataaaaatgcctattgcggctgggtgcagtggctcacacctgtaatcccaacattttggaggcctgaggcaggaggataatttgaggccaggaatttgagagcagcctgagcaacaaagtaagatcctgtctctattaaaaaaaaattaattgaaaaaaaatgtctaccccaagctctaataaaaactctggcttaagatggcaactgctaaagccataagcagctgtttcatcctcatctatttctgttttagatgaaatgtaaactaaattcaatatttctaacaaactagaaatattggttatatgggccataccctgaggagttttatcgataaaaccattgacaagccaggcatggtggtaggcacctgttgtcacagctactcaggaggctgaggtgagaggatcacttgggcccagaagcttgagtctagcctgggcaacacagcaaacataacaagactctgtctctttaataacaaaacaaaacatggacaggtgtgtgaagtaaaacacaaaaccagcaagcttaagacaggaagatttctatctgtgcttcttcctacctccactgccaattgttggcagaaattcttttctgaagtatcctgggctaggtcatcatcccaacccaaccatccccattgatattgctctttctccaccagttctcactcagtcatcatcacagccatctccacagggtggaggaacaggccattgcacactgtgtcttggcacatggtggaggtaacgggaagggrcggaaagaaagctgtgcacagtgtcctacaaagaagagagtttttcatgctgtgtttatgctaagataaaaaatgcagatgcttccacgtattatggataaatcctcctttaaataatcccataagatattatgggaataagcctttccttatgagaaagacaagccaaactagacaaatgaagaatctggcaaagtgtagaccacctagcccagtccttcagctcatgacctcacacagatttctaacagtaagaaggtaggcagtgtcagagaacaaagaaaatcctcctgggcctggacaggccactcctcagccaggcaaaagcaaaagcaaacaaccatcaaaagcaaaacaaacaacaagcaacaataataataccaacaaacatcaaccaacatcaatgaccataaacagcaagcaacaaccactggcaaacaatttaagtaagcaacaatagcccacgacaagagccaacaacaacagagctctcctagcaaaaagattttcgaaagcaaaataaagggaacagcatattcaagatagcagaaatgaagtgttttgctctattctgcttacaataagaagctagtccaagaaaacatgaccttaagaaaaacagatagaaatatgacagagagagagagagagagagagagagggaggaaacaattgacatgtgagtggaaactcagaattagattctatattagaaggagaaagaatacaatctacacttcaaataatcaaatgggtaaaatcagaaagcaaacatgaaatgcagtcatagaatgaaagtgtcaagaataaatagatgaaaataatgtaggagaagat

SEQ ID NO: 706625 - DNA, 1006 bp, Homo sapiens
tggcctgggagctccgggatgccctgcctgcttcctcccccgctggactctgggcacctggcccagagcccgccccactccctcccgcgtccttgctgagtgaatggaggcccgtcttgtctcccccttctctaggctcactgccctgaccaggtctcatccttgcctgtgacagggcttgaagatataaaccaggagtcggcaaactttttctgtaaagggctgagtaataaatatttttgttttggtgggctgggtggtttctgctgcaactactcaaagttgccattgtagagctaatgcagctatagatgatacgtgcatggatgggcatggttgtgtgccaataaaactttgtttacaaaaatgggaagtgggctggacttggccccagactccatttgctggtgatacaaacagatccaggggaaggggttggacggagaagaaagagaaatgactcctagactcacggtcaacytggggatggggcagaggaggcctctgggacttcctactgagggcgcaggtagggtggacggtggatgaagtcgggggaaaaatagcaggcaccctcctcacgattttactctaaccaggtaccctcttgtactgctattttctttcttatttttttgagacagaatctcactttgtcacccaggctggaatgcactggtgcaatctcggctcaccgcaacttctgcctcctgggttcaagcaattctcctgcctcagtctcccgagtagctgcaattacaggcatgtgccaccatgcccggccaatttttgtatttttagtagagatggagtttcgtcatgttggccaggctgattttgaactcctgacctcaatcaatctgcccatctcggcctcccaaagtgctgggattacaggcgtgatcccagcccattttcttgatatttttttgtaccagggctgttggagcagaggaaacatgttatcacccagcaaggaaataattcccttttcttttcttccatc

SEQ ID NO: 706626 - DNA, 1006 bp, Homo sapiens
tggcctgggagctccgggatgccctgcctgcttcctcccccgctggactctgggcacctggcccagagcccgccccactccctcccgcgtccttgctgagtgaatggaggcccgtcttgtctcccccttctctaggctcactgccctgaccaggtctcatccttgcctgtgacagggcttgaagatataaaccaggagtcggcaaactttttctgtaaagggctgagtaataaatatttttgttttggtgggctgggtggtttctgctgcaactactcaaagttgccattgtagagctaatgcagctatagatgatacgtgcatggatgggcatggttgtgtgccaataaaactttgtttacaaaaatgggaagtgggctggacttggccccagactccatttgctggtgatacaaacagatccaggggaaggggttggacggagaagaaagagaaatgactcctagactcacggtcaacctggggatggggcagaggaggcctctgggacttcctactgagggcgcaggtagggtggacggtggatgaagtcgggggaaaaatagcaggcaccctcctcacgattttactctaaccaggtaccctcttgtactgctattttctttcttatttttttgagacagaatctcactttgtcacccaggctggaatgcactggtgcaatctcggctcacygcaacttctgcctcctgggttcaagcaattctcctgcctcagtctcccgagtagctgcaattacaggcatgtgccaccatgcccggccaatttttgtatttttagtagagatggagtttcgtcatgttggccaggctgattttgaactcctgacctcaatcaatctgcccatctcggcctcccaaagtgctgggattacaggcgtgatcccagcccattttcttgatatttttttgtaccagggctgttggagcagaggaaacatgttatcacccagcaaggaaataattcccttttcttttcttccatc

SEQ ID NO: 706627 - DNA, 671 bp, Homo sapiens
tcaacatatatgaaccttgacattatgcaagtgaaagaagctggtcataaaagatcatctcttctatgactctacgtatttgaaatgtccaagataggtaaatccatagaactagaaagcagactagtggttgccaaggaccagagggaggggcaaatgggatgtgaatgctcacgggyatagggttgacgataatattctacaattgactgtggtgatggttgcacaactctgtgaataaattaaatattaaaacccactgaattgttcactttaaactagtaaactgtatggtatatgaattatatctcaataaagcttatataaatctccttccacttcatctcatctcccaggccaggctgttaaccctattctacactgaccccaagagggtcaaggagcccacaggcagggaggctccccctaagccagaagcagtgtggaaaacctgctgcaaaggccagacaaggccaacttgtacagtctgtcccctcggatgtcatcttcagataacacatgtgcacatgtatccccacaaaggcccacggatgaaaacgtgcagtgggtacatgggaagcagagatgtaggggatggggtggggttggaaatgagggaattccttccttccagtcccaccagggcaagcctcaggctccccatcaccacc

SEQ ID NO: 706628 - DNA, 671 bp, Homo sapiens
tcaacatatatgaaccttgacattatgcaagtgaaagaagctggtcataaaagatcatctcttctatgactctacgtatttgaaatgtccaagataggtaaatccatagaactagaaagcagactagtggttgccaaggaccagagggaggggcaaatgggatgtgaatgctcacgggtatagggttgacgataatattctacaattgactgtggtgatggttgcacaactctgtgaataaattaaayattaaaacccactgaattgttcactttaaactagtaaactgtatggtatatgaattatatctcaataaagcttatataaatctccttccacttcatctcatctcccaggccaggctgttaaccctattctacactgaccccaagagggtcaaggagcccacaggcagggaggctccccctaagccagaagcagtgtggaaaacctgctgcaaaggccagacaaggccaacttgtacagtctgtcccctcggatgtcatcttcagataacacatgtgcacatgtatccccacaaaggcccacggatgaaaacgtgcagtgggtacatgggaagcagagatgtaggggatggggtggggttggaaatgagggaattccttccttccagtcccaccagggcaagcctcaggctccccatcaccacc

SEQ ID NO: 706629 - DNA, 1670 bp, Homo sapiens
acatgtgttcatgaagatacaaaaaatgaaaaataaacaaaaaaaaatttacatacccttcactgaccaagataattttttattcaaagttaacttatttttaagataaaacttcaaacacaaaattgacttcaacactgttctcacttgtcacacagaaaccaacttttcagccgcggcagcatcaggtgttagggagagacacctcctggcagcacatggaattacaacctagcacaatcagacactggaaccagccagggactgggtttcagcagccatcggtggaataccaggagattcccaagagtgggagaaaaatcccataccaagaaacaatcatggataaggcaccaggaagacatactaggttacaaaagcccatcyaaggccaggcgcagtggctcacgcctgtaatcctagcacttttggaggccaaggcgagcagatcacttgaggtcaggagttcgagacaaaagcccatccaccaccagacataaatctcctgtgtcacatccctcaagccatgcatggctgcacagagatacataataataagtgtcggtcatttgaataaataaatgattgattgattaattctgattatttcagaactctaccattaagcattttattgtcttctttaacattctttttcagttggacacatattatgaagggaatgtagagctgggatttactgcttcaaacaacttagctgacacagaagtgttcgatgatcaaggaacgtctggactttagcaaaatcatcaagaacaagaaaacatcaagatgagtttctggtaaagcataaaaagaagttcctggctaggcacggtggctcacgcctgtaatctcagaactttgagagaccaaggaggacagatcacttgagtccaggagtttgagaccagcctgaccaacatggtgaaaccccgtctctactaaaaatacaaaaagtagccaggcatggtggtgtacatctgtgatctcagctactcaagaggctgaggcacgagaatcgcttgaacctgggatgcagaggttgcagtgagctgagatcatcccactgcactccagcctgggcaacagagtgagactctgtcacaaaaaaaagaaagaaagaaagatgttcccatttttttttcctttggcccaagatggtggaaatgaaagatggcttactggattgggaaatggattggaccctaaatcattctttatccactcgttccacagatactgattgggcctcttggtagccaggcggcgggatgatgagtagtgctggaggccacttagctgagttgtgcacacaaaataacacaatgcacaaaaggtttatcttcaggaactcatcccgggtagaacaagtgctcagcagagatctgggctggtgaaggcagcttgcggtccctgactcttctgagaacctggggatccaggttcagggagaccaacgctattggatacaaatcttgaatttaaagaaattgggatgtaaataatgatgcaatccccgaggctcatggagtaccccagtgacaggagaggttttccatgggattcaagcaggctaatcagcaagacaatctgggctgtctcagtgagccgtggcctgaggctacttgtgggccacctgtccagaattggaggggtcccagggtctg

SEQ ID NO: 706630 - DNA, 1405 bp, Homo sapiens
aggattcacatattttctgtcaccactttgaagatattaatctactgtcatcttgaatataaaatgtttgaatatagaccagctttattgacttcctttcaatgaatagaaagtgatgctgctttacttgtgaagtttggaaccttgccaccatgctatgaggaggccgaggccacatgatgagatcatatgtggctcctttggctgatagtgccagactgaagtcccagtcaagagccagcatcaagaccaggcatgtgtgtgaggaagcctttgagatgactctatcttagttaacatctgactgcagctgcatgactaccccatgtgaaaaccacctagctgagcccagttagcccccagaaatcatgatttgggtccctcagctgtgccattaactagccatgtgactttgggcaaattatatgacttgtctataagatggtcctcgtgatacctacactacagagttattctgagaactaattaagataataattccccaaggtaggtattattttgatcattttacccatgagaacatgtactgggaaaggccaagtaaattgctgaaagtcagctaaacatataacaagtgacataatgtgattttggactttaaaaaatctgactctaaagcatgttctctttaccattattcattttcattgctaaaaatgatcaccatagcaacccattaacctacctaatttcacattaggacctagagaaacaatatcatctttttgcataccttactttaacttaagtccgacttggcaacaggctaacgtagtgatgccatttaaagcaaaatagaaaaaagtgtaccatggtttgaaatacctgagcccataggcaggttaagcagacacctcaatgtgccagtgtgagagagaacagtgagttctttttggcctcactttctgataatgctgtttttggaaaatgaattttaccaaaatagcatgccatgcatgaatcttattcaaatgccagggttgctgttggagctagaatgtagatacgttgcagattatcatagcgatatagaagggaaaaggagctgagtaacagggagagaagtgtggtgagggtgatggaaatcttaaatgttttcacactctcaaaattctcatatacattttctctccactggtggatcatatacatcatcagggattaaaatgttgtcacaaagtcaaaatgatcagaaatagcaaaagccatgtattctctggacatatgtttccggaattaatcataatatgaatccaaaagacaatgtcatgkttctacgtttgacacatcaaagaatagtgagaatttgttttagaaggagaagtttactcaaagtctctttctaaacaatggtttgctgctgctacattgatttatctaatta

SEQ ID NO: 706631 - DNA, 907 bp, Homo sapiens
ttttgggaggccaaggcaggtggtggatcacctgaggtcaggagttcaagaccaacctgaccaacatggcgaaaccccatctctactaaaaatacaaaaattagccaggtgcagtggcaggcacctgtgatcccagctacttgggaggctgagacacgagaatagcttgaacctgggaggcagaggttgcagtgagctgagatcacgccattgcactccaggctgggcaacagagtgagattccatytcaaaaaaaaaaaaaaaaaaaaaaaaaaaaaaaaaaaaatatatatatatatatatatatatatatatatgcatctatcaaatgttacagttttatatatatactttttatttttttatatatatataatgtatgttatgaggcataattacagaatatatacctaatgaacccagcacctaatttatgaattaaaatatttccaatctgctatggactaaatgtttgtgtcctcccaaaattaatgtattaaaaccctaatccccaatgtaatggtatttagacctagggcctttagggaggtaattagggttcgattaagtcttgaagctggagtccctgtgatgggaacagccatgtgaagacataattaggaagagggcacccaaccatgcttccaccctgatctcagacttccagccttcagaactgtgagaaataaatgtttgttatttgagctacctaatctatggtaatttgctacagcagcccaagctaactaaaaacacaatcccagtgaagctatacatgggcccctaccgaaagccatctacctgcctccctgcaatgatcatcactattctgaattgtgcatttttttcactcttgcctttttttaaagaagttcttaacataactcttggaattttctttcttaaa

SEQ ID NO: 706632 - DNA, 1500 bp, Homo sapiens
tagtatgttgtcatacacacttattcctcccaaacagaagcacagaacagggctctggttctgatactgcctgtgcttgaaaacatcatcactcatgaccttgggcaaattttaattaattaacatctgtgtatgggctcttcaaactgtaaaatgaccaaataagcaactatcacatggctatcctgggaattaaataatagtacatgtatgctctcccaaagccctagggctcattcacatttgaggggtgcccactcattgaatttacgggaaaaaaaaaagggtatatgtcaaaaacctagaatagttcctgcacatggtcagctctcaaaagtttagtagtcttgtattcatctccctaaaatgacatacagcaagtttcaagaacagtgactataatgtaagaaaactagggactggctaaaaaaaaaaaaaagatgagtcatcacagctggcagattcttcacttgtctgacaaatataaggaggatctaaaatttactgagttccttaggtgctaggcactgtggcagactgctgcagttactgaactgaatcacacctttctgatcccttcccacattaactctggatttactcatgtgacttcctttggccagtgtaacactaacaaacatacagcacgctgaggcttgtactttcttgcactttggggcttgctctctctcgctgctgggatctttctaccatcttgtgaacaagttagggctagtcgcctgtagaataataggtcacatggaagtggactttagctacctcagtctgaggccccagacatgtaaggctatcctagattctaggacctagacaatctagtcctagccaggtcagcccagactctaagaacattgcagccaaccacagaattgtaagagtaatgtttactgatttaggccactaacttttaggggtggtttgttatacagcaaaggtaactactacaaccaccatataaatatagctatttttttccagttttacagattaggaaagaagattcccaaaactagcaagtcagtttggccccaaagactctttctactatatcaagccatctttgcatgccattctctgaggttttaggctctggtggttttatcctacaacccttatttaaccctttcctttgtaccaggagacagtatactatggtccatggccaaatccagctcatcacctttgcaagctaagaatggtttaaacacggccgggcgcggtggctcacgcctgtaatcccagcactttgggaggccgaggcgggcggatcacgaggtcaggagatcgagaccatcctggctaacacggtgaaaccccgtctctactaaaaaatacaaaaaattagccgggcgtggtagcgggcgcctgtagtcccagctactcgggaggctgaggcaggagaatggcgtgaatccgggaggcggagcttgcagtgagcmgagatcgcgccactgcactccagcctgggcgacagagcga

SEQ ID NO: 706633 - DNA, 580 bp, Homo sapiens
ttgaggtcaggagtctgagactagcctggccgagacatggtgaaactccatctctactaaaaatacaaaaattagcctggcaaggtggcgggagcctgtaatcctagctacttgggaggcttgtaggagaattgcttgaaaccaggaggcagaggttacagtgagctgagattgacccactgcactccagmctggtcaacagagtgagattccatctcaaaaaaaaaaaaaacaaaaaaacaaaaaaccagatcaatccttttatttttaaaagtaatacatgttgactttgaaaaattaagaaaaaatagataagcaaaaggaccacattaaaataatcactattaatgctgatgaatatactttctattttcagggtataggtgataactgcattgaatttcattttttacagaaaagtgatgatgctatatatgtaattatatagtctgctttttataattcataaaatataatggcagtttctcaggtcataaaatagctatagctattatgacagtttatttaaaagatgatttatctattttttcccaccaactgatttcttagcagtgtttcc

SEQ ID NO: 706634 - DNA, 579 bp, Homo sapiens
aatgttccatggtgtattattaccacattttctttatccaatccactgttcatgggcacctgggttgattccatgtctttgctattctgaatagtgcagcaataaacatgagcacaggtatcctttcggtagattaatttattttcctttgggtatatactcagtaatgggattgctgggttgaatagtaattctatttttgttttttgaataattctttgttatcttgtgagttcttcaacacttctacaaatattttttcatgtagctattttagttgtcctcagatagaaggttgttttgaactattcagcccattgtttccrctaaacttgactttcttacctcgtttgaagcaatttaataagcaaaaaattctgatctcatgtagaacactggtgggtactattttttgtcctcaaatagaaatatttcacaagaagcaagcataatatcaactcaaaaatgttttgaggaagagcttctgaggatgttacattttctatagtttatattctggaaaaggacatactaacgttgctcagcagtcacagtttattcatcccattttgcatttca

SEQ ID NO: 706635 - DNA, 1240 bp, Homo sapiens
caaatttctcatcctcctaagttgtgtgcatgtttgcacccatgtattgttgatatactgtcacctttctagttcttatgaaagtacaggccaggcacagttggctcacgcctgtaatcccagcactttgggaggctgaggtaggtggaccacctgaggtcaggagttcgagaccagcctgggcaacacagtgaaacttcatctctactaaaaatacaaaaactagtcaggcgtggtggcacacgcctgtagtcctaactactcgggaggctgaggcaggagaattgcttgaacccagggggcagaggttgcagtgagcygagatcacgccattgcactccagcctgggcaacagagcaagacgccgtctcaaaaaaaaaaaaaagaaaagaaaatacagccattcaaagaaatatggctgccttataattaagctcataatttgaaagctaggaatttgacattaatgattctttaaaagccatcttctgcctaggtgacagttaataatgctaactactttaaatcttgataattaaaattatattccaaacttacagcatatatttcaaataagaaaactgttaggagttttacaacttaaaagtatagtgttctatttttccaaagtatgtttgagctatatctttaagttcaagctgagcaaagttatcttattgtttcatgaaataaaattctaaattcttccttattttatatgttgccaaaggaaaaaacataatctcagcattactcttgagctctttgacaaagctggtgttaatgttgaacaaatgaaaagcacaactgtaagttttaatttttagaaagtattgcagttctacacattttacaaagaaaatgctttaaatgtggtcatattttatcccctttcttcagaaatatttcaccaaactgcagattggcaaatttcaaatttggtgataattggcatcaagaagaacataatattttattgaatggaacagaggtacaatgagaaatcaatccttttgtctttttagttcaagaaatatttttgctgttatcatcttggcccaaattttaaacgtattcattttttttaaaaaggaaccaacagctgtctacctcctggttcttttctattccactacaatgatgggttttaagaagggatgacacaatcttaagattttgtggctaattatggttgatgaccaatagaccaaatgaacagtttgtattttgatgaggtcaa

SEQ ID NO: 706636 - DNA, 1240 bp, Homo sapiens
caaatttctcatcctcctaagttgtgtgcatgtttgcacccatgtattgttgatatactgtcacctttctagttcttatgaaagtacaggccaggcacagttggctcacgcctgtaatcccagcactttgggaggctgaggtaggtggaccacctgaggtcaggagttcgagaccagcctgggcaacacagtgaaacttcatctctactaaaaatacaaaaactagtcaggcgtggtggcacacgcctgtagtcctaactactcgggaggctgaggcaggagaattgcttgaacccagggggcagaggttgcagtgagctgagatcacgccattgcactccagcctgggcaacagagcaagacgccgtctcaaaaaaaaaaaaaagaaaagaaaatacagccattcaaagaaatatggctgccttataattaagctcataatttgaaagctaggaatttgacattaatgattctttaaaagccatcttctgcctaggtgacagttaataatgctaactactttaaatcttgataattaaaattatattccaaacttacagcatatatttcaaataagaaaactgttaggagttttacaacttaaaagtatagtgttctatttttccaaagtatgtttgagctatatctttaagttcaagctgagcaaagttatcttattgtttcatgaaataaaattctaaattcttccttattttatatgttgccaaaggaaaaaacataatctcagcattactcttgagctctttgacaaagctggtgttaatgttgaacaaatgaaaagcacaactrtaagttttaatttttagaaagtattgcagttctacacattttacaaagaaaatgctttaaatgtggtcatattttatcccctttcttcagaaatatttcaccaaactgcagattggcaaatttcaaatttggtgataattggcatcaagaagaacataatattttattgaatggaacagaggtacaatgagaaatcaatccttttgtctttttagttcaagaaatatttttgctgttatcatcttggcccaaattttaaacgtattcattttttttaaaaaggaaccaacagctgtctacctcctggttcttttctattccactacaatgatgggttttaagaagggatgacacaatcttaagattttgtggctaattatggttgatgaccaatagaccaaatgaacagtttgtattttgatgaggtcaa

SEQ ID NO: 706637 - DNA, 1240 bp, Homo sapiens
caaatttctcatcctcctaagttgtgtgcatgtttgcacccatgtattgttgatatactgtcacctttctagttcttatgaaagtacaggccaggcacagttggctcacgcctgtaatcccagcactttgggaggctgaggtaggtggaccacctgaggtcaggagttcgagaccagcctgggcaacacagtgaaacttcatctctactaaaaatacaaaaactagtcaggcgtggtggcacacgcctgtagtcctaactactcgggaggctgaggcaggagaattgcttgaacccagggggcagaggttgcagtgagctgagatcacgccattgcactccagcctgggcaacagagcaagacgccgtctcaaaaaaaaaaaaaagaaaagaaaatacagccattcaaagaaatatggctgccttataattaagctcataatttgaaagctaggaatttgacattaatgattctttaaaagccatcttctgcctaggtgacagttaataatgctaactactttaaatcttgataattaaaattatattccaaacttacagcatatatttcaaataagaaaactgttaggagttttacaacttaaaagtatagtgttctatttttccaaagtatgtttgagctatatctttaagttcaagctgagcaaagttatcttattgtttcatgaaataaaattctaaattcttccttattttatatgttgccaaaggaaaaaacataatctcagcattactcttgagctctttgacaaagctggtgttaatgttgaacaaatgaaaagcacaactgtaagttttaatttttagaaagtattgcagttctacacattttacaaagaaaatgctttaaatgtggtcatattttatcccctttcttcagaaatatttcaccaaactgcagattggcaaatttcaaatttggtgataattggcatcaagaagaacataatattttattgaatggaacagaggtacaatgagaaatcaatccttttgtctttttagttcaagaaatatttttgctgttatcatcttggyccaaattttaaacgtattcattttttttaaaaaggaaccaacagctgtctacctcctggttcttttctattccactacaatgatgggttttaagaagggatgacacaatcttaagattttgtggctaattatggttgatgaccaatagaccaaatgaacagtttgtattttgatgaggtcaa

SEQ ID NO: 706638 - DNA, 676 bp, Homo sapiens
ataaatttaaattattttttatttaatctaataacccacaggaatctaacaatttaactcattgaaagaaaaagtaaatatcaaatgtgattttcttgttttaataatcttgagctaaattgctaaagaagcctatggtgaactggtttaaggcaagaagactgtagtggggtggagggattaggggtaagggtcacaaaacaaaaacaacattgaaacataggttgagatttctaggtgctaaactaacaaagttgataacataagagcaatttggattataaattaatatttgacgagacctcagtaagagctgtatttccaaatgtagcaatttcaattcccagtctatttkaatagaaagccaaaatgatacttacaataaacagatttttagttggtccatcatgctgagaaatgtttctaatcattttcatcagcaatggatccttaaacttcagagccctcttcatgagcatcttcagcccatttcctgaaacagaaaagtcccccaataaaattaaggttagcttaagtttaataattttttgtttagttctcaaaaaagccacaacaatttacatctagtaaaatgcataactcttaagggtacaatttgattaatttagatgcaacccataccatatatcaacatacagagtattttcattccctc

SEQ ID NO: 706639 - DNA, 1033 bp, Homo sapiens
taaccatcttctaaagttacaccatcctctaaagatacagcmgtaaaaattcttaatacaaatactccctgatgtttaaacatggagccattcctccaggtgcaacacaaaatttacaacaaatcagcaatgaaattgactataactgaaattatgtgacttccaagcatgttttctactgatctttctccatgaaaaatataactccaagaaaataattattttgcaattctagtcagttggttattgctattattaatgagatattgaatactaatcatattatttcttcctctgttatggtgaacctataatgtttctttaggctagattaaagtagatggactagaaatatgattttacacacttgtaatattgggacattataagagttgcttttgaaaataaaataaaatttttctatgatagagactgtgcttagatgggtgtttctcagtatatttaattagacttgtagtagtataatacaagtacactacgaatcccttaactggatcttaattatgaaggcaagcatcttcatctatgtaaaatatagctacttaaggtctgtttttatcttacctaggttattaaaaaattttcccatatagcataggctcctatcaacaattttataatacaaagcatatgatactataagcaggatatataatacacatctatttgattatatatttaatagatggtatgcattgtacatttgaaaggatactgaaatagtaaaaattaaaattaagaaattataaaaaagttcacattgaaaatgaaacagcatgggaaatggagtaagacatctatgtctgaatactggctctgacctttaaaacttctattaaacaaacgtctattgagaacctagtggtgccagtagatagaactttgaaaaagacagtcaaagttcttgcccatctagagactgtattcttgtggtaggagggagaataaacaagtgaacaaaaattaaattactaggttagatgagggagaagcagcttctttgataattctc

SEQ ID NO: 706640 - DNA, 1033 bp, Homo sapiens
taaccatcttctaaagttacaccatcctctaaagatacagcagtaaaaattcttaatacaaatactccctgatgtttaaacatggagccattcctccaggtgcaacacaaaatttacarcaaatcagcaatgaaattgactataactgaaattatgtgacttccaagcatgttttctactgatctttctccatgaaaaatataactccaagaaaataattattttgcaattctagtcagttggttattgctattattaatgagatattgaatactaatcatattatttcttcctctgttatggtgaacctataatgtttctttaggctagattaaagtagatggactagaaatatgattttacacacttgtaatattgggacattataagagttgcttttgaaaataaaataaaatttttctatgatagagactgtgcttagatgggtgtttctcagtatatttaattagacttgtagtagtataatacaagtacactacgaatcccttaactggatcttaattatgaaggcaagcatcttcatctatgtaaaatatagctacttaaggtctgtttttatcttacctaggttattaaaaaattttcccatatagcataggctcctatcaacaattttataatacaaagcatatgatactataagcaggatatataatacacatctatttgattatatatttaatagatggtatgcattgtacatttgaaaggatactgaaatagtaaaaattaaaattaagaaattataaaaaagttcacattgaaaatgaaacagcatgggaaatggagtaagacatctatgtctgaatactggctctgacctttaaaacttctattaaacaaacgtctattgagaacctagtggtgccagtagatagaactttgaaaaagacagtcaaagttcttgcccatctagagactgtattcttgtggtaggagggagaataaacaagtgaacaaaaattaaattactaggttagatgagggagaagcagcttctttgataattctc

SEQ ID NO: 706641 - DNA, 1033 bp, Homo sapiens
taaccatcttctaaagttacaccatcctctaaagatacagcagtaaaaattcttaatacaaatactccctgatgtttaaacatggagccattcctccaggtgcaacacaaaatttacaacaaatcagcaatgaaattgactataactgaaattatgtgacttccaagcatgttttctactgatctttctccatgaaaaatataactccaagaaaataattattttgcaattctagtcagttggttattgctattattaatgagawattgaatactaatcatattatttcttcctctgttatggtgaacctataatgtttctttaggctagattaaagtagatggactagaaatatgattttacacacttgtaatattgggacattataagagttgcttttgaaaataaaataaaatttttctatgatagagactgtgcttagatgggtgtttctcagtatatttaattagacttgtagtagtataatacaagtacactacgaatcccttaactggatcttaattatgaaggcaagcatcttcatctatgtaaaatatagctacttaaggtctgtttttatcttacctaggttattaaaaaattttcccatatagcataggctcctatcaacaattttataatacaaagcatatgatactataagcaggatatataatacacatctatttgattatatatttaatagatggtatgcattgtacatttgaaaggatactgaaatagtaaaaattaaaattaagaaattataaaaaagttcacattgaaaatgaaacagcatgggaaatggagtaagacatctatgtctgaatactggctctgacctttaaaacttctattaaacaaacgtctattgagaacctagtggtgccagtagatagaactttgaaaaagacagtcaaagttcttgcccatctagagactgtattcttgtggtaggagggagaataaacaagtgaacaaaaattaaattactaggttagatgagggagaagcagcttctttgataattctc

SEQ ID NO: 706642 - DNA, 1059 bp, Homo sapiens
gatataggtaacaaaatatctttatgagaagtccagaatctcattgaggattttcagaacatcagcaagatggccgaccaggagctgctagctaaagcagagcacaggagaacagcaaagaagcagcagaaatcccatagaccacagcaacccaggatgaccacaaacaaaaggtaaggaaacaccttgcctccaccacacccttccccaagttgagacccagctctgagctgtgatggaaaagttaagcaaggggaccccagcaacactcatcactattacaaacacttctgcagtcctcaaaggctctgagtcccgttgagggaagtccctagactccatatgctgagctacccccagagaaggagcccacactgtgctccaccgaactcactcctggtttgtgctgctacctccttgtgccatcttgaagctagaaccactgctagagtgcttcctactctgggagtgagtagcatttgcatccctccatccctgaggttcagccgccactgcaccatgcccacctggtagtgtgccatcctcgagcagagctgctgctatgaccttctccctagggccaagctatcagttagccacttatcctccacatccaagtcgctggtgcaccctcaccttagggccagctccttgagctctgggtccctgggggtaaggcaccacttcactccaagaatactacccagcaaagctgcyttcagaaatgaaagagaaataaagtctttcattagacaagaaaaagctgaaggaatcaattaccactagatctgtcttacaagaagtgcttaagagagttctttaactggaaacaaaaggacaataatgactatcataaatacatgtgaaagtataaaactcattggtagaggtaaatacatagtcaaattcagaatactccaataatgcaatagtggtaggtaaatcatacataacactagtatgaagattaaaagtcaaaatggtcaaaaataatgtcaagggacaaagtttcaataaattttcagatctaaattggctttattgcaattctagcatcaa

SEQ ID NO: 706643 - DNA, 755 bp, Homo sapiens
tgagaccccatctccaaaaaaaaaaaagaaagaaaagaaagatgtctgctgcctgctcagggcccagttccttaggagttgggacttggggtatgtctcccaccctgaggccttaccgccttgatctccctctccagcagcttgcccgagcacgagtaggtgttgtcaatgaaggggcaggagacctccgcctcctggctgttgcggatggtgccctgcaggcactccctaggggaggggaggggaaaagagttaggatcataggaacccccttcactggggactccayccctcacatggcaaggcctgaccccaggggcctcactcagtcaccccaggtggacttctcctcaatatctccttccttcccatccctctcaccaacccatcaccaaggcctccaccctgcctccatactgccgctctgattctctggtccaggccccacatcccccacctgggtgactccaggagcctcctcgctgggctccctgcatccatctggcccctagagtctatctcagaacagcagccatgtctccccagtgactcccatcctacccagaacaaatcccaactcctcactgctgctcacgtacccaacacctctctatcctgctctgattacccccttcatccctctgctccagccaccaagagacctcctcagtctcctccaacaggccaggcccacaccccacacctacagcaggccttccggtccctgctctggggctacctccttggaagcttcc

SEQ ID NO: 706644 - DNA, 1657 bp, Homo sapiens
tttttcacatatatcttgtaccatatagtaccagttgtttaacaacaatttgatattgttaaataacagtgtattgtgaatattttgtcatgttattaaatattcttctatttcacattttaatgactgacctatgtcctatcacatgaacatgcctcaattttatttcacaaacccactataagtggatgtacttgttatttattgtgtataataaattagcccaaatttaacagcttaaagcagcaagcatttatgatctcacagtttctgtgggtcagaaatccaagaacagcttagctgggtcctccagctcagggtacctcacaaggctgcagtgcaggtgctggctggggctgttgtcatctgaaggctcaaaccgggaaggatctgcttctgggttcactcacgttccattggcaagcttcaagtcttcactgtcttttggctagagacatcaagtccttgtcatgtgggccaccccataaggctgtttacaacataggatgtgcctttcctcagatgaggattccaagagacagaatgtgagagaagatacccctaatggaaggtgcagtcttttcatatcttcatcttgaaaatggcataccatgatttttgccatattctagctggtagacawtagtaactaaggcttgtccacattcaagtgaagaggaccatataccaaggcatacatactggagacagggatcacagaggaccagcttaaaaacagaccaccatagtgggcattgaggtaacacatacatgcatgcacagttcggacactaataaaagggaaatatttttctgagtagcttagaggaagtgaccagttgaagttttcaagacctgatgtttcagccattaaatgaaaacagcagaaaactcataatggcatttttcaagtcagcttggaacctgagccagaaaaatcacctgtcaatagactattttgtggacattttccagtgtggtggtggatttaaagacgtaagttctgcaccacttcacttgtatcttccccctaaacaaagcgttcatcacaccagccagggggctcatgtcttcatcgggccatcttggcaatgggagaacagcctgtgtagcctggcattgagctttcccatggcccaaatgcaggcttttccagtcttctctctacacagtctgtctggtccatgccaatgatagaggcaggaggcagagaactctcctaggcagacaggggaaggtccctggagaacctccaacctgccaaggtcattgtgcacagggagcttgcctaaacatgcccgtggtgaaaaatttcatcccttaacacatgcacagtaagggaaataaatcagtatgaagtggctcagactaaggtcccacatgtgcactgaaaggacagggtggcgcctccaggaattcatgccttatacacatagggaacccagccccatcaccagatatgtaaaagcccttgtagtcaactgtgaacgggctaccaagaaccttctttcaggaccctctctttgctgagagctttcctttcacttaataattctattccactcattctccagtgtccacgtgcccaattcttcctggtcgtgagacaagaaccccaacctaactgagctaaggagcagaaaaactgcaccaccaa

SEQ ID NO: 706645 - DNA, 1657 bp, Homo sapiens
tttttcacatatatcttgtaccatatagtaccagttgtttaacaacaatttgatattgttaaataacagtgtattgtgaatattttgtcatgttattaaatattcttctatttcacattttaatgactgacctatgtcctatcacatgaacatgcctcaattttatttcacaaacccactataagtggatgtacttgttatttattgtgtataataaattagcccaaatttaacagcttaaagcagcaagcatttatgatctcacagtttctgtgggtcagaaatccaagaacagcttagctgggtcctccagctcagggtacctcacaaggctgcagtgcaggtgctggctggggctgttgtcatctgaaggctcaaaccgggaaggatctgcttctgggttcactcacgttccattggcaagcttcaagtcttcactgtcttttggctagagacatcaagtccttgtcatgtgggccaccccataaggctgtttacaacataggatgtgcctttcctcagatgaggattccaagagacagaatgtgagagaagatacccctaatggaaggtgcagtcttttcatatcttcatcttgaaaatggcataccatgatttttgccatattctagctggtagacaatagtaactaaggcttgtccacattcaagtgaagaggaccatataccaaggcatacatactggagacagggatcacagaggaccagcttaaaaacagaccaccatagtgggcattgaggtaacacatacatgcatgcacagttcggacactaataaaagggaaatatttttctgagtagcttagaggaagtgaccagttgaagttttcaagacctgatgtttcagccattaaatgaaaacagcagaaaactcataatggcatttttcaagtcagcttggaacctgagccagaaaaatcacctgtcaatrgactattttgtggacattttccagtgtggtggtggatttaaagacgtaagttctgcaccacttcacttgtatcttccccctaaacaaagcgttcatcacaccagccagggggctcatgtcttcatcgggccatcttggcaatgggagaacagcctgtgtagcctggcattgagctttcccatggcccaaatgcaggcttttccagtcttctctctacacagtctgtctggtccatgccaatgatagaggcaggaggcagagaactctcctaggcagacaggggaaggtccctggagaacctccaacctgccaaggtcattgtgcacagggagcttgcctaaacatgcccgtggtgaaaaatttcatcccttaacacatgcacagtaagggaaataaatcagtatgaagtggctcagactaaggtcccacatgtgcactgaaaggacagggtggcgcctccaggaattcatgccttatacacatagggaacccagccccatcaccagatatgtaaaagcccttgtagtcaactgtgaacgggctaccaagaaccttctttcaggaccctctctttgctgagagctttcctttcacttaataattctattccactcattctccagtgtccacgtgcccaattcttcctggtcgtgagacaagaaccccaacctaactgagctaaggagcagaaaaactgcaccaccaa

SEQ ID NO: 706646 - DNA, 1594 bp, Homo sapiens
tagggctaaaatcaacccgaggcatttatatgtgtataagcaactgagaaaagcagctaacagaaaatggaggggagcccaggaatgagggggagcaccctacccacttctacctcccacctataggatgctagtgccttgatttcccctaagtgcagccctttgttgggtaagactctctcatctcttttcatcccccacctcgttacagcaaagagtgttatttaagttctttttatttttttctcagtgtatttcagttctgcttcttgccttgttctagcttaaactcattaaacataatttaaaatattttaccttgcctctttattcatttagttcttcaaagtttcccttccccacttgtgttttattatcacctctgcattctaatcatgttcccagctgcaaatatcatcacacaaccttgttttagcgataggtttccttttcttttatcctctaattggaacttaccttcaaaatcttccaagattccttcctgcaggcccctagttttattactagmcagcgttccctcggattcacaccctgtcatgttaaatctttctcccttcaggaagccaaacactggcttttcctttaagcttctctctctgttccattactcatttcttagaaagacctgttttagaacccgaggtttactgtaaaatgtacagctaagttgtgatgaaaaccagcttgtttctataggatgaaataatacagagttcaccttgactcaaccatgtagttagatacctaggaaagagggttgaaagcaaaaagaacaaagttgctgttaaaaaaagaaagaaagaaagaaaagaaacttacatttgattataatggtgccctatgttatttttttctaaataagaaattaaaaatagaaatgtgtttgttccatgattctttagtgagcagtagctggttggcaaggaacaattggctattgaactctccacataaagatagacaagcatgagcatgtcagccccagactcaaggaaaggccataaatgactgtctcctgtgagaggccatcttgggaacaatgaggaacttgtcctggtctggactagctaagtgccttccagtagtagtgactgccaggatgggctgtaggagcaacaaagagggagtcaatcttctcagttattctgttggaatttccttatgctgagaaaatgagctgggaatctatcctgaggaggcaactttgctgcagtcagaattaaatattcagaaaagcagagagggaaggactagtctatgacatgaattctaagaaattcctgaaaatggggaaggagtgggcctaagtgctaactgattttgcaattgcacttacccggaaccagatatattctaaccatttgagatttcagagtctgaaaacttgacacaaaataatcattgggtatttatgtatgtatgtatgtatgtatttatattcatttagagatagagtctggctctgtggcccaggctagagtgcagtggcatattcctagctcactgcagcctcaaacttctgagctccggcctcagccttccaagtagctgggactataagtgcatactacta

SEQ ID NO: 706647 - DNA, 1594 bp, Homo sapiens
tagggctaaaatcaacccgaggcatttatatgtgtataagcaactgagaaaagcagctaacagaaaatggaggggagcccaggaatgagggggagcaccctacccacttctacctcccacctataggatgctagtgccttgatttcccctaagtgcagccctttgttgggtaagactctctcatctcttttcatcccccacctcgttacagcaaagagtgttatttaagttctttttatttttttctcagtgtatttcagttctgcttcttgccttgttctagcttaaactcattaaacataatttaaaatattttaccttgcctctttattcatttagttcttcaaagtttcccttccccacttgtgttttattatcacctctgcattctaatcatgttcccagctgcaaatatcatcacacaaccttgttttagcgataggtttccttttcttttatcctctaattggaacttaccttcaaaatcttccaagattccttcctgcaggcccctagttttattactagccagcgttccctcggattcacaccctgtcatgttaaatctttctcccttcaggaagccaaacrctggcttttcctttaagcttctctctctgttccattactcatttcttagaaagacctgttttagaacccgaggtttactgtaaaatgtacagctaagttgtgatgaaaaccagcttgtttctataggatgaaataatacagagttcaccttgactcaaccatgtagttagatacctaggaaagagggttgaaagcaaaaagaacaaagttgctgttaaaaaaagaaagaaagaaagaaaagaaacttacatttgattataatggtgccctatgttatttttttctaaataagaaattaaaaatagaaatgtgtttgttccatgattctttagtgagcagtagctggttggcaaggaacaattggctattgaactctccacataaagatagacaagcatgagcatgtcagccccagactcaaggaaaggccataaatgactgtctcctgtgagaggccatcttgggaacaatgaggaacttgtcctggtctggactagctaagtgccttccagtagtagtgactgccaggatgggctgtaggagcaacaaagagggagtcaatcttctcagttattctgttggaatttccttatgctgagaaaatgagctgggaatctatcctgaggaggcaactttgctgcagtcagaattaaatattcagaaaagcagagagggaaggactagtctatgacatgaattctaagaaattcctgaaaatggggaaggagtgggcctaagtgctaactgattttgcaattgcacttacccggaaccagatatattctaaccatttgagatttcagagtctgaaaacttgacacaaaataatcattgggtatttatgtatgtatgtatgtatgtatttatattcatttagagatagagtctggctctgtggcccaggctagagtgcagtggcatattcctagctcactgcagcctcaaacttctgagctccggcctcagccttccaagtagctgggactataagtgcatactacta

SEQ ID NO: 706648 - DNA, 632 bp, Homo sapiens
ataggtaaaccatataaaactatgacacaaaggacaaaacagtatctaagccattacagaagaactaaacaataaagaatattgatgaatgctaaggtacatcacatgactatgtgacctgggacacccatcatgagctgtatgctaagaaacccctaagccacaggctgagcaagaatgttgtagttttcaatttctttctatccctaaaaacgcctgaatacaatatgtatattttcttatacttacactctactccctaaacagtcatgttaagaatcactatcaggagctgtaagaaccaaaacagtagccacgagccaaatgtagctattcagaaattaaaatgagkcaaggacaaatggaaagctgaatttttaattttataaaattttaattttctaatatattaaactattaggaagatttaagtatacctgtaataacttggtatgtaaatttactatttcacagtaaatttttatgaaatataaatacagatcaaatatatctaataaaaatttagtgttataattgagatgtggaaaactcaaactggttctgaagacttaatactaaaaacgataatgtaaaatagctcattaataatttttccctgatcatatttcaaa

SEQ ID NO: 706649 - DNA, 632 bp, Homo sapiens
ataggtaaaccatataaaactatgacacaaaggacaaaacagtatctaagccattacagaagaactaaacaataaagaatattgatgaatgctaaggtacatcacatgactatgtgacctgggacacccatcatgagctgtatgctaagaaacccctaagccacaggctgagcaagaatgttgtagttttcaatttctttctatccctaaaaacgcctgaatacaatatgtatattttcttatacttacactctactccctaaacagtcatgttaagaatcactatcaggagctgtaagaaccaaaacagtagccacgagccaaatgtagctattcagaaattaaaatgagtcaaggacaaatggaaagctgaatttttaattttataaaattttaattttctaatatattaaactattagraagatttaagtatacctgtaataacttggtatgtaaatttactatttcacagtaaatttttatgaaatataaatacagatcaaatatatctaataaaaatttagtgttataattgagatgtggaaaactcaaactggttctgaagacttaatactaaaaacgataatgtaaaatagctcattaataatttttccctgatcatatttcaaa

SEQ ID NO: 706650 - DNA, 817 bp, Homo sapiens
ttaatatattttttgctgcctcatagtcataagaatactctcccatattttttcctaatatttttatactacacttttttacttttgggtttgggctttttcttagtgatgtgacatcggaatttaatgttcttgcactaggtagtcaattgccccaacacaatttatttaatacatcattctttttccccacagtgatttgagatgacactgttatcatagaccaaattccctcatgcactgagtcagcttctagacttgcagttcttactgatctttttatccatatctacatcaacctgtgttaattactatagtattatataacagtatcatgctatccattaagtacatccaactctttcatctgttttacaactgtcttgactattcttgtacacttgttcctccatataaatttgagaatctgcttggtaaaygccatgaggagtggggtcaatgggattatggtagattcgtaggtgaacttcaaaatactttttacatggtttatgctatttttcttgccaaccaaacaactacatctttttctccctactgggtacatatcttctaaattgtttagttcatgttaattaggttttacacacaataggaaatattgggtgaaagaacacagtcatgtttaaatgcacattacagagaatataaatccagagacaatctctttgcacttattactcccttaaaaaggtatggctagaaggactccgcatgcacctactgaacaaacacttagtaaattatggattggtaatctcataccagttaaacaaaatagcatgggtttaatata

SEQ ID NO: 706651 - DNA, 619 bp, Homo sapiens
atactactgacacaaaacatggatccatctcacaggcataacattaagcaaaagaaaacagacacagaagtgtctgatcccactcatgtaaattttaggaacaggcaaattaatctatggcacccaaagttagcatgagggaagagagcacaagaagtatggaccaaggagaagcataaggggtccttccaggattatgaaaatgttctaccttttgacatggaaatgtttaatgtcttgatctaggtggtggcttatatggtgtctacatctaaaaattcatgaagctgtacacataaaatacatacttcatgtatattttgctttaataaatgaattataaaacatgagacatatcttttatgtactgatgtggaaaaaatctccaaaagattatatttaaatctaaaaagtttataataattaacacatttattttttaagaaaacaaatacaggcacaaaataaaactgtgtttctgttacataaaaatatagataaaagcactggatttttactggttaaaccccacggggaaaggaaatgagaaagaaaagatcttytggaggatcaaaggtaaattttatttatattacctgaaattttttacaacaaaaaa

SEQ ID NO: 706652 - DNA, 1549 bp, Homo sapiens
acatacataagggatgttgaaagctattgcacattgtttaagctaatcatttcctatgactcattcatttgcaagagggacaccggcaaggtctttgttttcatctgtctgcttggatgtgtttctttgggccaatcctttccttctagggtctctatgacttgaaatagtacctcctctgggcttctctctggatggacctggctgtggcacatggaaacagcattgggtggcccttctgatatttctctgtagtaggacagggaggactgtgcttctcccaccctacatgtgttagggaacacaagcctatctaattctgggattgactgtgcccagtgataaaagctcccttctccaaaatcagcataattggggcaaaggtgagagtttggccatccatctttcttagcattttgctttatttttttcaattagtttagaacctgatcagagaagaggatccttactctttctccctatcctaccacctgccacctgtacagcatttccagagcagccctcatcaatgacctcccacctctggaagaactctctgtaragctgtgatctatgctggctccactagtccctcagcaggaatatgctctagttgccacagtgaaagcttgcttaattacttcttgggtgttacctgcacataaatcttagtctcagagtctgatttgggagtaacccaagctaagactcagatataagtccctgtgctaggcactgtggagaaagatagaaaacatcgttattgtgcttaaaacacattgtcttctggaaaatactatcagtatctccatacatagcatgaatttagaaagacagcaaattaaagattgatatcagattacaagcgccctggaatgctaggctcaggatttgacatgtattccgtaagcacttgaatttctagatattttgtaagcaatgaaatgtttcaggaagatccatcaatgatgatattcctatgcttaatatggatgagtatggatttcaggggacagtcaggagcccccggggagtgaaaagacaggttagaagagcattatgatggcccagctatgacttgctaagagataaagctggaaggagagctgccatgacttggtgtattgctgaacacatggggtggggtgagtggaggcaggatagggagaaagggtaaggatgatggtaacttttccctgcttggacggctgagagaatgatggaactgctgatggagctgggaagctggttggggcagagttggtttggggtggaaaaggacccactctgttgtctgtggtgttgtaacaaggtgattgcttcccaagaaactccagtgctacaaaaaatgaaaccaaaccaaaccagcattataaagacaaaggtttcagtgggacaaggggaatgggaacagtgcttactttctgtgacggttaatattgattgtcaacttgattggattgaaggatacaaagtattgatcctgggtgtgtctgtgagggcattgccaaaggagattaacatttgagtcagtgggctgggaaaggca

SEQ ID NO: 706653 - DNA, 1291 bp, Homo sapiens
ctgacaatggcccacaaagtcctcatgaccatcccctcatcacctctgagctcctcagtgttcctccaacatgtcaggcactgtctgacctcagggcctttgcagatgctgttccctctgcctgggatgctcttcccccaggtatctgcacagttactcccttacttcctttttttttttttttctttgagatggagtctcactctgtggtgagaccctaggctacggtctagcttagggcccagcacacagtagatgctcagtaaacattggtcacaggaatgtgttaagctgtgttaaatgccatttctccctccatgattaaggcttcaggctttggaactcagacacttgggactctggtcccatctgctgtcttcctgctagtccctcctactcccaaagcttgagaccaaataagccacttctagttgggaatyaggtgctctaggctggagcatgccaagccacagagtgtgggggttcttgtgtgggccttataagatggtcgattaaagggtcgattctagcccacgagtgggaatggctgtcccaatctgtcctccatcaatcagcctctactgtgtggagattttccatcagcagctcagaggtttgtgtgagccagcccagcaccctgcagtgactcctgctgtcccagggatgcagccctgactcctccccagcgcacagctctgcctggcttggtcccttttcactgcagcctcacgaacccttttacctccttgctctctggcctcctctctacctctctaatgccaacctcttccctgcctcctggcctttgcccatgccctccccactgcctggattactctcccaccctcttttcatctggccaagtcctacatacccttcagtcctcagtccaaacaccatttcccacaccagcttacacccctggcacgtgcacccagagcccccagttcttcatcaggccagtcatcgtggtcattgttatctactaacatcacctgaatttctcaggagcttactgttttttcataaagccaacttttaaattcaatttattttgggtgggaggcagggaaggaaaaagggattttcctacaaaaaggcctctacttggagagagagagagagatgagcctgggccttttatatcctctcctggggatgggacagttatgattggcagcggtgatgcccaatctcgtcatctaaagtgagtttcataggctacgagccactccccacccactccgaggcattgcagagacacctggtaaacaccctctataaatcatgg

SEQ ID NO: 706654 - DNA, 1291 bp, Homo sapiens
ctgacaatggcccacaaagtcctcatgaccatcccctcatcacctctgagctcctcagtgttcctccaacatgtcaggcactgtctgacctcagggcctttgcagatgctgttccctctgcctgggatgctcttcccccaggtatctgcacagttactcccttacttcctttttttttttttttctttgagatggagtctcactctgtggtgagaccctaggctacggtctagcttagggcccagcacacagtagatgctcagtaaacattggtcacaggaatgtgttaagctgtgttaaatgccatttctccctccatgattaaggcttcaggctttggaactcagacacttgggactctggtcccatctgctgtcttcctgctagtccctcctactcccaaagcttgagaccaaataagccacttctagttgggaattaggtgctctaggctggagcatgccaagccacagagtgtgggggttcttgtgtgggccttataagatggtmgattaaagggtcgattctagcccacgagtgggaatggctgtcccaatctgtcctccatcaatcagcctctactgtgtggagattttccatcagcagctcagaggtttgtgtgagccagcccagcaccctgcagtgactcctgctgtcccagggatgcagccctgactcctccccagcgcacagctctgcctggcttggtcccttttcactgcagcctcacgaacccttttacctccttgctctctggcctcctctctacctctctaatgccaacctcttccctgcctcctggcctttgcccatgccctccccactgcctggattactctcccaccctcttttcatctggccaagtcctacatacccttcagtcctcagtccaaacaccatttcccacaccagcttacacccctggcacgtgcacccagagcccccagttcttcatcaggccagtcatcgtggtcattgttatctactaacatcacctgaatttctcaggagcttactgttttttcataaagccaacttttaaattcaatttattttgggtgggaggcagggaaggaaaaagggattttcctacaaaaaggcctctacttggagagagagagagagatgagcctgggccttttatatcctctcctggggatgggacagttatgattggcagcggtgatgcccaatctcgtcatctaaagtgagtttcataggctacgagccactccccacccactccgaggcattgcagagacacctggtaaacaccctctataaatcatgg

SEQ ID NO: 706655 - DNA, 1026 bp, Homo sapiens
gcaccaactggatcaaactaatgtgccagtaaattaactgtctgctcaaaataaaattcaacacacttctaccaaagacggaagtctagaatctaaataatatagtatgaaaaatgtcaaatataaaacaaaaacaattattaaacatgcaaaaatagcagaaacctatgagaaaattaggagataaataagcaatagaaacagaccttagatagccaggatgttgttaagaataaaaacaagcatttttaagctggtattaaaatatgtccaaggatttagaggaaaataagaaagacagtggagagatgtagaatatcaacacagtcatacaattaaaattcataattgtaggtgggagaaaaggcatgtaatagaaaagggaataatgataaaaaatacttctgacttctcatcagaacaaatataagctaaatgaaaatctaaaaattatttaaagtatagagaataaataataagtcatttcagaatgatatattcagtgaaaataatcttcaaaaggcaaaattaacactttaataaggttaaaataataggtgaaagagtttattaccaccagaaaagcactacaaggaatgttaaagcatgctcttcaagcacaagagtagtgataaaaaatataaactcacatctaccaaagatgtggagtgctactggggcacaagaacagataggttttccttaatggacaatgacaacaacaaaaaatctaatgtttcaacaggaaaatatgtaattgttcttatcctgagatgatagttttaatatcccgatttagtaattgycatatctgattatctttgtcagaaaaactaacatatacaagttttttaaccccaaaatatgaagtctttttatcactttattgagtcacgagctgctatggttaccaagagaaaagatttttggagcccaaagtcttctcaggcttatttttctttccatttcttatttctatacctttaaagatattacaaaggaatttaagagcacccattgtagggc

SEQ ID NO: 706656 - DNA, 1239 bp, Homo sapiens
gaaggagtgggcttcccctgttttgcmcttccgccttctgccatgtgaggacacagtgcatctcctcctgaagacacagtgcacaaggtactatcttggatgcagagaccaggccctcaccagacaccaatcctgctggcaccttgatcttggacttctagcctatggaactgtgagaaatacatttctgttcttcagaaattacccagcctagtgtattttctatatagtagcacaaactcattaaggcacaatgcctcttgtcattttcttctacagttttctttgttgcctctttagcactgggtcattttatatttgatccttcataatacctcttactttcggtttttcacatttctgttccaagtgtattcttagatacatattttccactattagttagcctcaggggttgccagggagtgtgtgtttctgtgccaccactgtaggactgtgtgtgtgtgtgtgtgtgtgtgtgtgtgtgtcccgttctctcttctctctctgtctctcaccctctgtgtgtttctttccctctctctgtcagtctgtgtgtgtgtgtgtttgtgtgtgtatgcctgtgtgtgtgtgtatctttggacgaatgtgctctgttcaccaaaatgcaaatttttgcatatcggccagtctttgttgagcctctttctgtgtctctgcctgggtcccctggccggttgtccgtcattttcacggcggttccactttgggtttgtgaagtcctcgatcatgtgaggagacgcgtcagtcccggagcaatcgaagtctcatccccatcctgagcggccacttttctaagatcaagaggaccacactccagcccaggacaaaaccccacagcagctcattgtccggcaggagaggagcagacccacctccaagaagatggttgtacccctgcacggctcttctctgagcaatgaagccacaccacgatacaattctgaggaggaagccgggaatgggagacggcaacaatccctgtccctggaatgctggcctctctggacaagtcacacatttcacacccctccccttatgcccgtggcagtggcaaggtcctgtaacctgcctgggctctggcctctgctctgtcctccctcttgctctgtctcccctgtttctgaggggcctagttgcctcttggtctggctaataacttctacgaagatcgcttcccagtccatcagggagacactttctggagatgcgtgacat

SEQ ID NO: 706657 - DNA, 1239 bp, Homo sapiens
gaaggagtgggcttcccctgttttgcccttccgccttctgccatgtgaggacacagtgcatctcctcctgaagacacagtgcacaaggtactatcttggatgcagagaccaggccctcaccagacaccaatcctgctggcaccttgatcttggacttctagcctatggaactgtgagaaatacatttctgttcttcagaaattacccagcctagtgtattttctatatagtagcacaaactcattaaggcacaatgcctcttgtcattttcttctacagttttctttgttrcctctttagcactgggtcattttatatttgatccttcataatacctcttactttcggtttttcacatttctgttccaagtgtattcttagatacatattttccactattagttagcctcaggggttgccagggagtgtgtgtttctgtgccaccactgtaggactgtgtgtgtgtgtgtgtgtgtgtgtgtgtgtgtcccgttctctcttctctctctgtctctcaccctctgtgtgtttctttccctctctctgtcagtctgtgtgtgtgtgtgtttgtgtgtgtatgcctgtgtgtgtgtgtatctttggacgaatgtgctctgttcaccaaaatgcaaatttttgcatatcggccagtctttgttgagcctctttctgtgtctctgcctgggtcccctggccggttgtccgtcattttcacggcggttccactttgggtttgtgaagtcctcgatcatgtgaggagacgcgtcagtcccggagcaatcgaagtctcatccccatcctgagcggccacttttctaagatcaagaggaccacactccagcccaggacaaaaccccacagcagctcattgtccggcaggagaggagcagacccacctccaagaagatggttgtacccctgcacggctcttctctgagcaatgaagccacaccacgatacaattctgaggaggaagccgggaatgggagacggcaacaatccctgtccctggaatgctggcctctctggacaagtcacacatttcacacccctccccttatgcccgtggcagtggcaaggtcctgtaacctgcctgggctctggcctctgctctgtcctccctcttgctctgtctcccctgtttctgaggggcctagttgcctcttggtctggctaataacttctacgaagatcgcttcccagtccatcagggagacactttctggagatgcgtgacat

SEQ ID NO: 706658 - DNA, 1239 bp, Homo sapiens
gaaggagtgggcttcccctgttttgcccttccgccttctgccatgtgaggacacagtgcatctcctcctgaagacacagtgcacaaggtactatcttggatgcagagaccaggccctcaccagacaccaatcctgctggcaccttgatcttggacttctagcctatggaactgtgagaaatacatttctgttcttcagaaattacccagcctagtgtattttctatatagtagcacaaactcattaaggcacaatgcctcttgtcattttcttctacagttttctttgttgcctctttagcactgggtcattttatatttgatccttcataatacctcttactttcggtttttcacatttctgttccaagtgtattcttagatacatattttccactattagttagcctcaggggttgccagggagtgtgtgtttctgtgccaccactgtaggactgtgtgtgtgtgtgtgtgtgtgtgtgtgtgtgtcccrttctctcttctctctctgtctctcaccctctgtgtgtttctttccctctctctgtcagtctgtgtgtgtgtgtgtttgtgtgtgtatgcctgtgtgtgtgtgtatctttggacgaatgtgctctgttcaccaaaatgcaaatttttgcatatcggccagtctttgttgagcctctttctgtgtctctgcctgggtcccctggccggttgtccgtcattttcacggcggttccactttgggtttgtgaagtcctcgatcatgtgaggagacgcgtcagtcccggagcaatcgaagtctcatccccatcctgagcggccacttttctaagatcaagaggaccacactccagcccaggacaaaaccccacagcagctcattgtccggcaggagaggagcagacccacctccaagaagatggttgtacccctgcacggctcttctctgagcaatgaagccacaccacgatacaattctgaggaggaagccgggaatgggagacggcaacaatccctgtccctggaatgctggcctctctggacaagtcacacatttcacacccctccccttatgcccgtggcagtggcaaggtcctgtaacctgcctgggctctggcctctgctctgtcctccctcttgctctgtctcccctgtttctgaggggcctagttgcctcttggtctggctaataacttctacgaagatcgcttcccagtccatcagggagacactttctggagatgcgtgacat

SEQ ID NO: 706659 - DNA, 621 bp, Homo sapiens
tattgcaataagggaaaggattgaaagggacaagatgcagtctatgagaatattggaatgctactgacttaatgacctaacgttgtttgcaaggcttcctcaagaacccaattaatttcaaatgggtatcttacattcttgagaattttgctcaactccatttgttattgctagtttttttatttgtagattgaacaagggcttcacatataatacatacagatacaaatccaaaataagatataaacttgaatcactgtcaaattctttactttytttcattcttttattcatttatgtagtgaacatttattcatcgaggccaatctctgttctaaacaccatgcatatctgtgtcactcacaatataatgatatccttatgaagtgtactgttcaatataagagacacaaattaatcaaataatcacataaaactgcctttgtgataaaagctatgaaattgagatacatgtgctatgaagtacataatagggcaatttgacctagtcagagaggtcagttgagatttccatgaaggaatagtgatagggataatatcacaaggaatttcagggctgaagaggacagggatgagtgagctctcacagtatgataatgt

SEQ ID NO: 706660 - DNA, 621 bp, Homo sapiens
tattgcaataagggaaaggattgaaagggacaagatgcagtctatgagaatattggaatgctactgacttaatgacctaacgttgtttgcaaggcttcctcaagaacccaattaatttcaaatgggtatcttacattcttgagaattttgctcaactccatttgttattgctagtttttttatttgtagattgaacaagggcttcacatataatacatacagatacaaatccaaaataagatataaacttgaatcactgtcaaattctttactttctttcattcttttattcatttatgtagtgaacatttattyatcgaggccaatctctgttctaaacaccatgcatatctgtgtcactcacaatataatgatatccttatgaagtgtactgttcaatataagagacacaaattaatcaaataatcacataaaactgcctttgtgataaaagctatgaaattgagatacatgtgctatgaagtacataatagggcaatttgacctagtcagagaggtcagttgagatttccatgaaggaatagtgatagggataatatcacaaggaatttcagggctgaagaggacagggatgagtgagctctcacagtatgataatgt

SEQ ID NO: 706661 - DNA, 1128 bp, Homo sapiens
cagaggtggcccagggatgtgatgtatggatcaaaagacatctgctacaaccatgaaactactcatattaattatatttgaatttaaggagaagtaaagcacaagtaaaggaatttggaataaagcattttataagctttgaaatcagacctatatttgaaaccagtccctacttctgagtagatgttcagctttgggacaatccataagtcttcctaggggatgacagtatccatcttctctggttatcattctgatcaaayagattaaggcaagaggagactgaaacatcataattatctatgagtgatagttactattgctcttgcctcatctatagtgataagatcgcattcattgggtatgtgttttattcatttggtagtatggtagggccaggaaatttgatttgctcagcttgttctttttatctgtgtagaggcaagttactactctgctggagagagtgcactccattacaacttgcttgttatcacattgcatcaggctttttaagtttcatcataagtataactaactcaagaaagatttccttaactctctagactaggttaagcaccttgaaagctaccaccaaatcactcaataagccctcttttgtaacacttaaggtacttgttactagtgtaagctctatgactgaggaaaatgttcatcttgctttccaggactttcaatcaatatttcttgaattgcatcaatatatcttaatcatatactaagggcattcaataaagtttttgcccttcagccttatctgaaagcaaagatcatacaaaaccttggctccttagaacacttacaatagtagaaatgtagggcaatacaatcttttagatttttcacaaaaatagatctgtgtgtaattttattttaactctaaggcacaccattgaaattaagcctgagatgatctttatgattcttccacaagcatccatttatctcaccatggaaccactgtccccctccactatggtagataaagcaagaaaagaaaatggtcaagagcccaagtgaagaaaagcaccagaatactgcagggagaaggcaggagaggaagagatgctgagtaggaatttctgcctttaattctcccgaatgctc

SEQ ID NO: 706662 - DNA, 667 bp, Homo sapiens
tggcttaattgaataattcattacggactcttttgtgattccaacttttgcaactactaaaatgacactttcttgctaaatgcagaactccaaagattttcagagatgaattttscaattaaaaatttggcctgtctactctaattttctcaaagttctcccttgaagagacaacaacttttaccttggcgtttaagaataaaatttatgattggcattcagtcaatatgttcacttggttttaaatttattttaatgaatagtattcaaatgcctactatgtttcagtcaatatgctagacaatcagtatacagatgatcatggcatggaacctaacctaagggaactcgtagcgtagacagtaaagaagaaagttaaacaactaagcataacaccatttgatttatacgttgtaggttattgcaaaatactatagtaacacattgattatattaattctatttcgagggacttgctcatcaatcccaagttaatgaacaaaggaagactatgtattccccaggtcaagaattcattcattttgaatgaatatttattaataaatatttactgagcacctattgtgccaggtacctttctaggcactaaggggacacagtgaacaaaaaagacaaacatagctgccttgtggaacttattgtctac

SEQ ID NO: 706663 - DNA, 3011 bp, Homo sapiens
gcttttgatcttgatttggtgggttgcattagaatcacccgagaaattattaaatatcctaacccctctccttcagaaggattgggatgaggcctgggtatctgtatgcttgacagactttttgggttgttcaatcagcacttggtgcttgcaaacctctgctccctaccattttttaatggtcacataatatttcattatagggttgcatcataatttatttgctatgttactggatgtttgttaatgatttttttttttttttgagacggagtcttacgctgtcacccaggctacagtgcagcggcgtgatcttagctcactgaaacctctgcctcccaggttcaaacaattctcctgcctcagcctcccaagtagctgggactacaggcatgtgccaccacgctccgctaattttttatatttttagcaaagatggggtttcaccatgttggccaggctggtctcgaactcctgaccttgtgatctgcccacctcggcctcccaaagtactgagattacaggcgtcagccacagccctgctgttaatgattttttagatatcataagtaatacaccatagtagcttttttaattggcccgtgcgaacacattatttctctatgccagccatcctgaagagctgccagaataacttgtttcaacaccatgtggaagggctttttcttccttttttcagattatttatttcaatgtggattctatccagatctatttctcagtaagaatcacagttcttgaaaagttaacagcctttgtttgactagaaagctcacgatttcttctgttctcaagtttttgaccacttctcatttaatagataaaatataatatagaaatggcaaatgtcttgcagggtgcagacatactggtaatcctactccatgttctaaatctggcaactaaaataaacttgaatttgttaccagtgcttaaaagttgatgtatttctcataagaattgggatttatagctttttgcaaaaatggaaggatctggcaaatctgggcctggactgtcaaatggtaacccttggctgggccggagaagctcctgtggatgaagcccagcctctctgatttaccccagtccccactcctccctgttattcttgataacaaggctgagaatcagtttccatcattcgttgcctctgtgagccatgttgaatttaaccaaaatttgtaacatgtttctgatagaaaaaaagaacttctccgtctccatggtttcaatgtttctgttaactaaaaggcttcactaagttacttacattacctccactatgtccaaataaataaaataaaaaaataaaaaagcctattttataacaaagtgttggatacctattttataacaaagtgttggatgcctgatgtaatttattattcttgactgtcagaacaacagtcaagaggtagacactattatcactatttcatagatgcagaaactgagtctcataaagcctaaataaattttcttcaggcaaaagaccaataaaagtacgttagttaagaatctttggtcaggcatggtggttcatgcctgtaatcccagcacttcgagaagcaggcgaggagttcaagacgagcctgtgcaacatggcaagaccctgtctctacaaaaaatatcaaaattagctgggcgyggtggcatgcacctgtagtccctgctacacaagaggctgagatgggaggattcctttagcccagaaggttgaggctgcagtgagctgtgatggcaccactgcactccagcctggatgacagagcaagaccctgtctctaaatttaaataaataaataaataaataaataaataagaatcactgatggcaagtaacagaaactgtagaacagattttcacagtattttaaaatcaatctattagaattattcacttgcttaaattatttctggcaagagatattcagatactttcttaaagtattaagagaacacgcaggtttttttggaggggggggtctggtaatgttgataacaagaataatgaggacatattaactgaattaattactgtaagttttcgagcaaatatatccttctcctaacaatatacagatgctgttcagcatatgtatgatttgctacatcctgataaactcattgtaagctggaaatgttgtaagttgaaaattcatttaatagacctaacctaccaaatgccctatcttagtctagcctaaattaaacatgcccagaacacttacattcgcctgtggttgggcaaaatcatctacaaaagcctattttggccaagtgtggtggctcatgcctataatctcagtattttgggaggctgaagcaggtggatcacctgaggtcaggagtttgagaccatcctggccagcatggtgaaaccccatctctactaaaaatatgaaagattagctgagcgtggtggcacacacctgtagtcctagctactcaggaggctgaggcacaagaatcacttgaacccggaaggcagaggttgcagtgagccgagatcgtgccactgcactccagcctgagcgacagagtgagactccacctcaaaaataaatacatacatacatccatacatacataaaataaaaaagcctattttataacaaagggttggatgcctcaggtaatttatttgatactgtactgaaagtgaaaaacagaatggctcactggtgctgcccagcagcatgagagagtatcacactgaatatcgctatcccaggaaaatataaaaaatcaaaatggaaagtatgggtttctactgaatgggtatcactttcacacccattgtaaagttgaacaatcatcaactgtactattttacattaggaatcgtctgtagtttttaatttcaagtgaccaaaattttttcaacagtattttaacatacatagtttcctatagtaatcattcatagttagtaaaatgtcaattctcaaggcaggaaattttattttcttctttgtgtaccagca

SEQ ID NO: 706664 - DNA, 1462 bp, Homo sapiens
actgaagttttattatagatgtttgtatgataagccacattttatattctaaattttaaaaacctaacatgaaaataatatttaagaaaataacttgaagtaaagatttactttgctgctttgagccaaagattcttttttaaaaattttttcatgaaaggctttaagaggaaaaggagaaatgaatggaacatatgctttgaaatggttgactgcaagggtgtaaactgtgtgattgtttgaacactgttgaacactgttcaacttttaagtgcaaatattccttaggatagcctgttatctcatcttgtctctatacaaagtttcatgccattctttagtaaacatgcgcagaagggcttgctgccttgaaaggctgtaggttgttggaaattgctctgttttagagtcctgaggaaaatgaggtagaaggcaaaggagtggcttaaagattgccaatctttggaattccatatcccttgaaatgccaatctttggaaattcccatttcctgcacaatctcagggtaaaagtgaatgataaaggaaacaaaggaggtagaaaagcatccttgggagggttgattccttgggccacctggtgccaattgactgctacaatttagagacccttgactaaactcagaaaatccaggactgtaacctatattcaacctgatcagctaggggtttctttgattttaggaacacttaccaacgagtacaaactgatgatatgaggccctcagtttttatagtgtgttctttctgaagctgaatgctaggtcacaaacataaccttttacaccaaaaaattaatcactgatgctcatttcttagattctactagattcgtcccgggaattctgtcaaaaagaaggaactagcaaggtatataatatcttaggaggctaatccagaaaaaatggaaagtatgtacatggtgcaagactttttcagtgtagattcagaaaacatttgttcccaagctggaactcatgaagatgtggcaactaaaagattattcaaggggtgataccccaggtggaggaatatcatgagtaactgagagctagagagagatcagggactcaaaagaagtacagttgaccctcaaacgacccgggtttcaattgatcaggtctatttctgtgtggattttcttctgcctcctgccaccccagagacagcaagaccaacccctcttcctcttcctcctcagtctattcaacataaagatgatgaagataaagacctttatgatgatctacttccacttaatgaaaagtaaatgtattttctctttcttatgattttcctaaaaacattttcttttctttatataatacatatacaaartgttagtcaactgttcatgttattggtaaggcttccagtcaagagtaggctattcggccaggtgcagtggctcacgcctgtaatcccagcactttgggaagcca

SEQ ID NO: 706665 - DNA, 1098 bp, Homo sapiens
tgaccccaaaatgccaaaatacagtctgttattcttgttaataaggactgattttcagagtggtgagtttgctaaaatgggtgatcatcatcttggggaaagaggggcatctgaagcagcctgtgtaaggaaattgaccccactctaggtggagccaaatgggtgccggagttggggggatcaatgattatgcacagggtcrtcactctccaatcaaagcacagccactgcttggctccctctgggatccacctctgggcagggagggcttcctctttccatgtcctcatacagaagcagccctcttcaggaggtagtaagaaatgtgaggagaacattatttgccgtcagttatccacgaggtatttctgtttccttgttgagcagcaacacttgcatcaatgtgtgccagaaagaaaaccaaaaactgaatagagttgcaaggccagggagtcccagcaggcccctctcatgctctctcactcctgatctgccctcagcccacagctagtgaaacacatgtctggagtcaagggtttggagagaacacagccatagcgagcacagtcgtccacttccagccccctacttccctccactgtgacagcatcagtgaagcagctggtatctcgctgttcctgttcacataaattattgtcttgaagcctcacagcaacccaatgagggaggcatagccgccgtacaaatatgagagatgcagaggtcaaatggcttgaaagggtcaggcctctaataacttgcacaggacggaagccagacctggttctggtaatgctgagctctggggcataaagtttcccacttcacataccgagcaacccccaccaacaatttccttgggttctaccccatttattataccacagagaaggcaaagcctatccctgtgcttggcccagaaaaggaagacaagacccctagaccaaatcccattttctctggaataccaccaaaaatggtgcagggtctggagtgctggctttgccctcagatactgctccaatgtaactgaataacctgttaatggacaataagactacgatgaaaaagacttgcaaggtcttgaatggggcatta

SEQ ID NO: 706666 - DNA, 1098 bp, Homo sapiens
tgaccccaaaatgccaaaatacagtctgttattcttgttaataaggactgattttcagagtggtgagtttgctaaaatgggtgatcatcatcttggggaaagaggggcatctgaagcagcctgtgtaaggaaattgaccccactctaggtggagccaaatgggtgccggagttggggggatcaatgattatgcacagggtcgtcactctccaatcaaagcacagccactgcttggctccctctgggatccacctctgggcagggagggcttcctctttccatgtcctcatacagaagcagccctcttcaggaggtagtaagaaatgtgaggagaacattatttgccgtcagttatccacgaggtatttctgtttccttgttgagcagcaacacttgcatcaatgtgtgccagaaagaaaaccaaaaactgaatagagttgcaaggccagggagtcccagcaggcccctctcatgctctctcactcctgatctgccctcagcccacagctagtgaaacacatgtctggagtcaagggtttggagagaacacagccatagcgagcacagtcgtccacttccagccccctacttccctccactgtgacagcatcagtgaagcagctggtatctcgctgttcctgttcacataaattattgtcttgaagcctcacagcaacccaatgagggaggcatagccgccgtacaaatatgagagatgcagaggtcaaatggcttgaaagggtcaggcctctaataacttgcacaggacggaagccagacctggttctggtaatgctgagctctggggcataaagtttcccacttcacataccgagcaacccccaccaacaatttccytgggttctaccccatttattataccacagagaaggcaaagcctatccctgtgcttggcccagaaaaggaagacaagacccctagaccaaatcccattttctctggaataccaccaaaaatggtgcagggtctggagtgctggctttgccctcagatactgctccaatgtaactgaataacctgttaatggacaataagactacgatgaaaaagacttgcaaggtcttgaatggggcatta

SEQ ID NO: 706667 - DNA, 1098 bp, Homo sapiens
tgaccccaaaatgccaaaatacagtctgttattcttgttaataaggactgattttcagagtggtgagtttgctaaaatgggtgatcatcatcttggggaaagaggggcatctgaagcagcctgtgtaaggaaattgaccccactctaggtggagccaaatgggtgccggagttggggggatcaatgattatgcacagggtcgtcactctccaatcaaagcacagccactgcttggctccctctgggatccacctctgggcagggagggcttcctctttccatgtcctcatacagaagcagccctcttcaggaggtagtaagaaatgtgaggagaacattatttgccgtcagttatccacgaggtatttctgtttccttgttgagcagcaacacttgcatcaatgtgtgccagaaagaaaaccaaaaactgaatagagttgcaaggccagggagtcccagcaggcccctctcatgctctctcactcctgatctgccctcagcccacagctagtgaaacacatgtctggagtcaagggtttggagagaacacagccatagcgagcacagtcgtccacttccagccccctacttccctccactgtgacagcatcagtgaagcagctggtatctcgctgttcctgttcacataaattattgtcttgaagcctcacagcaacccaatgagggaggcatagccgccgtacaaatatgagagatgcagaggtcaaatggcttgaaagggtcaggcctctaataacttgcacaggacggaagccagacctggttctggtaatgctgagctctggggcataaagtttcccacttcacataccgagcaacccccaccaacaatttccttgggttcyaccccatttattataccacagagaaggcaaagcctatccctgtgcttggcccagaaaaggaagacaagacccctagaccaaatcccattttctctggaataccaccaaaaatggtgcagggtctggagtgctggctttgccctcagatactgctccaatgtaactgaataacctgttaatggacaataagactacgatgaaaaagacttgcaaggtcttgaatggggcatta

SEQ ID NO: 706668 - DNA, 1098 bp, Homo sapiens
tgaccccaaaatgccaaaatacagtctgttattcttgttaataaggactgattttcagagtggtgagtttgctaaaatgggtgatcatcatcttggggaaagaggggcatctgaagcagcctgtgtaaggaaattgaccccactctaggtggagccaaatgggtgccggagttggggggatcaatgattatgcacagggtcgtcactctccaatcaaagcacagccactgcttggctccctctgggatccacctctgggcagggagggcttcctctttccatgtcctcatacagaagcagccctcttcaggaggtagtaagaaatgtgaggagaacattatttgccgtcagttatccacgaggtatttctgtttccttgttgagcagcaacacttgcatcaatgtgtgccagaaagaaaaccaaaaactgaatagagttgcaaggccagggagtcccagcaggcccctctcatgctctctcactcctgatctgccctcagcccacagctagtgaaacacatgtctggagtcaagggtttggagagaacacagccatagcgagcacagtcgtccacttccagccccctacttccctccactgtgacagcatcagtgaagcagctggtatctcgctgttcctgttcacataaattattgtcttgaagcctcacagcaacccaatgagggaggcatagccgccgtacaaatatgagagatgcagaggtcaaatggcttgaaagggtcaggcctctaataacttgcacaggacggaagccagacctggttctggtaatgctgagctctggggcataaagtttcccacttcacataccgagcaacccccaccaacaatttccttgggttctaccccatttattataccacagagaaggcaaagcctatccctgtgcttggcccagaaaaggaagacaagacccctagaccaaatcccattttctctggaataccaccaaaaatggtgcagggtctggagtgctggcwttgccctcagatactgctccaatgtaactgaataacctgttaatggacaataagactacgatgaaaaagacttgcaaggtcttgaatggggcatta

SEQ ID NO: 706669 - DNA, 1211 bp, Homo sapiens
tttttttctagatgactacctagtatcctcaaatcatgtattcagtagtctatctttgcttctcctaaatgaaatgacacttatatcatcctttagattctgccacgtgtctgggtttgttaacacttttctgttctgttgcattaatttgtctacctatccacatgccagtaccacttgtcttcattactgaggttttataagtagatctttaatctgcctttaaaaattagatatatttaaccctgagaagcagagtatagtcctaaaaagttatgatgactgattagacaacttctggtcctgggacaccaagaaaatttgaaatgtatataaccctgagacaccaatacaatatgtaattagcacatccaagaagccatagtaactaagctcttttttgttgttgttcattttgtcttttgaggcagggtctccctctgttgcccaggctacagtgcaatggtgtgatcatggctcactgcagcctcaacctcccgggctattttttttttttttagaaacaaggtctcactatgttgcccaggctgatctagaactcccgggctcaagcagtgctcccacctaagcctcccaaagtgctaggattaccggcaagagccacctcgcccagccttcaagcccttttggataacactttagatgtttatttcagaagctactaaaactataatacagaaacacaaattacatcctatacaataactacaacttgaattctatattaccatgctgttttttcccattctgcaccagcctccacccatccctggactgcaactctgcagttacctgttagtctctttttttccaacagagtaaactgctctttatgcaaagccgcttcttacacagtacttaccaacttttaaagggccaaatacgcttktatttttgtaaataattcatcatattcaaacacgtcagcccttcataagcaacactttcactttgctgtgtagaaatgttttcatcaaagtaaaaagctttttatcactgccccaggaaatgaagctgaggcatccagaacgctctaaacacttatctccctccttcccatcaactcagggtggctgctccacgccaagccatgccccaccagctcgggcatatggacacgctgtgttcacagtagctcagaagccctgggtcactggtgccaactagtgtatttggattacatgaaaata

SEQ ID NO: 706670 - DNA, 1476 bp, Homo sapiens
gattattaacaaagatgtattttaatgcacaaactcaaatgtttaaaatatatatttactttgtactcaaataaaatcccctattgcaaatcctatacatatttcaatgcaattcttatacatcgatcttaatcaaatttataaatgtacaatcctgaagacagtgtactagatatgcactataaaatatattgcagtaaggaaacagattaagttcactgtcaaactgtctgacttccttaacaaatttaataaagataaatgtcaatatgaacaaatttgttaggtaccttaggaatctttcaaaactatttagatataaaataaaattatagtaataaaatattgaagagaaatatcatttttagtgaatatggttagaaagaacataagaagtgagatcaaattattttaattaaaaaaataggccaggtgcgatggctcacgcctgtaatcccagcattttgggaggccgaggcgggcggatcacaaggtcaggagattgagaccatcctggctaacacggtgaaaccccgtctctactaaaaaaagtacaaaaaagaagttagccgggcgtggtggcgggcgcctgtagtcccagctacttgggaggctgaggcaggagaatggcgtgaaccyggaaggcagagcttgcagtgagccgagatcacgccattgcactccagcctgggtgacagagtgagactgtctcaaataataataataataataataataataataataataataatagactgactcaaatctaccataaagcacctctactcattttggaatatgtacgtggaattttgcttcaatagctgaaatctaaaaacactctttctgttgcatttgattattcaatcatgataaggtaaatgtaaacagactgtgtagcactctatcacctggagtgaacttagaatttacagcttagagtacatgactaaaagaggaatggagtggaagtgggcagtaggtgtctttggggcaaaaattctataaactggtgttatctaaactatcacattactttgttaaattattgtttcatcacgtatgacctttgtgatttgtcacacattttacttctacatatgcacataattgtaatttttttaactttaaaaagtcaattatgtttaagaaaatttttaaaataagaatgaacgtatgtgatatttactgtgatatttactcgtgtatttacgatttctgatgcccttattttctttacatacatccgtgtatccacctgttaccattttccttctgcccaaagtatttatcatctataccagtgaagaactgttggttcaactgttgtatgtctgaaaatgtgactctttttctgcctccattctgtgaaaaaaaaattgctgcatatagaatttgaggttaacatggttttgtggatttttttcagtattttaaagatgttgctctaatatttctggtttgctttgttcc

SEQ ID NO: 706671 - DNA, 2259 bp, Homo sapiens
tgtrtgtaatacataaaatgcagcccttgctttgggaagaactgttattgacctactgtcaacaatgtatgtattctaaacttctttcatattatagtctctttcttgtatccccccctcacctactttccctgggcatatatataccctatttatcttattgtggtgaggacagctgtgttgaagatgtcttcattcaacattatgttaaaattgagtactgaatatacttccgtgtcgggatttgtagtgtgcattgggttataaagataaattactctttctcccattttgccaatttagcccctacttgttctttaagtctttgctcacttatcacttttaggaagccttctctggttggtcccacgctgaacgaactgcttctctctcttcctatatcgcagtgcgcataacatcatcactcaactatttgagagcctggtatatgccagacatgtgtaataaggactagtttaggctaggggttccaaaaaggccttcctgaggaaatagcatttaaactgagacttgaagatgtgtgggaggtagcatgccaaagatggcagtaagtggaaggatgctaatgtaggcagaggattagcacgtaagaagataagataatggatttctaggaaacgaaagagattcagtggctagagcatagatgaggatagggtttcttagggatattagattatattcagcaggcaatgcaaagctactaaagcttttttttttttttttgacacggagtctcgctctgtcacccaggctggagtgcagtggtacaatctcaactcactgcaacctccaccttctgggttcaaaggattctcctgcctcagcctcccaagtagctgggactacaggtgtgcaccaccacaccaggctaatttttgtatttttagtagagacagggttttgccatgttggccaggttggtcttgaactcttgatctcaggtgatcctcctgcctgggcctcccaaagtgttggaattataggcacgagccactgtgcccggcctactgaagcatttttaattaagcaaattgtatgatctgattttactttttggaaatggacttggctgcccggtggggagagaagggagatcagggatcacagagatagggagactggttgggaagctatttggttaagagatgggatggtggcatgggagaaagagaactggagagattagatattttgtgggtataattgataggacttcatgactgcatgtaggagccttaggaagttagaggagtcaaggatgataacaagtttttagtattccattacatggtgattatgaatttaaatatcttcccttctctttagacggggcatttgtggataatgttggctacagagtagggactccaaaaccatatgtagaactactgagagttcaaggaacaaataaagtttagaagggaaaggtgtaatatgttttactgagaaatgaaatgtaaagcataggataatacagacttacaagttttcttttctgcagtccaaagaattagcatattatataaatgtattaatcaaactttttatatgcctttgtagttatattttatacatttgtttgaggtttttcacaaccttttttttcttttggtttctggcttggagtttctggttttgtttagtattgactctatttgatttcttgcttttaagggaaattccatttacttcactaaaaaattaagcaaaagcttaatctagaatagcctaaaaagcctaaatttcatcgtctttacagagtgatgaaagaaaagaccaaacctcagggtggagagggcaaaggcgctcagtcaactccgatccagcactccttcctcactgatgtctcagatgttcaggagatggagagagggctgctcagtcttttgaatgatttccactctggaaaacttcaagcatttggtaagcaatagatgtttctgtattatttttttctctaagatgtttgcatcctgttttctgtgtgtattttactcttcttttcaaagtgccagtttcttttaagaaaaaaagagcccacaggcataaaggcaatcatcctagattttgtcttagaatataatttgccttctaaaacttctgggaaaaagtttttttttaagagggagggttagttgaaatgttgaagtaggattgccattatggaataagtatcttgcaagtttaccaaataagagggacagtcttggtcagttaaaatattttagacttagt

SEQ ID NO: 706672 - DNA, 2259 bp, Homo sapiens
tgtatgtaatacataaaatgcagcccttgctttgggaagaactgttattgacctactgtcaacaatgtatgtattctaaacttctttcatattatagtctctttcttgtatccccccctcacctactttccctgggcatatatataccctatttatcttattgtggtgaggacagctgtgttgaagatgtcttcattcaacattatgttaaaattgagtactgaatatacttccgtgtcgggatttgtagtgtgcattgggttataaagataaattactctttctcccattttgccaatttagcccctacttgttctttaagtctttgctcacttatcacttttaggaagccttctctggttggtcccacgctgaacgaactgcttctctctcttcctatatcgcagtgcgcataacatcatcactcaactatttgagagcctggtatatgccagacatgtgtaataaggactagtttaggctaggggttccaaaaaggccttcctgaggaaatagcatttaaactgagacttgaagatgtgtgggaggtagcatgccaaagatggcagtaagtggaaggatgctaatgtaggcagaggattagcacgtaagaagataagataatggatttctaggaaacgaaagagattcagtggctagagcatagatgaggatagggtttcttagggatattagattatattcagcaggcaatgcaaagctactaaagcttttttttttttttttgacacggagtctcgctctgtcacccaggctggagtgcagtggtacaatctcaactcactgcaacctccaccttctgggttcaaaggattctcctgcctcagcctcccaagtagctgggactacaggtgtgcaccaccacaccaggctaatttttgtatttttagtagagacagggttttgccatgttggccaggttggtcttgaactcttgatctcaggtgatcctcctgcctgggcctcccaaagtgttggaattataggcacgagccactgtgcccggcctactgaagcatttttaattaagcaaattgtatgatctgattttactttttggaaatggacttggctgcccggtggggagagaagggagatcagggatcacagagatagggagactggttgggaagctatttggttaagagatgggatggtggcatgggagaaagagaactggagagattagatattttgtgggtataattgataggacttcatgactgcatgtaggagccttaggaagttagaggagtcaaggatgataacaagtttttagtattccattacatggtgattatgaatttaaatatcttcccttctctttagacggggcatttgtggataatgttggctacagagtagggactccaaaaccatatgtagaactactgagagttcaaggaacaaataaagtttagaagggaaaggtgtaatatgttttactgagaaatgaaatgtaaagcataggataatacagacttacaagttttcttttctgcagtccaaagaattagcatattatataaatgtattaatcaaactttttatatgcctttgtagttatattttatacatttgtttgaggtttttcacaaccttttttttcttttggtttctggcttggagtttctggttttgtttagtattgactctatttgatttcttgcttttaagggaaattccatttacttcactaaaaaattaagcaaaagcttaatctagaatagcctaaaaagcctaaatttcatcgtctttacagagtgatgaaagaaaagaccaaacctcagggtggagagggcaaaggcgctcagtcaactccgatccagcactccttcctcactgatgtctcagatgttcaggagatggagagagggctgctcagtcttttgaatgatttccactctggaaaacttcaagcatttggtaagcaatagatgtttctgtattatttttttctctaagatgtttgcatcctgttttctgtgtgtattttactcttcttttcaaagtgccagtttcttttaagaaaaaaagagcccacaggcataaaggcaatcatcctagattttgtcttagaatataatttgccttctaaaacttctgggaaaaagtttttttttaagagggagggttagttgaaatgttgaagtaggattgccattatggaataagtatcttgcaagtttamcaaataagagggacagtcttggtcagttaaaatattttagacttagt

SEQ ID NO: 706673 - DNA, 915 bp, Homo sapiens
catggaaaaaatatattatttttccttaatatttacatgaagtgggtgctattacaatctctattccacacactcagagagaaaaatcctttacccaaggtctctaactagacagggcagagctggaaatttgatccaggtctgcataattcaaagcccctgctctcaacacagagttccaagaaccatttaataagacaccctttcattcatttacagggaagaagagttggtttgggagaaggtacacgttatctaatgtgtacatgataattttatacagtaaacaactaaaatctgaaggaatgatctgttgaccaaagcacttgcaagtcatccttgctccacggtcttcagcaacaaagtatgccaattaactataaggtataaatcctaactctgcattagtaccttgtttgcagtcactggtgctaatggcagtaactggcaaataaaacctaagtcatttttgccactattttgtaagtaagggaaggtgtttttttgcttcattagtcaattgtcaggaatatagatggtaatgacactttccacaacaccagtgagacacgaatagggcaccttctttaggtctgaatgagacatgtttattagtaaatgaaagcttcaaacatccattccctacatggagaaattcaaacactcaaaatcacccaacttcccaccatgagccatgaggttttcttagaccagggagaagaagactttctgtggcccattcctawgttcctggctggaatcaaggtagacaaattatataaacgttgtaccatttgttgttccaacaaatgagtgaccgttaccgtctcctggtgcccaatggatgtaaaactgcattactacagcaatgtggctaatagatataaagttacaggccttcaaatgcttgattta

SEQ ID NO: 706674 - DNA, 1310 bp, Homo sapiens
  misc_feature 745, 746, 747, 748, 749, 750, 751, 752, 753, 754, 755, 756,757, 758, 759, 760, 761, 762, 763, 764, 765, 766, 767, 768,769, 770, 771, 772, 773, 774, 775, 776, 777, 778, 779, 780,781, 782, 783, 784, 785, 786, 787, 788, 789, 790, 791: n = A,T,C or G
  misc_feature 792, 793, 794, 795, 796, 797, 798, 799, 800, 801, 802, 803,804, 805, 806, 807, 808, 809, 810, 811, 812, 813, 814, 815,816, 817, 818, 819, 820, 821, 822, 823, 824, 825, 826, 827,828, 829, 830, 831, 832, 833, 834, 835, 836, 837, 838: n = A,T,C or G
  misc_feature 839, 840, 841, 842, 843, 844: n = A,T,C or G
ccaaatgggtttctccacttgcgagcgtgtttccaaaacttctcaagagaagtcacgtgaaaattcaaccactagatggagtggcttttataagccctcaggaatcaatttgttattctatttggtggacatagttctcgctttggttgagcaacttctcctcctgctacaacattttatgtattttacaactgaattaattaaaatacaaataggaaaatatgttatggagagttaaaatgggttattactactgcctatgaaaactaaatttctaattacttttctgaggcaaaagggcattgagaaaatttaatatattgataaaaattaattttgaatatcaggaattctgcctcaagaaagtaattaagaatgagaaaaggaaaggagttctacttaaaacaaatatgtttaaaccaagagatgttaaaagtaagaggggtggtctcaggaacccacaatcaatattaataaccaactcattctattttgtaaacatcmggctttccaatttccaaatatgccataatcactactggtcctaactctgtgatgaaaaagaacagaaaattaatctctattattgtagggactaaaatggaatatttaacaagagaaatgaatcttgcttcaaatattcatacaaattgaggacacagtgactttctaaataattcaatttccttcctatcattctctcactaaaataattttaaataagtttttattattgcgtaaatcnnnnnnnnnnnnnnnnnnnnnnnnnnnnnnnnnnnnnnnnnnnnnnnnnnnnnnnnnnnnnnnnnnnnnnnnnnnnnnnnnnnnnnnnnnnnnnnnnnnntaaaataaattttaaataagtttttataatggcgtaaatccgagggtttccttcagacattattataagaattaggtacttatgtatcacctactttagtcgaaatgtttaggaaattttcagtgtgtgctaccaatgcaagacataaacagaaaaatatgctttcaagatgtaaataattacatacaaacagaactggaagaacgaggtttcagtagcaatgcaaaatatgctctggaaatgtagttgtgattaagaagtatgtatgcaaattggatgcaagtgcagaatttttatgccattgaaaccatgaggctgttctattgtattcattccggatcgagcccttcttagcgtttgtgtgatacaattaagaattaagagattccaggaactgaaaagtgttcagaaaaagtgatgtgaacatattgaattagtaaataagacaggtaccaacgggctgaaa

SEQ ID NO: 706675 - DNA, 631 bp, Homo sapiens
cttacagacttcaactggtttcatttttactttaataatacatagttgaaatgtataatttttgcatttattctaggccagacactatgctaagcactttcaatgtatatctgagtcctaaaaaatcctctgaatagattttattattattattattattattattattattatattatggaggttagtagtactgatattaacaaatgttaaagaaaaaaattactttcactttaaagtgccttatcagcagataatgtatgtataactcatttatatattctgtagctcttttcagtattattttttcctatcccagcttccaggaatttacttttacattctaccttgataatctcacctttaggattacatcttgctaatgtccactggaaatagaagtctttcaggttcggacttgtgtctgtatctaccagtatttctttctactaatgtcactataatctattcaatttaattttttaaatccctcaatgtcatggctcccctgcatgcaaatgagacacaattttacayggtctgtcctcaatctctctgctacattctactcctaaatatgctcatccaatatcttgaactgattatttctattctcatacatggaaacatt

SEQ ID NO: 706676 - DNA, 946 bp, Homo sapiens
tgagtgactttgcaatgcaggctactgaggctcagtcccgctggggaccactggagacaatgtggaacaggcaagagttgtcccacctgtagggagttaatcgcccgactcccatccatcattggctgaggtctattctggatcaacgcgtggacactttcagcctgtcttgcgggcctcatgggtgggaccctggggcggggggtcaaaggtgctggatgtagggagcagtaggcagggactagaagagagagtgtagcgggtaggggcaacagtacagacaggacaaatgatattcatgctgggaaatgtgtatgtcttttcttctggctaggcctttccctggggattgagtcaatccaagcaggagtcgagctggacttgggttttgtagttgccctatgctatggtttgaatgtttgtcccawctcatgccgatatttaattgccattgtaacagtgttaagaaagagggcctttaagaggtaagccacaagggctccacccacgtgagattaatgccattatagaagggtgagtttggctctctttttctctttctcatcttcccgctttccatcatgtgctgatgcagcaagaaggcccccaaacatactggtaccttgatattgcacatcccagcttccagaactgtgagccaatacatttctattagttataaattaaccagtctgtggttttctcttacagtggcacagactaagacaatgtggttgctgtgcatgtgccactggcttcagatcagtgttaccctgtgcttagggtggaggctggcttgcagaggagtttgctcagtgtctttaagcttctgcactgtgcctgagccttggatatggtctctgcacatctgccccatccccagtggtagacatctgtttgcttgttatttgctagcctggttggatgggagaagttggattctcta

SEQ ID NO: 706677 - DNA, 946 bp, Homo sapiens
tgagtgactttgcaatgcaggctactgaggctcagtcccgctggggaccactggagacaatgtggaacaggcaagagttgtcccacctgtagggagttaatcgcccgactcccatccatcattggctgaggtctattctggatcaacgcgtggacactttcagcctgtcttgcgggcctcatgggtgggaccctggggcggggggtcaaaggtgctggatgtagggagcagtaggcagggactagaagagagagtgtagcgggtaggggcaacagtacagacaggacaaatgatattcatgctgggaaatgtgtatgtcttttcttctggctaggcctttccctggggattgagtcaatccaagcaggagtcgagctggacttgggttttgtagttgccctatgctatggtttgaatgtttgtcccaactcatgccgatatttaattgccattgtaacagtgttaagaaagagggcctttaagaggtaagccacaagggctccacccacgtgagattaatgccattatagaagggtgagtttggcyctctttttctctttctcatcttcccgctttccatcatgtgctgatgcagcaagaaggcccccaaacatactggtaccttgatattgcacatcccagcttccagaactgtgagccaatacatttctattagttataaattaaccagtctgtggttttctcttacagtggcacagactaagacaatgtggttgctgtgcatgtgccactggcttcagatcagtgttaccctgtgcttagggtggaggctggcttgcagaggagtttgctcagtgtctttaagcttctgcactgtgcctgagccttggatatggtctctgcacatctgccccatccccagtggtagacatctgtttgcttgttatttgctagcctggttggatgggagaagttggattctcta

SEQ ID NO: 706678 - DNA, 946 bp, Homo sapiens
tgagtgactttgcaatgcaggctactgaggctcagtcccgctggggaccactggagacaatgtggaacaggcaagagttgtcccacctgtagggagttaatcgcccgactcccatccatcattggctgaggtctattctggatcaacgcgtggacactttcagcctgtcttgcgggcctcatgggtgggaccctggggcggggggtcaaaggtgctggatgtagggagcagtaggcagggactagaagagagagtgtagcgggtaggggcaacagtacagacaggacaaatgatattcatgctgggaaatgtgtatgtcttttcttctggctaggcctttccctggggattgagtcaatccaagcaggagtcgagctggacttgggttttgtagttgccctatgctatggtttgaatgtttgtcccaactcatgccgatatttaattgccattgtaacagtgttaagaaagagggcctttaagaggtaagccacaagggctccacccacgtgagattaatgccattatagaagggtgagtttggctctctttttctctttctcatcttcccgctttccatcatgtgctgatgcagcaagaaggcccccaaacatactggtaccttgatattgcacatcccagcttccagaactgtgagccaatacatttctattagttataaattaaccagtctgtggttttctcttacagtggcacagactaagacamtgtggttgctgtgcatgtgccactggcttcagatcagtgttaccctgtgcttagggtggaggctggcttgcagaggagtttgctcagtgtctttaagcttctgcactgtgcctgagccttggatatggtctctgcacatctgccccatccccagtggtagacatctgtttgcttgttatttgctagcctggttggatgggagaagttggattctcta

SEQ ID NO: 706679 - DNA, 951 bp, Homo sapiens
agataaagtgtagaccctgaaggctggcattcagaatactccataggtgactctatcttagctgtgcaatgtgatgtcccaccagtccctcacttttaaaaatggctttactgagatataattcatagtccttgtagttcacccatttaaactgtacagttaagtgagttttagtatattcacagaattgtgcaaccatcactgcaatcaattttagaacatttycatcacccccaaaagaaaccttgtactattagcagttgctcctcagtaccaaccctctcagcctttgggaaccactattctgctttctgtatctatggatttgcctattctggagattcctaaacacggaatcatacagtatatggccttttgtgactgacttctttcacttagcataaggtgttcaaggttcacccatgttgtagcagctatcagtagtttattcctttttattgcagtgtagtattctactgtatggatatagcgcttttgtttagccattcatcagttgatggatattgggttgtttccacttaattcttcactttttgattcagtcatgctggccttttcactgttactcagtttcattgtgtttatccttaatttttgcttttcctcatcctggagtactctttcaatatatccttatccaacatacaccatctctaggatccagctgtaatcttacatctttcataaagtcttctctaactgcttaaaccacatggatcccaggcttctttgagctccgttatcacttagtggcgctttcttcaattggccattaatcactgatttacattccttaactgtgtgtgcatgttttcttcagtagattgtaaggtcctggaggacaagcttttagaggacaagggcaagctttcttgttgttgttctttcttgttcttcgctgtgatataaatatatgcctcttaatggaat

SEQ ID NO: 706680 - DNA, 1046 bp, Homo sapiens
cacctggtttaagtgtggtcattggtgggcttctgtgtattgtcacacgaaaaatcatatttacctccttcctccatatgctcycagttcttccttgccctctctgttctttcaccttattctagaagacacttttagttggctggacaataatagactaactgtatgggtgatgaaaaatgaaatctcacattccattctctaatgttaagttcactctattatgttggcataatgagttgacacaagaaacagagtgctcacacactcataccaggcagtagtggttacttagcaacaaactggaaactgtgttaagtaggtcttgtttgtgtccaggttcatgtgctataaagagctggagtcactgttgaatgtggatggacattttgtgcatgcattgagttctccaggttctattgcaatgtagttacctaacaaagagtttgaaaggctgtagtattcctgaaactgtttcatggttctagagctaattttaagaggaactaatcttatctgcttatacttgtcattaatatactctttgagttagaacaattttcctggagtagcatagaatagctattcttaagatctgtcttagtttctaaattcatcaatccctcctattttctgttgcttcagtgatcttagtgaacatgctttatttccattttacctcctgcagtagaggctcagagaggagaagaacaggtccaaggtcacatagctagtgaggggcaggactaggattaagcctgaaatccgcccactctgttatgtctatggtatttgtaggaggtttctggtttgagacttaaaccattagagtgtgtctcctaaaagatggcagcaagggtgttcttgggtgtctgtgatgtatgttatcactctcccaaacttcagcatcaaatgatcactgttctggcagcctttctctctggatcaagatgtaggagggaataaagccagactagtctccactgtataccctgcctgctgtgtcactggtgtcttattagtatgtgctgaatgaatgaatgaat

SEQ ID NO: 706681 - DNA, 470 bp, Homo sapiens
agcatgaagttaaactttacttcagtccataaaaattaacacattatcaaagcaaacctgcttatttcagtctgacataaaaatgaaaggaaaactcatcaaataccgtatttcatgaaacccaaggtggtaacaattttaaaacataatttttaaaatatattttatatactactgagaaataaaaatgctgccagttatgacatatcatcagtgataagatagatcctaatttcagaaatgtaaaaaaggacatttggaattgacaaactataacagtctattaacaaatgctcattatacaactgaagaatttgagctgattaaaccagattctgtcaagttacttatcgaaaatctaaaactatattcccagtaagagtacatttcaattcaatatatgatatcataaaaattggttataacatcataaatagaacraaatgcaaatagcttagaacaccataaaa

SEQ ID NO: 706682 - DNA, 593 bp, Homo sapiens
tattagctcctcagaataaattgcttgaaaacttttaagacaactagttaacaagtataaacctttagtttgyagctaacaggtataaaccaagttgtcatgagaagttttcaagtaaggcaaaactaatttctaagacggaaaaaaacccaaaactcaagagaagaatatgtgcctttttacatttctctgcataaatagaagctatataaacatgctctattgaagataaaatattattttaaaacaatgtgtcaaacaattaaaatgagaaagctattaattcatttgttttgccattcttcaatgccttccagcaagctgaaggagaaaatgtttatcaccaggcatttttctgcaggtacccccaaaagactggtccgaagtagagaagtggcgcaaagcaagccgctgtgaaaatacctaaattctctgagtgtcagaaaatgggagttctcttaaaaatcaaaaccaggagaactgaaccacgcacagaaactcggagacctcataggtggcaacatagataagaagctatcagctgctagatcttgttgtgatggccttctgatgcccactaggaaggagacaag

SEQ ID NO: 706683 - DNA, 525 bp, Homo sapiens
ctctgaataaggtctatgatctttcacttatgaagaatttrcacccaattttcataaattacatatcgatgtgttataaattatgtactttattttatttataaaattatgtccaacattttgctaaagttcattatacaaattccgaaacaaataatattgtttattttagatttggtagtttaatgacgccattcatttaacgtaaatatgtttcattgtgaaagaacatgggaagaagaatgactttgtcatacatatattttgttacatttgatccagcaatcccactactgggtatctacccagaggaaaaaaagtcattatatgaaaaggatactcgcacaggcatgtttatagcagcacaattcacaattgtgaaaatgtggaaccagcccaaatgcccaccaaacaatgagtgaataaagaaaatctctgtgtgtgtgtgtgtgtgtgtgtatatatatagtatatatatgtatatatgtatgtatatatatgtatatatgtatatatgtatatata

SEQ ID NO: 706684 - DNA, 2731 bp, Homo sapiens
tgctgatatcaaaatatctcatataccccataaatacatatacctactatgtacccatgaaaattaaaaattttaaayatagaatatgagaagtgagccatacctccttccaggaagtaattccttttcagcacagtggtgacatagcagtgaaatcaggtgttgaaatgtacatgtgctcgaaggatttttaagtggaacaaatccactctgttttcacataagtaccacatgctaaccaattgtgccactggagctctggaaagccactctacctttacatttcaattgtgttagccacagctagtattatttcaaagccttcctgaaaatctgctaaatgatctgtgaaaactgttgttgaaaagatgaagttgacttcattggagattttttttccacttagtttttagccattcagatatcagagtcagacaggtaaatacttcatggaccctcttacccctaattttagttgtttcccattgttttattgacatatgtctcagagcctgctgtaatctctctatgttctagaatattttcatttcttttctgtctcctagtcagagaaaggaaatcagtattttcattcacctgagtttgacattgagcacctgccaaaattactttatcccttcttacttttgggtgtggttgacttatacaaagtagacatccagacaaattttccacctcaaatatcaaacccaaagaaaaagttgtaaagtttctttccattttgggtttttgtaagtaatcaagacatgggatttttatcaacttgacaagctctggttaattatgtctcattttccaagaccagattcatacaaataatctaatgaaaggctgcctgatatgccgtggctagcatttggatcctgtaatgtcagtaccaaagtggaactttgtaatcttttagacaaaaatgagtttgagaaatgcccatttgcatcattttactattcaaacttcaaatagagaagaagaatacatgtgaagtggccaaagatagaattatcaactataatagcgggaataataatcagtaataatagctgacatttatcatgtaccatacaggattcttggcactttacatgcattcattattttaattcttacaacaaccctatgaggttgatgctattcttccatttcgctgatgaagaaattctgtctcagagtggttaagtaacttgcacaaggttattggactgaatatgttgctatgcccatattgcaccttggcagcctgcctccagaaccatacttctaaccattaagtagcattaataaagcatcatcattgaatatttgtgcccatattcaaattctgacttgcattttaagtcactatgcagatgtggtgtagaaagaagttgtagcaagactggatggctgatgacctagattctggccccagtttttctattagctagtcttatacctaatcatacaagaagtcagtttcctcacttgcaaattcaacacatattgagcacttagtatgtgccaggcactgtacttggtgttacagaaacagcgattaacaagatagacacctattatggcaactgagaatgtcaaactagacaatccctaaggtcccttctggaactaactataatcaaggccaccagtattctagatgcattctgttccataaaggtgctgactaaatagccagtcaataaaatgaaaacaatgtttcaagcctggacacaaaactgactaaaaactgaactgctttgtaagcacaaaactttctatgtcatctcctagttgttaatgcaaataattatctctagggcaagactgttagaatgtatcttccctgctcagtaaaggccctggaacaacaacaacaaaagccttaatagtatttgtgccctcttcctttctccttaccttctggcttggcaaacagttgcctttacttacagggatttgtagctttaaagaatagtgtgcaatcatacctggaaagtagcatttagtaacaacaacaacaacaaaaaacatgagataaatgggcaaacaggaatcatgttgctgaaaacccacacccattggctttcaacagaggatccaaggctaggactcaactgttcccacctttattccagccaaacttttcagtagaagctggatatatgtggtctagaaccttacttccccttttttcttgggaatgaggttgtccactataatccaataccattctctgctcctccagcccataagatttagggtaggtccccctcatgagaatattgtatgtgatgtcctacagttacattgatataactaaaataaaatctaagtctggaagcggcctaagatggagttgaagatgcagggaagggccagaccatggttgaccatgtcctaccacatgttatgtacatgaaagaaagtaccagactcactgaaaattctgatttattcagttttgtcatcaatttgcataaaagaatcagaatgccatttttaaatttcatctctgtatccctattcatataatcatacaatgatatcacctattcacatcctctcattttacagatgaggaaactaagaccataaaaagtgatgtgctcacgatcactctgcttgttagaataaaagaggatattgctgtttcttaaaacagatgagtcttaattctattaagagtataatcccaggtttaggtttaattggagttttatgaatacttattcag

SEQ ID NO: 706685 - DNA, 1087 bp, Homo sapiens
taccagcttcctagggttgcatttttgtgccagccaccaagccaccagttagtccttgtcactcccaaaaccctcactgcggctccacgaggtcattacttcattgcccccatgtttatggatgaggacattgaggcttgagagacccacagcctgctctaagcatcaccagctaagtggcacccagggctgcttttcagctttcctttccatggcagcattttttttaatgctacatccgacataatctgtattttattatttactctgttcattgtttgtaagttctgctagggcaggtggatttctcttgctgttcactgggtatcacagtccctggcaaagagcagtgctcaataaatatttgcttgatgaatgcaygcagacatgctcttagccattctatgctacctaatatggattattccaggctccctgaactcttcccaaatcaagaaaccactttccagaagtattttaacacgagctgccaagccttgactgttgaaatgtttttgacagtcagccttgccatccttagatgtcctgctcttttcagaccttcccagacctgtcatcgccagcgcctttcctgaagagccatcctacactgggtcccggaactgcagctctgcaaacaatagcacaggctcatgatctccctctgtctccatggggaagtatccctccctgtaccagagcagccctggccaagtggggctcagcccaagagcaggctggagccagacagctcggcccacagatattgatgaacagtttaaaaggacaagcccatcagcactaattcctccagggtcctctccccggctccaggttggtaatcaaagggaaagtgcactttggaaataattttgtttctgtgcagttcaaattccggagaccttgttttaaagctcatttgaataataacaagagcaattaaaaattaatatgaattgctattatttatggagtgtgggttacctgccaagggcttttccaaatgcttcccttgcactattgcactgtagcctaacaaccttgtgaattggctcctgtttatattctccttttaaagggaagaaaa

SEQ ID NO: 706686 - DNA, 1087 bp, Homo sapiens
taccagcttcctagggttgcatttttgtgccagccaccaagccaccagttagtccttgtcactcccaaaaccctcactgcggctccacgaggtcattacttcattgcccccatgtttatggatgaggacattgaggcttgagagacccacagcctgctctaagcatcaccagctaagtggcacccagggctgcttttcagctttcctttccatggcagcattttttttaatgctacatccgacataatctgtattttattatttactctgttcattgtttgtaagttctgctagggcaggtggatttctcttgctgttcactgggtatcacagtccctggcaaagagcagtgctcaataaatatttgcttgatgaatgcacgcagacatgctcttagccattctatgctacctaatatggattattccaggctccctgaactcttcccaaatcaagaaaccactttccagaagtattttaacacgagctgccaagccttgactgttgaaatgtttttgacagtcagccttgccatccttagatgtcctgctcttttcagaccttcccagacctgtcatcgccagcgcctttcctgaagagccatcctacactgggtcccggaactgcagctctgcaaacaatagcacaggctcatgatctccctctgtctccatggggaagtatccctccctgtaccagagcagccctggccaagtggggctcagcccaagagcaggctggagccagacagctcggcccacagatattgatgaacagtttaaaaggacaagcccatcagcactaattcctccagggtcctctccccggctccaggttggtaatcaaagggaaagtgcactttggaaataattttgtttctgtgcagttcaaattcyggagaccttgttttaaagctcatttgaataataacaagagcaattaaaaattaatatgaattgctattatttatggagtgtgggttacctgccaagggcttttccaaatgcttcccttgcactattgcactgtagcctaacaaccttgtgaattggctcctgtttatattctccttttaaagggaagaaaa

SEQ ID NO: 706687 - DNA, 1063 bp, Homo sapiens
tgatyatttttgttttaatgtcatttgttgtcaccaaattgcgggcttcatgatgaaaacagttgcacctcttctactcaccaatgatactcttgtgcccaatgcaaaaccaggcacacagtaggtgctcaataaatgcgccttgctctccttcctttctaaagggttccagaaggccattaataggcaaaaaacgcaagcgtgggtgaaggctgaatctatcatgctccctgatgggtccccatgcccagcactgggtgctctcttagtgttagtaaaatacatgaatgaatgaatgagtgaattaatggatggatgaagtgcaattgaaatttattatgctcataaacacaaaaattaaatagatttactgcattaagattattttaagaagttgttttattcctacattcattttgtttccaacacaaacagtacataaaaataattatttcttggattcatgaaaaattgaaagggcccttgagtgtttatttagtgtattctttttggcagaattaatgatcttaataatgaaaacagcactgggtgacttttttaaattgaagtttttattgagataattgtaaatgtgcatgcagctatgacaaatggcagggagatatcttgtgtaccctttcctcaattttcccccagtgctaaactagaatatacacacctaattgggatactgacacggatgaaatccactgaacttatcccactgtctaacttaattcacatttgcagcactgtgctgagtgctttatctcatttaactgtgacaacagccctgtaagggggatagcattatcactcaggttctagagcctgggacacccgtgctcagagaggtggagcaactcgctcacagcctggtgcatgctcaggggtggagctggaatccccactggaaacccaccccccagcccgtgttcttcctggtgctggcgtaaaccatgatatatagatctgttccttgttagagatctctaaagaagaaaactacttgcttaacaaaaatgactttgctatataaaggtgtggtttttttgactattcc

SEQ ID NO: 706688 - DNA, 1063 bp, Homo sapiens
tgattatttttgttttaatgtcatttgttgtcaccaaattgcgggcttcatgatgaaaacagttgcacctcttctactcaccaatgatactcttgtgcccaatgcaaaaccaggcacacagtaggtgctcaataaatgcgccttgctctccttcctttctaaagggttccagaaggccattaataggcaaaaaacgcaagcgtgggtgaaggctgaatctatcatgctccctgatgggtccccatgcccagcactgggtgctctcttagtgttagtaaaatacatgaatgaatgaatgagtgaattaatggatggatgaagtgcaattgaaatttattatgctcataaacacaaaaattaaatagatttactgcattaagattattttaagaagttgttttattcctacattcattttgtttccaacacaaacagtacataaaaataattatttcttggattcatgaaaaattgaaagggcccttgagtgtttatttagtgtattctttttggcagaattaatgatcttaataatgaaaacagcactgggtgacttttttaaattgaagtttttattgagataattgtaaatgtgcatgcagctatgacamatggcagggagatatcttgtgtaccctttcctcaattttcccccagtgctaaactagaatatacacacctaattgggatactgacacggatgaaatccactgaacttatcccactgtctaacttaattcacatttgcagcactgtgctgagtgctttatctcatttaactgtgacaacagccctgtaagggggatagcattatcactcaggttctagagcctgggacacccgtgctcagagaggtggagcaactcgctcacagcctggtgcatgctcaggggtggagctggaatccccactggaaacccaccccccagcccgtgttcttcctggtgctggcgtaaaccatgatatatagatctgttccttgttagagatctctaaagaagaaaactacttgcttaacaaaaatgactttgctatataaaggtgtggtttttttgactattcc

SEQ ID NO: 706689 - DNA, 742 bp, Homo sapiens
gggaggtctgaggacagggcgctccttgggcacccctttaaaaagcaacatacattatgattacttcaccctgcaaggccaaattccccagggccaccaccagtgttcattgttgccctgttgctctttctgtccacaccagtggtacgaggagaccctatctcaactctcactccctgagataaatgtgaaatggacaacttatctgtgtctccctccctcscttgctgccccttctgggaacaggaccccactgaggacaatcgattcacttggctggttggcaaattgcaagaacccctctgcctatgccactgatgcacaatgtctagggctggcacaatgcaaactcctccaagagccagttctgtccctccaggcacacagatactatccatcacagagctggcggcctcaagaatggccatggggagccactgaatgttttgagcaggggtgtgacatgagccagttgggagtagtggttatgtgcaggcattttggtgttgggctgcctggattcagataccagaactgccacctattagctgtggaatctaggacaagtgaccatgcctctctgagcctcagtttcccacctgcaaaatggggataacaacagtacctacctcctagggttgttgtgaggactgagtgggtaaggcccttgcaatagggcctgccatttcatgttaggtaagagttagcttttatgaattcaatctgagctccagctcatgga

SEQ ID NO: 706690 - DNA, 2931 bp, Homo sapiens
aactgagttttttctctggagaggagtgccaattctggaaaaggtgactgagagacatttaaactgtgttttcagctccaaggaattgaaaagacaacaattgaagttcaaatcccaataagcggtgaaactccaactttggttagaaccttaaaaggctataccttaagagaaaaggccagctagaagtaaacccaccctccctcttacagactaaacttagctgtaaatcatctcaatccctaaaattaaactaacgtgatctcagattactggggtcctcattcctttgccagaaaatattataaatccctcagaatgaaggtaacattatcctagtcctcaaattatttctgtaatttttcatgaacaaggacaggctgtcaataaaaaaataaccatctaaatgagggaacataacaacgtgaatgaaaaaccacagacagtagaaacatacccaaagaagttctagataacaaagatttcagatacacatttctaaataactacacttgggatatacaaggagagaaaatgtcataaattttgtcagagagttaaaaactacgaagaaatggaaattttagaaatgagaagcaaagtaactggtattcagaactcaatgcacatagatttaactgcagattagactcaaacaataaaaaatgagggaactgcatagaagtcataaagaaaaaaattcagaataaatcatagagagacaaaggaatgaaatagaggagtgggtgtaaaagatgtaagatatacaatgagaaggtttaacctacgtgtattggaagagaagagagaggacacagaaatagctgaagagatgatagctgacaattttcaaaactgatgaaagacattaagtctcagattcaagagtatctacaaaccccaagcagaataaacaaaaatgagcccacacatattaaagcacattgtagtaaaattgatacaaaccaaagagaaaataacagattaccttgaaaggagcaacaattagactgatatctcactgttgaacagaaataatggaaagcaaaacaaagtggcatctttaagtactaaaagaaaataacttccaatatagaatactatatctagtgaaaatattcaaggatgaagctgaagcgaagatatttacagacacaaaaaaaattgacagaatttgtcatcaactgaaatgatgaaagaaaatgctacaaattactatatcctaaaatagaaggaaatgatcccagattaaaagccagaaagtaacgaatggggaaaaattaattttaaactcttctcttttcacttaatgcctttattactagttcttatttttttgtattaaagttgttacctctaccttcttttttttcatttgtttggcatatttttctcattctcttatatttaaatttttggggtttttgtggcttttttctgataagcaatattattggatttctaatgcaatctgagagtttttatgtttaactatgggattttatcttaatttaatttatttaacactgatatttatgatttgtcttctttcatttttttctgtactttctcattaaaaccacacactaggcagtctcctcatctctgtgaaccatgaaatttgataccttcggtggtctgacacaattgccacaatcttaactcaatgtgcaataggttgaactacccaagtcccaatctaagatccaacctgaggtgacactgatgaacaarggaatagagacggtaaagcagagttaatctactaacagattatcccaaatgtgtgcaaattagtgtatggtttaggctaagcatttaaaaatgcttctgtgaaccaaatcatgcaaaatgccaaatgtttactctcctttaatctcttaaagttgccaatttttatttctactttgaattctgttttatggtgcaagcatagtctctttttttgtacaaatatttatgatcaattttacccttcatgattttgtttctcaatatttttattcctctattagtcatctaaagtttttcaaaggcactctttaacttctatgcctctaattgccaaagtcaaaaaggaaattttattatttgagtgttgctttttgaaaccaccaatttagccacacttttgcttgtcttcctcccatctttgttaatataatctgggttttaaaagcaaatgactgttatgacatggttattttcatgttatataccttttagagaatggttttttatatttgcatttagctttataatcaaacataccataattgcttgacatctctattttaactattttttaacagtttcagtctttttctttgctatgattaccccaattttagctctttattttgtgcttttctgccaataagaacacatctttagatagacacattgattctgcatctttgaatccctgaaatttaggaagtattttgcgttattttcattcataaaatacacatgacctaccttccttccttccttctttccttccctccttccttcctgtctgcctgcctgccttccttccttccttctttccttccttccttccctcttttctttcttttttgagacagagtctggctctgttgcccagggtggagtgcagtggtgcaatctcagctcactgcaacctctacctcctgggttcaagggattcttatgcctcagcctcccgagtagtagctggcattataggtgcacaccaccatacccggctaatttttgtatttttagtagagacaaggtttcaccatgttgggcaggctggtctcgaactcctggcctgaagagatccaccctccttggcctcccaaagtgctgggattgcaggctttagccaccacaccaggcccaaattacatcatttatttctgacatttagagttgacagtgaaaatttagatcagcttgatg

SEQ ID NO: 706691 - DNA, 1008 bp, Homo sapiens
gtgcatgttgataacccattgagagtcataatcagatgagtgaagaagccccctgtgcatcccaaccaatccttctgaattcaggrttaaagtagaaaaagcatcctcaactaacaggactattcgtatgggtgatgtcatccttctctaaacaattatttgatctaacaaattctagaattctctataaggagctgcctgccttgctctgaaaggtgaaaaagttcacctttgtttcctggatgcttagtgactagtaaaggtttttttgtttgttttgtttgtttttttggggggtggttggtataattaaacgctaccaccttgactccaactccccttttgaaatggaagctgaagcaactcaaggttaaattttcaatcgaatccaagtttaagaaagggaacaggactgtgccaaccagctagtaattacaaactagtgccttcaggtgcttgaaatctagtgcggttaatgctctcataccagtgaaaacagactggtcaacttagtttttttgttttgttttttctttttctttttttttttttacacgttttgttacacgagaacgatgggtaggccccatctggggtcttggggagaaaagcaagttccccgatttattgaatgttccctgtttgcattccccatgccaggcagggcttcctaactcgtctcacaggtctaatacaaagtctctcctgtttaatcttcattcccactacggattgccacattgtgctataccaggatacctgggaggacttctcaaaggcaaaaatgcccctcagtgaggctgggagtgcctaactcccagtctttccatcctttaaataaatgttccctcttcttttctgtaggcaggggtactgatttgttttttgttttaaagggaaacaatgatttacccataatggtaatttaaagggggacaaaaaaaatgagaaactgtaaacacgggctgccacttccacatctgtttctggtgagaatattatggaaac

SEQ ID NO: 706692 - DNA, 1008 bp, Homo sapiens
gtgcatgttgataacccattgagagtcataatcagatgagtgaagaagccccctgtgcatcccaaccaatccttctgaattcagggttaaagtagaaaaagcatcctcaactaacaggactattcgtatgggtgatgtcatccttctctaaacaattatttgatctaacaaattctagaattctcyataaggagctgcctgccttgctctgaaaggtgaaaaagttcacctttgtttcctggatgcttagtgactagtaaaggtttttttgtttgttttgtttgtttttttggggggtggttggtataattaaacgctaccaccttgactccaactccccttttgaaatggaagctgaagcaactcaaggttaaattttcaatcgaatccaagtttaagaaagggaacaggactgtgccaaccagctagtaattacaaactagtgccttcaggtgcttgaaatctagtgcggttaatgctctcataccagtgaaaacagactggtcaacttagtttttttgttttgttttttctttttctttttttttttttacacgttttgttacacgagaacgatgggtaggccccatctggggtcttggggagaaaagcaagttccccgatttattgaatgttccctgtttgcattccccatgccaggcagggcttcctaactcgtctcacaggtctaatacaaagtctctcctgtttaatcttcattcccactacggattgccacattgtgctataccaggatacctgggaggacttctcaaaggcaaaaatgcccctcagtgaggctgggagtgcctaactcccagtctttccatcctttaaataaatgttccctcttcttttctgtaggcaggggtactgatttgttttttgttttaaagggaaacaatgatttacccataatggtaatttaaagggggacaaaaaaaatgagaaactgtaaacacgggctgccacttccacatctgtttctggtgagaatattatggaaac

SEQ ID NO: 706693 - DNA, 1906 bp, Homo sapiens
ccatctctacaagaaagacaaaaattagctgggcatgttggtgtacgcctgtagttcaggctgcctgggagaccgaggtaggagggtcacttgagccctgtaggtggaggctggagtcagccatcattgccagcctgggcaagagagtgagaacttgtctcaaaaaagcaaaacaaaacaaaaaaaattaagtctgattattattctttttggttcaaaacccagcaaagactgcctaactacccttccctcattccattccagccacattagcttccttatctgttaacacctcaggcacacattgctacctttaaggcctccagacatctgttcactctgccttaaattttctttcttccaataaccatggctaactcatattcttcaaatcctggttcaaatgtcaccttatcaatgaggacttccttaagaatcctgtgtaaatattgcaaccatgatcccacctcccacagctacccctcagcactccagatactccgtatcctggtcttcttctcttttccacgtttcttatccctttcaatacatatactgacttaaaaaaattatcatatctattttttactgtctgtcctctccctctcccaatataatctccatgtggtcaagactcatgacgtatcccaagcacctagaacagtgcctggcatacagtaggcatgcagtgaatctttgatgcaataaggaatgaaaagcagatgattttccctttgctaccaggatttcttacattgcagaattgtcccacaagttccattttgagttttttttttctttctttcttgaaagaggagaggtctatacaagtctaattttgcttaaaaataggagaaagagatcctccttgggtccccacattatacattgttgtgttgttgagtaccttctctcagatctttggccagagagcacattggcataaatttacatgaccaggtctacagtctaacgtcctcagagtttctttcttatgtttggtaaaatctctgtatcaggatcagctttccagcttttcatgtggtctagctttcactcatatatatatggtgttttcattgtctttcctgttgtaatttcctcctgggtgaggaaacaccctttcacctgttggctggtgtttgatgtgggcatgcttagactcaggccttccaactcctgtgactttcaaaggccttttgagtttggagagggtgtgtcagttggactgccccctaaagtcgtgtgacctatcctttctgcctctcattattcctctaagttaggggttgatagttagattctgtcaaatctatatttacttcccatacaaatatcctgctttctttgcaagagaagttaaacatcagatctggtgtcttttttcactctggtgtgattcaatactctgtttagcagacattttaaaatgtggagcatttggttgacatcctctttattgatgcagattttttcccctttgtttattaagttcatttggccttttcacttgtagtttggcaggggccagttataaattggtgcttgaaaatcctgaggtatatacttccaataattcctggtaggcatgtgttcaaaagttttccatctcttctgcacttaggaataagctctctaagtgatttcagtatgcaggtagattgggggctgctggaatagatgatcagtgagacttacatgagggtttagaggaaaggtgaaatcttgcagtggtaataactacacctcagaacccttaagcagcatccttaatgcrtcaccatttagctgtttttttttttcctggaaattctttttgtttttttgtgttttttttccaccaaagcctaaaggcattacccaaaatatcaagatactgcagatacctggttatcttcactgcttg

SEQ ID NO: 706694 - DNA, 3589 bp, Homo sapiens
atatactctgcctgtgacaataaatcatgactaatctaataagcccatcacagcagttcattcccttttagccaacttaagctctccaggttcagttatagcaagggtagcatgtgactaaattctgattaacaaaatattagcagatgtctgtttcatgactccaggggaagatgttcctctccaacaaaaggagagccctagtcctcccaaactttttgctcttgccaggaaggctgatgtattatgggatgcttggagctgcagcattcatcctgcaaccatgaggacaggctaagagactctcaggcaccatccagaatcctgactttggtgagctgctgacagaaaggcacttgcacgcatatttccttgattctaaaacaaactcccccctccccaatattttaatctctcagaaacttggatctttcttaaaatcaatggcatttttataattataatgggcagtgtttcctctttcttatgacagtacatttttaaaaggtgcaccttacaaccaatagagtttttgattcaataaaaaaatggttaagtgccaggcactagggacacagagaataacccacagtcttcgcctttgcgatgaaaccaacgactatagtgcagtgtgatagtttcaaagaagtgaatgaaacaaggcaatgaaaacacaagatgaggcagctagatcctactgagtaggcagactttcacaaaagatttttagagcttttatttgatttttaggttgttccttgttcaggaatattttttagcaataatgtacaaaaggaaaaatacgtttgaatatattggtatcaactgaaggaaacattttcaaaactgggaaatgacagtgttctactaagcaagataatttagcaaccaccttacctgttttctggtaattcaactggtttaatctgaaagtctccatttactacaatttcatgggctagagccatgttggtgacgcctctcgctgtctctagaagttcttctactgtcacaaagcgaggaggactagctgtaacagaaactcactgtaagagatttgcttccctggatctgaatttctactaaaataagaaaacagtggttctggtaccagacaataatttcagttattgcgtctattaaaatgtttgttctggcattttcaaacagcaacagaatgttacttcatattcattttgtacccttgaatcctaaaagcagagatcatttattaacactcaaaacatctggcttttactaagactggtcaaaggaaaataattacagtaaactgaaacctaggaaaacttaagttacagatgatcatctgtcccataagctgagggtttattttctagtctttctgcctcctgtctaccctaaaagaaaaaaaaaaaaaagaagacaccagatttaagatcttctcttttgctcccattagcagtttacttttgcactaccactaacactgccacaaatgaatctccccaaattaaaatagcatcaaggctaggcacagtggttcacacctgtaatgctagcactttgggaggccgaggcgagagatcatttgaggccaggggttggagaccagcctgggcaccatagtgagatcttgtctctacagaaaaatgtaaaaactaaccgggcatggtggtgcatgcctgtagtcccagctactcaggaggttgaggctggaggatcgcttgaacctgcagtgagctatgatcatgtcactgcactcaagcctgggtaacagagcaagactctgtctcaaaaaaataaaaataaaaagttgtaaaaaattaaaataccatcaagtcctttagggtgccgatggtgctgtttaaacaatgctaaaaccactatcttgtacaggatactgtgacagaatatgatagctctgcagtggtcaatggacagatcaaaagatgtgtgacacaagaattttctagaatgctgatccagtgaatcaaaaactttgaaaaagagtcatctctgatttctctctttcccctgctctgttatccaagtcctgtagattttacttctgtatcgactgctgcaacggcctcaaaatttgtgtccatacttctcttttgataaagcttgagactgatcattcagaaagaaggttctaaaccaaggaacaaagggggaattcttactcttaaaagcctatgataaggccaggctcacacctgtaatcccagcactttgggagatcgaggcaggtggaccacctgaggtcaggagttggagacccacctggccaacatggtgaaaccttgtctctactaaatatacaaaaattagcagggcgtggtggtgcatgcctgtaatcccagctccttgggaggctgaggcgaaaggattgcttgaacctgggaggtggaggttgcagtgagcgaagatcacaccattgcactccagcctgggcgacagaggaagattgtctcaaaaaaaaaaaaaaaaaaagtctctgatagcaattctcaaactttagcctatcatggagtcagagggaggacttgtgaaaacagattgctgagcccacctctcagggtttctgatttagcagctctggagcagggccaaagaatctgcattttttatttttctattttttttttgagatagggtcttactctgtcaccaacaggagtacagttgcacaatcatggctcaccccagcctcaacctctcaggctcaaatcatcttcccaccttagcctcccaagtagccrggactacaggcacatgccaccatgtctggttattttttctatttttttaaagacaagtttcgccatgttgcccaggctggtctcgaactcctgagcttaagtaagtgatccgcctgcctcagcctcccaaaatgctgggattacaggcgtgagccacagcagccggcccagaatctgtatttctaacaagtctccagttgatgctgatggctccaaacaccacagtttgagaagtactggcctagaagatgaatatattaattttatgtgatagtgataagatctggccttaaaattagataagtaatgtcactggtttgcccaggtttaaaagatcttcttacattggtgaaaagttattttccttcttttttcttttgcgcaccaaaataaagaaaaaaaaaaaggaaccaaatcgaagagctggtcatatcctgcctggtaaaaaactttatttggtcacaaggggaagttgggaaaactcagaattcttcctcacaacattctcagcatttccaaagaatatgaataagaatacagaataaataaatctggctttgttgatattgctaaaatataataaatatccaaaatcaaagcccaatatatcttttcaattaaaaaaattttttttaacttttaagttcaggtgtacatgtgcaggtttgttatacaggtaatctcgtgtcacgggggcttgttgtagagattattttgtcacccagttattaagtctagtactcattatttttcttgatcctctccctcctcccactctccagtagaccccagtgtctcttattcccctctatgggtatattattaagatgtcaattttcccc

SEQ ID NO: 706695 - DNA, 3589 bp, Homo sapiens
atatactctgcctgtgacaataaatcatgactaatctaataagcccatcacagcagttcattcccttttagccaacttaagctctccaggttcagttatagcaagggtagcatgtgactaaattctgattaacaaaatattagcagatgtctgtttcatgactccaggggaagatgttcctctccaacaaaaggagagccctagtcctcccaaactttttgctcttgccaggaaggctgatgtattatgggatgcttggagctgcagcattcatcctgcaaccatgaggacaggctaagagactctcaggcaccatccagaatcctgactttggtgagctgctgacagaaaggcacttgcacgcatatttccttgattctaaaacaaactcccccctccccaatattttaatctctcagaaacttggatctttcttaaaatcaatggcatttttataattataatgggcagtgtttcctctttcttatgacagtacatttttaaaaggtgcaccttacaaccaatagagtttttgattcaataaaaaaatggttaagtgccaggcactagggacacagagaataacccacagtcttcgcctttgcgatgaaaccaacgactatagtgcagtgtgatagtttcaaagaagtgaatgaaacaaggcaatgaaaacacaagatgaggcagctagatcctactgagtaggcagactttcacaaaagatttttagagcttttatttgatttttaggttgttccttgttcaggaatattttttagcaataatgtacaaaaggaaaaatacgtttgaatatattggtatcaactgaaggaaacattttcaaaactgggaaatgacagtgttctactaagcaagataatttagcaaccaccttacctgttttctggtaattcaactggtttaatctgaaagtctccatttactacaatttcatgggctagagccatgttggtgacgcctctcgctgtctctagaagttcttctactgtcacaaagcgaggaggactagctgtaacagaaactcactgtaagagatttgcttccctggatctgaatttctactaaaataagaaaacagtggttctggtaccagacaataatttcagttattgcgtctattaaaatgtttgttctggcattttcaaacagcaacagaatgttacttcatattcattttgtacccttgaatcctaaaagcagagatcatttattaacactcaaaacatctggcttttactaagactggtcaaaggaaaataattacagtaaactgaaacctaggaaaacttaagttacagatgatcatctgtcccataagctgagggtttattttctagtctttctgcctcctgtctaccctaaaagaaaaaaaaaaaaaagaagacaccagatttaagatcttctcttttgctcccattagcagtttacttttgcactaccactaacactgccacaaatgaatctccccaaattaaaatagcatcaaggctaggcacagtggttcacacctgtaatgctagcactttgggaggccgaggcgagagatcatttgaggccaggggttggagaccagcctgggcaccatagtgagatcttgtctctacagaaaaatgtaaaaactaaccgggcatggtggtgcatgcctgtagtcccagctactcaggaggttgaggctggaggatcgcttgaacctgcagtgagctatgatcatgtcactgcactcaagcctgggtaacagagcaagactctgtctcaaaaaaataaaaataaaaagttgtaaaaaattaaaataccatcaagtcctttagggtgccgatggtgctgtttaaacaatgctaaaaccactatcttgtacaggatactgtgacagaatatgatagctctgcagtggtcaatggacagatcaaaagatgtgtgacacaagaattttctagaatgctgatccagtgaatcaaaaactttgaaaaagagtcatctctgatttctctctttcccctgctctgttatccaagtcctgtagattttacttctgtatcgactgctgcaacggcctcaaaatttgtgtccatacttctcttttgataaagcttgagactgatcattcagaaagaaggttctaaaccaaggaacaaagggggaattcttactcttaaaagcctatgataaggccaggctcacacctgtaatcccagcactttgggagatcgaggcaggtggaccacctgaggtcaggagttggagacccacctggccaacatggtgaaaccttgtctctactaaatatacaaaaattagcagggcgtggtggtgcatgcctgtaatcccagctccttgggaggctgaggcgaaaggattgcttgaacctgggaggtggaggttgcagtgagcgaagatcacaccattgcactccagcctgggcgacagaggaagattgtctcaaaaaaaaaaaaaaaaaaagtctctgatagcaattctcaaactttagcctatcatggagtcagagggaggacttgtgaaaacagattgctgagcccacctctcagggtttctgatttagcagctctggagcagggccaaagaatctgcattttttatttttctattttttttttgagatagggtcttactctgtcaccaacaggagtacagttgcacaatcatggctcaccccagcctcaacctctcaggctcaaatcatcttcccaccttagcctcccaagtagccgggactacaggcacatgccaccatgtctggttattttttctatttttttaaagacaagtttcgccatgttgcccaggctggtctcgaactcctgagcttaagtaagtgatccgcctgcctcagcctcccaaaatgctgggattacaggygtgagccacagcagccggcccagaatctgtatttctaacaagtctccagttgatgctgatggctccaaacaccacagtttgagaagtactggcctagaagatgaatatattaattttatgtgatagtgataagatctggccttaaaattagataagtaatgtcactggtttgcccaggtttaaaagatcttcttacattggtgaaaagttattttccttcttttttcttttgcgcaccaaaataaagaaaaaaaaaaaggaaccaaatcgaagagctggtcatatcctgcctggtaaaaaactttatttggtcacaaggggaagttgggaaaactcagaattcttcctcacaacattctcagcatttccaaagaatatgaataagaatacagaataaataaatctggctttgttgatattgctaaaatataataaatatccaaaatcaaagcccaatatatcttttcaattaaaaaaattttttttaacttttaagttcaggtgtacatgtgcaggtttgttatacaggtaatctcgtgtcacgggggcttgttgtagagattattttgtcacccagttattaagtctagtactcattatttttcttgatcctctccctcctcccactctccagtagaccccagtgtctcttattcccctctatgggtatattattaagatgtcaattttcccc

SEQ ID NO: 706696 - DNA, 1304 bp, Homo sapiens
ttttctctctcctgactcctcctcttctcttaatatggtggatagattctttaatgctcaaaggctttcaaatataaacagaaatatctgctactgtttgtctaatacacaagtaatttttaaaaattcacatactattttcacaatatattaaaaatcacttttatttccctcacacgtttaaatattttaatacacactcataaaaattcaggtctaatatgtcaaattattttatttttaaatgctagaaacaccttagtactgtgttattgttagaaaatgaaacagcaggccgggcgcggtggctcacgcctgtaatcccagcactttgggaggccgaggtgagtggatcacctgaggtcmgaggttcaagaccagcctggtccacatggtgaaaccccatctctactaaatatacaaaaattagccgggcatggtggcagtcgcctgtaatcctagctactcgggaggctgagacaggagaattgcttaaaccctggaggcggaggttgcagagagccaagatcgtgccattgcactacagcctgggcagtaagagcaaaaacgtcgtctcaaaaaaaaaaaaaaaaaaaaatgaaacagcaatgttgtattcatcaataccttacatcagcggttctcaaacataagcgtgtaccagaatcaccctcagggcttactaaaacacagattattgagccctacttccacagtccctgactcataggtctggagtagtcctagagaatttgtatttttagtaagatcctaggtgatgctgatgctgttgttctgaggaccacattttgagatctactgcctgacactgaattctgtttctcacattttgtaacccagatttatatttgaatattcacatttctcttacgctttttattcaacaagatacagatttactcacccaatctactgagtgggatttttcttcttagacgaggcggagggttggtttgtggataattccaagcccaaaacctaagactgggtatgccttacaagatcaatctatcccagtactttacccactgaactggcttctgattacagttagactttgtataatacatcaggaaatttcccagtggtttgctgtaaccatctatggttctacttttctttattctggccatttcaattgactggatctgaatgatttatatacatagtcctgctcagataaaagccagttttgcaaccccttgttctgtgttgggcctggtgagtttccaattactctaaaggacttagtgacattgatttaaatcttctttctcacattc

SEQ ID NO: 706697 - DNA, 1304 bp, Homo sapiens
ttttctctctcctgactcctcctcttctcttaatatggtggatagattctttaatgctcaaaggctttcaaatataaacagaaatatctgctactgtttgtctaatacacaagtaatttttaaaaattcacatactattttcacaatatattaaaaatcacttttatttccctcacacgtttaaatattttaatacacactcataaaaattcaggtctaatatgtcaaattattttatttttaaatgctagaaacaccttagtactgtgttattgttagaaaatgaaacagcaggccgggcgcggtggctcacgcctgtaatcccagcactttgggaggccgaggtgagtggatcacctgaggtccgaggttcaagaccagcctggtccacatggtgaaaccccatctctactaaatatacaaaaattagccgggcatggtggcagtcgcctgtaatcctagctactcgggaggctgagacaggagaattgcttaaaccctggaggcrgaggttgcagagagccaagatcgtgccattgcactacagcctgggcagtaagagcaaaaacgtcgtctcaaaaaaaaaaaaaaaaaaaaatgaaacagcaatgttgtattcatcaataccttacatcagcggttctcaaacataagcgtgtaccagaatcaccctcagggcttactaaaacacagattattgagccctacttccacagtccctgactcataggtctggagtagtcctagagaatttgtatttttagtaagatcctaggtgatgctgatgctgttgttctgaggaccacattttgagatctactgcctgacactgaattctgtttctcacattttgtaacccagatttatatttgaatattcacatttctcttacgctttttattcaacaagatacagatttactcacccaatctactgagtgggatttttcttcttagacgaggcggagggttggtttgtggataattccaagcccaaaacctaagactgggtatgccttacaagatcaatctatcccagtactttacccactgaactggcttctgattacagttagactttgtataatacatcaggaaatttcccagtggtttgctgtaaccatctatggttctacttttctttattctggccatttcaattgactggatctgaatgatttatatacatagtcctgctcagataaaagccagttttgcaaccccttgttctgtgttgggcctggtgagtttccaattactctaaaggacttagtgacattgatttaaatcttctttctcacattc

SEQ ID NO: 706698 - DNA, 1007 bp, Homo sapiens
ttttccggtatttcaggcattctagatttataaaagtcttttatattagtaacagattttagaaactaataaagaactgtgattatctaaattaatattgtcagccaaactatagttcaaaattctgtcatcagacatgagatggtgtccccatcttatgactgcwcccctagaaaagtgaacacttcttaagtggttaaagtcaaaaggatcagtccacttcaaccctgcatctctttctacctgaaacacggaaatgaaatgcatgctttacaataaacatggaaatgaaatgcatgctttacaatggcaaaatagaaggtttcagcactttaacttttctaacttgatctgctttaaatttttttttctacttaaaaaaatatttcttcaagctagggaaaacctaattacctgtcttacattttggctaacggtctgtgccattagagacttgagattacctcagagaagattcacataacagatttttacatgacattaccttacagccatcagcctgtgcatttttataataaacaatacaacaaatgtaaaatgtttacagcattaaatcacattcccaaagagaacggtttgtataacataattttcatatgataatatcatataaatatgtatcagtcaaaataagcatatttcaattaatcatgaaaaatttgtaccgaatttaattaagcagaatgtttaaggcattttctttccaatctaatgttccaagagctatagaacatttttctactttacatcccagaagttcagattactccaagatgaaatcaaaattgtatttattatagtgcagagaagtatgagatcaagcatttctggaatgccctgctgaagttgtttgagaaattgccttatctggtgacttttaaaaataaggatggccattggtcagtgatcttcttggggcatttaaattggctataaacatgtatactaacttacctgaccagtgcccaaagaaaatcagtagggca

SEQ ID NO: 706699 - DNA, 1272 bp, Homo sapiens
aaaaggtagaaaggggcatccacgtgtgatggaaaatcaggaaaaacttcccagaaaaagcgattcctgcctcatcaatgagtctggaagagtaactggaaattagctaggcaaacgtgagaagaaaagtgacattgcatatcctaggctggagggcagtgtgtgccactcttggtttaatcaggcccatcagcttagggcaatgccgactgaccacagcggttggcctgagggatttaaaattgaggtgaactgatgtgcagagtgtttggggtcagggtgattacagctgctcagggagcccaggaagaatgcctgcaaggcttaacttctgaagccagtgcagaaaaatgtgtagtagtcacagcaaacaacctgcatgccaaagagagaagtggtctgcaccccggcccccacgttagcagtgcagggcaacaacccttaatcctaactatttacatgagtaaaataaataatacctmtttaacagattctagatgaaaactattacctacagatgctctcctagggactcttaggaaagtcgaggtggtgaaaaaggacatttgcccccttgtgacttgattagaaagcatgagaatcattcttttaaatccttccctatgtgccatcaggaatttgcatattgaatacttgtctcgtggtctacatagactcacctacaggggcaagcggcactcacatggcaccaaatgccttgcaaatctcaatgttacaaatggcattttcttctgaaagctcaagtgctgtttgtttagattttcagctgggaaattttaacaatgaacacgtatctgctcctaaacaactctttaatgatcttttttggcttcgattttctcctgttgatcactctcttttgggggtatttaatctaaagtaagggctagcgtttatctcagcatgccatcctgcatgctgagccaattcattgaatgataatgagcacaggtccacccgccagaagagaaatgaagttcatcatgagcccacagcggagttcaaatgttcttaaatactaccgttaagagtgatctcacaaagctacaagtgggtgcagattcaaatattcacagaacagcaggaacttctgtatgtattcgttttacttcaacctcaacacaacccagaaagctggtgcaatgatccctaatctacaggtattaggaagaagcaatgatccctaatctacaggtattaggaagaaacagatattcccctagatcttcaggctgcacagcctgtatgtgt

SEQ ID NO: 706700 - DNA, 865 bp, Homo sapiens
tgcctattgccccaacactctgccacctgtccctgtggttctataagttgttgggacagaattaccaccccctggcagctgcagtcctctcccggtgacaatcacactgtaccaacccaaggacaaagtcccaagctggtccctagatcctscactaaaaggtaccacatgacacatcaagtcactctactgagaagattcagtaactttatagttctcatagaaaacattcatgcatggaaaacagcacacttaaatcacgaatgactccaaagtggcaggaagacaattccctccattttcttgcagtatttatattcatgaagcaaagcaaaacgtcattaattttgactgctcatttggctttgatgatcatctgatccgggctgggctgaagctgatcacagcattatctactgagaaaaggtctgccaaataaattaacccaggcaaaattccttgttgacaaacattgagatgaaggagacccagaataactgtcattcccacgtccctgcagagagcccacagaaagcagccttcagcaacctgcccagagtgatccctcgaccccctccagtttcatggtcatcatttataataattttttaaaggtttgcctggtaaacttgtagcggggacagctgctctgggatagtgccgtcactcagccccactcacaggctggggctaggggaaacctggggctgggattgggcaaggagtggagggcaggatagtccggcttctgcctacaggaaggatgcattctgggagtcggggtggcggagcctcaacaattataatgagagatgtacaaccactgtgacaaggtgcagaggtatgggaggctgagagaacagca

SEQ ID NO: 706701 - DNA, 865 bp, Homo sapiens
tgcctattgccccaacactctgccacctgtccctgtggttctataagttgttgggacagaattaccaccccctggcagctgcagtcctctcccggtgacaatcacactgtaccaacccaaggacaaagtcccaagctggtccctagatcctgcactaaaaggtaccacatgacacatcaagtcactctactgagaasattcagtaactttatagttctcatagaaaacattcatgcatggaaaacagcacacttaaatcacgaatgactccaaagtggcaggaagacaattccctccattttcttgcagtatttatattcatgaagcaaagcaaaacgtcattaattttgactgctcatttggctttgatgatcatctgatccgggctgggctgaagctgatcacagcattatctactgagaaaaggtctgccaaataaattaacccaggcaaaattccttgttgacaaacattgagatgaaggagacccagaataactgtcattcccacgtccctgcagagagcccacagaaagcagccttcagcaacctgcccagagtgatccctcgaccccctccagtttcatggtcatcatttataataattttttaaaggtttgcctggtaaacttgtagcggggacagctgctctgggatagtgccgtcactcagccccactcacaggctggggctaggggaaacctggggctgggattgggcaaggagtggagggcaggatagtccggcttctgcctacaggaaggatgcattctgggagtcggggtggcggagcctcaacaattataatgagagatgtacaaccactgtgacaaggtgcagaggtatgggaggctgagagaacagca

SEQ ID NO: 706702 - DNA, 911 bp, Homo sapiens
aagacttgtttacttaaatttgtctttaaaatggttggtttcataaaattcacggctccaaactcactcctctccaccctccacttcacttgtaaccaggttatgtgaaatgctttattctgttgataacaagaatgccaagtataaagtgagaagcaccaacttgaagtgtcaggtaagcaaaagacaacatgaaggaaagggctaagtaaaaacaaatgcagagattttgttttgttctggttttctttccccttgctgtctcttcagtacctaggacagtgcccagcacacactaggcacttggtaaataattcttgaaagaagagctgtcttgttctttatcactcacgtgtgtcacattatcccaggtaatgtccttaaaagtacattagctctctttgccagacacacccagggaggcatygaccctgtagaattgctccacaaagcacccatcaggagaccacctctagcatcaccacaacatgaaacatcttctgacctaagacagacactgcacttactacactatgctgacttccttaaacgtgtcccccatttcaatccagatattacctataaatcacttttctgtacccatatgaataactgatatttgactctgtagcagtctaggtctaatctggagatagaaactacaaagtgggttaaacaaaggaagattaatataaagaataattaaactataataaaggagaataagatataaggaattctacatggtatcccagggcagatggagagtacccaaagaagaacaaatttcaaaaggcatcccttccccaaggttggggtttagacctcattggaaaaagtatatttcagctcatggaaaaccagaagttttctggttccagcctggagctagtctgcagtcattgagcaag

SEQ ID NO: 706703 - DNA, 601 bp, Homo sapiens
caagtagatttttgaatgaatgaatycccagggaagtcctacgaaaggtgggtggtatagagaagcaaggaaactgaggctcagagatgttgagcaagttataaagaaaataagcagcaaagctaggatccaaatcaagttcagtatgtttgcaatgtcaaggaagtttctattatttctgcaagaaacattagtggcattttccactccagagtttctttaaaggacatatgctggggaactccagttatttgtcaactctgtctccctagaaatctctttagattagagttatcatcatcctttggcatttcaaaccctgcacaacatgtttataattggatggtctgataaatgatcctgcataaaccagccactaacatctttgaacttcctctgtcatttcctatgcagaattcctcttaagtgcctcatacacagtttgatgtgccctcttttaaagtagatatgcactgatcctatcagtgtctaaactaccacctgactgtaaagtagcccttttaaaatctattctttcattgttttatccatgtcactgttagaatagatgccacatttttatctaattggttttaatacc

SEQ ID NO: 706704 - DNA, 601 bp, Homo sapiens
caagtagatttttgaatgaatgaatccccagggaagtcctacgaaaggtgggtggtatagagaagcaaggaaactgaggctcagagatgttgagcaagttataaagaaaataagcagcaaagctaggatccaaatcaagttcagtatgtttgcaatgtcaaggaagtttctattatttctgcaagaaacattagtggcattttccactccagagtttctttaaaggacatatgctggkgaactccagttatttgtcaactctgtctccctagaaatctctttagattagagttatcatcatcctttggcatttcaaaccctgcacaacatgtttataattggatggtctgataaatgatcctgcataaaccagccactaacatctttgaacttcctctgtcatttcctatgcagaattcctcttaagtgcctcatacacagtttgatgtgccctcttttaaagtagatatgcactgatcctatcagtgtctaaactaccacctgactgtaaagtagcccttttaaaatctattctttcattgttttatccatgtcactgttagaatagatgccacatttttatctaattggttttaatacc

SEQ ID NO: 706705 - DNA, 654 bp, Homo sapiens
cgactgaattgatcctcctgctcctagagatgaaaatcaagtacagataatgacagagacatttttgctctattaggtccttggatgagctcaagaaatgtctgcttatccctaaccaccttggaaagttaccttaagaaagtaaaattgctatgttgcttgagaagctatatttttaagtatttttattatagtagtttctagaacaagatttctcaaccttaatacaattgacatttgaggctgaatatgtttttgtagtaaaaagctgtcatgtgtattttacggtgttttgtagcatcattagccactaccactagacccctatggcattcttctggtcrtgacaagcaaaaatgtctctggactttggcaaatgtcccctgtggaataaatgtgtttctgtttgagaaccactagtctgtagactaacgaatgtagacattgttccctgtagtaatgctgccttaataaaacttataaaatattgcattcacttaggagtcagtgagaagaagtgaagaggcattgaaggctggaaggtggtgataattcttctgctgcagcattgataaaactgttaactgtggaaagtactaggcagaacatattcctatggagattaaagcagctagagaagtgcttagaaaggca

SEQ ID NO: 706706 - DNA, 2145 bp, Homo sapiens
caataaagtgtggtaagtgctatgactgggttggccatgaggagttaggagagcattggcatggcttctgatctagcttaggagatcagaggaagtgagggccaatcccaagcttgaaagctgattaggagctaaaggggcagggaggagctaaggagaagaaaagggtttcagatggggataactagttatgaaaagtcttatttgagaatgtgagagaattacaatatggctggagctctcagacgagaagtgtggtttagcaagaaataaagctagcccaggcacagtggtacacacttgtaatctcagcactttgggaagccatggcaggtgaattgcttgactccaggagttcaagaccagcctgggcaacatggcgaaatctttctctgcaaaagctacaaaattagctgggtatgatggtacaggtctgtagtcccagctactcgggaggctaaggtgggaggattccttgagtccaggaggttgaggttgcagtgagccgtgatagcaccactgcactccagcatatgtgacagagtgagaccctgtatcmaaaaaaaaaaagaaagaaagaaaaagagaaagaaagaaagaaggaggaaaggaaaggaataaagaaagaaagaagaaagaaaagaaagaagcaagaaagaaaaaagaaagaaacagagagagagaaagataaagaaaaaaagagaaagaaagaagaaagaaagaaagagaaggaagagaaagaaagcaagctaaaaagtaggcaagggacagattgtgaagggctttgtaaaccatgtttaggagtttggaattattcctgagagcaacaaggagccttcgaagcaggacaatgcctggattaggttactgtttcagaaagaccgttctggctttgctgtagggaatgcaagaagctagaactgcattggggaagaccagtgagggggctgttatggtagtacagggagaaatgatggcgatctggattagggtggtggcagggggatgttgatgcattttagaaatattgaataggaataatcaacaggacttgatgattgattagatgtgggagatgagagagaggaaagaaccaaggatgacatccagacctgtgacttgtacaactggatttttgtaagttagtcttgtatccagccacctcgatgaattttcttgtagttctaaagcttattgtacatttgcttagattttctaggtagacaattatgttgactgcaaataaggatggtttaggttcctctcttcatttttattgatgtagtatcagtgaacgtccagtcaggaaaaaagaaactgctcttggtatttcaagcaaagagatgtaatagatgagattaggtgcttacaaactggctgggagtgtggagtggtgaaagtcaggggaggctgctgctagattttaggttcaccattgcagttgttgcctttcacatcaagaagttgctgttgccatccaggtcaggaaactgacactgatagtcacagctgtcctacagcagtgaacagggtaggtgagagggctggctgccttgaggattttataaatcatttctgagagtgcccaagtatctacaagccactaccagagagaaaaagagagtcgtatagcttgcttctgactccctcccatctccaaattgtaagcaagtgcatctcattggctggatgatcatagtaatgtgaaggtaaaggagtgtggggcgagtagctcccaggcttctagccccagtgataaagggcagggatggtagaaataacggcggcaaaaacaagacaacaaaaaccaatatccagtgcagttttgccttcattttctgggcctaccttttgtgtgcaagacactcaaaacactttcaaatgagttaaactctctaggttcttctctcaccacttctcccaggtgcactatgttctggaagacgcacagaatgtcatgcaactttctaaatgtatgtccatgcctttgcccttgtggtaccacctaaaagttacctttcctctgcctgtgaagactcttcctgttccttcagcgcccattcactccttgcccccttacctgcatcaggcaggactgatgcctatcttcactatttccactacactgggttcacagttctatag

SEQ ID NO: 706707 - DNA, 2426 bp, Homo sapiens
ctcccaaagcagtaggattataggcatgagctactgcacctggccattgttttgctttttaaaaaactttcaagaaatgattgggttgactctattgcctgagtcatagaattatttctaccatttctaagcaaaagcgtcttatcagatgaattggctcggcattttagttttatataaccaattgtcatatgtccaagaatttccatgatatttacaagacaaaatctttatttttatttgtttagaccttttaatgtaagaatatgtactcttattaccaagttatactgtactgactaggtcgatgttgcttgggacatcattgataataaatatttttgtaggaccccaaacaatacttaagtgacttctctattagtaaagcgtttagaatagatatcactccaagttataagaatctgtgattttgttaaagtttaatacgtttatcagagcaagcatcatgggaacatacttgtgcttttagcaaaacatgttgtggttatatatgtgcaagcttgagccagaagaggaaaatttttctgaatgatgttacaatgttgcagataaagattcaaaagatagattgttttgtagaaactgacaagctgattctaaaatttatatgaaaataaaagaacccagaatagccaaaacaactttgaaaaataacattgaggttggagaattaacattatctgatctcgagacttattatacaggttccacggtttgtgcctgtaatcctagccagcagagagactgcttgagcccaggagttcaggctgtacagtgctataattgtgcctgtgaataaccattgcacttcagcctgggcaacttagcaagaccctatctcttaaaatgagggcttataaagttacaataatcaataatatggcattggcataaagagacaaatagatcaatggaacaggatggattcaaaaaatggatctacacatatgtagacaatggattttagacaaaggtacaaaggcaattcagtggagaaatggtagtctttccaacaaaggttactggaaaaaaatagatatttacatgcaaaaaataaactttgattaataccttccaccatacacaaaaattaagttggctgtttccagctgctaacaactttcaggaatttgtcatgatgactgttctcatactgctagtaaagacatactggagattgggtaatttataaaagaaagaggcttaactgacttayagttccacatggctgaagaggcctcacactcatggtggaaggtgaatgaggagaaaagtcacatcttatatggcggcaggcaagagaacatgtgcaggggaactcccttttataaaaccatcagctcttgtgagacttattcactatcatgagaacagaataggaaagacccacctccatgattcaattacctcccactgggtccctcccatgacatgtgggaattatgggagctacaattcaagatgagatttgggtggggacacagccaaaccatatcattgacatttaaggagcttaccaaaaacacactaaagatctccttcaaatatttagatgaaataatgttggcggcaacttgtgtataaaattacatactcatagaaaaagttttttgtggttttttgagatattataatgtatccagcaatgcatattgtagctctgatattttctttaaaaattttttagttacgtatttatatacttagagttctgatacaactactacttaaatctcatttataaattttgttccttgtggccaagattctgtggggaaacagtattttcattttgtaaatcttagactttctattgtatttttttgtattgaaatctgattatttgaattttcatgacaaagtctcatcattttgcttttaattactctatagatttttatttggcagatcatcttatttttcattattaaaacaaggactgacatttgctgtctcagaattagtacattcaattattcttaaaaaacattggaataactccttattcagaaactctttttgatattttcagtttctaaacttagctgattatcaagaggaagcaaaaaagagccttgagtacccaactgatatcacaaagtctttgatgtaaatctcatgcattacagggtcccagccttattctggcctttccagccttattttaaactcagaccatgcatactgggttattggatttctcagtctagagtaaaatataaaaccacaagtgagaatgggaatatggcttaaaaacagatgtgttgcgaacagcaagaagtgacaactgtaaacttgatagcaagggaagagacacaaggggagaaaaaaagcataaaatagcacataaaacactttttaagtaaacaaagtaatctatagccccaaatcattgaaataataaa

SEQ ID NO: 706708 - DNA, 484 bp, Homo sapiens
ggtggctgatccataaattgccattttagcagcagtcagtattctctaccctgaatatctattaaatctatgctgtagagtgctggggcaagacttcccaagtaggaggactcctcactgaggaatatggagaacatgtgctgaattcctcggttcatgaaaagaatatcttgyattgaaaaacacaaaaagagaattagtgatggtatttacagtagggtaggtctagccccctgacagttaacacttgtgcttttaatatttcttcaacctatggataattctgtttttgttagttttgttatccttccctttatagatggttactagcagttacctttctgaaaaaccagtgggaagaaagagagagaatgagagggacagagaatgagaatgaatatgaatattagttcccagttacctgacagaaaggctcaggtaaagaacagatgtacatagtagaagaggcaaatgggctgaattc

SEQ ID NO: 706709 - DNA, 484 bp, Homo sapiens
ggtggctgatccataaattgccattttagcagcagtcagtattctctaccctgaatatctattaaatctatgctgtagagtgctggggcaagacttcccaagtaggaggactcctcactgaggaatatggagaacatgtgctgaattcctcggttcatgaaaagaatatcttgtattgaaaaacacaaaaagagaattagtgatggtatttacagtagggtagktctagccccctgacagttaacacttgtgcttttaatatttcttcaacctatggataattctgtttttgttagttttgttatccttccctttatagatggttactagcagttacctttctgaaaaaccagtgggaagaaagagagagaatgagagggacagagaatgagaatgaatatgaatattagttcccagttacctgacagaaaggctcaggtaaagaacagatgtacatagtagaagaggcaaatgggctgaattc

SEQ ID NO: 706710 - DNA, 1823 bp, Homo sapiens
agtacagtcgtgagccactgcctccggcttcagtgagagtcttatactacactgctgtttcttcaagctccaactttttcttaaaaggccacatggcaaatattttcaggccgtatagtctttgttgaaactgctcagttctgctcaaaagcaaccaaatgtgtatgagtgtggctttgttccaataaaactttatttacaaaaataggtatcaggctggttttagcccacaggcagtagttcgcatacgacgcatgtgttcatatgaaaaagtccttgccaaggtaggccagggattacttccagagaagttggtgcaccagtgctatagttaaccaaatctctattgtagctgtgtttttgcacattaggcttgtggagtgaatgtggacacttgtaaatcccatcatgtgtccctgtattcagttattcaaaactatttagtgagcaccttccctagaacctcaccatcataggccctaggaaggttcatatgaacaggcagatgagtatctgccctcatggagctgacattctagaagaaaaagaaggtgataaattcgtagacaaatacagagatgatttcagatcatggtaagcattatgaaggcattaaagcaatgtgataaagaattggcagggaggtttgctttggagacgatcagggaagattccctaaggcaatgacattgcatcctgcaagggacactgagtaggataagagaatgaaaaatgattctttttgtgtgtgtgtttgtttgagacagggtttcactctgtggcccaggctggagtacagtggcaccatcatggctcactgtagccttcaactcctgggatcaagcgattctcccgcctcagccacctgagtagctggaactacagacrtatgccaccacgtccagctaatttttaattttttagtgtggagacaaggtctcactatgttgcccaggttggtctcgaactcctgagctcaggtgatcctcccacctcggcctgcataagtgctaagattacaggcatgagccactgcacttggccgtaaaattattctaagaaaatagttgtttttaaaaacacacaaatagctcagaagtacataaaatgaaaagtaattgcccctgttctcctaccctttaaaagggataaatgaattgtaatagggtaaccatctctcagttcctgggtcctgacaaccttctctcgcctcagtctcccacccacttcggtttgggcagacagtgcctcaccggcgtcggctctgagtgaagttctatttctggccaggcacactgccttgagcaggagtctcccagtccctagtcgggatcgggatttactggcgctggtgaatgagccacagctgttgttcagcccagcctgtctgtgcagttgaaaaggctgccttgcatggtgaactttttctcatttttctactcctgagataggttagatctgcaagtacaaaaaaattagctgggggcggggaggcgaggcagtgggcatagtggctcacaactataatcccagcactttgcggggctgaggtgggaggatcacttgagtccaggaattcaagaccagcctgtgcaacataatgagaccctgtgtcttcaaaaataaaaataaaaaattaggtggacatggtggcacatgcctatagtcccagctactcaggaggctgaggcaggagggtcacttgagcccagaagttcgaggctgcagtgagccaggatcatgccattacactccagcctgggtgacagagtgagaccctgtctcggcgggggaaaaaaaaaattagctggggtagctcattc

SEQ ID NO: 706711 - DNA, 2296 bp, Homo sapiens
cagcctcctccattcccaaggcagctgccacaaatgggtctctttctctctgcacctcatgggagtggtcaaagcagccacaatcatttcatcagagagttggtttgagttgaaatctccttgtcatctctgccttaatgagtatataaaactttttttagtagaggatatgaataaatttcatagctcatctttaaaaagaatcattaaagccctatgaactaagatgtccttttcactaatagattaagattgaggctccaaaagatgggtagctgtttttgtttgtgcaaaagccttgcagcctctagcagttttcccagcacatagtaggtattcaaaattattgacagaataattgcgcagaattagtcttaccaaatagagctaatgatgacagtaatcaatgataggtccagccttactcatggatagcatagatagtcatgggcatgatgtatgtataagttctccagagttccaatgaaacaacatttcatatatatgtgtgtgtgtgtgtgtgtgtgtgcgcgcgcgtgtgtatgtgtgtgtatcttgtatatatatccagaaagagagacagagagagagagagatttattttaaggaattgctgcactgacagatgtgcctgtttttgctatcttgggatttctttctgttattttaagaaaaactcagtgagcttgattttgaaagctgctgctttggccatggcttagtgtttgaggctcaaagtgttgaaacttcctataaatagtatccttagcgatgggtcatcgccatatgtattgctccaacattatgttggcatacatttaaatgaaagattgatgttgttgactacagttgcttgtatgatttgtgtttgtagttggcctcctttttatttttttgtgaatggttgagaccacaagaaatgttgtttcactgggaagagaaaaagaaaggagaaaatactcattaccaaactcaatttgatgacttatgttggcattccctaatgggctgcctaacatgagaaaggggagaggaggtgtgttttttgtcacaaggtttctattccatgattgaaactatttatcttttgagggaaaaaagatttataatgtttccagtaaagttgcctgtattaatctatgtgaacttccataataaaatgtcatagattgagtggcttaaacaacagacatttattttgcatagttctgcgggctgaaaatctatgatcaaaatccagcaytgtttggtttctggtgagggctctcttcctggcttctagattgccaccttctcatggtgtccttagacggtcttttctttgagtgtacttggagagagagctctttctcttcctcttataaggccaccaaccttgtgtgattagggacctacccttatgacctcatttaactttaattacctcctaaaggccctatctcaaactacagtcacattagggtgaaggtttcaatattttggggggataaaattcagtccatggcagtttcgattacgttataaaataatactgtttttcaaaggcataagaaactagcaagggagaatcattatgtattcacagagttgaaggaaaagaggggtggtgtggtaaaaatcgaaaattatttgccacttacctctctctctttttatagagacagggtcttgctctgtcacacaggctagagtgcagtggcaccaacatatttcactggagcctcaacctcctgcttcagccccctgagtagctgggagtacctatgtgtgcactaccatggcttgttaatttttcaaaagaaatttttgtcgagacagggtctcattatgctgcctaagctagtcacaaacttctggtcgcaagcaatcctcctggcttagtcagcctcccaaagtgctgcaattacaggcatgagctaccacatctggcctacttttcttgcaataaaatccagacacagttttagggtttctttctgtgtgtaaaatattgtggtaaaatctttagattactgacttaatttttcaggaagtaagaagcattttaagataatgtaccacacatcttctcacactgtggtatgtgacggttaaaaatgcagcaaaaaatatggacctttacttcacgaatttagaattttactggcaatattgaggtatgagtttgctaattctcaaaggaatcttatatgtgtctattcaggaatagtaatttgattattttgaataaatgtgcctgatgacagtgtattagtcaattttcatgctgctgataaagacataccaagactgggaa

SEQ ID NO: 706712 - DNA, 1205 bp, Homo sapiens
caaaactgctcactcggccgggcacggtggctcacgcctgtaatcccagcactttgggaggccgaggcaggcrgatcacgaggtcaggagatcgagaccatcctggctaacacggtgaaaccccatctctactaaaaatacaaagaattagccaggcgtggtggcgggcacctgtagtcccagctactcaggaggctgaggcaggagaatggcgtgaacccaggaggcggagcttgcagtgagccgagatagcgccactgccgtccggcctgggtgaaagagtgagactccgtctcaaaaaaaaaaaaactgctcactctttgctacttggctaagggtctctgtcatgcccttcccagagaggcaggtcctccactctgagaggcccccaaccacctctccaatggcactcagcacactgtgttgtcactgtctgatgcacggtcctctccactatgtgccctttctgcagcaaaggacccctgtatcacttctatgagctcagcacccagtacactaacatgtaagtaaaggatacacaggacaaacctgcaaaactgaccagatgccaaaacgctgattagaaatccagtgagcttcagaaagttcggggtgggtacagtgtttcttaaacttggccattagaagcatttcaaaaaattaatcaatatcttgactagaggctgagacccataggcaagcgcctgtagatgggcccaaggggctgccactgcagactggagggcaagctaaaggttaggaaaataggaaggtgattcctccatacttccagggtcaagtccaaagatctgggatcagggaatgttctccccatagctggagactggcctctaacgcccctgcactggccaagcaggtctctggcttcctttctgggagctgtgtgtctcaactcggacgggcatggttgttttacttaactagaaggagggtgagaaggaggccagagactgaaatcaaatccagttatcctcacatccctgaagggaatgatggcctgctgggaatggcaggtaggtggtttccgcaaagtgtcccgggcagggccaggcagagccgcccctcccgttgtggtagcctccttcttgggcttgctctccttggaacctgggctacctgcacactgggtctcaggtgcagtgtcttgaggggaatgaaagctctgtgctcccggtcgcagtcag

SEQ ID NO: 706713 - DNA, 1205 bp, Homo sapiens
caaaactgctcactcggccgggcacggtggctcacgcctgtaatcccagcactttgggaggccgaggcaggcagatcacgaggtcaggagatcgagaccatcctggctaacacggtgaaaccccatctctactaaaaatacaaagaattagccaggcgtggtggcgggcacctgtagtcccagctactcaggaggctgaggcaggagaatggcgtgaacccaggaggcggagcttgcagtgagccgagatagcgccactgccgtccggcctgggtgaaagagtgagactccgtctcaaaaaaaaaaaaactgctcactctttgctacttggctaagggtctctgtcatgcccttcccagagaggcaggtcctccactctgagaggcccccaaccacctctccaatggcactcagcacactgtgttgtcactgtctgatgcacggtcctctccactatgtgccctttctgcagcaaaggacccctgtatcacttctatgagctcagcacccagtacactaacatgtaagtaaaggatacacaggacaaacctgcaaaactgaccagatgccaaaacgctgattagaaatccagtgagcttcagaaagttcggggtgggtacagtgtttcttaaacttggccattagaagcatttcaaaaaattaatcaatatcttgactagaggctgagacccataggcaagcgcctgtagatgggcccaaggggctgccactgcagactggagggcaagctaaaggttaggaaaataggaaggtgattcctccatacttccagggtcaagtccaaagatctgggatcagggaatgttctccccatagctggagactggcctctaacgcccctgcactggccaagcaggtctctggcttcctttctgggagctgtgtgtctcaactcggacgggcatggttgttttacttaactagaaggagggtgagaaggaggccagagactgaaatcaaatccagttatcytcacatccctgaagggaatgatggcctgctgggaatggcaggtaggtggtttccgcaaagtgtcccgggcagggccaggcagagccgcccctcccgttgtggtagcctccttcttgggcttgctctccttggaacctgggctacctgcacactgggtctcaggtgcagtgtcttgaggggaatgaaagctctgtgctcccggtcgcagtcag

SEQ ID NO: 706714 - DNA, 1205 bp, Homo sapiens
caaaactgctcactcggccgggcacggtggctcacgcctgtaatcccagcactttgggaggccgaggcaggcagatcacgaggtcaggagatcgagaccatcctggctaacacggtgaaaccccatctctactaaaaatacaaagaattagccaggcgtggtggcgggcacctgtagtcccagctactcaggaggctgaggcaggagaatggcgtgaacccaggaggcggagcttgcagtgagccgagatagcgccactgccgtccggcctgggtgaaagagtgagactccgtctcaaaaaaaaaaaaactgctcactctttgctacttggctaagggtctctgtcatgcccttcccagagaggcaggtcctccactctgagaggcccccaaccacctctccaatggcactcagcacactgtgttgtcactgtctgatgcacggtcctctccactatgtgccctttctgcagcaaaggacccctgtatcacttctatgagctcagcacccagtacactaacatgtaagtaaaggatacacaggacaaacctgcaaaactgaccagatgccaaaacgctgattagaaatccagtgagcttcagaaagttcggggtgggtacagtgtttcttaaacttggccattagaagcatttcaaaaaattaatcaatatcttgactagaggctgagacccataggcaagcgcctgtagatgggcccaaggggctgccactgcagactggagggcaagctaaaggttaggaaaataggaaggtgattcctccatacttccagggtcaagtccaaagatctgggatcagggaatgttctccccatagctggagactggcctctaacgcccctgcactggccaagcaggtctctggcttcctttctgggagctgtgtgtctcaactcggacgggcatggttgttttacttaactagaaggagggtgagaaggaggccagagactgaaatcaaatccagttatcctcacatccctgaagggaatgatggcctgctgggaatggcagrtaggtggtttccgcaaagtgtcccgggcagggccaggcagagccgcccctcccgttgtggtagcctccttcttgggcttgctctccttggaacctgggctacctgcacactgggtctcaggtgcagtgtcttgaggggaatgaaagctctgtgctcccggtcgcagtcag

SEQ ID NO: 706715 - DNA, 1205 bp, Homo sapiens
caaaactgctcactcggccgggcacggtggctcacgcctgtaatcccagcactttgggaggccgaggcaggcagatcacgaggtcaggagatcgagaccatcctggctaacacggtgaaaccccatctctactaaaaatacaaagaattagccaggcgtggtggcgggcacctgtagtcccagctactcaggaggctgaggcaggagaatggcgtgaacccaggaggcggagcttgcagtgagccgagatagcgccactgccgtccggcctgggtgaaagagtgagactccgtctcaaaaaaaaaaaaactgctcactctttgctacttggctaagggtctctgtcatgcccttcccagagaggcaggtcctccactctgagaggcccccaaccacctctccaatggcactcagcacactgtgttgtcactgtctgatgcacggtcctctccactatgtgccctttctgcagcaaaggacccctgtatcacttctatgagctcagcacccagtacactaacatgtaagtaaaggatacacaggacaaacctgcaaaactgaccagatgccaaaacgctgattagaaatccagtgagcttcagaaagttcggggtgggtacagtgtttcttaaacttggccattagaagcatttcaaaaaattaatcaatatcttgactagaggctgagacccataggcaagcgcctgtagatgggcccaaggggctgccactgcagactggagggcaagctaaaggttaggaaaataggaaggtgattcctccatacttccagggtcaagtccaaagatctgggatcagggaatgttctccccatagctggagactggcctctaacgcccctgcactggccaagcaggtctctggcttcctttctgggagctgtgtgtctcaactcggacgggcatggttgttttacttaactagaaggagggtgagaaggaggccagagactgaaatcaaatccagttatcctcacatccctgaagggaatgatggcctgctgggaatggcaggtaggtggtttccgcaaagtgtcccgggcagggccaggcagagccgcccctcccrttgtggtagcctccttcttgggcttgctctccttggaacctgggctacctgcacactgggtctcaggtgcagtgtcttgaggggaatgaaagctctgtgctcccggtcgcagtcag

SEQ ID NO: 706716 - DNA, 1047 bp, Homo sapiens
gagagagaaaactagtgagacatgcagcagacacctccaggctctttcacaaaaaccttcacagcagcaatctgcaactcctgctgacttataactgcattatcacacctccagggagcatgcagacactcctttctccttgtcttgggtcaaagagctgaaaacagtcccagcaagtcctgagaatgagatgctgagcttctgtgggtctgctatatgcagttccttctcttttcactaaagcaggttccctgacagtgaatggcatgggaataagtccaagagttctgtgaaataaactggaaatcagaaaaaaaaaatgggaagagttttctaggtctaccctgtcctgggatgttggttgaaattagttgtgtctcgtagattctttcaacttctcctctcttctttrtatttaaaggtcagtagaaaatttcaattttaatttaattagggcaagaaagtgattcaataatttatgtgctgggcacatctaaatagattatattctctcactcacctagacaggtaaacaacaaacaaggctttaaaataccttacttagaaataaaaaaacttgaaaagagcccaagttaggcaaaatttgtgctgtgcagaaattggttgcagacaaaattgacccttctagggtagccgtttaatattcctttctttgcagcagttctaattaatacttaatcaccctggaactagcctcttcctcgaggaactcatagggatcttgaagctacctctgtctaattgaccaactttcaactggtgatggtgactttcattagcttgccacaaaaacattaaattgaagcaagcagagatgagacgatacctcagtatgtgaaaatgactaagaacactgtgctgttcattgcttttagattcttgtgaccattaggtttctcctaatatgatggcatgggtgagctagagcaatgaaggaagcactgaacatggaatccaaggactttggatcccttgtcccatttgccaatggtgtgaccttgccaagtcatttaatataattaacca

SEQ ID NO: 706717 - DNA, 1160 bp, Homo sapiens
  misc_feature 694, 695, 696, 697, 698, 699, 700, 701, 702, 703, 704, 705,706, 707, 708, 709, 710, 711, 712, 713, 714, 715, 716, 717,718, 719, 720, 721, 722, 723, 724, 725, 726, 727, 728, 729,730, 731, 732, 733, 734, 735, 736, 737, 738, 739, 740: n = A,T,C or G
  misc_feature 741, 742, 743, 744, 745, 746, 747, 748, 749, 750, 751, 752,753, 754, 755, 756, 757, 758, 759, 760, 761, 762, 763, 764,765, 766, 767, 768, 769, 770, 771, 772, 773, 774, 775, 776,777, 778, 779, 780, 781, 782, 783, 784, 785, 786, 787: n = A,T,C or G
  misc_feature 788, 789, 790, 791, 792, 793: n = A,T,C or G
ggctggattttacagtatgtaaataagtcagtaaagctgtccaaaatgtaaaagagtgaggcacccacggtgcagaatttaaggaggcatttattctcatgcaagcacctccttaaattttgtgccatagttgttccatgtgcttcaccctagtccgggacctgccaccaaacttcccttctaagcttctcacaggaagagaggcctactgaaatcccggagaagctgtgccacaaaggcctatgtgaaagctgacccaagcgatacaaggctgggggactatactagacatcgttatgtgcccttcagctttcctttgaggagtgacttgatcygctaagcgtggtgagtactgcgagcagaatagccttgatctgtcagtctcttcagggttgcctgagctgcacaaagacaccttggtcaaggtagtgccgtttctgagtcagtctacctgcagcaattgatagaagaaataatctaaaggctcagccatttcatcccaatgtgagaaaactctcatgtgtcacttttagctgcacagcgccctgtagtgtaggctgaggctgttgccaggccaccagcatagctcaatttcttcctctacccagtcatgtgtgcttccctcctttaaactggtgctattaggactttgacctaagagtggaatgtctggatccctttatagtgtcacctnnnnnnnnnnnnnnnnnnnnnnnnnnnnnnnnnnnnnnnnnnnnnnnnnnnnnnnnnnnnnnnnnnnnnnnnnnnnnnnnnnnnnnnnnnnnnnnnnnnnaacaagtagctaaagatcccctactctgtcctggatcatgggacgcagtccagaacaagagggtgtggccctcgctctgctggagcttacgttcttatggggagacagaccctggatgagttgaaccctaatgtgacacgtactgatgtgcaaaggtgttgggcagaagtatggggagaactagtttggtcaagagggtgtcagggaccctttttctaaggaagtgacatttaagataagcctgaaaggatgtgtggaatttcactgggtggaaagctgctgactgctttggggtagagagaacagcatgatggagggactcaagccctcagaaagggtgacaccctggaggccagtgaggaagtga

SEQ ID NO: 706718 - DNA, 1983 bp, Homo sapiens
caggaaaaaagccccatggctgggccactttgtggtctgtaggcccatttctgaagtacggaaataaaatacaatgtggtgggaaaaagaaaaagaaaaaaaaaataaacagcaaaatcaaaatgactggatggggttctgttgaagtccagaactccagctagagggaacgtcctgagggcgtatggtaaaataatctccctgctgtctctggtcttatcagcctgtgttgccctctttgctgctgtcctccatgtgcaaaaaattcaacagggagaatttttccacactggcaacaggtgatggcaagttatcagccgtgtcaacacaagcccaagtgggcaggcagaactctcttcttcttttgtaggtcaagccagccttgattagcctacgaacttcttggttaagctcaatctgcaatctgttgcaggaaagaaaagaggaaatggtcagttaaaggcagtaatgaaagaagtgcccaatatgactctgagcctttcaaaaacaacgagattgggatgaaatgttgaggggccagggctggcattaagtggaatttcaaataacagtaacttacttgaaaaggtattcaagaaataattaatatagtatcttcaaaaggacatcatgctattacctgtcactatcaaccatcatattgtgaatttaacatcctaatcagtaccttctcttttatctattctttatctatttgcatatccaaacacttaattacaacaggcacactgctgaatccactcaatcagttaatgataattatctacaaatcctactggtcatagactagtttcaaggtagaggtgatgactgacagctagcaaaagtgaaggggaaaatgtgaagccctgcagagttatatatttaaaaatgcaacatggagactaataaagtcacttaaaaagatgcatccttacagaaaagttattccaaatgtattatatttccaaatacatttactagatatgaactttcatatactatgttataaaaaagctgtagctgaataagttgccatttccttttaaaatgtattttaaaactctgatacaaaaccttattcatgcttaatggaaaattttagagaataaaatataaagaacacagtatgaaggtgataaagattattcattatattatcactcaaagataactgatcgatttgcttactttccttttttctatacatatacttaacaaaattggaatcattatttttctttttgttacctaacatatgtcatgaccacattaccacatgatttaaaacaatcattcaaagaaaaaaaagaaattcaaagaaaaaatttttcaaagaaaaaaaagtagtataaacgtagtgaacagaagcatgtatgaaggcagagagacttttttctttcccacttcttgtctcccttcctctttatcttcctccaaaatagcttgcacctcaagtcaccgaggasaatgactaagctccagcccacaaaacatttccacttatctcctccttcgagacctctaggtccagatgagatacaccattgtgatcccttgaagagttgccaagctcacgactaggggtaaattatttttcaacagcaccaccttccttccgtctgtgctttcctgcttttataggaggtcttttagcaaatttcgaaatgacagaagacacagttgaggaagtcaaggcaatccacagatagtaatcatgccttcttgctccagaatgtattctatctgtttttagattagagaggtaaagaagttaattgaaaggtgccagatttgatttccctacaaaataagctaacatgacaggacatggcgaactgcaagtctcttaattctcaccaatacatggagattgaaacaacttacatctaaaagcatagaggaactatttgaaattgttctcttagctatctttagaaatataattaaaaaagaaaaaaagaacactggaaatgttattta

SEQ ID NO: 706719 - DNA, 1983 bp, Homo sapiens
caggaaaaaagccccatggctgggccactttgtggtctgtaggcccatttctgaagtacggaaataaaatacaatgtggtgggaaaaagaaaaagaaaaaaaaaataaacagcaaaatcaaaatgactggatggggttctgttgaagtccagaactccagctagagggaacgtcctgagggcgtatggtaaaataatctccctgctgtctctggtcttatcagcctgtgttgccctctttgctgctgtcctccatgtgcaaaaaattcaacagggagaatttttccacactggcaacaggtgatggcaagttatcagccgtgtcaacacaagcccaagtgggcaggcagaactctcttcttcttttgtaggtcaagccagccttgattagcctacgaacttcttggttaagctcaatctgcaatctgttgcaggaaagaaaagaggaaatggtcagttaaaggcagtaatgaaagaagtgcccaatatgactctgagcctttcaaaaacaacgagattgggatgaaatgttgaggggccagggctggcattaagtggaatttcaaataacagtaacttacttgaaaaggtattcaagaaataattaatatagtatcttcaaaaggacatcatgctattacctgtcactatcaaccatcatattgtgaatttaacatcctaatcagtaccttctcttttatctattctttatctatttgcatatccaaacacttaattacaacaggcacactgctgaatccactcaatcagttaatgataattatctacaaatcctactggtcatagactagtttcaaggtagaggtgatgactgacagctagcaaaagtgaaggggaaaatgtgaagccctgcagagttatatatttaaaaatgcaacatggagactaataaagtcacttaaaaagatgcatccttacagaaaagttattccaaatgtattatatttccaaatacatttactagatatgaactttcatatactatgttataaaaaagctgtagctgaataagttgccatttccttttaaaatgtattttaaaactctgatacaaaaccttattcatgcttaatggaaaattttagagaataaaatataaagaacacagtatgaaggtgataaagattattcattatattatcactcaaagataactgatcgatttgcttactttccttttttctatacatatacttaacaaaattggaatcattatttttctttttgttacctaacatatgtcatgaccacattaccacatgatttaaaacaatcattcaaagaaaaaaaagaaattcaaagaaaaaatttttcaaagaaaaaaaagtagtataaacgtagtgaacagaagcatgtatgaaggcagagagacttttttctttcccacttcttgtctcccttcctctttatcttcctccaaaatagcttgcacctcaagtcaccgaggagaatgactaagctccagcccacaaaacatttccacttatctcctccttcgagacctctaggtccagatgagatacaccattgtgatcccttgaagagttgccaagctcacgactaggggtaaattatttttcaacagcaccaccttccttccgtctgtgctttcctgcttttataggaggtcttttagcaaatttcgaaatgacagaagacacagttgaggaagtcaaggcaatccacagakagtaatcatgccttcttgctccagaatgtattctatctgtttttagattagagaggtaaagaagttaattgaaaggtgccagatttgatttccctacaaaataagctaacatgacaggacatggcgaactgcaagtctcttaattctcaccaatacatggagattgaaacaacttacatctaaaagcatagaggaactatttgaaattgttctcttagctatctttagaaatataattaaaaaagaaaaaaagaacactggaaatgttattta

SEQ ID NO: 706720 - DNA, 537 bp, Homo sapiens
tgtcagaagcatattcacatcctctctgaaggaactcacccaaatattcctcacagttaaacttctaagcaatatgagccacagataaaataagtcaccagctcacaaaggaaaaaggtaccatgagaagaagccagcgaaaataacaacagaatcagaagtgcaaaaatgttagagactgggatttattataaagaaagacacacacacacacacacacacacacagattcagtaggtttgaaaaatgtaagagaagactgaatacatgtcaaaaagtaaaatatgawtaattaacaaaaggacagctttaaaaggaaataaattaacatttccaaaattaaaaatctaaccattaaaagtaaaatttcatgaacaaatttaggtcagattagaatcattgaaaagtaataaactgtatgtcagttataaaaaaaaattagaatagaatcaaatagttggaaaacctgaaagaaaattacaaagacgtacagaacaaattaaagtctaacgtgaataactaaggaagaaggcataa

SEQ ID NO: 706721 - DNA, 677 bp, Homo sapiens
cctggcctgaagatggcacttttaaaaagatttttttctaagtaaaatggcccccaaagagcccaatgatttttttaagggtttatttttmattttaaaaaaactggataaaaatgaaagctgtaaaatatgggaagaggagcaagagagctgctgagtttgcatttgaaattgtgaggggctggggaggacacgaccaggtagagaggacccctacccactagtccctgctctcacagcttgcgctccccacactcaggctgcaccaccagggaacacaggacagaagtctagaggacaagagaccaaactcaagtcttctttcttgtggttggttgggtgtttacatgtgcaagtgtagtaagccacaccccacagacataaggtgcctgtctgtggatgccataggcatgctcctaagctcagtctctggtgaccccgagtctctgggcaggccacgggccttcacttctccactttcttggctttcttgaggatgttgcattttttcctgttagggcagtggcactgctcgtcgttgctggggatacattcgcagtgccacacctcctccaccttctccacggggtagacggcttccacctagtggcagatgagccgcagctgcgtagggtccagctgcttcttgttgcaagcccgaaaattgttgtactgca

SEQ ID NO: 706722 - DNA, 677 bp, Homo sapiens
cctggcctgaagatggcacttttaaaaagatttttttctaagtaaaatggcccccaaagagcccaatgatttttttaagggtttatttttcattttwaaaaaactggataaaaatgaaagctgtaaaatatgggaagaggagcaagagagctgctgagtttgcatttgaaattgtgaggggctggggaggacacgaccaggtagagaggacccctacccactagtccctgctctcacagcttgcgctccccacactcaggctgcaccaccagggaacacaggacagaagtctagaggacaagagaccaaactcaagtcttctttcttgtggttggttgggtgtttacatgtgcaagtgtagtaagccacaccccacagacataaggtgcctgtctgtggatgccataggcatgctcctaagctcagtctctggtgaccccgagtctctgggcaggccacgggccttcacttctccactttcttggctttcttgaggatgttgcattttttcctgttagggcagtggcactgctcgtcgttgctggggatacattcgcagtgccacacctcctccaccttctccacggggtagacggcttccacctagtggcagatgagccgcagctgcgtagggtccagctgcttcttgttgcaagcccgaaaattgttgtactgca

SEQ ID NO: 706723 - DNA, 1173 bp, Homo sapiens
cacacacacggcgcgcatatcagaggcggacgaagaagccgccagaatttagccagtcttscttcttcatcttccctcctcctagtaaaacacacacacacacacacacacacacacacacacacacacacacacaaacacaaatgggcatcactcttttctctggtcgtgcctctatttcagcttgtgattttcacgtttcacaagggtcttcgcggcagaacctggccgtcccaacagcctgcggaggtttcgggttggatctcgcgttcgctccactgcttggcctgcgcttcagcctctagcgaccaaagacacccatgccaccgtcggcagctccatgctcgcgaacttagacttcagacctctgtttcactgcagtaattaaagagaccatggtggggatagggcggaaagttatgttcaataaataccttttaaatgatttaaatgtgtccttccttctccagcgcacacacgtactcctgaactggacacctggcaaggccaaggaaaaaggagaaactcttttgtaaggcgggaaggatgcacccccttagctacagacaggcttctaggtggctcgccttctactagtagaacaggtagggttgtctgctaaagtgtgggacctgctacgttgaagccaatcttctctgagcaagactcaatttatctttttcttaattacaacacatgaattttaggtcaccaagtaacaccaccagtcaaagggtttcattttatctttattgcctatttattacaattcagaagaaaaatgaccaactggaaaaaaaaatatgtaacacgtattacagactgtcaaatttatttcttcttcttattctttagacaagttctcactctgtgaccaggctggagtgcagtggtgtgatcttggcttactgtagccttgaactcccaggcttaagtgattctcccacctcagcctcctgagtagctgggactatggcatgcactacacacctgggtaatttttatattttttttgtagagacaagggttttgccatgggtccaggctggatttttttctttatatatatgaagacttggcaaaggatatggacagacaggtaatccagctggatcttgagcatataacaagatgctccaccacactggtaattagaaaactatactttaaaac

SEQ ID NO: 706724 - DNA, 1173 bp, Homo sapiens
cacacacacggcgcgcatatcagaggcggacgaagaagccgccagaatttagccagtcttccttcttcatcttccctcctcctagtaaaacacacacacacacacacacacacacacacacacacacacacacacaaacacaaatgggcatcactcttttctctggtcgtgcctctatttcagcttgtgattttcacgtttcacaagggtcttcgcggcagaacctggccgtcccaacagcctgcggaggtttcgggttggatctcgcgttcgctccactgcttggcctgcgcttcagcctctagcgaccaaagacacccatgccaccgtcggcagctccatgctcgcgaacttagacttcagacctctgtttcactgcagtaattaaagagaccatggtggggatagggcggaaagttatgttcaataaataccttttaaatgatttaaatgtgtccttccttctccagcgcacacacgtactcctgaactggacacctggcaaggccaaggaaaaaggagaaactcttttgtaaggcgggaaggatgcacccccttagctacagacaggcttctaggtggctcgccttctactagtagaacaggtagggttgtctgctaaagtgtgggacctgctacgttgaagccaatcttctctgagcaagactcaatttatctttttcttaattacaacacatgaattttaggtcaccaagtaacaccaccagtcaaagggtttcattttatctttattgcctatttattacaattcagaagaaaaatgaccaactggaaaaaaaaatatgtaacacgtattacagactgtcaaatttatttcttcttcttmttctttagacaagttctcactctgtgaccaggctggagtgcagtggtgtgatcttggcttactgtagccttgaactcccaggcttaagtgattctcccacctcagcctcctgagtagctgggactatggcatgcactacacacctgggtaatttttatattttttttgtagagacaagggttttgccatgggtccaggctggatttttttctttatatatatgaagacttggcaaaggatatggacagacaggtaatccagctggatcttgagcatataacaagatgctccaccacactggtaattagaaaactatactttaaaac

SEQ ID NO: 706725 - DNA, 1173 bp, Homo sapiens
cacacacacggcgcgcatatcagaggcggacgaagaagccgccagaatttagccagtcttccttcttcatcttccctcctcctagtaaaacacacacacacacacacacacacacacacacacacacacacacacaaacacaaatgggcatcactcttttctctggtcgtgcctctatttcagcttgtgattttcacgtttcacaagggtcttcgcggcagaacctggccgtcccaacagcctgcggaggtttcgggttggatctcgcgttcgctccactgcttggcctgcgcttcagcctctagcgaccaaagacacccatgccaccgtcggcagctccatgctcgcgaacttagacttcagacctctgtttcactgcagtaattaaagagaccatggtggggatagggcggaaagttatgttcaataaataccttttaaatgatttaaatgtgtccttccttctccagcgcacacacgtactcctgaactggacacctggcaaggccaaggaaaaaggagaaactcttttgtaaggcgggaaggatgcacccccttagctacagacaggcttctaggtggctcgccttctactagtagaacaggtagggttgtctgctaaagtgtgggacctgctacgttgaagccaatcttctctgagcaagactcaatttatctttttcttaattacaacacatgaattttaggtcaccaagtaacaccaccagtcaaagggtttcattttatctttattgcctatttattacaattcagaagaaaaatgaccaactggaaaaaaaaatatgtaacacgtattacagactgtcaaatttatttcttcttcttattctttagacaagktctcactctgtgaccaggctggagtgcagtggtgtgatcttggcttactgtagccttgaactcccaggcttaagtgattctcccacctcagcctcctgagtagctgggactatggcatgcactacacacctgggtaatttttatattttttttgtagagacaagggttttgccatgggtccaggctggatttttttctttatatatatgaagacttggcaaaggatatggacagacaggtaatccagctggatcttgagcatataacaagatgctccaccacactggtaattagaaaactatactttaaaac

SEQ ID NO: 706726 - DNA, 592 bp, Homo sapiens
aaaaaatacggagaaatgttgatggttgctatagatggatgatgagggctcacagttctaagaatattaaaaattaaaagaaataaagatccatctttaagggaaaaaaataaaaccacgatcttatgattaaactccaagtagtgttgtggggaggataggccgggagtgacacagtaaagtgccacctatctaacatcaaaatagggggaatggggaatgaagaggggaggaggaagttttgccacagggaatttgaccactcttcaaagtggctacaccacacaatgtttatctgttccttcctttcgactgtaatttcttgccaaagcacatgatgactaaactaagtatcatttcctcctcttctagactgaaagctcctctcaactgtagaatatttccagggtggtctctctgtaatgggcctaaatcctggtgtctgtttggagccacagctggtttgtgacactgaccaccacttcctcaaaacaatttacaagaacaaaactagatgtatgaagyttagattctggaaaaaggtgcaagtattcatgaatatttcagaactcccaaagtgatctatgtacag

SEQ ID NO: 706727 - DNA, 1004 bp, Homo sapiens
ccccagcaggtcttgatcaactccagctgcaaaagcccaacatccatctcgattaggctcaccatcttgtcctttactaactgtgtgatcttggcaattttctcacmttttttgggcctctactgtaaaactaagaacatgatacctgcctcattgggttgctcagtagattcattgagtttctacccatagagaatgtagaacttagactggtacgtggagcataagaagtgctcaccaggcattgactgttattatactttcctggtgtctgtctgatccccatctcctttcctcttgctttcctctctccccaccacaccctcccataacaattcactaacagaaggaacagaaggtggttaagtacagcaaaaaaaatcagatcagagacagtgaaaaataatcatggctgggtgcagcagctcagacctacaatcccagtgctttgggaggccaaggtgagaggattacttgaggccaggagtttgagactagcttgggcaacatagcaagaccctgcctctatgcaaaatgaaaaaaaaacatatatagctggacatgttgatgcatgcctatagtcccaactacatgggaggatgaggaaagaggatcacctgagcccaggaatttgaggttacagtgagctatgattgtgccactgcactccagtctgggcaacaaagctagatcctatctctaataaaaaattattattatcattatattgttaaagggtgcttctattttaattaaaacatgtttaaaaaattaaatattaagaacattgtaaacattaaagttcctgttttatgtgatctctaaactatttcccatctcacttgctttatggtttgtagttttatcacagcaacttcagctttttctagtttccctagacccccttcaccagctaataccttcttgggggtgcatcttcttttatggggtactctgagatgaaatctggtacttagttctacttactgcttgctgcataacaa

SEQ ID NO: 706728 - DNA, 1004 bp, Homo sapiens
ccccagcaggtcttgatcaactccagctgcaaaagcccaacatccatctcgattaggctcaccatcttgtcctttactaactgtgtgatcttggcaattttctcaccttttttgggcctctactgtaaaactaagaacatgatacctgcctcattgggttgctcagtagattcattgagtttctacccatagagaatgtagaacttagactggtacgtggagcataagaagtgctcaccaggcattgactgttattatactttcctggtgtctgtctgatccccatctcctttcctcttgctttcctctctccccaccacaccctcccataacaattcactaacagaaggaacagaaggtggttaagtacagcaaaaaaaatcagatcagagacagtgaaaaataatcatggctgggtgcagcagctcagacctacaatcccagtgctttgggaggccaaggtgagaggattacttgaggccaggagtttgagactagcttgggcaacatagcaagaccctgcctctatgcaaaatgaaaaaaaaacatatatagctggacatgttgatgcatgcctatagtcccaactacmtgggaggatgaggaaagaggatcacctgagcccaggaatttgaggttacagtgagctatgattgtgccactgcactccagtctgggcaacaaagctagatcctatctctaataaaaaattattattatcattatattgttaaagggtgcttctattttaattaaaacatgtttaaaaaattaaatattaagaacattgtaaacattaaagttcctgttttatgtgatctctaaactatttcccatctcacttgctttatggtttgtagttttatcacagcaacttcagctttttctagtttccctagacccccttcaccagctaataccttcttgggggtgcatcttcttttatggggtactctgagatgaaatctggtacttagttctacttactgcttgctgcataacaa

SEQ ID NO: 706729 - DNA, 595 bp, Homo sapiens
ctggctaatgtttaaaatttctttctattttttttttttgtagaggcagaggtctaaytatgttgcccgggctggtctcaaactcctggcctcaagggatcctcttgcctcaacctccaagtagctggcacaacaagtgtgtgccaccacgcctgactaatttttacattttttgtagagatgagttatcgctgtgttgcctgggcttaattatgcatgattgaaacaagagagtgagataccaattgttgcaggtggggttcccctggaagtatacactgagtggaaatttatgtacaagagattttttgagaaatgttctcctgatcaacacctcccgaggagggtgggggtgaaggaaccaagaagggcggtgggatgagtttaattgctctgcagttgcgacaaagtctcagacaatccccatggagctttagacatcctctcagagttgtcccacattggggtgggggttggggaggagtctttgtatctccatattgacctatctttggatatggattgccacaggagagggcctttgaccgtgggcagtgaggctttcttcagccaaaggcatggcaccagggagagg

SEQ ID NO: 706730 - DNA, 595 bp, Homo sapiens
ctggctaatgtttaaaatttctttctattttttttttttgtagaggcagaggtctaattatgttgcccgggctggtctcaaactcctggcctcaagggatcctcttgcctcaacctccaagtagctggcacaacaagtgtgtgccaccacgcctgactaatttttacattttttgtagagatgagttatcgctgtgttgcctgggcttaattatgcatgattgaaacaagagagtgagataccaattgttgcaggtggggttcccctggaagtatacactgagtggaaatttaygtacaagagattttttgagaaatgttctcctgatcaacacctcccgaggagggtgggggtgaaggaaccaagaagggcggtgggatgagtttaattgctctgcagttgcgacaaagtctcagacaatccccatggagctttagacatcctctcagagttgtcccacattggggtgggggttggggaggagtctttgtatctccatattgacctatctttggatatggattgccacaggagagggcctttgaccgtgggcagtgaggctttcttcagccaaaggcatggcaccagggagagg

SEQ ID NO: 706731 - DNA, 1834 bp, Homo sapiens
gtatataccctttaaagaaggcatatgcctttataatttaataatttggttaataagtttttgtagagaatttaaattacttaagagatagaagagatgaggtatagcatgcaagataggacttttacttttctggcacattacatattgtgccagtggaagtttgtacttttataaatgagaaaaactgaatatatgtaacttccttaagggggtcacacagctaattgtaataatgtctaagaactggccagtgacagaaacttaatgaatgaatactcacctttgccatttttagtccttgtcctgcatccggctctttatcatcatggttggattgggcagagagagctcctgcacacatacatgaccaggagctcctgacggccctcatgcataaaggaactctgcagtgagttgggaatcagtggtactgctaagctaagaaaccctccactgcagatcatcccagaggcaagagcaagtgaagaatatgctgtcagctcctggcatttttccctttagaagaaactgagtgctggttaatagaggccagaggtctctgtggcctttggatgaattcagggttcaatcactgagcactagaagggagaagaccaggcctaagtggggggagtagtaaaacctctcctatgaagcagaaaatcggctggaataacccacttataataaactgggattaacaaaagcctagctgactcagaattattgtgagtgttctgttaaaccaacagacagatgagccttatctatgggcatatatacaagtatatactgcctataagaggatatttacaaggcttaccttttattttctgatttatttgcctttaatacctagtttggtttcagtaagaaccaccacaaacaaaagcattgagaaaaattaaaattcatactgctaggcatttataaaacctaactttcaaggctgggcgcagtggctcgtgcctgtaatccaagcactttgggagtccaaggcaggcagatcatgaggtcaagagatcgagaccatcctggccaacacggtgaagtcccrtctctactaaaaacacgaaaaattagccaggcgtggtggcgcatgcctgtagtcccagctacttggaagtctgaggcaggaaaatcacttgaaccctggaagcagaggttgcagtgagctgagattgtgctactgcattctaccctggtgacagcgagactcagtctctaaataaataaataaataaaccctacctttcactctcaaacattgaattgaaggtatggttaaagttttttccccaaaacttctaatatctaaactcgaggtctcatattttaactaattagaacgccaaattaggcatcagcaagtacgaatttcagaatcctagactgaaactatcattaacattctgtaaattagagtctcaggttcctcatgagaaatatataatctgctttataaagttacttgtgaaaaggccaaattatatagtaactgtaatgacattttgagaatctccaaagtgttattaaaatatagaatatatcattttagaaatccgtttcatctttccttgtacataacattggagtaatgacagggagtataatccatgaaggagttattctgagggtgacttctggttcagactgcaaactcaggagtgactcaagaacacacttcacatggattgagaatagcataagagactacgaacagatgcaaaagcaaactatttgtgtttacttggagaaaggtgactactggatgccacaagttgtgatattaagcttgattttattcagcatctttattaatcatccagaa

SEQ ID NO: 706732 - DNA, 584 bp, Homo sapiens
gtcagccacatgtatgtcttcttttgaaaagtgttcatgacctgttgatgatcatgtgtgtcatgttcatatgtgggagtcaaaaatgttctcttatggagatacagagtaaaatgatacttaccagaggctggaaagggtgagtgtgttggggtggggaacraagagaggttagttagtcggcataaatatatagttagaaataatttcttatgtataatagcagaatctggtaactatagttaacaataatatattgtatatttaaaaggagctgaaaaagagtacctgaaatatttccaacacatagaaatgataaatgttccaggtgatggaaattctaaacactgtaacttgatcactacacattctatgcatttaagaaaatagcatatgctccccttaaatatataaaaatgtgtatcaattaacccacatgccaaccatataggaaaaaaaattaaaagaaaatctaaggacaatgttctaacttgttctctctctcttttttaacagaaagcttataatactgctactttgacttgctttttctaattttatctacaactaactttttaatagct

SEQ ID NO: 706733 - DNA, 689 bp, Homo sapiens
agaatcaccaaatcctctcaatttaccatctaaatctgtctcaaatcttccctactttcttcaattcaactctaatgctttaatgtcttcttcatacttaaggtaaaacaagggaccaaaagtatgggttccaacccaaatagcccattaacttctggctgtttgtgataagctttaagacaattagcttcactatctgatagacaaaaacagtcactggtatagcagacacaaaatcataaacaagagaaaagaaagaatgtactgaagaaaaatggcattgatcttccagaaaaagagggctacaccaggattatgtattttaagtacataagtatataaccccttttatttttgagcttcaacattattgcagaaaataacatgtacacataaacttttcactttacatatataagtagtttaacagatatatcataccaytaacaaatattacataacactctaaaaagagaacaattaagtcaggcttaaccgcattaaaaagtgatcattaaaagacagtactgtgtatagctagcaaaatcaactattttccatgctaggcaatgactcaagaattacaaactgtcaccaatacctgcattaaacataaacccagacagtaagcaattgtcatggaaagataaatccatgtgactatatctctgaagcttaagcaaaactag

SEQ ID NO: 706734 - DNA, 689 bp, Homo sapiens
agaatcaccaaatcctctcaatttaccatctaaatctgtctcaaatcttccctactttcttcaattcaactctaatgctttaatgtcttcttcatacttaaggtaaaacaagggaccaaaagtatgggttccaacccaaatagcccattaacttctggctgtttgtgataagctttaagacaattagcttcactatctgatagacaaaaacagtcactggtatagcagacacaaaatcataaacaagagaaaagaaagaatgtactgaagaaaaatggcattgatcttccagaaaaagagggctacaccaggattatgtattttaagtacataagtatataaccccttttatttttgagcttcaacattattgcagaaaataacatgtacacataaacttttcactttacatatataagtagtttaacagatatatcataccactaacaamtattacataacactctaaaaagagaacaattaagtcaggcttaaccgcattaaaaagtgatcattaaaagacagtactgtgtatagctagcaaaatcaactattttccatgctaggcaatgactcaagaattacaaactgtcaccaatacctgcattaaacataaacccagacagtaagcaattgtcatggaaagataaatccatgtgactatatctctgaagcttaagcaaaactag

SEQ ID NO: 706735 - DNA, 631 bp, Homo sapiens
tctccaaaataaagatttgttgattcttaatgagtaagtagactaagtgaagaattaatgaatgactatcaaacaatagtgtaatgtgaaaatttttagtgtcaaacattttttgtaaccaccttcatctgacccaaactccatcagaagggaacatgcaaactagatttttcaaataatctgatacaatgagtataagctataaacatttatagtaattttaactcatcatagaacttgtgttcttttcaataaaaagkaatattcaattcacatttttaaacagtgaacctggtagggaacccaaaacccaaaaatacagttgggatttccatgggtatagagagggatgctgacaaacagctggataccacacccaggaaccagcagatcaaagcaggctgtgacagagctttacattagtatgaagacatcaaggattcatctaataaataaaccatatcatctctttgatcataatattgttcctcaacaggagttaaccaaacataaacttactaaaataggtaacaccaaatactatgctactatgctgacccggaggcttattatgctgctgctattgtcttattgaaagaccacatccagaccagttacatgattcagagtg

SEQ ID NO: 706736 - DNA, 631 bp, Homo sapiens
tctccaaaataaagatttgttgattcttaatgagtaagtagactaagtgaagaattaatgaatgactatcaaacaatagtgtaatgtgaaaatttttagtgtcaaacattttttgtaaccaccttcatctgacccaaactccatcagaagggaacatgcaaactagatttttcaaataatctgatacaatgagtataagctataaacatttatagtaattttaactcatcatagaacttgtgttcttttcaataaaaagtaayattcaattcacatttttaaacagtgaacctggtagggaacccaaaacccaaaaatacagttgggatttccatgggtatagagagggatgctgacaaacagctggataccacacccaggaaccagcagatcaaagcaggctgtgacagagctttacattagtatgaagacatcaaggattcatctaataaataaaccatatcatctctttgatcataatattgttcctcaacaggagttaaccaaacataaacttactaaaataggtaacaccaaatactatgctactatgctgacccggaggcttattatgctgctgctattgtcttattgaaagaccacatccagaccagttacatgattcagagtg

SEQ ID NO: 706737 - DNA, 648 bp, Homo sapiens
tctcggctgtaaagacttgagaagcttgtctcctggccttgaaaagaaattttaaaaaacaattttaagctataagtcaattaattagaatatgtgttgtcattctaatgtaaaaaataaaatctggaattttttttcaagataataatgaaaattcctaaagaaaaattgcaatctcaaacttctgaaattaggaataaacatttttccagccaaggcataaacaaagaaaagtccagataaagacaaaacagtatgaaatagaaaatgtcacttttttgtggaataatgagtcaaaagtaaaatgctgcctcaaagtcagagagagatgaataaaaacagagaggaggctagaggaagacagggctgtgcacagagaaactttataaacattatgcatatccctcattatagtcttaaaaaygtcacttcaaaaaaattttcaatgtttgtgctattttcacaacctgagttccaaatcaagacatatcaaaccaagctaaattaagttaaatcaagctgagaatacaaggatgacacgatggaaaatttacgaatatagtggggtaactttaaaactgcatatcataatgtgaaaaagaattaaggaacatggctattgcataaatctgtatttactatttaact

SEQ ID NO: 706738 - DNA, 1384 bp, Homo sapiens
aggaaaataattttccttttataattcaatatcagccaagctctcaatcaaatatcctttggctatgcaacgtggacatgcaacctcagcatttttcctcctgtaaaacttttcccgggaagccactggagagcagttttccagcaaaccaagtaagaaagaagcaaagaccatctccaggatgacggtgaagagaaatctcagaatttattcatccattcgacaaataattcttgactacatgccaggcactgttttagggtgacaatggtcattacacaggacagctagttcagattggagggtatgactcaagagacaggcatgttgaaagcaggcatctgcatacactttgctgctgcaccatctttttaacttgaggctacagagggatgtgttccatcaacccaagaaagaaaaagtttcaaggtccaggacatgagtatctagcaaagaaaaaaggcaaaggatgccaagaacgacagctgtgtcagcctggaaagcaactgaccagacaggagagacggcgccaagaaaaaatttagaaccaaaagaacaccttgaactgatagactgaccttgtagaaaactgtactgagaggctactggaagtggtaagaattaacaataggtacaaagaaaggcaaattgaaaaacaaggagtgcttaacctcaatgacctcagtaaaacccaaaaagtaagaaagaaaacaaaatcatagtacacttcagtgcttcgatgtgaacgctatgtgcaaggcataatgaggcaatgctaaacgtagatttagcaggtaattgaaacagaactatcttgagaagaggggctggccgtgaaagggagctcaatcctcacatacgataatgggaccaaaaaaagatagcagcaaacgtcaattaattaaaagacaatagtgtctacatattcttttagaaatgtggagatgcgtaaatgccagagcaaatactgtcagtggggatggttactgaaggaggaattgggagggccggggcagggaacctctgtgtgctcttctaagccttttggtaaaattggacttttcaaatgtgtattactttgataaaagaaaatttaagtttaaagaaaaagaagtattcagtgcccacaacacaagcaggtgtcctggtaaatgtttaacaatcagctgggggtgrggggtaaccttgatttgtcgcatttgccaatttctgtggcataaatactcccaccatggctgtaaatactcctccactcacttgcacaattcccgaaattttaacagtgggtccataggagccaactccaggcactgaccgcaaccaactctcagggtactgctcacagttagtgtgcagcaaagatagttcaacttccatctgacag

SEQ ID NO: 706739 - DNA, 399 bp, Homo sapiens
cccaagcctgcccctctgcctcattttcctgtagctcctctggttctgtttgctcattggcygctgtgttcatccaagggggttctcccagaagtgaggggcctttccctccatcccttggggcacggggcagctgtgcctgccctgcctctgcctgaggcagccgctcctgcctgagcctggacatggggcccttccttgtgttgccaatttattaacagcaaataaaccaattaaatggagactattaaataactttattttaaaaatgactgctgtggacctggcttttgtccctaggactgtgtttttcctcctgaaccccaaagaaaagaatgagaaggaaactggctgtggtgtttattcagggcccagggaaggctgaaggcagcagggggc

SEQ ID NO: 706740 - DNA, 1476 bp, Homo sapiens
gtagaggtaggggagtgctagataaaacacatggagtttcttttttgaggtgatgaaaatgctctaaagttgactgtggtgatggttgcacatatctgcaaatatactaagaaccactgaattgtgtacttcaaatgggtgaaatgtatggtatatgaaccatatcttaataaagctgattaaaaaaaactatggaaaaatatcacttttctcataactgcttagtaaatacttaaaatacactgtttgtggaagggggcttctgggtactggtaatgttctatttcctaatttgggtggtagtgcaaaagtgaatgtattttgtggtaattattggtgtacttttctgtatgaaggttatacttcagtaacaaagtctataaaaatacacacataaacacagtatgttggtgatggtatgggtaaacagacgctcatactttgttcctggggatataaactgacaaaacttcttaggtaggtaaacttcagatttataaacaataaaaaacatacgttcttgttccaaaggtatatactcacatgtatacaaaaatatgtaaaagatctttactgcaaccttgtctgtaagagaaatggtgtggaaaaattataaatgccagtcaactggggcctgggtaaataaattatggcacaatcacaccaggaaacactaaccatttaatttttttttgagagctcatcacccaggctagagtgcagtggtatgatcttggctcacggcaacctctgcctcccggcttcaagcaattctcctgcctcagcctcctgagtagctgggattacaagtgcctgccaccgtgcccatctaattttggtatttttagtagagacagggtttcaccatcttggacaggttggtctcgaactcctgacctcaygatccacctgccttggcctcccaaagtgctgggattacaggcgtgagccactgcgcccggcctaaaattgttttaattaaaaaaaaaaaaagaagaagaaagaaggtacagaatagtgtagccgtgtatatggtatatcactctatgtgcggagaaaataaactaaggtggaggtggtggggaatatttacacacacacacacacacacacacacacacacaaaaaaaacaaaacatcttaagcaggacacacaagaaactagtaatcacaactggttctgaggaggggacactgggaaatttagagatgtacttttcacttagtatttttttaaaaaggtatacaccaatttaaataaatgaattcttctgaagtaaaaactatgctgcttcaacatgtaaatgccgctaagcttctaaaagttaaaatctgaaatgttataaattctgaaatctttcctatctcccatttcaaaagttaaattcccaaaccattaagcagtagtaacagcagtagtaataataaatagctacttacatcaacacctccaaacaagtcaaaaatgtaagtatt

SEQ ID NO: 706741 - DNA, 1476 bp, Homo sapiens
gtagaggtaggggagtgctagataaaacacatggagtttcttttttgaggtgatgaaaatgctctaaagttgactgtggtgatggttgcacatatctgcaaatatactaagaaccactgaattgtgtacttcaaatgggtgaaatgtatggtatatgaaccatatcttaataaagctgattaaaaaaaactatggaaaaatatcacttttctcataactgcttagtaaatacttaaaatacactgtttgtggaagggggcttctgggtactggtaatgttctatttcctaatttgggtggtagtgcaaaagtgaatgtattttgtggtaattattggtgtacttttctgtatgaaggttatacttcagtaacaaagtctataaaaatacacacataaacacagtatgttggtgatggtatgggtaaacagacgctcatactttgttcctggggatataaactgacaaaacttcttaggtaggtaaacttcagatttataaacaataaaaaacatacgttcttgttccaaaggtatatactcacatgtatacaaaaatatgtaaaagatctttactgcaaccttgtctgtaagagaaatggtgtggaaaaattataaatgccagtcaactggggcctgggtaaataaattatggcacaatcacaccaggaaacactaaccatttaatttttttttgagagctcatcacccaggctagagtgcagtggtatgatcttggctcacggcaacctctgcctcccggcttcaagcaattctcctgcctcagcctcctgagtagctgggattacaagtgcctgccaccgtgcccatctaattttggtatttttagtagagacagggtttcaccatcttggacaggttggtctcgaactcctgacctcacratccacctgccttggcctcccaaagtgctgggattacaggcgtgagccactgcgcccggcctaaaattgttttaattaaaaaaaaaaaaagaagaagaaagaaggtacagaatagtgtagccgtgtatatggtatatcactctatgtgcggagaaaataaactaaggtggaggtggtggggaatatttacacacacacacacacacacacacacacacacaaaaaaaacaaaacatcttaagcaggacacacaagaaactagtaatcacaactggttctgaggaggggacactgggaaatttagagatgtacttttcacttagtatttttttaaaaaggtatacaccaatttaaataaatgaattcttctgaagtaaaaactatgctgcttcaacatgtaaatgccgctaagcttctaaaagttaaaatctgaaatgttataaattctgaaatctttcctatctcccatttcaaaagttaaattcccaaaccattaagcagtagtaacagcagtagtaataataaatagctacttacatcaacacctccaaacaagtcaaaaatgtaagtatt

SEQ ID NO: 706742 - DNA, 627 bp, Homo sapiens
acttatacatagattataggttggacaaaaccatctcatgacatagatatataggttcttgagcaatctcaaagaaatgacaaagaaactttttcgtggtctgtgggtgagaaggtcagcaacaatttaaccaatgtgctctagatcacaaaacgtatttgaaatgagactgaaagcagctagaggaaaagtttttgaagagatagtaaggagagaatcagaggtgctaagatagcaacagcatgttaatttgaggtgaaaagtgtcctaattagtaggtagattttggactctttatcagttactatggtggtaagtgcaagcaaggaagacagaggaaattctctaggaacattcataatgcacatatgagaggtcacccatccttgtagtgcgttttggggatggatagaggaawttgctgaattatagaggccaattatgaaaaagaaagtacgtagatttgggctaaataataatatcgatgtaatgagactagtattctaataatgataatagcatgaaaagagtagtggacagctaaatatagacgaaaatatagtaaaatctgattgtacaggatggtaagggtacacaaatatggagatgtgttactagtctggaatg

SEQ ID NO: 706743 - DNA, 627 bp, Homo sapiens
acttatacatagattataggttggacaaaaccatctcatgacatagatatataggttcttgagcaatctcaaagaaatgacaaagaaactttttcgtggtctgtgggtgagaaggtcagcaacaatttaaccaatgtgctctagatcacaaaacgtatttgaaatgagactgaaagcagctagaggaaaagtttttgaagagatagtaaggagagaatcagaggtgctaagatagcaacagcatgttaatttgaggtgaaaagtgtcctaattagtaggtagattttggactctttatcagttactatggtggtaagtgcaagcaaggaagacagaggaaattctctaggaacattcataatgcacatatgagaggtcacccatccttgtagtgcgttttggggatggatagaggaatttgctgaattatagaggccaattatgaaaaagaaagtacgtagatttgggctaaataataatatcgatgtaatgagacyagtattctaataatgataatagcatgaaaagagtagtggacagctaaatatagacgaaaatatagtaaaatctgattgtacaggatggtaagggtacacaaatatggagatgtgttactagtctggaatg

SEQ ID NO: 706744 - DNA, 1724 bp, Homo sapiens
ccaggccccacctccaacattggggattacatttcaatatgagatttgggtggggacacagatacaaattatatcagaatatgtcaagaaggagctgagcagagaagccagcgtgtccaaagccccaagaggaactgaaattgattcagaatggctaaagtatgggagtaatcaggggaatatgacaagagaagagcctagaaggcaggttcagctggtcatgaaggaccttctgaaccaagttaaggaagtttggactttaatctataggcactgagcagctattaatgtgtattaaaagagatcatgatactatctgattttatagaataggtggcataaccagtgattcttgggggaaagcaacgtttagtttctgattcatttgcatgagagattctagacttgtggtcacaggtaaagaatgaagaaacctacctagagaaactgggaactagagaagagaaaggggaagggatccaggagaaaggtactcagttacatttatactattcggcagattccaccttcgaaatgtcccgcctcctcctttcttttccattctcttgaaaaacactaggcaagcccctttttcacgtctgcataattgcaacagcaccttaactagtcttccagaggctcatttcaccagatggctagcagacttgattttctaaagcactacctcttacatatctgtcattcatagaaacttccagggctccctgttgtctttaagatgaagcctggactcctctggctggcatttaaagaccctccataagctggcccaactgccccaccttatcccttcacagtctccccccaggtctgactggtctatggacagcaccctcaccccaggttgggctttctcagtccctgaccttgtcgggactttttctggctgcttttctaggcacagctcagtggctctcctttgaaagcacttgccagtccaacacagctgaccctgaaacacacaaaacaaactttgttgaaactttacaactacaaaaatgacacccaagatctcctacccaatcacattattctcctttgttcagttctttccaaggggtgtgtatatgtgtataatacatattttttgtatggctgctgtgtgtagatatatatgtacataatctcataaaacaccaattagcatttcatattcttacaatcttatatttcataaatggggataataatattgctaacytatgggtttgctgtcagataacttaatacagtgatatagtttaaatatgtgtccccccaaatctcatgttgaaatgtaatcctcagtgttggaggtggggactggtgggaggtgtttaggtcctgggcgtagatttctcatgaatggtttagctccatccccttggtgctgtcctcaccatagtgtgtgtgttctctcaagatctgattgtttaaaatcgtgtggcaccctctccctgtcttgctcccgctcttgccatatgacatgccttctcctgctttgccttctgccatgagtaaaagttccttgaggccttccctgaagctgagcagatactgtaaagcctgcagaactgtgaggcaattaaacctcttttcttcgtaaattacccagtctcaggtacttcttcatagcaatgcaagaatggcataatacatacagagattctcaaacttgttcatgctgcagaatcacacagaagctttgttaggacacattttct

SEQ ID NO: 706745 - DNA, 3460 bp, Homo sapiens
gggtcactaacagtcaaagaaacacaaacaaagtaccattttaattgcttgtattaaaaaactttggaaataataatatccaggaattgccaaagtattatgaaacatgctttgttaacagcaaatataaattgatatggtgttttggaaagcaatctataaatacacattaagatccataaaatattccaatcttttaaatactgtaatcctacttctaagaatctatcctaaggaaataattataaaaacaaaaaataaaacaaaaaatctgtatgtatggacatgtctattgcagtattatttataatagtaaaattgagggcaatggtaaaatactatcagaaaggatcaattaaataaacatgttcatctactttataaaattttatataattgtttttaagatcatggtataactgtgaaatacttagaatttaatataaaatttaaaaaaaagatataaaactttgtataaataataattattatcaggcaaaaatatatgtaagaataaaagactaaaagaattattcccaaatgccatcaataatcgaatttgagtggtaatatcatagatgatttttgccttctgttgacaccttttgactttttttattgtaattttttaaataagaaaaaattaattatgtaggagttgattcatcagtgcacagttgtgattacaggaaaccaaactcctctgaattatgggacttttttgcccaattattctttctgtgaattcaagtgtttcctaaatctgttttgtttgccttaaaaatatcactgtatatctatacacattacatagtgcctctatagttttccaagcattttacagctactcttcaattttattgtcactgcattatttgatttatttttcccatagcagagtcagaaaatttagccttgaaaaggttgttggtgagattgcagagcaaataaaactcacgcactgctagggaaagcaagatggtayagctgctttggaaaacaacttggcaatttcttatccagttaaacatgaacttatcacatgacccagcatgcaatcccatgcctacagatttacccaagagaaatgaacactcatgttcacacaaaatatgtaacatattcctagtaaatttgatcttaatcacaagaaaactagaaacaacctaaatgttcttcaactggtgaatgaataaacaaagtatggtacctccatacaatggaatacccctcaacaataaaaaaaaagaactactaaaatatgcaacaatgttaatgaatctcaaacattatgccaagtaaatgaagccaccctcaaaaggctatgtaatgtatgactccatttacatgacattttggaaaaggcaaaattatagtgtcagaaaacagatctgtggttcctagaggcaaaggttggctgcaaaagaatggaacaaagaaatttttgagatgacaaaattgtactgtatcttggttctggtggtgattatatgattatgtcttgtcagaacagaactgtgcaccatgaagactgtgctttactgtctgtaaaaagagaagattaagtgatttgcctaagtccactagagtaggatggcactgtttccaataaagagtatttattgcctatatctctctaccttcactgctgctattcataaaatagaagtatcttttattaaagatatgtcaggcaccaacaaacaggttggggaaattttggtgagtcatggttcctacaaggatgaccctaaaaaataaccattttaatgggtttgagtgcctgggggaattggatttcagtggtgtctccttcctattaaaaatctcttgtgttcctgcagagagtggcctctagttactatagcatcagagtttttcctctgggaaaagaagaaaaggaaaactgacattttattgaattcctcctatggtggtagaaggagcagaggatacaaagttttatttatattatctcattttatcattttatcctcataacagctttttttaaaaatagggacttgctctgttgcccaggctggagtgcagcggcgtgatcattactcactccagccttgatcttctgggctcaagcaatcctcccatctcagcctctagagtagctgggaccacaggccctcaccaccatgcccagctaattttaaaaaattgtgtagaaactccttaccatgttacccaggctggtctcaaactcctgggttcaagatcctgccttagccttccaaagtgctgcatttacaggtgtaagccacggtgcctggcctcaacagctttgcaaaccaatatattattattttacacacaaggaaactggggctcctagggattaagtaatcagatgagaatgaactcggtcacctctattcttaataggatcccagtttacttgagcatagacaattgactcatagacttgtttctagtgctgaatggactaatagtaaacctagagtctctcattggccttgactgacctccttgccactgctaagtgatcatgttgcctatctctgcagaccattatcatcccagcagctcagtttcctctggcttagtggatgagacttttgtcccattataatgcccaggctgaaatgcagtggctattcacaggtacgatcatggcaccctacagtctctaactcctggcctcaaaggattctcctgtctcagactcccaagtagctgaaactacaggcatgtgccatcatgcccaactcacaagatctatgcttatctgagatttaaaggacacaaatgaagcaaaagccgatttttaaagtgacatacacattgtcacctaccttctggctcacctattagtctgtaacagctccaccttcccctgaattctccttcagcttctctaactcctaggctaggtgtgtcttcagctccatgactaaaggcaccaatttcttttgcagggtatccatgccatcaagatcagcatcagtaagaactaacacaagttttagcttatcttttcgggtttcaggacgtgcctggtggttctggcttgtcctttctctcttgaagtttacatcccttcctaactgcctgtcctgagaaacttcaagctctaatatcactttacagagacttctcgaccagctttcacaattgaggtcaaatccctgtaacaaagttctgtgtttgtgtatgtatgcatgtgtgttaaatatatatctgggatatatgtctcaatatatctatatttatatcaatcaatcaatcagccatctctctatctatattttctagtagccctgcttctctaattgaatcttgactaaaaaagcttttcatctgatccacgacccactttgcttcctgtacttcatttcaaagtttgagaatattggttagtttctctcaaagtctctttgatttaattctctggtaattttgttgtttctcagaaggggctttcgct

SEQ ID NO: 706746 - DNA, 3460 bp, Homo sapiens
gggtcactaacagtcaaagaaacacaaacaaagtaccattttaattgcttgtattaaaaaactttggaaataataatatccaggaattgccaaagtattatgaaacatgctttgttaacagcaaatataaattgatatggtgttttggaaagcaatctataaatacacattaagatccataaaatattccaatcttttaaatactgtaatcctacttctaagaatctatcctaaggaaataattataaaaacaaaaaataaaacaaaaaatctgtatgtatggacatgtctattgcagtattatttataatagtaaaattgagggcaatggtaaaatactatcagaaaggatcaattaaataaacatgttcatctactttataaaattttatataattgtttttaagatcatggtataactgtgaaatacttagaatttaatataaaatttaaaaaaaagatataaaactttgtataaataataattattatcaggcaaaaatatatgtaagaataaaagactaaaagaattattcccaaatgccatcaataatcgaatttgagtggtaatatcatagatgatttttgccttctgttgacaccttttgactttttttattgtaattttttaaataagaaaaaattaattatgtaggagttgattcatcagtgcacagttgtgattacaggaaaccaaactcctctgaattatgggacttttttgcccaattattctttctgtgaattcaagtgtttcctaaatctgttttgtttgccttaaaaatatcactgtatatctatacacattacatagtgcctctatagttttccaagcattttacagctactcttcaattttattgtcactgcattatttgatttatttttcccatagcagagtcagaaaatttagccttgaaaaggttgttggtgagattgcagagcaaataaaactcacgcactgctagggaaagcaagatggtatagctgctttggaaaacaacttggcaatttcttatccagttaaacatgaacttatcacatgacccagcatgcaatcccatgcctacagatttacccaagagaaatgaacactcatgttcacacaaaatatgtaacatattcctagtaaatttgatcttaatcacaagaaaactrgaaacaacctaaatgttcttcaactggtgaatgaataaacaaagtatggtacctccatacaatggaatacccctcaacaataaaaaaaaagaactactaaaatatgcaacaatgttaatgaatctcaaacattatgccaagtaaatgaagccaccctcaaaaggctatgtaatgtatgactccatttacatgacattttggaaaaggcaaaattatagtgtcagaaaacagatctgtggttcctagaggcaaaggttggctgcaaaagaatggaacaaagaaatttttgagatgacaaaattgtactgtatcttggttctggtggtgattatatgattatgtcttgtcagaacagaactgtgcaccatgaagactgtgctttactgtctgtaaaaagagaagattaagtgatttgcctaagtccactagagtaggatggcactgtttccaataaagagtatttattgcctatatctctctaccttcactgctgctattcataaaatagaagtatcttttattaaagatatgtcaggcaccaacaaacaggttggggaaattttggtgagtcatggttcctacaaggatgaccctaaaaaataaccattttaatgggtttgagtgcctgggggaattggatttcagtggtgtctccttcctattaaaaatctcttgtgttcctgcagagagtggcctctagttactatagcatcagagtttttcctctgggaaaagaagaaaaggaaaactgacattttattgaattcctcctatggtggtagaaggagcagaggatacaaagttttatttatattatctcattttatcattttatcctcataacagctttttttaaaaatagggacttgctctgttgcccaggctggagtgcagcggcgtgatcattactcactccagccttgatcttctgggctcaagcaatcctcccatctcagcctctagagtagctgggaccacaggccctcaccaccatgcccagctaattttaaaaaattgtgtagaaactccttaccatgttacccaggctggtctcaaactcctgggttcaagatcctgccttagccttccaaagtgctgcatttacaggtgtaagccacggtgcctggcctcaacagctttgcaaaccaatatattattattttacacacaaggaaactggggctcctagggattaagtaatcagatgagaatgaactcggtcacctctattcttaataggatcccagtttacttgagcatagacaattgactcatagacttgtttctagtgctgaatggactaatagtaaacctagagtctctcattggccttgactgacctccttgccactgctaagtgatcatgttgcctatctctgcagaccattatcatcccagcagctcagtttcctctggcttagtggatgagacttttgtcccattataatgcccaggctgaaatgcagtggctattcacaggtacgatcatggcaccctacagtctctaactcctggcctcaaaggattctcctgtctcagactcccaagtagctgaaactacaggcatgtgccatcatgcccaactcacaagatctatgcttatctgagatttaaaggacacaaatgaagcaaaagccgatttttaaagtgacatacacattgtcacctaccttctggctcacctattagtctgtaacagctccaccttcccctgaattctccttcagcttctctaactcctaggctaggtgtgtcttcagctccatgactaaaggcaccaatttcttttgcagggtatccatgccatcaagatcagcatcagtaagaactaacacaagttttagcttatcttttcgggtttcaggacgtgcctggtggttctggcttgtcctttctctcttgaagtttacatcccttcctaactgcctgtcctgagaaacttcaagctctaatatcactttacagagacttctcgaccagctttcacaattgaggtcaaatccctgtaacaaagttctgtgtttgtgtatgtatgcatgtgtgttaaatatatatctgggatatatgtctcaatatatctatatttatatcaatcaatcaatcagccatctctctatctatattttctagtagccctgcttctctaattgaatcttgactaaaaaagcttttcatctgatccacgacccactttgcttcctgtacttcatttcaaagtttgagaatattggttagtttctctcaaagtctctttgatttaattctctggtaattttgttgtttctcagaaggggctttcgct

SEQ ID NO: 706747 - DNA, 1808 bp, Homo sapiens
attttcatatacttggtgctgataattctatttttcatgtgtgttgatttttttggtttttattgctagttatttctattacttacaagttaaaaatttatgtaattatatttgaccattttatttcatttctaatttctccatttgctccaattgtaagaaaattatcactttaaagtgagactaaaagccctatatattcttttaggtctctatttcccaccatccctgagattttactctgacattctctgggccttacagcccaggccctataattattcaacacattattttcacaaaggttagatgcttgcattatgacttcaattgagcagttaccttagagtctactacctacctatttatcctgtatttacaactatttcccatgttttctgttgtccaaggggcttacaacattcaaacccaacttcactcattcacttactcatttacttattcactcactcacactttcatttattcattcatttactatatttggcacacaaactctagggtgaccaccagggatccttgcttcctggtgtgttcacttgtgtgtaggcaggacctgggacttgcttctaaccaacagaatacggcaaaagtggtgggatgttcttcctgttattgtgttacataatataagacgctgtcttgctagtagactcactccagacactctccttgttggcttgatgaagtaagcagtcatgttgaggaagctctcatggtgaggaaccttgggcaaactctagccagcagtcagaaagaagcctggatacttggttttagagcagcatggaaatgaattctgccaataacctgagtgagcttaaaaggggtttcttcctcagtcaaatctccagatgagaacactgtccaggtgtcaccttgattacagtgttgtgagactctaagcagagggcccatctaagccatgcccttacctagaaactgtaagataataagtagttgttgtttagagccacaaagtatgcagtaatttgttacgcagaaatagaaaacaaatacacggtgctgtgctaatgatcacatgcatgatctcttagtgcttcaagtaacgtcataagcccgatactaatattatcttcatttacagatggagaaactgaggcccagaaattgatgtccagaatgctttgctcttagccactgtactattatggcatattttatctttatgtattgcatcatttcatggattcaagtttatcaatgtcctttgacaagtttaaaaatctgtctgctaaaatctatcmaatacattaaggaaaagtcccacttggcacatctcccacaccaggtagatgttttataagttcaactccataaagacatttcatgaaactgttttatgctgtacttataccatacatcttgtagaaataatattagattaatgaataggaaaggtttttcttaaaagtgatggactggctgggcgtggtggctcacgcctgtaatcccagcactatgcgaggccaagggggccagatcacgaagtcaggagttcgagactagcctgaccaacatggtggaaccctgtctctactaaaaatacaaaaaattagctggacatggtggtgcagacctgtaatcccagctattcaggaggctgaggcaggagaatcgcttgaacctggcagtcagaggttgcagtgagccaagatggtgccactgctgtactccagcctggatgacagaggagagagaatctgttctaaaaaaaaaaaaaaaaaaaaaaaagtgatggattatgaactatttagaagaaagaa

SEQ ID NO: 706748 - DNA, 1808 bp, Homo sapiens
attttcatatacttggtgctgataattctatttttcatgtgtgttgatttttttggtttttattgctagttatttctattacttacaagttaaaaatttatgtaattatatttgaccattttatttcatttctaatttctccatttgctccaattgtaagaaaattatcactttaaagtgagactaaaagccctatatattcttttaggtctctatttcccaccatccctgagattttactctgacattctctgggccttacagcccaggccctataattattcaacacattattttcacaaaggttagatgcttgcattatgacttcaattgagcagttaccttagagtctactacctacctatttatcctgtatttacaactatttcccatgttttctgttgtccaaggggcttacaacattcaaacccaacttcactcattcacttactcatttacttattcactcactcacactttcatttattcattcatttactatatttggcacacaaactctagggtgaccaccagggatccttgcttcctggtgtgttcacttgtgtgtaggcaggacctgggacttgcttctaaccaacagaatacggcaaaagtggtgggatgttcttcctgttattgtgttacataatataagacgctgtcttgctagtagactcactccagacactctccttgttggcttgatgaagtaagcagtcatgttgaggaagctctcatggtgaggaaccttgggcaaactctagccagcagtcagaaagaagcctggatacttggttttagagcagcatggaaatgaattctgccaataacctgagtgagcttaaaaggggtttcttcctcagtcaaatctccagatgagaacactgtccaggtgtcaccttgattacagtgttgtgagactctaagcagagggcccatctaagccatgcccttacctagaaactgtaagataataagtagttgttgtttagagccacaaagtatgcagtaatttgttacgcagaaatagaaaacaaatacacggtgctgtgctaatgatcacatgcatgatctcttagtgcttcaagtaacgtcataagcccgatactaatattatcttcatttacagatggagaaactgaggcccagaaattgatgtccagaatgctttgctcttagccactgtactattatggcatattttatctttatgtattgcatcatttcatggattcaagtttatcaatgtcctttgacaagtttaaaaatctgtctgctaaaatctatccaatacattaaggaaaagtcccacttggcacatctcccacaccaggtagatgttttataagttcaactccataaagacatttcatgaaactgttttatgctgtacttataccatacatcttgtagaaataatattagattaatgaataggaaaggtttttcttaaaagtgatggactggctgggcgtggtggctcacgcctgtaatcccagcactatgcgaggccaagggggccagatcacgaagtcaggagttcgagacyagcctgaccaacatggtggaaccctgtctctactaaaaatacaaaaaattagctggacatggtggtgcagacctgtaatcccagctattcaggaggctgaggcaggagaatcgcttgaacctggcagtcagaggttgcagtgagccaagatggtgccactgctgtactccagcctggatgacagaggagagagaatctgttctaaaaaaaaaaaaaaaaaaaaaaaagtgatggattatgaactatttagaagaaagaa

SEQ ID NO: 706749 - DNA, 1523 bp, Homo sapiens
cccagcgtcgcctccttcctggccgccccgcccccacagcatggatgarggccccaattctgcagctgggccttgggctgcctgaatccctcctggaggttccaggggctaccccgtcaccacatatcttctctgctcgatgcagagatctagaatgtgcggctggtggaacaaagaaaggctctgccaccctggatcagggccttcgctgcatgagcgcctgatgtgcctgcacccagatgaggcccggtcagcaggaagagcggcagcagccgccatcaggagcctgccacacagacacagctgcaagccaccgcgaggctgcacacccaccgaagggccgcttgccaaggcccaggcaggacaggtggtaggccttggtgcagaacttgcggtcacacagcaccagctgcccgccatcaccgcagcggaagcactcgtcctctgactgcctcttcccttccccttttgctctgcgccgcctcgttttcttcttggtctttttgcccttttcctctgatgaaagggtcgtcgaggtctagagtcaagaattaagcacagatcaccggaaagaattacacaggctgaagcaaatagggcagaagagcgagctacactccaggaacttcagagatctctgcaggtgcccaacactaagaggagaggagaggagtgtcctcctcgtgctccccagacatccttagactcactcgactcagcgtgaaaaagctgaacaaagactacgactagagtgagctttgtcggaagcctgcaatgacgcatctcagcagcatctcagcagacacacagctccaggatctgctgatgggacccactggcaaaggaggccaccacaggcagaacagctcccgcccgccacccagggtctcctcattaggaaattccacaggaacgtgggcacaggtgggcggcagtgacctgagggcagtgaccatcctcagcaacacggctgaggacagacaccggctcagggccgagctggtgccaccgccaggctttcaggaccaggttctacacagcacagggaaggggtgcaagagtgcccccccaaatctctgtccttcctggaaccttggaaggtgactgtatttggaaatagggtcattgtcaatgagatctgttaagatggggtcacacggtagcagggcaggcgctaagtcaacaggaccagtgctcttataagaagggcaagtcaacagtcatgttcgcagggagaatggttgggcggtgctgctacaagccaaggagcagcaaggactgtggccgccaccaggaacgggagacaggcctgggaaagagcctcccaaggaaccttcagagggcgcacggccctgcccacacccagaactgcgaaaccacgcgtctgtgaggcattgttctggcagccccaggaaacacgttcagtgaggaactcttaaccactggcctttgttgagagccatcctccccagcccacagcagggaacttgctcccacctgtcccggcaacaagccagcctgga

SEQ ID NO: 706750 - DNA, 1387 bp, Homo sapiens
gccctcatttttatattaattataaatgcattaatatgtaaactttagtgtcaatgttttaagcaataaactttaagatcctctgggttcatttcaagtttttaaaaaataagcatgggctatctttctctcattctttatttataaaaagttcatctaagagttgtaaaccaatcagttcttgcccatggatttttatttctctgctaccatttgttcatatatgtgctctctgtttttgtttttctctttaatggtctctgtatgttgcatttgttttcccctttaggactggttttgtccaatggatatcccagagacaattctgactcagcaggcctctgagtcagaattccgagggactgcagaagataagagaccggctatttagacagccttcaaacacagatatcatgtgcagcttcgagtgtccacctggcagtacctggtaccatcttgaagtaagatcataaggccagagaaagcaaaagtaatcacacagcttcaagctgtagggcaccaacactgctctttcttgctcccacagtcccaggctttatctaggatccaggatcaagggtaaaagactagataacattggacttaattatatcttcacactcatttttcaatcctttgggaaaaggactgtagccatagaaataagtctgtcaattggaagtatttgtgctctccgtcctggatttactagttcagtgatgaacattagtaactggcatgacttctgtggtgctggagggagaagaggaggagacacatgcactcattaggagccccagtactccttatacctagcctgtggttactaaactttctgaaactaaggtaagtgattgtcctggggaagcagtaagtagcagtgcccaaccaaaatctcagtcaggcagaagacaactcttaggaagacggtgtttgtactagattttcagctttgtttgggaaaatgtttataaacttttataaatgtctgcattgaccaacgtttcttctaggctgaggcaggagaatcacttgagcccgggaggcagaggttgcagtgagccgagattgcaccattgctctcctgctctccagcctgggcgaaaagacaactctttttttgagataactctgtctcaaaaaaaaaaaaagaaagaaagaaagaaagaaaagaaaaaataagattgatctctaaaatttttttcttttcatttcattttagttttaaactttctcgtgttttatttttaatwtgaattttagaattaccataaagagaaaatatctctgttcagacttcaaatactaggacaataatgtcacttacttcattaagaccaggatattttaaccccagcaaaaccggcaaagaaccaacagatttgct

SEQ ID NO: 706751 - DNA, 846 bp, Homo sapiens
ggtatttcaccagagttgtttaatcttcacatcaacactatgagccatactattatccgcattttagaggttgaggtaaacagaggcacagaaaggatatgtgatttgctctagktcacacacattttagtagaggatctaaaacaatgcctatatggaattctaagacaggcatcccaaatgcctctctggccaggtaagtaggataaatgagtgaagtccttgggtataatcacaccaggcattcattttgagcctgaggaaactgggaaactcttaaatttaagaactcaagacccaattaaaggtcactactgtgaggcagtgggttgtggtgctgcagaaatactggcccaaattgtctgatttttcaagagaatataggaatatggattttttggtacataatctcctaatttaaaaatttttaagtcaggtagtgcgtggtagctcatgcctgtaatcctagcactttggaaggccaaggcaggcagatcacttgaggccaggagtttaagaccaacccggccaacatggtgaaaccatgtctctactaacaatacaaaaaattagctgggtgtggtggtgcccagctactcaggaaactgagacaggagaatcacttgaccccgggaggtggaggttgcagtgagctgagatcgcatcacttcactccagacttgggaacagagtgacagagagaaaccctgtctcaaaaaaccaacataaaataaaataaaatatttaattaattcaaaaagaaaacaactggcaggtgaaacaaaagaaccggtggttctattttccagcctctgctcttgggccaggattgctcagccacaatca

SEQ ID NO: 706752 - DNA, 846 bp, Homo sapiens
ggtatttcaccagagttgtttaatcttcacatcaacactatgagccatactattatccgcattttagaggttgaggtaaacagaggcacagaaaggatatgtgatttgctctaggtcacacacattttagtagagratctaaaacaatgcctatatggaattctaagacaggcatcccaaatgcctctctggccaggtaagtaggataaatgagtgaagtccttgggtataatcacaccaggcattcattttgagcctgaggaaactgggaaactcttaaatttaagaactcaagacccaattaaaggtcactactgtgaggcagtgggttgtggtgctgcagaaatactggcccaaattgtctgatttttcaagagaatataggaatatggattttttggtacataatctcctaatttaaaaatttttaagtcaggtagtgcgtggtagctcatgcctgtaatcctagcactttggaaggccaaggcaggcagatcacttgaggccaggagtttaagaccaacccggccaacatggtgaaaccatgtctctactaacaatacaaaaaattagctgggtgtggtggtgcccagctactcaggaaactgagacaggagaatcacttgaccccgggaggtggaggttgcagtgagctgagatcgcatcacttcactccagacttgggaacagagtgacagagagaaaccctgtctcaaaaaaccaacataaaataaaataaaatatttaattaattcaaaaagaaaacaactggcaggtgaaacaaaagaaccggtggttctattttccagcctctgctcttgggccaggattgctcagccacaatca

SEQ ID NO: 706753 - DNA, 846 bp, Homo sapiens
ggtatttcaccagagttgtttaatcttcacatcaacactatgagccatactattatccgcattttagaggttgaggtaaacagaggcacagaaaggatatgtgatttgctctaggtcacacacattttagtagaggatctaaaacaatgcctatatggaattctaagacaggcatcccaaatgcctctctggccaggtaagtaggataaatgagtgaagtccttgggtataatcacaccaggcattcattttgagcctgaggaaactgggaaactcttaaatttaagaactcaagacccaattaaaggtcactactgtgaggcagtgggttgtggtgctgcagaaatactggcccaaattgtctgatttttcaagagaatataggaatatggattttttggtacataatctcctaatttaaaaatttttaagtcaggtagtgcgtggtagctcatgcctgtaatcctagcactttggaaggccaaggcaggcagatcacttgaggccaggagtttaagaccaacccggccaacatggtgaaaccatgtctctactaacaatacaaaaaattagctgggtgtggtggtgcccagctactcaggaaactgagacaggagaatcacttgaccccgggaggtggaggttgcagtgagctgagatcgcatcacttcactccagacttgggaacagagtgacagagagaraccctgtctcaaaaaaccaacataaaataaaataaaatatttaattaattcaaaaagaaaacaactggcaggtgaaacaaaagaaccggtggttctattttccagcctctgctcttgggccaggattgctcagccacaatca

SEQ ID NO: 706754 - DNA, 2344 bp, Homo sapiens
gaataacgctgctatgaacttaattgtacaaatatccattgtgtcccattgtttccctgctttcagttcttttgatgtcaagaagtggaattgctggatcatagagtaattctgtgtttaattttttttttaggaccggccacaccagtgagtgagtctcttaacctttcttaagcctctctctggctaagctcaactcccttggggagactctaggggatgccacctgggagggcattgtggtggagggggtgacactccaaggagtcttcttggggaaggagctgagtgagaggtggtcctcatgcacctcatgcagaagatacctttagggaaagagaatggctatccctggagacagggattgagcagcaactgaattcatagacaatttttggaagcctgataaatgccaatgctaaagatgtcaaacaggaagaaaaaaattttgtttaaaacaaaggttattgcattatatttaaggacagatgctgcttttattttaggaaactcaaggatgatggctgtaataggagtatgtttattttagttaggttycctgggcaaagcctacatgggtggggataattttttatatttctacaggtcaacgaggagaaaagagttaatgagggcaggaagagggaaaagaggagatgtgagaaagattgagcaagtggagaaagcccaagaagaggccaggaggtgagagtctcaggagagaaagtgggccattgagaagtccctgagtcaggggtagctaaggaatgctgctgggtcagtaagaaccaacctttgacgtattgtttcctgcaactatatcatctccttgctttcactgtaaaccttaagtgaatgcttgctaccgcaaatgagcatcgtgttactaacattatcaggatttcatgaaggaaggggttggtgtttggcttaggtgagcttcccccagaaggagatgctgtaacatgcgtttcagtgaagtagatcatctgggatttggggagcacctataagggagcatagaagtgagataaagggaagaaaacgattcaatatgagttcatgaacaggttacctctgtgaacaactagggctcagtctccctggaactctctgcaaggctgtgtagaacaagactcagaattatccctggggcaggaaacggagggcgataactacttaaagtctaggtctcattgctttttagaatgagggcaattactgatgctctgatgggtgccttggagcaactttgtgagcaaatgtgcaaagagtaaatgttgctggggcctaaagatgagcaaggtgaatgcatccttttcctgtataccccactggcagacaatcatgggctgagctttcctgtttgtctccctaagccagctcccacctctgatctttcaaccattggacagaaacatagcaacaggaaggaggaatatagcaataagaatttgttctaattcttctctctcaagaagtattttccataagatagaacgctattgacatttttagacttttatttattggattaatctctgatttatcattcagtgtacttttctgtctgctatggaaatgatgaatgatgtcataattataattttaaacacttcaaaaaacatctcaaaaaatccacctttcctctccatcgcaaacaacattctagtttttgtacattccttttagctctagcactgtggataaattttacataatattaattatggcctgcaaggaattttatattctgctttcatcaattatcttttatcatttagatttaatttatattttcttcagtctttatagataatgtttgaatagcaacaaagtatttcatccagcggctggacaataatacatttcactagtcccccatttctagaaatggatgattatcccagattgggttccaaaggaagtgggctccaaaacagacacttgcagggagatctattacagcgtgctcttgaggatcaatacctgtggaagtcaggtacagacagcacagggcaagagggaagttgatctctcatgcagttattatgaaggtgttagctcagcccaggaagagctttgaagcagggagggtcttgcgaaattgtgtcaagtttgggcaagcagacagggccttaacaccatcacattgattagtcactggatatgggctataacctcaggcaaggcagttttcttcaggccaggaaatttccaaagaggtagatagctgagggctgtcttacaggtccctcagagcaatgtgggtagtgcatcagtgcccagcccaagggcattttccagtttttctaattaaatatcacagcgatgagcaactttg

SEQ ID NO: 706755 - DNA, 715 bp, Homo sapiens
tctccagaaaaaaaaaaaaaaaaaaagccaggtatgatggcgcaccaccatagtcctagctactcagaaggctgaggcacaagagtcgtttgaactctggaggcagaggttgcaatgagccaagatcgcaccactgcactccagcctggatgacagagcaagactctgtctcaaaaaataaatgaataaagattaaaaagaaataaaaaactattttgagccaggcatagtggctcatgcctgtaatcccagcactttgggaggctgaggtgggaggatcacttgaagccaagagttcgagaccatcctgggcaacatagtgagactctgtctcaakaaataaaaaaataaataaataaatgaaactcctttgaggatctcaaccaacatgagctgtttgtaattccagaaatagcccggacactgagtggccctaccccctcaaaggattccaggacagctcccaccttcttagagggatgtggagggagagccggccctgggcatgtgacttctgtgccctcagccgctgttggctcactctgaggaggtccagcctccctcccatgggtcacacaagcatctctcctcttccccgaggagcaagaacacagggaacgtctacatcgaaaggaggagctttagggttttgtgccagcttcacttcatttcttctgctgttggttcattcatctaacagaatttattgaagtcc

SEQ ID NO: 706756 - DNA, 1011 bp, Homo sapiens
attactttcttatatcacatacatcgctattgtagaacctgagactggccttctgagatggcttttcagccgtttgcatttctgaagaccaggcctcttgacccaacttttgtgtgcyccacacccagaaatggactcagtgcaagaggaccattttccacaccactatgatcgcatccccagccattcagcgatactgactccctcgtcccctgcccaccaagctatacttgaaaaaccctagcctccgaattttcagagaggctgatttagtaataataaaattgtggtctcttatttagtcagctcttggtatattaaactctttctctattgcagttcccctgtcttgataaattggctctatctgggcagcaggcaagaagaacctgttggacagttagttacaaagccctcccataggagggcactcctatgggagtggtgaccgttcccttttctgagattccatctcttgggatcttccaaagtagggtagaaatatagatatcaatccacactgactatgtgatgccagtgttctttcttcctgcacagcacacagcttcctgagcaactttccacctccccattcatgcctaacttgaaaagtgtgtgctgaatgtggatggacagtcattctagggcagaagccatggaaatccaaggactggactgaagaagatctagatgccgcatctctaggctatccggctgagacaaggccttctgcagcccaggtggtttgggggatgggggtggggggtgttgactccgattagtgggaccaactgggattattttctaaaatggggcagataaaagatcttcatagtctccccactgcccaataactaattttttttttttgagatggagtctagctgtatcacccaggctggagtgcagtggcacgatctcagttcactgcaacctctgcctcccgggttcaagcaattcttgtgcctcagcctcccaagtagctgggattacaggcatgcagcaccacac

SEQ ID NO: 706757 - DNA, 1011 bp, Homo sapiens
attactttcttatatcacatacatcgctattgtagaacctgagactggccttctgagatggcttttcagccgtttgcatttctgaagaccaggcctcttgacccaacttttgtgtgccccacacccagaaatggactcagtgcaagaggaccattttccacaccactatgatcgcatccccagccattcagcratactgactccctcgtcccctgcccaccaagctatacttgaaaaaccctagcctccgaattttcagagaggctgatttagtaataataaaattgtggtctcttatttagtcagctcttggtatattaaactctttctctattgcagttcccctgtcttgataaattggctctatctgggcagcaggcaagaagaacctgttggacagttagttacaaagccctcccataggagggcactcctatgggagtggtgaccgttcccttttctgagattccatctcttgggatcttccaaagtagggtagaaatatagatatcaatccacactgactatgtgatgccagtgttctttcttcctgcacagcacacagcttcctgagcaactttccacctccccattcatgcctaacttgaaaagtgtgtgctgaatgtggatggacagtcattctagggcagaagccatggaaatccaaggactggactgaagaagatctagatgccgcatctctaggctatccggctgagacaaggccttctgcagcccaggtggtttgggggatgggggtggggggtgttgactccgattagtgggaccaactgggattattttctaaaatggggcagataaaagatcttcatagtctccccactgcccaataactaattttttttttttgagatggagtctagctgtatcacccaggctggagtgcagtggcacgatctcagttcactgcaacctctgcctcccgggttcaagcaattcttgtgcctcagcctcccaagtagctgggattacaggcatgcagcaccacac

SEQ ID NO: 706758 - DNA, 1011 bp, Homo sapiens
attactttcttatatcacatacatcgctattgtagaacctgagactggccttctgagatggcttttcagccgtttgcatttctgaagaccaggcctcttgacccaacttttgtgtgccccacacccagaaatggactcagtgcaagaggaccattttccacaccactatgatcgcatccccagccattcagcgatactgactccctcgycccctgcccaccaagctatacttgaaaaaccctagcctccgaattttcagagaggctgatttagtaataataaaattgtggtctcttatttagtcagctcttggtatattaaactctttctctattgcagttcccctgtcttgataaattggctctatctgggcagcaggcaagaagaacctgttggacagttagttacaaagccctcccataggagggcactcctatgggagtggtgaccgttcccttttctgagattccatctcttgggatcttccaaagtagggtagaaatatagatatcaatccacactgactatgtgatgccagtgttctttcttcctgcacagcacacagcttcctgagcaactttccacctccccattcatgcctaacttgaaaagtgtgtgctgaatgtggatggacagtcattctagggcagaagccatggaaatccaaggactggactgaagaagatctagatgccgcatctctaggctatccggctgagacaaggccttctgcagcccaggtggtttgggggatgggggtggggggtgttgactccgattagtgggaccaactgggattattttctaaaatggggcagataaaagatcttcatagtctccccactgcccaataactaattttttttttttgagatggagtctagctgtatcacccaggctggagtgcagtggcacgatctcagttcactgcaacctctgcctcccgggttcaagcaattcttgtgcctcagcctcccaagtagctgggattacaggcatgcagcaccacac

SEQ ID NO: 706759 - DNA, 1011 bp, Homo sapiens
attactttcttatatcacatacatcgctattgtagaacctgagactggccttctgagatggcttttcagccgtttgcatttctgaagaccaggcctcttgacccaacttttgtgtgccccacacccagaaatggactcagtgcaagaggaccattttccacaccactatgatcgcatccccagccattcagcgatactgactccctcgtcccctgcccaccaagctatacttgaaaaaccctagcctccgaattttcagagaggctgatttagtaataataaaattgtggtctcttatttagtcagctcttggtatattaaactctttctctattgcagttcccctgtcttgataaattggctctatctgggcagcaggcaagaagaacctgttggacagttagttacaaagccctcccataggagggcactcctatgggagtggtgaccgttcccttttctgagattccatctcttgggatcttccaaagtagggtagaaatatagatatcaatccacactgactatgtgatgccagtgttctttcttcctgcacagcacacagcttcctgagcaactttccacctccccattcatgcctaacttgaaaagtrtgtgctgaatgtggatggacagtcattctagggcagaagccatggaaatccaaggactggactgaagaagatctagatgccgcatctctaggctatccggctgagacaaggccttctgcagcccaggtggtttgggggatgggggtggggggtgttgactccgattagtgggaccaactgggattattttctaaaatggggcagataaaagatcttcatagtctccccactgcccaataactaattttttttttttgagatggagtctagctgtatcacccaggctggagtgcagtggcacgatctcagttcactgcaacctctgcctcccgggttcaagcaattcttgtgcctcagcctcccaagtagctgggattacaggcatgcagcaccacac

SEQ ID NO: 706760 - DNA, 1359 bp, Homo sapiens
gaaaagaaaaagaaaaagcatcatagacacccttctttctcctactctgtgtttgcttaactctccccctaatggtgggtatacgggctttccaaactgttgctattgtaaatagtgttgctatgaaaatctttgcaggtcttttatgttggattatttccttgaagatatggcctctaaaatgggccagggactataaatatatttcttgttgcaaatttccaaacagttcctagatccaccccaacagaataaactccagatggattggacttacgtgtaaaaaaaataaaccaaaaaccataaaatctgggctgggcgcagtggctcatgcctgtaataccagcagtttgggaggtcaaggcgggcggatcacttgaggtcaggagtttgagaccagtgtggccaacatggtaaaacctcatctctactaaaaatacaaaaattagccaggcatggtggcgggtgcctgtaatcccagctactcagaaggctgaggcacgagaatcacttgaacctaggaggtggaggttgcgtaagctgagatagtgccactgcactacagcctgggcaactgagtgagacccaaaaaagtgagtctaaaaaaaaaaaacaaaaaaaaacccactataaaatctaaagacaaatgaaggaaaataagcaatgcagtcactagagacaagaggactttctaattatataagaaaagattgatagatttgaaaagattgatagatttgattataaaacactctgagccacattgagctaagaaaagactattccctatggcagtgagggaaactgacctgtaagcagaggcctctagcctctcattgcattaaagtgtaaacaataaaatctctcaggaataacacaggagtagtgtaaactatatggaacaaaacatcctctgcttggaaaatagcatgagatgtctgagatgtactatcatgactaaatgtttcaattaagtcagatattgtgattataaaggtttatttatttatttatttatttagagacaggctttcrctctgttgtccaggctggagtgtagtggcatgatcatagctcactgtagcctggaactcctgacctcaagtgatcctcccacctcagcttcccaaagtgctgggattacagagccaccaagcccagcataaagttgttaaaaattaaaagactcggccgggcgcagtggctcatgcctataatcccagcattttggaggcagaggcgggaggatcacttgaggtcaggagtttgcgaccagcctggccaacatggtgaaacccgtccctactaaaaatacaaaaaattaactgggcgtggtggcaggcacctgtaattccagct

SEQ ID NO: 706761 - DNA, 1359 bp, Homo sapiens
gaaaagaaaaagaaaaagcatcatagacacccttctttctcctactctgtgtttgcttaactctccccctaatggtgggtatacgggctttccaaactgttgctattgtaaatagtgttgctatgaaaatctttgcaggtcttttatgttggattatttccttgaagatatggcctctaaaatgggccagggactataaatatatttcttgttgcaaatttccaaacagttcctagatccaccccaacagaataaactccagatggattggacttacgtgtaaaaaaaataaaccaaaaaccataaaatctgggctgggcgcagtggctcatgcctgtaataccagcagtttgggaggtcaaggcgggcggatcacttgaggtcaggagtttgagaccagtgtggccaacatggtaaaacctcatctctactaaaaatacaaaaattagccaggcatggtggcgggtgcctgtaatcccagctactcagaaggctgaggcacgagaatcacttgaacctaggaggtggaggttgcgtaagctgagatagtgccactgcactacagcctgggcaactgagtgagacccaaaaaagtgagtctaaaaaaaaaaaacaaaaaaaaacccactataaaatctaaagacaaatgaaggaaaataagcaatgcagtcactagagacaagaggactttctaattatataagaaaagattgatagatttgaaaagattgatagatttgattataaaacactctgagccacattgagctaagaaaagactattccctatggcagtgagggaaactgacctgtaagcagaggcctctagcctctcattgcattaaagtgtaaacaataaaatctctcaggaataacacaggagtagtgtaaactatatggaacaaaacatcctctgcttggaaaatagcatgagatgtctgagatgtactatcatgactaaatgtttcaattaagtcagatattgtgattataaaggtttatttatttatttatttatttagagacaggctttcactctgttgtccaggctggagtgtagtggcatgatcatagctcactgtagcctggaactcctgacctcaagtgatcctcccacctcagcttcccaaagtgctgggattacagagccaccaagcccagcataaagttgttaaaaattaaaagactcggccgggcgcagtggctcatgcctataatcccagcaytttggaggcagaggcgggaggatcacttgaggtcaggagtttgcgaccagcctggccaacatggtgaaacccgtccctactaaaaatacaaaaaattaactgggcgtggtggcaggcacctgtaattccagct

SEQ ID NO: 706762 - DNA, 1275 bp, Homo sapiens
aaaataaaaagaagaaaaacttactactgtttttgaactataattttttattgtaatatttttaacacttaatgcttacttgagtgtattaccaaagttaccccagggcaccccttcttcaatgaagtacccagaatgagttttttttttttttttgagacggagtctcgctctgtcgcccaggctggagtgcagtggcgcgatctctgctcacggcaagctccgcctcccgggttcacaccattctcctgcctcagcctcccgagtagctgggactacaggcacctgccaccatgcccggctaatttttttgtatttttagtagaggtggggtttcaccgtgttagccaggatggtctcgatctcctgacctcatgatccacctgcctcggccccccaaagtgctgggattacaggtgtgagccactgcgcccggcccagaatgaatttttataaatagtcgaagacacaaaagatcacactggtcggcttccagtgtygccgccagcaagtacgctccctgcgaaagtgcatcaagtcagggccccaggctcagcttctctaagaaccttcagtctgggggagggttgtgatgtgagtcacaggtccatgaattctttttttgttgtttttaaagacgtaaagacactttttctcctttcactgcttttctcctcaaaatgttgcatttccttctgcccttagtgttttccataaccttctgatcactttcagttattccggcagtacaatcataggctggctttacagtgaagcctttataatcttcttccacttcttctaaaattaaaaaatgaaaaccaactagcccaaccctcaaccaggctggaacgcatgtcctcctcagtgctcagttatggtgagagatgaggatgccctgggaagtgtccggcagtctcctctcagctccttggggtcatttctttgggtagcaatgtcaggtctggacggggcacaagtccctacatccaggtacccaacatgcctctgaggcagcaacgcttcccagaggggctggccctggtccccccacgacgagcttccatccccttactcacatcttcccttattttagttactgctcaacaggaccaaacacttcattagtagctgtttattgatcaatggtttgatataaagttatttcagatcttcagacttttgcccagatggaatcacaagcattacaaagtttttttcttaaaaataaaaaaaggataggggcaagttgggaggggaccaacctagcagtag

SEQ ID NO: 706763 - DNA, 943 bp, Homo sapiens
ctggaaagtttttaaaggaatattcgccaaattgtaaaattagttaaggtattggttgaggggtggttgtagtagggaatggaattacagaagagaggacttcataatctaatttatatattcctgaatatttacttttatctttacaaaaacaatgtgttacttttataatcaggaaaaaagctttaaaatgtatatcttctgagatgcaactacagcaattataagtggaaaatttattgcctctaatgctagaatttctaaacagaaagaatgaacatgaacttatcgataaataaaatatgagtagatttcacactggtttaggaataaatggacataagtaaaaagtaatcaaagcacaattaaatagaacaaatacagggacacagattaattttgacaccagctggagccagcaacacatctagcmaatctagcatctatctagttatgcttctgtgaaaaacatggtttgcaaaacctttgaaaggagcaaccaggtcttataactggtggagcatgtagctcagtgcggttttgatttctgatttttgtttgaaacaaaagttgttcaggagacaggatgtttcttactaattaggcttcctttttttgtttgtgtcaacttttgtgccattttttgttactcaattttatggtatttttgaagaatgtgttatgtgctatttctttttttctcctttatttttaaatttcaatagtttttggggacaggtggttcctggttacatggataagttctttagtggtaatttctgagattttggtgcagtcatcacccgagcagtgtccactgtacccatgtgtagtcttttatcccttacctccctcttgcccttccgcctgagtccccaaagttcatcacatcattcttacgcctttgtgtcctcaaacttagcttccacttataattgagaac

SEQ ID NO: 706764 - DNA, 588 bp, Homo sapiens
cagtgcttggcctaactcttctaaagagatgagttaatcccgagtaaatctttaattggagaagtagggcaagaaacttctatgtgaggaggacttttaagagccccacacatactttgggctttgcactgtctccccgacatttttttaatctcaaatgaaacatacaaaataaaccagaaaaacttgtcagcccttgtcagctcttcatctatcagttcttcctcctgtcccttctttgtgcatgataccgaagtggataagatgatgaattaaaagtggtccctggtttcaatgaagaaagaaactttatttaaatcctatgtaactccaaaagagtacaaacagcccccaacttatgaaagtttggcgattttttgaatttgcaatggtgtgcaaatgatattcaagtagaaaccatactttgaatacctatasgaccattctgtttttcactttctgtacagtattcagtaaattatatgagatattcagcttttttttttttttttataaaataggctcagtgttagatgatgtttcccaactgtaggctaacgtatttaaggcaggctaagttaagctatg

SEQ ID NO: 706765 - DNA, 1249 bp, Homo sapiens
agcagcatgcaatctttttgctattaagtttctatgaagtgaggccagaaagctttaaacatattttgaccaagatggtttaggagtctggttatgtctcagtttgctctgactgacttgactgaataacatcttggattgtcaacgaagtgttgtgtaatgtgtgttttctcacacttgagctcataccacaagatattcttaggctaataaatgtatctcccagccagtgtaaaatagagaactttsaatttaggagaagcctccctgctcagaaactggtctccctgtcttagatttttaccaggacatggtagattcccgtcctttttttttctcctgaggcttggacttgctcccttttttactattttttgaaattttccatttaaaaaattaattttgtaaaaattttaaacagtttccaagttaccaaaaagttgcaagaacagtgcaactgtcttttgcatcccgaagttttggagagtaagttgccaacatggtgcttcatcatcctcaaatatgagaacgacattctcctacataacccagtatgcataataacatcaggaaattaacattgacttttcactaccgtctaatcctcataagagaggcctgtgaaaactagtcaactggcaaaaaaagaaaatttgagtactgcattgtagaaaaaagatcatgataattctcagttgagagtaggtataagtgtataataccagaaaaatatgtacacttaatgtaaactgaatggcaaatgaagaggcaggagaaaatgatcatgataatggggctgctgtccacatgcttctctagcaatcccacaatgtgtcttcattcgctttgatgctgaatacatgagctcttctatgacgaatcatttgaccactggatagctccagctttgagtttgcagttggccctggtaccttgtctcaaagtcagctattttggtcttgttggtctgcttcttgatgtagcttctgagagtttagttattcagtaccattgtagaaatttcagtacatcagagggattctttcatgtatgtgggttgcagctgcccactgcactgtatagatggtctcacatgagtgaatgtccagccttattgctctgttgctgaagagtgagagaacttgctctctgtgatcaaataggctactttttcctttcattttattcctgagcaaataatcctacatagagttcttcatgtaatttttctctgatttatattataaag

SEQ ID NO: 706766 - DNA, 1460 bp, Homo sapiens
tactgtttgcagatcaccataacaaatgtaataataatgaaaagatttgaaatattgtgagagttaccaaaatgtgacagagacacgaagtaagcacacagtgttggaaaaatggctgatcttgtgttatttgtatttccctacttcacctcatattgctttattatttatttatttatttttgcaacagggtctcactctgtcactcaggctggagtgcagtggtgcgatctctgctcactggaaccttcatctcccgggttcaagcaatcctgctgcgtcagccacctgagaagctgggactataggcatgcaccaccacgaccggctaatttttgtattttttgtagagacaaagtttcattatgttactcaggcttgttttgaactcctggcctcaagcgatctgccccgcttgaccttccaaagtgttgggattataggcgtcagccaccatgcctggcttcatactattttaaagcaaatcccatacatcaaatcatttccttaaaaacattttgagtatatttktctaagaaatagggaattttttaaaaccgtaataccattgcacttaaaacatcagtaataatttgtaagaaacttttgattgagtttctgattttaattgaataaatttatatcctttactagagcagactgtaatagaggcctgtaatttagcagcatctaaatctggtgaaacattacaaaaatcataaatagagacagcatatttgatatattttgtcttgttaaaaatatttgttgaagaaaagtaccctaaatggaagccaaaagatactaagtgaatatttataagtttttttttgtttttttttttttttttgagacagagtctcgctctgtctcccaggccaaggactgcggactgcagtggcgcaatctcggctcactgcaagctccgcttcccaggttcacgccattctcctgcctcagcctcccgagtagctgggactacaggcgcccgccaccgcgcccggctaattttttgtatttttagtagagacggggtttcaccttgttagccaggatggtctcgatctcctgacctcatgatccacccgcctcggcctcccaaagtgctgggattacaggcgtgagccaccgcgcccggccattataagttttaatattaacaaagctagaattaaaaatatgttctatttagcagaagttgctctgagcttaccaggtacatcagtatacttcaaaataatattttcaattaaaattattgtgtcccctagaaaagagtcaataaaagagtcaacaattttaaatgtgtaaacaatgaatctgacaattaacaataaagaacaactttgaagtagcaggtaatcttaggaaaaaataaaaaatactaagatcatattgaaagaatatattcattagtaaaatatcaatgacatggtattagcataaaatatgactaaaac

SEQ ID NO: 706767 - DNA, 1460 bp, Homo sapiens
tactgtttgcagatcaccataacaaatgtaataataatgaaaagatttgaaatattgtgagagttaccaaaatgtgacagagacacgaagtaagcacacagtgttggaaaaatggctgatcttgtgttatttgtatttccctacttcacctcatattgctttattatttatttatttatttttgcaacagggtctcactctgtcactcaggctggagtgcagtggtgcgatctctgctcactggaaccttcatctcccgggttcaagcaatcctgctgcgtcagccacctgagaagctgggactataggcatgcaccaccacgaccggctaatttttgtattttttgtagagacaaagtttcattatgttactcaggcttgttttgaactcctggcctcaagcgatctgccccgcttgaccttccaaagtgttgggattataggcgtcagccaccatgcctggcttcatactattttaaagcaaatcccatacatcaaatcatttccttaaaaacattttgagtatatttgtctaagaaatagggaattttttaaaaccgtaataccattgcacttaaaacatcagtaataatttgtaagaaacttttgattgagtttctgattttaattgaataaatttatatcctttactagagcagactgtaatagaggcctgtaatttagcagcatctaaatctggtgaaacattacaaaaatcataaatagagacagcatatttgatatattttgtcttgttaaaaatatttgttgaagaaaagtaccctaaatggaagccaaaagatactaagtgaatatttataagtttttttttgtttttttttttttttttgagacagagtctcgctctgtctcccaggccaaggactgcggactgcagtggcgcaatctcggctcactgcaagctccgcttcccaggttcacgccattctcctgcctcagcctcccgagtagctgggactacaggcgcccrccaccgcgcccggctaattttttgtatttttagtagagacggggtttcaccttgttagccaggatggtctcgatctcctgacctcatgatccacccgcctcggcctcccaaagtgctgggattacaggcgtgagccaccgcgcccggccattataagttttaatattaacaaagctagaattaaaaatatgttctatttagcagaagttgctctgagcttaccaggtacatcagtatacttcaaaataatattttcaattaaaattattgtgtcccctagaaaagagtcaataaaagagtcaacaattttaaatgtgtaaacaatgaatctgacaattaacaataaagaacaactttgaagtagcaggtaatcttaggaaaaaataaaaaatactaagatcatattgaaagaatatattcattagtaaaatatcaatgacatggtattagcataaaatatgactaaaac

SEQ ID NO: 706768 - DNA, 1460 bp, Homo sapiens
tactgtttgcagatcaccataacaaatgtaataataatgaaaagatttgaaatattgtgagagttaccaaaatgtgacagagacacgaagtaagcacacagtgttggaaaaatggctgatcttgtgttatttgtatttccctacttcacctcatattgctttattatttatttatttatttttgcaacagggtctcactctgtcactcaggctggagtgcagtggtgcgatctctgctcactggaaccttcatctcccgggttcaagcaatcctgctgcgtcagccacctgagaagctgggactataggcatgcaccaccacgaccggctaatttttgtattttttgtagagacaaagtttcattatgttactcaggcttgttttgaactcctggcctcaagcgatctgccccgcttgaccttccaaagtgttgggattataggcgtcagccaccatgcctggcttcatactattttaaagcaaatcccatacatcaaatcatttccttaaaaacattttgagtatatttgtctaagaaatagggaattttttaaaaccgtaataccattgcacttaaaacatcagtaataatttgtaagaaacttttgattgagtttctgattttaattgaataaatttatatcctttactagagcagactgtaatagaggcctgtaatttagcagcatctaaatctggtgaaacattacaaaaatcataaatagagacagcatatttgatatattttgtcttgttaaaaatatttgttgaagaaaagtaccctaaatggaagccaaaagatactaagtgaatatttataagtttttttttgtttttttttttttttttgagacagagtctcgctctgtctcccaggccaaggactgcggactgcagtggcgcaatctcggctcactgcaagctccgcttcccaggttcacgccattctcctgcctcagcctcccgagtagctgggactacaggcgcccgccaccgcgcccggctaattttttgtatttttagtagagacggggtttcaccttgttagccaggatggtctcgatctcctgacctcatgatccacccgcctcggcctcccaaagtgctgggattacaggcrtgagccaccgcgcccggccattataagttttaatattaacaaagctagaattaaaaatatgttctatttagcagaagttgctctgagcttaccaggtacatcagtatacttcaaaataatattttcaattaaaattattgtgtcccctagaaaagagtcaataaaagagtcaacaattttaaatgtgtaaacaatgaatctgacaattaacaataaagaacaactttgaagtagcaggtaatcttaggaaaaaataaaaaatactaagatcatattgaaagaatatattcattagtaaaatatcaatgacatggtattagcataaaatatgactaaaac

SEQ ID NO: 706769 - DNA, 1460 bp, Homo sapiens
tactgtttgcagatcaccataacaaatgtaataataatgaaaagatttgaaatattgtgagagttaccaaaatgtgacagagacacgaagtaagcacacagtgttggaaaaatggctgatcttgtgttatttgtatttccctacttcacctcatattgctttattatttatttatttatttttgcaacagggtctcactctgtcactcaggctggagtgcagtggtgcgatctctgctcactggaaccttcatctcccgggttcaagcaatcctgctgcgtcagccacctgagaagctgggactataggcatgcaccaccacgaccggctaatttttgtattttttgtagagacaaagtttcattatgttactcaggcttgttttgaactcctggcctcaagcgatctgccccgcttgaccttccaaagtgttgggattataggcgtcagccaccatgcctggcttcatactattttaaagcaaatcccatacatcaaatcatttccttaaaaacattttgagtatatttgtctaagaaatagggaattttttaaaaccgtaataccattgcacttaaaacatcagtaataatttgtaagaaacttttgattgagtttctgattttaattgaataaatttatatcctttactagagcagactgtaatagaggcctgtaatttagcagcatctaaatctggtgaaacattacaaaaatcataaatagagacagcatatttgatatattttgtcttgttaaaaatatttgttgaagaaaagtaccctaaatggaagccaaaagatactaagtgaatatttataagtttttttttgtttttttttttttttttgagacagagtctcgctctgtctcccaggccaaggactgcggactgcagtggcgcaatctcggctcactgcaagctccgcttcccaggttcacgccattctcctgcctcagcctcccgagtagctgggactacaggcgcccgccaccgcgcccggctaattttttgtatttttagtagagacggggtttcaccttgttagccaggatggtctcgatctcctgacctcatgatccacccgcctcggcctcccaaagtgctgggattacaggcgtgagccaccgcgcccggccattataagttttaatattaacaaagctagaattaaaaatatgttctatttagcagaagttgctctgagcttaccaggtacatcagtatacttcaaaataatattttcarttaaaattattgtgtcccctagaaaagagtcaataaaagagtcaacaattttaaatgtgtaaacaatgaatctgacaattaacaataaagaacaactttgaagtagcaggtaatcttaggaaaaaataaaaaatactaagatcatattgaaagaatatattcattagtaaaatatcaatgacatggtattagcataaaatatgactaaaac

SEQ ID NO: 706770 - DNA, 601 bp, Homo sapiens
caaacaaacaaacaaamaaaaaaaagaaagaaagaaaagaaaaaaaaaaacaaagcacagagccgctgctttcttccctaacttgagatgtgttttacataagggcacgttcctctagtcctagaccgagctctctaacatcactctttctcccccacccctgaatccaattcccccagaggcgtagccaccctgccaggtacacagagctgaggtcactggactgaacactgccaaaaatgaggttcgcttcctgaaataactcttgaacacaggagtgaatgggctgtggattcaggtggaatatttattaatgcatcaagcaaacaggtagtgcgaggtgggaggtaggcacggggctgggtgctaggtgctcagtaatgactcaaatctaagtccacaggtcctgggcagtgggagtggagatgcatgcacagaaaaacggtgcaagtgccaggcgaggtggctcacgcctagaaccccagcactttgggaggcttacttgagaccaggcgcttgagaccagcctgggcaacatagcaagaccttgtttctacaacaaatttaaaaattagggctgggcatggtggctcaagcctgt

SEQ ID NO: 706771 - DNA, 2201 bp, Homo sapiens
tgtttaatcatttggctggatatcagataggatgcctcggttcttcatgtgagctttctagaaaagatactttggaattatttgcatggtggctgggctcgtaaagagttgaaggagagaaagagagagaaacaccagtaaggagcaaattagttcactcaaaattaaaaccctagcctttgtgaccttgtctcagaaggtaacattccaatcctgtggtgttttatttcttagatgggagtcactcagcttagcctgccttcaaggggaggagtatgaagctccacttcttaaactgaggaggatcaacaaatatgtagatatatatatatttttaatagtattacagctcatgaacccatttaaacccattttagaactttaaagaaatattttaaaacggaattttcaattaagccgaagaaattgccagctgtggaacagtgaactttatcgctgaaatcacacacatatgtacacacacacagtgtaaactcatacatgatcaaatctataaccttattacacaaagttttgtgagaggaaaaatgcttgacttttcaaaagggctcatttattaaaaataaaattaccattgtgttcattttagctgcaacctttaagcaatcaatgactatatacttgctgtaatcatcctttaaaattagaattattgaaaagctttatcactgatgaatgaaagaaagtaatattgacttgtggccaagagagagaatctcaggcaataaacaggtgcagtctttgaaggaatcgttttattttattaactttctgacattattgaagccaattttaaataaattcatcatgtttttaaatttaatcacatattattttatcataccttaggtaaagtttcaatctaagtaactcctggataaaaaatgaagtatatcaatttacaattacaaatacccaaattgtagaggcatgcatttttcaatgacatttataaattgtgttttgttgtttgtgccttgtgtttgttttatttatcaaattaatttatatagatatatgtatggaaatgagacagatataaccagttctctayaagtaagcattatttaatggagtctttcctttcactaatgatcatcaggacagctagggaagtgagttgaaattttcaggccattaggttaatagttccagtaattctagtaatgtttcgacagtcataatataaatgatactatgtggcttgaattaatgcattttcttatgtaacaaataataagacaatttttaaaagtggtaattactatttttaaatatgacaattaaaaataacgaaagaaaagaggttgtacattgagtagccataacattatctttaaacatatttattcttcatttcctaacttttcccaccttttggctaaatcgtatgttctttctctcacctcacttctgttttattactctctgggaaagatttttatataaaacgtctaagcaatcaaacctaacgcaggatgaatttctacacattactataccctctggtcactatttttttcttctctttattgcccatttccctgttcttgaaacattccaattatttgccttccatgacattctactcttacttttacttttctgtctctgattactcatttccagttccctttgtcatctccttgtcttcctacacctgccaattaaatgtgaatttcctctgcatttcatcttatgtctccttttcttctgccaaattctctccttagacaaatacagtcattcccatggttttatatcccacttatcttcaggggctctagaatgtatagcgccaggccaaatctatcttaagaacttactttacttaaccaattacatctgcatctgctcaggatcatgtaacccagatcagaatttggctcttttgtagacccattttttcttttcctggaagtctattttgacacctactttctgtcactacccacattttagcatttagccttgtcgatttactctcatccatatgtaactctatccattttcttctctctattatgaacagcagtttgagccatcatgaccaattttgcagtatcttcttaaattagcctcctgtttcgcattggacattttcaccccccagcaattccacccatttcattctcggaaaaatataaatgaagagttagttacatttttcaatagccata

SEQ ID NO: 706772 - DNA, 1254 bp, Homo sapiens
ttttctaagtctgattcatatgcaaacaatgggtaagtggtctaagctgcattcataaagctggctcaagggaagctgcattgcttgttttgttttgttttaattttctaacctcttcaaagagtggaacgaaggttgaggaaacctgtccacacagtctaccacacaccttccacgaaaggttccccaacacctccaacaaaataatgtaaacacatgctggaacctatattactctcacaccataacacttcccacacttcccacaatactttttctcttcatgggaatatccttccaaaacatgctgatatctcctaagcattattcatctgtcgaattttcccacctattgtaaggtcttccaattgttaggttcttaataaacacattttaaattattaaaattctgaactaatgggtaatcagctgtacaaaccgaattgctgatttgcatacagctgaagtccctcctcaaaacttctgtaatacatgaaacttaggcaaatggttgggtcattaccatatattactttgtatttttatttatcagtatatgtgattacagttatgcttatgtttattgatacgtatatgttaacttttatacatatgtacattgtattattttgttacatagcacagcgttttgtactcaaaaagtgaccaattataataagctgcatactttgggaagcattgcaggctagtcatacagttttattttttttttccctgcagcctgacaacctctttagtcattcactaaacctctctcagcttcagtttcttcatctgcaacatatagcaaataataaaacttaactcagatggttctagtgtgaaataatacagagtaaatgtgycaccaaatacaaaccaatggcttgattgacataactcattgctaattttcttgaaatgattcaaagtattttccagacaagcacacactgagggaattcgtcaccactaaacgagtcctatgagaaatactcaaaggtgtcccaaacacaaaatgaaaggtcaacattcatcatcgtcaaaacacatgaaagtagcaaactcataggtcttgtaaaacagtcacacaaagtaggaagagaaatcaaatagcaacacaacagatttccaccaaaccacaaagacaaagagacagacagaaagaaaaacaaaaaacaacaacaaaataaccccaaagaacttataaaacaagtagaaaacaaatagcaatatggcagaaagaaaacctca

SEQ ID NO: 706773 - DNA, 588 bp, Homo sapiens
tactaatttagtggatatgttttaggtgctgttatagcagacccaactcaagctggtgatttctayattacttggaatagtactagttgctttgacaactacactcaacaacatataatatcttaaacagaacagaagtttcattcatataaactgtttttttaagataggaaaagcattgctcctttatgtccgcattcaagaacataggctactaagctatttaatctgcagtatgttgcttccaagactactgtagaattggccattccagtcaagcatactgaaaaacgtatacagaagagtgcatgttgggattttggagactaaattggatataaaatatgttatttctactaattttccactattttgactttaatcccatgccctaatataaagtatataagaatgagaaatatagtttatgtatctatcaaaatagaacataaatgtttgtgaacatttgaatctgtcagcttctcttgctcacgtgcctgtagtgcctgtactcgggatgctgaggcaggagaatcgcttgaacccaggaggtggaggttgcagtgagctgaggtcacaccactgcac

SEQ ID NO: 706774 - DNA, 588 bp, Homo sapiens
tactaatttagtggatatgttttaggtgctgttatagcagacccaactcaagctggtgatttctacattacttggaatagtrctagttgctttgacaactacactcaacaacatataatatcttaaacagaacagaagtttcattcatataaactgtttttttaagataggaaaagcattgctcctttatgtccgcattcaagaacataggctactaagctatttaatctgcagtatgttgcttccaagactactgtagaattggccattccagtcaagcatactgaaaaacgtatacagaagagtgcatgttgggattttggagactaaattggatataaaatatgttatttctactaattttccactattttgactttaatcccatgccctaatataaagtatataagaatgagaaatatagtttatgtatctatcaaaatagaacataaatgtttgtgaacatttgaatctgtcagcttctcttgctcacgtgcctgtagtgcctgtactcgggatgctgaggcaggagaatcgcttgaacccaggaggtggaggttgcagtgagctgaggtcacaccactgcac

SEQ ID NO: 706775 - DNA, 602 bp, Homo sapiens
tgcagagtgaagaaaggataaaaatttgaaaaagaaaaaaacaaacacatggatcattcacttgtgtaaatcatgtataataaatcacagttctatttcctctacattgctagaaaaattataaatttttatcaagattaagatgaaatgaggccgggcgcagtggctcacgcctgtaatcccaacactttggaagaccaaggccagtggatcacttgaggccaggagtttcaggccagcctggccaacatagtgaaaccccatctctactaaaaatacaaaaattagccrggcgtgggtggcgcatgcctgtaatcccaggtattcgggaggctgaggcacgtgaatcacttgaactgggaggggaaggctgtagtaagccacgatcgcaatcttttgtgacactctgtctcaaaaaagaataataataaaaatttaaaaattgagagaccataattatctcaaatttgtcaaatacttttctgtatctattaatatgattatataatttttcttctttagcctattggtgtgatatattgattctggatgtggaatcaaccttatatacctggaataaattccacttggtcatagtgtat

SEQ ID NO: 706776 - DNA, 2114 bp, Homo sapiens
cactcacctatttttagacctcagttgaatgctggttaactgaaaccagggaaaacagccatgtacccggggttggggggggcgcggggggaactaaacatgctttctttattctgaagttctgaaaatcctaataattgagtaactttattctttccctgtgtaactccaggcaatttattgaacctctatgcacctaagattcagggatgcaatgagaatgataaaactgctctatcagctgatttatgtgagaattaaatcagccaatgcatgtaaattccttaacttggtccctcacagaaaattctttaatgtgttaaccaatactctgtatgaagtgaatgatatcatgtatattattttgcaaactcctattttgcatataggtgcagacatagcttcaggtaaatacatgcaaactaacttatcttttaatatcttaaaatttttccattataaggatacaaaaactattctaccaattacctgttgaagaaactcatgtttaattctggtttattttgccatcataaacaatgctgtgaaagcattcttgtatatcgaggataacatatatgcctttacttctgtaggatagattctttttaaaaatattttaacttttattttaggttcaagggtggacttttaatctaggtgctgagactagcacatatgtatacttttgcactatgaaaatatcaataatttttttctccaagtgcagtaacttacagtttcactaaagtatataagattttccaggttcattgaaattccctaagaaatactatacactcttatgataaaaaatatatgtataaaatttatattagatttccgcatgtatgaatttaataaagcaactttataattttgccagaagcccagcacagtgcctagaatgtataatttcacagtatattttagttaaaatattataattatgccaattgagggatgtataatattagtaataaacactgaaattacaaatatactacttctgatattatcaggcctaacaaaaacaaacttggttgaatgttataaaatcagttacacataaaaacattattattagctattacccactacatatttttcaaaattctgttgttgatttaactcatttgctagattaatataatcgtctcattcaagaccataaaatcaatttcccatttgttttattttatctatatctatgacaaacactttaaaccaaaatttgaagtgaatgtattataaaataattagtataaaataaaagctattcaaaagacatatacttctattgtatggatatgtaaaatgagtaagaatgagtaaaatgagtaagaaaaactttttgtgttagccactgggatttttggtttgtgtattactttagcatattatctcattttgaatgctatagtttaggacactagtttaaactactgaagttaaaatgttcttatttcagaggatagaaggatcttacagtgacagacatccatcagtaagaattaatttctagagataaagtgaatacagtaaccaaagtgtcagtagagtcagcatggtcaaaatagtctacatgggaaatgtttggtggctcttagttgatcatggagtctctagaaccaaaagttaggaatgccaattaagtttcgatttggcttatatgatctcaaatcttcaggtttacaaaacayatcttgagccaccacccagctctgtcacccaggctggagtgcagtggcaccatctcagctcactgcagcctccgcctccgaggtttcagcaattctcatgcctcagcctcctgagtaactgggactacaggtactcaccaccatgcagggattttttttctagttttttgtggagacacggtttcaccatgttggccaggctgctctcgaactcctgacctcatgatccacccacctcggcctcccaaagtgctgggattacaggcgtgagccactgcgcccggcccattttttcttttcacccacctcggcctcccaaagtgctgggattacaggcgtgagccactgcactgagcctacagctcatttcttaccacataaagctttgcacctctccacaaaactgccatc

SEQ ID NO: 706777 - DNA, 2114 bp, Homo sapiens
cactcacctatttttagacctcagttgaatgctggttaactgaaaccagggaaaacagccatgtacccggggttggggggggcgcggggggaactaaacatgctttctttattctgaagttctgaaaatcctaataattgagtaactttattctttccctgtgtaactccaggcaatttattgaacctctatgcacctaagattcagggatgcaatgagaatgataaaactgctctatcagctgatttatgtgagaattaaatcagccaatgcatgtaaattccttaacttggtccctcacagaaaattctttaatgtgttaaccaatactctgtatgaagtgaatgatatcatgtatattattttgcaaactcctattttgcatataggtgcagacatagcttcaggtaaatacatgcaaactaacttatcttttaatatcttaaaatttttccattataaggatacaaaaactattctaccaattacctgttgaagaaactcatgtttaattctggtttattttgccatcataaacaatgctgtgaaagcattcttgtatatcgaggataacatatatgcctttacttctgtaggatagattctttttaaaaatattttaacttttattttaggttcaagggtggacttttaatctaggtgctgagactagcacatatgtatacttttgcactatgaaaatatcaataatttttttctccaagtgcagtaacttacagtttcactaaagtatataagattttccaggttcattgaaattccctaagaaatactatacactcttatgataaaaaatatatgtataaaatttatattagatttccgcatgtatgaatttaataaagcaactttataattttgccagaagcccagcacagtgcctagaatgtataatttcacagtatattttagttaaaatattataattatgccaattgagggatgtataatattagtaataaacactgaaattacaaatatactacttctgatattatcaggcctaacaaaaacaaacttggttgaatgttataaaatcagttacacataaaaacattattattagctattacccactacatatttttcaaaattctgttgttgatttaactcatttgctagattaatataatcgtctcattcaagaccataaaatcaatttcccatttgttttattttatctatatctatgacaaacactttaaaccaaaatttgaagtgaatgtattataaaataattagtataaaataaaagctattcaaaagacatatacttctattgtatggatatgtaaaatgagtaagaatgagtaaaatgagtaagaaaaactttttgtgttagccactgggatttttggtttgtgtattactttagcatattatctcattttgaatgctatagtttaggacactagtttaaactactgaagttaaaatgttcttatttcagaggatagaaggatcttacagtgacagacatccatcagtaagaattaatttctagagataaagtgaatacagtaaccaaagtgtcagtagagtcagcatggtcaaaatagtctacatgggaaatgtttggtggctcttagttgatcatggagtctctagaaccaaaagttaggaatgccaattaagtttcgatttggcttatatgatctcaaatcttcaggtttacaaaacatatcttgagccaccacccagctctgtcacccaggctggagtgcagtggcaccatctcagctcactgcagcctccgcctccgaggtttcagcrattctcatgcctcagcctcctgagtaactgggactacaggtactcaccaccatgcagggattttttttctagttttttgtggagacacggtttcaccatgttggccaggctgctctcgaactcctgacctcatgatccacccacctcggcctcccaaagtgctgggattacaggcgtgagccactgcgcccggcccattttttcttttcacccacctcggcctcccaaagtgctgggattacaggcgtgagccactgcactgagcctacagctcatttcttaccacataaagctttgcacctctccacaaaactgccatc

SEQ ID NO: 706778 - DNA, 1785 bp, Homo sapiens
atgtttattccttagtttttcttttttctttttttttttttttttgagatggggtctcactctgttgtgcaggctggagtgctgtgacacgatcgcgactcactgcagtcttggtctcccaggctcaagtgatcctcccacttcagccttcccagtagctggagccacaggcgcatgccaccgtgcccagctaattttaaaaatttttttgtagagacaaggtttcactatgttgctcaggctggtctcaaactcctgggctcaagcgatcctcccacctcagcctcccaaagtgctggaattaacaggtgtgagccactgtgctggcccttagttgttatacatacacagagaaagcaataattatcagagggacactgttatgttgtagtatgccatcacactgaggaaaagttcaatagaaagaactctgtggaaagaagattttcatgagccaaaacacaactcatgaacccctgttactcaactgccatgcctgccttctctgagcagttgtctcctaggctgcagagaaactcagaaactatcttgtttaaatttaggtatctctctatgaaccttgttaccagcccttgcaatttatcccatctctgcttctcagatcacagcccagtgttcaggaaccatttgcttgttaattatcaggcacagacaatgcatgcaactaccagtgttctgtctttacacaactctctaccacagtaattggttatgtatgccctgctccctgctggaccaataaatgaactcttactacgtgcttggaaggatgatggatgagtgagcagaagatagatggatggataggtaaatggatgagtgmtggatgtgtgggtggatggatgcatgcatggatgagtggatcgatgggtggtaggtagatggatgaatgggtgaatggatggttgcttgtgtagaaaggtggctgggtggatggattaatggaccaaagtgtggaaatctgtatcattccatttttatgttgatacctgaggtaattacacagtgaagatgccccaagtggattctgcttccacgtaaaagatatgttcaggacgaaagttatgtttagatttggtagaagtttgccttggggtagactttaagaccctgaaaggcagggatcatagctttccatctatgagagagtaaccatcattgcctgccacatagtaggtactgagtaaatatttgttgacaaacatgtatgaatgaattatttgggaaacacaaggatggctctccttgactctgaagttcaaccccacattctgattcttcatgcttatacagttttaaaattgcatttctttataaatcggttaggcatccagaagtgtcctgttatgatgcaaaacattcttagatgttaaaaatattaaaccctttgcatctgttgtccctttgtcaggaattagctggtcacattactgtctccttgattctttgctgatgatgttgggcatggggcaggtctggtggtttctctgactgggctgaaggacttttgctgacaaataggagagggtcctttacagtaggaatcaccaagcctgcaaggaaggacccaaagactcccctctctcatgatctcagcagccaacccctgcccatagtgccttcttggcagccgtgctcctgatttgaagggaattcctcactttgtcccatgggtttctgcaagctgagcaggacacctaggtgaggacagaagtaaaaagagaagaggaaaggtgagagcgagaaagaaaacatgagaaggga

SEQ ID NO: 706779 - DNA, 1785 bp, Homo sapiens
atgtttattccttagtttttcttttttctttttttttttttttttgagatggggtctcactctgttgtgcaggctggagtgctgtgacacgatcgcgactcactgcagtcttggtctcccaggctcaagtgatcctcccacttcagccttcccagtagctggagccacaggcgcatgccaccgtgcccagctaattttaaaaatttttttgtagagacaaggtttcactatgttgctcaggctggtctcaaactcctgggctcaagcgatcctcccacctcagcctcccaaagtgctggaattaacaggtgtgagccactgtgctggcccttagttgttatacatacacagagaaagcaataattatcagagggacactgttatgttgtagtatgccatcacactgaggaaaagttcaatagaaagaactctgtggaaagaagattttcatgagccaaaacacaactcatgaacccctgttactcaactgccatgcctgccttctctgagcagttgtctcctaggctgcagagaaactcagaaactatcttgtttaaatttaggtatctctctatgaaccttgttaccagcccttgcaatttatcccatctctgcttctcagatcacagcccagtgttcaggaaccatttgcttgttaattatcaggcacagacaatgcatgcaactaccagtgttctgtctttacacaactctctaccacagtaattggttatgtatgccctgctccctgctggaccaataaatgaactcttactacgtgcttggaaggatgatggatgagtgagcagaagatagatggatggataggtaaatggatgagtgatggatgtgtgggtggatggatgcatgcatggatgagtggatcgatgggtggtaggtagatggatgaatgggtgaatggatggttgcttgtgtagaaaggtggctgggtggatggattaatggaccaaagtgtggaaatctgtatcattccatttttatgttgatacctgaggtaattacacagtgaagatgccccaagtggattctgcttccacgtaaaagatatgttcaggacgaaagttatgtttagatttgstagaagtttgccttggggtagactttaagaccctgaaaggcagggatcatagctttccatctatgagagagtaaccatcattgcctgccacatagtaggtactgagtaaatatttgttgacaaacatgtatgaatgaattatttgggaaacacaaggatggctctccttgactctgaagttcaaccccacattctgattcttcatgcttatacagttttaaaattgcatttctttataaatcggttaggcatccagaagtgtcctgttatgatgcaaaacattcttagatgttaaaaatattaaaccctttgcatctgttgtccctttgtcaggaattagctggtcacattactgtctccttgattctttgctgatgatgttgggcatggggcaggtctggtggtttctctgactgggctgaaggacttttgctgacaaataggagagggtcctttacagtaggaatcaccaagcctgcaaggaaggacccaaagactcccctctctcatgatctcagcagccaacccctgcccatagtgccttcttggcagccgtgctcctgatttgaagggaattcctcactttgtcccatgggtttctgcaagctgagcaggacacctaggtgaggacagaagtaaaaagagaagaggaaaggtgagagcgagaaagaaaacatgagaaggga

SEQ ID NO: 706780 - DNA, 923 bp, Homo sapiens
aaagtcaccttctcaatgaggccttcccttaacatctctacttaaaattgcaaaccccaacactccttatccctttccttgctttatttttctccaaagcatgtatctctatctgataaactacatactttatttgtgtagatactgtttgtctcccttaaaaactccrtgagatcagtaatattgtctctttgatcactcccatatctccggtacttaaacagagcctgacatacagcaggtgctcaatataagttgaagaaatgaattcaggaaggaatgaaaaaccattagcagtaggctaaggaacttagactttgtcctgctagtaaccgaaaatcattaaaggatttttctccccctcttatagtcgatatcagctaggaaaacggaatgagtttcctttcagcatggcagacaagaaaaagtatagaacactgagtcagatgctcatatatttaaattctagttttgccacttagaagctaagtgacctttgataagttttgtaatctctctgaaactccattgcttctcctgaaatacctatgacagtaattcatagggttattgggggaattaaatgaaacatgtagaagtgtctcaaacagtacctggaaaaaatgttttaataaatgtttgtttccctcccttctttctaacaaactgagaaattccctatgcattatgatatcagtcagattcccagaggaaacagatggcacacccaaattaggctaattcgaggtgagttaaataaagagactctaaaaggtgtggagaaaccacagaggatggtgtagtacctagacccggtgacaactctgttggggcatagagacaggggcgtagggacagggagggaggagtttccagaacccagaaggagagaaaaatttcaaaggcatatttaaaattctaaa

SEQ ID NO: 706781 - DNA, 607 bp, Homo sapiens
tcaatcattgtactattttatttttctaaaataacttctaaggtcayttcaaatgaccttagaacagacttggcagattcactagatttacaaacacagaagacatgagacagtacatcaagctttacaaaggttactttcagatctgactttctgaaagcaataagagaaaagaaggataagaagtatttaaaaagcatgatcctttttctcagatatgtattatgctagcaatatttgaagactcatgaaacattccaaatataaatgaaatgctggcaatgttaaaatatgtaaattaagaataagaaaacccaggggtaattcataatccaccccaaaataatgttttcaaaggttccatatgctacctcctatgctaaatgtcttccttcacatgtgctaacattctgtattcattgcaggatatcaaatgcaggaagtgaatttcaccatttgtttcatcatttgatattaggaagttacgaatagtatattggatcttgggaagttaggagtagcatattggagagtgcaggcttaaagctggagctcagttctacccttgactctagcattaactagctttatcatgttaacacatcag

SEQ ID NO: 706782 - DNA, 549 bp, Homo sapiens
ctttatcagttatgcctcaagacatggtattagctattctcccaggagttatagttgccttagcaaatgatagtaattctgaaaactggggttaaraggggcataaaaagaattcccattgagtacttgcagtgaacagagtaactccagaaaagaagaagaatatttcctttaggttatgagtttatattgacattttcaaattaccgctatcttttctcaatttgtttttctattgaacttggctaatataaacatttggcaatccagtttttctgttctattgactaccacttctatctcctttgtctagtatccttcaagtaccatttctatatactgcatcataccaaacctttctattaaaaactatatatttttctattttcctcattgactttcagccaatgcatcctagaattgaccccaaagtgtacagattaaatgattttctctgtcagtattatcggaaaacattactttctatttgcaaagaaatgaaaatggcaatctaacccaggggataccaggtaatttgaaagcaaatgt

SEQ ID NO: 706783 - DNA, 549 bp, Homo sapiens
ctttatcagttatgcctcaagacatggtattagctattctcccaggagttatagttgccttagcaaatgatagtaattctgaaaactggggttaaaaggggcataaaaagaattcccattgagtacttgcagtgaacasagtaactccagaaaagaagaagaatatttcctttaggttatgagtttatattgacattttcaaattaccgctatcttttctcaatttgtttttctattgaacttggctaatataaacatttggcaatccagtttttctgttctattgactaccacttctatctcctttgtctagtatccttcaagtaccatttctatatactgcatcataccaaacctttctattaaaaactatatatttttctattttcctcattgactttcagccaatgcatcctagaattgaccccaaagtgtacagattaaatgattttctctgtcagtattatcggaaaacattactttctatttgcaaagaaatgaaaatggcaatctaacccaggggataccaggtaatttgaaagcaaatgt

SEQ ID NO: 706784 - DNA, 583 bp, Homo sapiens
ataggtaaatacaagacaatataaatgaattttgtaataactctgtttttttctcctacttacttgactttataaagcaacatgtataaatttgtgttgatgttcatacaktgtataaatataaattattgtctaccaagatcttcactgttttaaaaaatgcctgcaggcatagcttttttttttcccccttttccaagttaagtcagtaccctcaagcagagctgcagagtcctttatccttatgtcctgcctttcctcctgggaagaatccctgaaccactgcaccagagctggagccagggacctgcttttatctgagtgatgcccctgctctgtgagatagttctaggaaggggtggcagctcctggtcctcttggattgcccattttggagtagaaaatatatttgaggaaataattgtcaaaattttccagatttgttgaaagatataaatttataaattcaagaagtttcatgaattccaaatggaataatctcaaagaaaaccacctctaggcacatcttattgaactgctgaaaatgaaaagtaaagaaaaaattttagactgatcattccaa

SEQ ID NO: 706785 - DNA, 583 bp, Homo sapiens
ataggtaaatacaagacaatataaatgaattttgtaataactctgtttttttctcctacttacttgactttataaagcaacatgtataaatttgtgttgatgttcatacagtgtataaatataaattattgtctaccaagatcttcactgttttaaaaaatgcctgcaggcatagcttttttttttcccccttttccaagttaagtcagtaccctcaagcagagctgcagagtcctttatccttatgtcctgcctttcctcctgggaagaatccctgaaccactgcaccagagctggagccagggacctgcttttatctgagtgatgcccctgctctgtgagatagttctaggaaggggtggcagctcctggtcctcttggattgcccattttggagtagaaaatatatttgaggaaataattgtcaaaattttccagatttgttgaaagatataaatttataaattcaagaagtttcatgaattccaaatggaataatctcaaagaaaaccacctctaggcacatcttattgaactgctgaaaatgaaaagtaaagaaaaaattttrgactgatcattccaa

SEQ ID NO: 706786 - DNA, 2011 bp, Homo sapiens
gccattgcactccagcccgggcaacgggagtcaaactccgtcgggggtgggggagggggagaaaagaacactgtactcatgaaataagaattattttcaaaggaattagaatgcaattattttcatggtcaaaaacagttgtgcttacagtttttagactggattacagagcaggaaggaaaacatggaaagtgaaaaaccgtattatttgcaaacacacattgcttcttcacggaatcgatccaagtctcttaaaattttggtctagactgcagtgttaacatttgttaagcttataaatagtaagcagaggaaatagccgaggaaagcacggatgaggtgcggaaagaacagagttctagatcaagtgccaacattaaaattagattcagggaaaccactaaattcttttgacaactgaacaggtttaatatcttatagctggtaaaagcttacttacttgaaagttcagtaaaagctcacgtgtaactctggaagtccctggtaggttttcacaaatatgcacggacaaatgagaccatcaaattaatagtgaacacttctacgtaacaggccctaagaacccaggccctcaacaggacacacgtgtgaatgcttggtcacaacgactgaccagaagaatcaattttccttcccaatcatcctttggcctgggtttggatatgacatacttctctaggctggggctaacaaggctgtgtgatgagtggacaaaatacacgtcacataaccatagtaagaaggtgaagactggagccttaaaaatcagccggcccaactgccagaagaccattatatttacggataaagaaagagaaacaaagtatttgtaactgtgagcgggactaagtgcctgtaacagtttttttctccctcttggtgggaaggcaaaaccaccaccacaaaagaaaagcaaaggaaggtctcagtaacaattcgaagcaccttaacactgaggaactctcagcctcaacgagtgaaaaccccagagaataaacgtacccccgccccggacagacctactccgcacccagcgctgccacctgtctgcctctttctccttcctaacaggaaccgaaatcctcacctgatcttggcagtgccggtggataaaatcccggacggtgcaccgacccgaggcacaccgcaccgccttgcacccgaagccagggccgcgaatccacaccagcgccgcggcctccgccatgtcaccgactacccgaacctcaagcctctctgagacaccaggcgccgcaactcgcccggcgcctcttgatgacgcgagcatcttccaacgccccgcccctcacgcttccgttcacccctcccctcccctggggcgggtcaagtgagccgggcggcggggcggtgcgggctgggggaggggaacaggaaaggcctggcggaggcagataaggcggcagagcacggggcgaggcgttgctaggagaagttgctagggcggggctcgagggaccggctataaaaggctggcgctgggttaggtttcgagcttcctggccgtaagcgataaggctttaactgagaaccaccttgtgctgtaggctttggcccttttcctcacatctgtgtagttatttttgggtcgcggagaattgtggcccgagaaggctctgctccttgagagtgtggggagagaagctgcagtcccggaagcggttttagggggccgcttccttggcctagaggagctccccaacccgagggggcaagggaaacgacccccaggaggcccytaaacagtggccggcgtggtttctcctccagctttacagagccttctcttcccctccagaaacagccaacctccgggtttctgcctgccacgcacggtttattcttatttccgcctgtttgtgcactgcgttatctccacttcagctctgttttcaaaatatttcacagcaagtgggctcttgtgaaaggcagtgacaggagtgacgtttatagtcatgctgcttcaaaaaac

SEQ ID NO: 706787 - DNA, 1401 bp, Homo sapiens
tcagctgggagtttccttctccctgtggccctttcccagttccactggctgccctccccaaggacctctgtgagataaagtcaggaatggtttccctgggcttctctggggactgggagtgcctacagggatcttcccactgcttctactactttcatattttgcttggctctctaaaatgatttcagctctaggtaaagtgaaatccttctcctgtgatctggatttttaggttccgcagtaggtatgtgtggtcacaagctgactttyccccccctctcacattttaggcactggtagttttttggctgtctcacggagtttgcagtggcaagctacttctttcaaagggtctgtgaattcttttgtttttcctggtatcttcctgcagtagttcttggaggaaaagctcatgacatgagtttctacacattgttctgtccatctgagtgagagctgcaagttagtcctgcctcctatctgccttttattattattattattattctgatctccttctttcagttttaaataataggttctctcacttgtctagagcagtctatctacccatgctctgtaactgattccttgctgtctcctccaggacatggctctgttggttgctttctcttcctttctactatcaccttccccatagaccatatataaatccctctaaaaaaaaaaaaccaaaaaactgaggaaaaggaaaataaatacttcccctcatcaaatatcttcttgtagttgctattcttcttctgtttttagcaagtgtctcccaacagcctacattcacaatttctacttgctctcgctttgtcccactagtcaccccacagcaatacctctttgcccaagtagctcacactattgaacccattccagtaaaataactttaatgattttcaaaatgccaaatttagtaaatgctttttagtgtctgtgtgccatttggcattaccgtccatttccattttcattctgtgtgacttctgaaataacgctttctctttatagtttccccttgcttatggcttttctttcctcgtttcctttgttggatctgctagctgtagctactccttaaatgttaatgtttctgaagattctgtccctggcccacttttgtcactgggcatgataatcctcatcaacattatcctacgttatcttggagtttcagctacaatcatatgctgatggcattcaaactcctgcctccagccaagacctcatttcagtttcagatcccacacatttatttaacaaacatttaagtagtgctttctacattctaggatctaagctttgcaaatgctagttcatttaattcccattacaatcctatgaagttggtatataggaggaaaattgaggtactaacataagactaaa

SEQ ID NO: 706788 - DNA, 1401 bp, Homo sapiens
atgcaatttgttttcttgacattataacagctacattttgatactgatgaaattatagtagatcagtatttgaggcattaattaaaattttgatgaggtcaagttttccgtcacacaaacagtccaaaataaaaatcatattttaaatactgtgataatggggttaccaagaccacatcttaaataatgattgagattatttcaagataattttatctaagtagcaaaattaagttatttgagtgaacgttttatttcctattttcttcaggtttaataatactacaaatattgagtgatgcaaaaaaaaaaaaacctgaagaagatgactgaagtaatagctgccatttatgaaatatttaattatatcccaggtactgtgctaggctctttacatgaattaactcatttactactcacatagctctctaacgcaggtacttttatcattattttatgttacaggtaaagacactgagacaaagaaagatatagcaacctgcccaaggttttacacatagcaagtggcagaaatggggtttgattcctgactcaccacacccaagagcagcactgtccaatagaactttckgcaacgatgaaaattctctacctgttgtcggatatggtagccactagccacatggagctattgggcacttgaaatgtggctagtgccacatttattattaattgaattcaatttacatttaaattgccacttaaatagtggcaatttaatcactggacggcacagttctggagactgtaaacttggcctttgtgctttgttaaagcttcagctgcttttctacagtattttgtctttccaaaacgggaagggtcagctctcagtcatgtagtggtctctctagaacagcttcttcaacctttgagcattactgcttcccccatccactaaggagccttttagacatttttttttttttaatgttaaccttgtgatggttaattttatgtgtcaacttgactgagccacaatgtgcctaaacatttggtcaaatgttattctgggtgtttctatgagggtctatttggataagattaacatttaaatctgtagactaagaaaagcagattgtcttccctaatgtgggtggcctcatccaatcggtgaaggcctcaactgaacaaaaaagctaaccctacccgcagcaagagagacgtctcctgcctgaagtcctttaaactgggactttggctcttcctggttctactgtaggctgtgggccttcaaacttgaactgggacagcagctttgtgaatttggggcttgctaccctccatgatgagccaatcaattccttataataaatgtccctcactctctctctccgtatgtgagatatttcgcattctttttcacactaaaagtcttca

SEQ ID NO: 706789 - DNA, 611 bp, Homo sapiens
ctctgttgcccaggctggagtgcagtggcatgatctctggtcactgtaacctgtgcctcgcaaattcaagtgattctccaccctcagcctcccaagtagctgggactacaggcgtgcaccactaaaaaataacaaaayttttttagtagagatggagttctcactgtgtagaccaggctggtctcaaactcctgacttcaggtcgtccactcgccttggtatatgtacagtttttaaattgccatttttctattatcttagcatcctaaaactataaaaaattaatacattttaatattaataataatataatacttttaaataatagattacatatacgcttaaatttctgttgtttttccgactatagtctactctcctatattacttctcccaccaagttaaacagtcaaaattctttatcctacctctacatttatttgatatagtgcatgtagtcagtgatatgatattcattgattattcactgatttaaataattcagtccttgaaatttcaacaaatgcaggccttgtcttcagttgaatttgtaggcttatgattaaaaaatggatcattctataaactctatatttttaaaaaatatgaca

SEQ ID NO: 706790 - DNA, 640 bp, Homo sapiens
ggagaccacccctgtaggtggggtgactctaccactctggtctgtcaacagaatagtttttatgggaccctcatacgggtcagggactctgttatgtgctgcaagggatttgcagggagcaagagagaggtcctttcccgcaaaagacttacggtcagcccctaagcttctcggtgaagggaagagcaacattgaacatccgtcttggacaccttgccccttggttcttctatctcacgagtgcctcgcagtggctctgcctgtggwcccttactcatgttctctggaccagggttgttaaccatagcaggttagaactgcccatttattctaaatacaacagccaactaccatctttatttcaaccctcacttcccaccacttcttctctagtctcaaaatgcctttcagcataggcaggaaatatgacagaagaaagtcccagtcgaacaaacaataaccgaaaatgctctttgttgctgggccttggcgatcaaagccctgcacatgtttgccagctgtagttcagatggtttctatttcactcagcattaattttttatgaaatctgtggcccaggggcccataagcggcttttagttcttcattctatactgtctggtctaattgccaaggcatg

SEQ ID NO: 706791 - DNA, 1082 bp, Homo sapiens
cactggcttccaatatatctgtcaatttttwaaaaatcttcaatgaacagaaatgaaaatccctggtgaataaggtgaccttatggtattgtttactttgaatacattagagaattgctttgagtctgtacctctcattcatcattgaattccctgggtcattttagaatcatagaaatgactttcattcttagaaataccttgactttaactttaatggttttctaaaaaatctttttagagttggtaatttagtactttactctgttggactacagtaacactcttcattaatataaatcagtggattctcccaaagttgtcaccccgagagctcctactaattgatatgcgttacaattggaaaggttgcaaggaacaccggaggcttctgcctttttctgctgttccaaactgagaaatttcattcctgatatgaatcatagaaagagacaataacacttttaaataaaagctgatagggttggagacccagaagctctggatggagactcaagtccatgatggaacctacatctggcagtggtcaccacctggggaattttgacctctaggcatctgtgggttagtaatgcaggtaggctgttgtcgcttttataaaagaccagatggaagttgtatctttacccccacaaagtgacaccgaatcatattcagtgtggtcatactcattatctggtagagatgattaccaccaccgccaccatcattagaagttcccattggcagttatataaatctgacacaagaatggggtaacaaggtattattacataatcatgatttgttttgatagatgaactttttcaaaaattaaaatccatatgggtaaatgtgaaaaagttccttggtgatttagaaatgccaaggacaatgcccattgagcacctgggtcctcagatgtatctacgaccgttcactccaaaaaaagaggtttaagctgctttataaaccaaaggatgggttagatattgctttgtaattaaaatttttcttaataaaactgttacgaaagtaccttgtgactggtctgtatgatcaaggaataaactttagaaata

SEQ ID NO: 706792 - DNA, 1082 bp, Homo sapiens
cactggcttccaatatatctgtcaattttttaaaaatcttcaatgaacagaaatgaaaatccctggtgaataaggtgaccttatggtattgtttactttgaatacattagagaattgctttgagtctgtacctctcattcatcattgaattccctgggtcattttagaatcatagaaatgactttcattcttagaaataccttgactttaactttaatggttttctaaaaaatctttttagagttggtaatttagtactttactctgttggactacagtaacactcttcattaatataaatcagtggattctcccaaagttgtcaccccgagagctcctactaattgatatgcgttacaattggaaaggttgcaaggaacaccggaggcttctgcctttttctgctgttccaaactgagaaatttcattcctgatatgaatcatagaaagagacaataacacttttaaataaaagctgatagggttggagacccagaagctctggatggagactcaagtccatgatggaacctacatctggcagtggtcaccacctggggaattttgacctctaggcatctgtgggttagtaatgcaggtaggctgttgtcgcttttataaaagaccagatggaagttgtatctttacccccacaaagtgacaccgaatcatattcagtgtggtcatactcattatctggtagagatgattaccaccaccgccaccatcattagaagttcccattggcagttatataaatctgacacaagaatggggtaacaaggtattattacataatcatgatttgttttgatagatgaactttttcaaaaattaaaatccatatgggtaaatgygaaaaagttccttggtgatttagaaatgccaaggacaatgcccattgagcacctgggtcctcagatgtatctacgaccgttcactccaaaaaaagaggtttaagctgctttataaaccaaaggatgggttagatattgctttgtaattaaaatttttcttaataaaactgttacgaaagtaccttgtgactggtctgtatgatcaaggaataaactttagaaata

SEQ ID NO: 706793 - DNA, 1082 bp, Homo sapiens
cactggcttccaatatatctgtcaattttttaaaaatcttcaatgaacagaaatgaaaatccctggtgaataaggtgaccttatggtattgtttactttgaatacattagagaattgctttgagtctgtacctctcattcatcattgaattccctgggtcattttagaatcatagaaatgactttcattcttagaaataccttgactttaactttaatggttttctaaaaaatctttttagagttggtaatttagtactttactctgttggactacagtaacactcttcattaatataaatcagtggattctcccaaagttgtcaccccgagagctcctactaattgatatgcgttacaattggaaaggttgcaaggaacaccggaggcttctgcctttttctgctgttccaaactgagaaatttcattcctgatatgaatcatagaaagagacaataacacttttaaataaaagctgatagggttggagacccagaagctctggatggagactcaagtccatgatggaacctacatctggcagtggtcaccacctggggaattttgacctctaggcatctgtgggttagtaatgcaggtaggctgttgtcgcttttataaaagaccagatggaagttgtatctttacccccacaaagtgacaccgaatcatattcagtgtggtcatactcattatctggtagagatgattaccaccaccgccaccatcattagaagttcccattggcagttatataaatctgacacaagaatggggtaacaaggtattattacataatcatgatttgttttgatagatgaactttttcaaaaattaaaatccatatgggtaaatgtgaaaaagttccttggtgatttagaaatgccaaggacaatgcccattgagcacctgggtcctcagatgtatctaygaccgttcactccaaaaaaagaggtttaagctgctttataaaccaaaggatgggttagatattgctttgtaattaaaatttttcttaataaaactgttacgaaagtaccttgtgactggtctgtatgatcaaggaataaactttagaaata

SEQ ID NO: 706794 - DNA, 982 bp, Homo sapiens
agtgagctaggattacaccactgcattccagtctggctagaatgatgaggctggtcagctagaatgtaggagactgtcagttctgtctcaaaacaaaaaacaaaaactattgctgctatatcatacaaaagtaatttcaggtcagtttgtatagggaaaaaagctacctccttaaagtcagacgaaatacttttatagggtataaattttatcagtgctaattctttttatacttaaaaccttaagccaaaatcactacactatctttttaaaataagcgaatcatgttaaggaatacctatcaataaaataattgtaaaagagtagaacacagtatcatttcaaaagcttcaatcttttattcagagaagaygaactcaaagtctggaagttcatgtgaatttaaaaaaaaaacaacaaaaaacccttatttagctccacaatgtataagtatgacagtgctcagtttaccaaataaatatatgtgctactgatttgaggcatctttaacaaaattaaattaattttcttcagattttattgaagtagcagtaatccttcagcatataaataccaaccagtgggaaatgacgagatgttctcatgtcagcaattatccagagagcattcgtattttgcaacataaaactgattagagactatactttgtggttttatgaataacagaattgctaaaaattccctgtatctgctgggtgggatggctcatgcttgtaatcctagcactttgggaggctgagatgggtggatctcttgagctcaggagttctagaccagcctgggcaacatggcgaaaccccatttctactaaaaatacaaaaaattcgctgggtgtggtgcatgcacctatagtcccagctactcagggggctgaggcggggggatcacttgagcccagggaggctgcagtgagctgagattgtgccactgcactctagcctgggtgacaaagcagagattg

SEQ ID NO: 706795 - DNA, 687 bp, Homo sapiens
acaagtcctagacctttctggcctcagtctccccatctggaaaatggagctaaccacagtctcttcatcagactgaatgttcacaggagggagggactgtcagggcttccaagtacagagagaggggacgggtaccatgagggcaggattatgggggtccccagggcctcccccacaggtaaagccccacccaaagccagttctgcccaaggcctgctccaagaggacccctgcaaggcagggtgagtggagtccttcctggggagtgcccagtgcccacacactcccttctagagaaagaagacagcactgtgcacaatgagaccaggggacccggggtgtgtgggggccaccaggtggggcacagcacaccctccactgaaccctgagccatggggaccctgagcgctcccagccctcctgacacctgcttccccttgccacatgggccctggcagtgggaatggggcgtctgccggagcctctcctgggctgtgccaacctccctatgcccagmcaaagcccccctcccccggcctccggggaaggggtgggccagtgagggagctgacaaagggagccagtggggctgtgcctggggctcgtgccaccccactccccgacctgcccacagtgcccacatccccctcctgccacttggccggctggggcgcccggcaccgttgc

SEQ ID NO: 706796 - DNA, 575 bp, Homo sapiens
  misc_feature 390, 391, 392, 393, 394, 395, 396, 397, 398, 399, 400, 401,402, 403, 404, 405, 406, 407, 408, 409, 410, 411, 412, 413,414, 415, 416, 417, 418, 419, 420, 421, 422, 423, 424, 425,426, 427, 428, 429, 430, 431, 432, 433, 434, 435, 436: n = A,T,C or G
  misc_feature 437, 438, 439, 440, 441, 442, 443, 444, 445, 446, 447, 448,449, 450, 451, 452, 453, 454, 455, 456, 457, 458, 459, 460,461, 462, 463, 464, 465, 466, 467, 468, 469, 470, 471, 472,473, 474, 475, 476, 477, 478, 479, 480, 481, 482, 483: n = A,T,C or G
  misc_feature 484, 485, 486, 487, 488, 489: n = A,T,C or G
cgtgggcagggccaaataagggaataagagctggccatcggagccagcagcggcaacccgctgggctccccttccacactgtgggagctttgttctttcgctcttcacaataaatctagctgctgctcactatttgagtccacaccacttttaatagctgtaacactcactgtgaaggtctgccgcttcattcttgaagtcagtgagaccacgaacctaccagaaggaacaaactccggatgctccacctttaagagctgtaacactcacctggaggttcgcagctccttgtagtcagcaagaccaagaacccaccagaaggaaccaattccggacacaatgtgctggaaaggtaggatgccmtcacattataattggacttatgttatnnnnnnnnnnnnnnnnnnnnnnnnnnnnnnnnnnnnnnnnnnnnnnnnnnnnnnnnnnnnnnnnnnnnnnnnnnnnnnnnnnnnnnnnnnnnnnnnnnnntcaatactctttaactataggaaaagggtgctataggaagaggaaaagaggagtgtgaggcagggaagctgaaacctgtcttccct

SEQ ID NO: 706797 - DNA, 2644 bp, Homo sapiens
tttactaaaaatacaaaagttagctgggcgtggtggcatgtacctgtagtcccagttacttgggaggctgaggcaggggaatcacttgaacccaggaggcggaggttgcagtgaactgagatcatgccactgcactccagcctgggtggcagagtaagactttgtctcaaaaaaaaaaaaaaattgttggtaacttacaacaaaataaaaaaccactgtggccaaacaagttgtatatatatataggctggagtgaattcatggactgccaatctgtgacttctggttatttgagttgaggaattacagaattgccaaattctgtcatttggctccatggcagggtctacctgtcctctgtcctctgcccattagaacaggtttggataggtctctaccagggagttttgatcttttctgcrgctgcagccaacagccagacatcctctaaatgtcacccgctggtcacaacgacggaaagccaaccgggggtgcagctagacaaattgatgtaaattcatttccacaattggcaaagccaaccaaagcacatggcccactgacagtgatgtggcagcaaagtcacttgaacatgtgaagaccacgtggggtggctattgttctttctgggcactaattaatcttgtgggtgggtaagtaactgtgttgtgctcctccagatggccgcagccagtgagttcaggggagatttatataactgatcaaacagagagcaagtcacttccctcgagcccccaaatccacttgaggccacacacccagcctttcataactgcaggctttccaccatgtgaacactattcagaaactgcaaaggccccccagttaaaggagtgacttctgcatgtcatttcatatgtagaagatgatggttcctcttaagttcccgggatgacaggtgacatcagatggggtcaccggctggtatttagggcagaacacagctgtcaaggatattgggtagagggacgaggctgttaagaacagtggattgcgagtgatagcctgtgggcttccttctgttgttagctcagattggccataaagctgctttgagtggctgtgtttccatcactaattagcatgccgtgggagctgctttggcattgccatagagaggtttcagggctgctgcttggcattttttttttttttttgagacaatctcgcatcttgctctgttgcccaggctggagtgcagtggtgcgatcttggctcactgcaacctccatctcctgggttcaagcagttcttgtgcctcagcctcctgagtaggtaggactacaggcacgtgccaccatgcctggctaatttttttgtattttggtggagaccaggtttcaccatattggccaggctggtcttgaactcctgaccttgtgatccgcccgcctcagcctcccaacgtgctgagattacaggcctaagctgccaggcctgacctgctgcttagcttttaagtaactaccaggatctgtggtagtggtgaagcgtgctttgcataagcctagggatctgttgtataaactccactactcctgcttctgatcaggggtgtcagggggtgagggaattgcataacatttaagggagcatcaacccttccccccatgcatgggcttcttccggaaagggcccatcagaaccaccaccccccaccagggaaggggtgttatttatttatttatttatttatttatttatttatttatttgagatgaagtctcgctgttgtcatccaggctggggtgcagtggcacaatctcagctcactgcaacctccacctcctgggttcaagcaattctcctgcctccctcccaaatagctgggactacaggtgcccgccaccacgcctggataatttttctattttttagtagtgatggggttttgccatgttggccaggctggtgtcgaactcctgatgtaaggtgatccgtctactaccacctcccagtgactacaggtgtgagccactgcacctggccaaaaagtctatatagtcttagaaaaagctgcaggctgggcatggtggtacacacttgtagtcccagctacttaggaggctgaagcaggaggattacttgagcctaggggttcaaggccagcctgggcaacatagctagaccccatcgccttaaaaaatgcagaagttagccaggcatggtggtgggtgcctgtagacccagctacttgggaggctgaaatgggaggatcccttgatctcaggagtcaaagctgcagtgagctgtgatcatgccactgcactccagcctgggcgatagtgtgagcccccatttctaaaaaagaaaaaaaagaaagaaactgcagtagataatgtataatggaagacaataaaagaaggaagatgaagcgtttttccccagggagttaggctgtcagtgtgtctgtctgaaaccttcccagtaagtcagtatttctagtgcatgcctggtagaattaccttgctttgtcttctaattcattcactcacaaattaatatatgaattcctattataatccagtccctcagtcagatgctaggcacacgtgatgagtgaaatacagtccctgcagtttggagcatacataaagaagagtataaaaactaaatgtcagcc

SEQ ID NO: 706798 - DNA, 2644 bp, Homo sapiens
tttactaaaaatacaaaagttagctgggcgtggtggcatgtacctgtagtcccagttacttgggaggctgaggcaggggaatcacttgaacccaggaggcggaggttgcagtgaactgagatcatgccactgcactccagcctgggtggcagagtaagactttgtctcaaaaaaaaaaaaaaattgttggtaacttacaacaaaataaaaaaccactgtggccaaacaagttgtatatatatataggctggagtgaattcatggactgccaatctgtgacttctggttatttgagttgaggaattacagaattgccaaattctgtcatttggctccatggcagggtctacctgtcctctgtcctctgcccattagaacaggtttggataggtctctaccagggagttttgatcttttctgcagctgcagccaacagccagacatcctctaaatgtcacccgctggtcacaacgacggaaagccaaccgggggtgcagctagacaaattgatgtaaattcatttccacaattggcaaagccaaccaaagcacatggcccactgacagtgatgtggcagcaaagtcacttgaacatgtgaagaccacgtggggtggctattgttctttctgggcactaattaatcttgtgggtgggtaagtaactgtgttgtgctcctccagatggccgcagccagtgagttcaggggagatttatataactgatcaaacagagagcaagtcacttccctcgagcccccaaatccacttgaggccacacacccagcctttcataactgcaggctttccaccatgtgaacactattcagaaactgcaaaggccccccagttaaaggagtgacttctgcatgtcatttcatatgtagaagatgatggttcctcttaagttcccgggatgacaggtgacatcagatggggtcaccggctggtatttagggcagaacacagctgtcaaggatattgggtagagggacgaggctgttaagaacartggattgcgagtgatagcctgtgggcttccttctgttgttagctcagattggccataaagctgctttgagtggctgtgtttccatcactaattagcatgccgtgggagctgctttggcattgccatagagaggtttcagggctgctgcttggcattttttttttttttttgagacaatctcgcatcttgctctgttgcccaggctggagtgcagtggtgcgatcttggctcactgcaacctccatctcctgggttcaagcagttcttgtgcctcagcctcctgagtaggtaggactacaggcacgtgccaccatgcctggctaatttttttgtattttggtggagaccaggtttcaccatattggccaggctggtcttgaactcctgaccttgtgatccgcccgcctcagcctcccaacgtgctgagattacaggcctaagctgccaggcctgacctgctgcttagcttttaagtaactaccaggatctgtggtagtggtgaagcgtgctttgcataagcctagggatctgttgtataaactccactactcctgcttctgatcaggggtgtcagggggtgagggaattgcataacatttaagggagcatcaacccttccccccatgcatgggcttcttccggaaagggcccatcagaaccaccaccccccaccagggaaggggtgttatttatttatttatttatttatttatttatttatttatttgagatgaagtctcgctgttgtcatccaggctggggtgcagtggcacaatctcagctcactgcaacctccacctcctgggttcaagcaattctcctgcctccctcccaaatagctgggactacaggtgcccgccaccacgcctggataatttttctattttttagtagtgatggggttttgccatgttggccaggctggtgtcgaactcctgatgtaaggtgatccgtctactaccacctcccagtgactacaggtgtgagccactgcacctggccaaaaagtctatatagtcttagaaaaagctgcaggctgggcatggtggtacacacttgtagtcccagctacttaggaggctgaagcaggaggattacttgagcctaggggttcaaggccagcctgggcaacatagctagaccccatcgccttaaaaaatgcagaagttagccaggcatggtggtgggtgcctgtagacccagctacttgggaggctgaaatgggaggatcccttgatctcaggagtcaaagctgcagtgagctgtgatcatgccactgcactccagcctgggcgatagtgtgagcccccatttctaaaaaagaaaaaaaagaaagaaactgcagtagataatgtataatggaagacaataaaagaaggaagatgaagcgtttttccccagggagttaggctgtcagtgtgtctgtctgaaaccttcccagtaagtcagtatttctagtgcatgcctggtagaattaccttgctttgtcttctaattcattcactcacaaattaatatatgaattcctattataatccagtccctcagtcagatgctaggcacacgtgatgagtgaaatacagtccctgcagtttggagcatacataaagaagagtataaaaactaaatgtcagcc

SEQ ID NO: 706799 - DNA, 767 bp, Homo sapiens
agacagtctgaatttacaatcaggaaactggaaatagagatttaccagcttcagcatgtgtccctgaagcttaaaaaaataaaaataaaaaagatttactagggatcttcgtcatgggtactaaacacatctcatttacttttgaatttggaattgttacaagtaaatattttgtattgctgcactttattttttaaaacaattccctttcaaatgttagaaatcatagattgaggaaaacactttcaaaaagaatgtgcaaccacaaccagctcatgtaacacaaatcgggtttggtgtaagaacacagcactctaactcacccatgaccaaaccaaagaacagcaactaagagatcactctgaatgagcgcactctgttctgctgacatatcagctctaacacagaaagggagaaaagaagttctcctgaataactgtgactatttcactgtgacacttacattatgtaataccatcattctccttgtaaatttctcagaatttcatggattaacagactcataaaacttgaagagcatttctacctcgatgttaatggtaaagatggatttgaatttatttagcaatatttaaaaaaaaactaggtcacagtaaattgaaccaaggaagactcagtgtctaaatggtaaataaataataaactggggccatggatgagtaaaaaacttaccctaacagataaaccatccatgattaggtcaattgcttagtttactctatttggttaattgmatatttatcata

SEQ ID NO: 706800 - DNA, 622 bp, Homo sapiens
tcaataaaaaaaaaaagaacttgtttggcggttcccctgcatttgaagtgttcacaagcatctgatgggagcaaataggaatcttcccttgaagaacatactttaaacactggcctcaaagaattttaacagataaagttcctgaaatgaatgacacacacacacacatgtgcacacacatacacatgcacacaacacacacacgagctattataaatgaggatcaaatcaaatgagaaatcataatgaagattttaaaatattttgaaccaaatgtgaaagcattataaaaaaatccgcagagctcaaaatacacctgcacaatggctatggacagatgtgttgtcctcacaactcctttgtgcccaagcacatcttacccttcttcttattgctgcaatctgcataaatttggtacacaggttacaaaaaatccaataaataaaagacatagttgacaagacagctacagagacaaagatatttttggaattacattcagagtctatggctctttcttccttttggtgggcgaggggcacacttcctttaaatgtcctcattagaactgtcacaggttggaamagcataaggagtcatgacaactaaatgcaatgtggga

SEQ ID NO: 706801 - DNA, 1759 bp, Homo sapiens
tagcagaaatttgctattctatgagagggaaaggaaagtcctcccaaaaaacagagtggcagagaacaagcagcctgcaggcagtgtgtggccaccaaagtgagctctccacggtcatatcttttttggtcccatagtatattctatctagaccaatactgagcagccaccagacatattcaccaatctgttgatcatgataactgcaacatttaatggagaatttataacccaggatcttatccttcagctattaagttgagatatttcatacattgaaatttgtgttggaaggcctttgtgtctcataatcaaaaaataaaaaatatataaaactatatgaatatatataaacaattacccaaataggcaccatgatcaagtctataacaaaagagaagcattttatttctttatttccctaatgcaggagcacgctctatgatataggcgcaagtcacagaataaatgttttaatgtctcttcctttctgccacttaatttgcctaaattttacctgtcttgcttaataaaacacatgtaataacattgttaccttccaagggacttatgtaaattaatgaatatggctgtaaaacattttgtaaacatgaagtgttacataaatacttacaaattcctcaaatgtgctcattatattgcccattttgaaccttaatatttacttaaaactctacatttgagatttccccaaggaagaaattccaacttttcttgcctgtagctttatagacttttctttaaataagcaaagtccaattcaataggacatagaactaggaataaacacaactaaccaaaaaccaggaagtattcacagatgctctaagcctgcaaatatagctaatcacattcattcagcatttacactgcgaaattactatagaaatgtagtaatttacagaaaataaagcagtaaaacttaaaggttcacaatataatgtcattactgtcaaattctctgcttcaacagaagaccgtattttctcactaatcgaagggcagattcctatgaaagctgaaaaaaaattttatatctgagcaagatttgagtaatttagcttctattactctgattttatacattttttgaatgaatcacttcaaatcatgctacttatgctttacatagacagtctgaaaccattaccaacttgaaaacctagtttctttttttttttttttttaaccttttaaatgtacagagctttatgtatgaaactcaggtaaattcagaatatcagcaaataaaatcacaaagcatgttggtcttactgttagtcttgcagttccctaataaaaccctaaaattcacataccactgactgcatgacaacatctcatgctgactctccaataatttccaccagtcaaatacaccacacaacaactaagatcacactcaaatttcaattatttaccttgkgaatcatttttcttgcttccacttcctcactgttgggattctctaactcaatggtataagtacccttgtcactttggtcatcatcattatccttttcagaagtagcagaagttgcttgattttttaacattttatccatctcctggcttggtctgtgcccaagactccctgaacctcttaataatgcagtttgtaggaagggtattgacaccgatggctcctctgatttctgttttaacagtttcccatgtggaacaccatgccccactctgtgatgcacagagctagtctgtaaagacaaagaaaccactt

SEQ ID NO: 706802 - DNA, 651 bp, Homo sapiens
atctacaaagtaatcacaagatacttacatggtgtagaaactatagtttttagaggtaagaaagcttagggatttagaggccatttagtctaattaatttttttttttttttttagagatagggtcttgctggagtgcagtggcacaatcatagttcactgtaaccttgaactcctgggctcaaatgatcatcctgcctcagcctcctgagtggctagtactacagttgtataccaccgtgcctggctaattaaaaaaaaawatatatatttttttgtagaaatggagtcttgctatgttacccaggctggtcttggacttttggtctcaagtgatctccctgcaccagcctctcaaagtgctgggattccagctataaggcactgtgcctggctaacatgtttatttaagaggtgaaaaaaaaatcctgagctatagcgagaataacttatcttgataacaaaatgtgcaggattagcatagatctggagttgtaagttctagtcttggctctgtcaactgttaacagtgtaacctctgttaatacacttacactgactgaattttagtttccttgtctgtaaaataagagggctccattagatgaactctaatgtacgtgcaattggaaggcatataacttgtcctgag

SEQ ID NO: 706803 - DNA, 741 bp, Homo sapiens
atagttcaacgtacacaaatttgttttacacacaaaattatttttaaaaatttaccttatttcactatcattgcccaagaaaaacatctgttactatttatttcactgtaattttgaacctccctatgttgttctgaagccattcaacttttgtaagaaaaccattaatttatttttataatttcacatctttctaaaaggactgtcatctcatcataactattctgtttattagccatatggccttgggaaaattacttaacctctctaatcctgttcacctctcaagactccagtaagtttccaatgaaatggcagacatagacatacttcawaaattataaagtaccagataatatacataatgtcttaggaaatacaactatcaattttgtaaacaaatatcttccttagggttgacctatttgctaaaacatgtcattgtactcctttttcagtcagttatatcctgtaattgagacaaataagtgcataattttacatagtataagcagccctagccttcttacaactcacacttacaccgcttgacaaactgctcccaagactgatatttaaccagaaaccatttgtaggccctaacagttatttgtggttggtatttattatgactagtgatttatttctgtcttaatgggcagctgcatattttctgattatagacagacatgccatactggttgctgaatattttatatgtcaccttgatcacacacattt

SEQ ID NO: 706804 - DNA, 604 bp, Homo sapiens
aaaaatgaggcagtaccaagtgccaggaactctgacttcagactgagggtacacaggaatggaagacacacacaggtatatataattcttacacatacgaggggtgataagattgagggacttactagaaagaaatgggaactggaaataggcaaatgtgaggaaaacttgtctaatatattacgtcattacctatctcactgaggtctggttaccctctgtccttccttaccaaaaatgttcaatttattctgttgcaagatatcatctctggggacttactactaggatgaccatatgtctcatttcagcaggcaggggcagacctagtttcctgcataatttactaagagcacccttttcactctcaaaattgttctggtttggataagaaattawaaagtcatactttttatctcccatttcataatgaaagccaaagagaagatgaggcttgcctaagggaaatatttactttataagtaaatttcctggtccatatctttaaagtgaaggttctgcctgtacttggacttgcccttattagctagtaggaagatgagacactaccacgttttggaaggcttgggccattctcctttgc

SEQ ID NO: 706805 - DNA, 1239 bp, Homo sapiens
tgtaaaagattctctggagaggagtgtaagttcatcataaaatgaaatcattttgtataatgaatgatatgatcagaggaacatccatatctcgagaatctttagaaacaaagcagcgtaatataattttaacatatttaaagttaacttgctctactgtttgtacacaggaagggcctatataggcatacatgaatatacaggtatcctccattccacgccagacactggtgaaactgtgcatatagcaatgccacgaacaggtaattggtggctagatttgttgtacttgattaacttgtttaacattgggtatatttcatcagaaaaagcagaaatagaaaaattggcagcaagatatacaaatctggtataaatcaagttcacacataatgactgaatttgagccatacccccccccccaccccacacacacacaaattttctcttggtgagataacctggacccaatcaaatgtagaaagaacctcttttgttctaatgagaagcacatatgaaaagaggtatacagcaagatttagaatggaacaacaaaagttctgtgcatgaattcaaaggccagacccaatgatctgaccactgttctcagtgagattgctgttctgattcatgaggaacacccaggactataccaggcaatggcatataatggttttttacacaagcacaggcagatgctttaggattctccaccagaggagagaacccccagaaaagaacctggtctcctaccttaagcatcttagacagtagacctttaygatgaacctcactgttgttcagtcaagtcagactgagggtcttgacatcagtcatgagcaaatgggctcttaccatcatcctgaacgattctctgcaggcaatcagccattagactcctaaggggtcttttgggaggcaagccaagctgatgaggaaacataaccgatatgtccacaactgaagtgtgaattaactatcaaataaaagtaaaaaaaaaaaaacacctttaactttcaaataaaagtaaaaactccaaaataaggatgctgatagcagcaataactacttaggaacaaggactatgatacaagaacaggcaacagtcgtgatgtgtcagttactggactaagtatattgcatagtttatcctgctgtactttgcagagtaacctaatgagataggtatttttattgtccctcttcatagacaaggaaattgaaattttgagaggttaa

SEQ ID NO: 706806 - DNA, 1366 bp, Homo sapiens
aaaaattagccaggtgtgatggatggcacatgcctgcccagctactcaggaggctgaggcatgagaatcacctgaacctgggaggcagaggttgcagtgaacctagattgtgccactgcactccagcctgggccacagagtaaaactgtgtctcaaaaaaaaaaaaaaaaaaaaaaaaaaaagatgtagacaaaatatttaaatatcaatcatattatttcatgtaaaactgtgccattgattcaactatacttggtagcatgtggatttttaagaaatattttttaaaatgaagtaaaattccatttcttaaataagtgacttttttttaaaaaaagcttttttccaaacctttcctttggctctgagagkctggacatgtagatgcatttttcttctgttctgaagtggcatcaataaaagccttcccattctttatggcagcctttatctgtactgctttgctgggcccgaatgattccagtggggcttgttagcagtgggactggtaccctgaatggtctaatgacctctttattggttgaggcctatagggcagcaacataaaacaaatgaaaatgatgaaaaattgataaaattgataattttgcctttcttctatcatagaagctcgttgggggccttacagccagccacacagtaaattgaccacatttgtaacgctgattgtgatccaatgcatgcatagttggagtatccccagaaataaggaaataataaaactgaacaactactgaaacataatttaagaaagttttaactaaaaaattaaatttcatacaaaagtgatactttgtatgtagacagaaaaaatagaatagctaataagacatatctactaaagttattggacttcagaattaaaggaagaatcctttggataggcagacaaaagtatcacacgactcaaagggtgaaatagcaggcaagcagacttctccacagcaacatttgttataagagaatggaacatgggaaagaatgtttagcttcactaataattaaagaaatgtaatataagataaggcaataaaattttaaccagatttgcaggctttaaaaaattataatgtgcatcgtaggtaagggtttgtgggaagagaactctgaaacattgagaaggactataaattgtgaaaacccttctggaaggcaatacagtgacaataagatttttaaagaatgctttaaaaatcttaaaattctttatctttagtccaattatttcaacttgtgagaattttaaggacagttatttacaaagccaaaaactatttatatacaagaattggggagggggtaacagggagtaggtgggactacaggcacgcgccatcacacctgg

SEQ ID NO: 706807 - DNA, 3803 bp, Homo sapiens
  misc_feature 1880, 1881, 1882, 1883, 1884, 1885, 1886, 1887, 1888, 1889,1890, 1891, 1892, 1893, 1894, 1895, 1896, 1897, 1898, 1899,1900, 1901, 1902, 1903, 1904, 1905, 1906, 1907, 1908, 1909,1910, 1911, 1912, 1913, 1914, 1915, 1916, 1917, 1918: n = A,T,C or G
  misc_feature 1919, 1920, 1921, 1922, 1923, 1924, 1925, 1926, 1927, 1928,1929, 1930, 1931, 1932, 1933, 1934, 1935, 1936, 1937, 1938,1939, 1940, 1941, 1942, 1943, 1944, 1945, 1946, 1947, 1948,1949, 1950, 1951, 1952, 1953, 1954, 1955, 1956, 1957: n = A,T,C or G
  misc_feature 1958, 1959, 1960, 1961, 1962, 1963, 1964, 1965, 1966, 1967,1968, 1969, 1970, 1971, 1972, 1973, 1974, 1975, 1976, 1977,1978, 1979: n = A,T,C or G
attccattcttttcattgtgctgtttttgacgaatggtgtatttctgtggtccattaaaactgtgatcctaggtatttattccccatcattcaatttcattgtacatgtttcttattaaattttattaaggcaacttctactgttttagtaaattggtttataaattctagtagagatttgaaacatgcttcaaagtgttacatagaatcaaattacaatgaaagaaaaactaggccgggcgtggtggctcacacctgtaatcccagaactttgggaggccaaggcaggtggatcacgaggtcaagaaatcaagaccatcatggccaacatggtgaaaccccgtctctactaaaaatacaaaaattagctgggcatagtggcgcatgcctgtagtcccagctactcgggaggctgaggcaggagaatcgcgtgcccctgggaggcggaggttgcagtgagccgagattgcgccactgcactccagcctggagatagagtgagattctgtctcataaaaaaaaaaaaaaaaaaaaaaaagggaaatgaaaagaaaaactatatatcattcacataatgttactaagtaactaacactttgggcaaaattcgtatattttaatttttgaatgcttttttaagctgagttacaaatgttctcaattaaaaacatttctggatatatgttctttccttcttcagttataaaagttgtgagagtcagtactctgtcaacccagagctggccacgatgtcttactttcatccatcagaaggtgtttcagatacatccttttccaagagtgcagagagcagcacatttttgggtaccacttcttcagatatgagaagatcaggcacaagaacatcagaatctaagataatgacggatatcatttccataggctcagataatgagatgcatgaaaacgatgagtcggttacccggtgaagaaatcaaggaacccggtgaagaaatcttattgatgaataaataactttaattattttgtcatcaaaagacctttctttatgtcttctgttaatgtcatgagtttgaaactgccgagacaaacattctggtgtcttaaaaggaggacagactcaatacaaattatctctcggttataaaatttaaatggaaaaatacacaagaagataatttaaggtgtgagaaactcatcaagtaaaaacattcctggagagtgactttgaaagatattttctctaggctggttcactttaaaacaaggacatttagatatttaccttccccaggggcattttgagaacatcagggaactcaccactgcctatgcgccccctcaccaccgctgaagcaaaaagaacacacctgttcatgttttattgacaaaacagttgtgccatcaagagatgaaactaaattaatggtaggaactcttagcattcttgaactgtttaaaagtcgtcaggggttgctctcacatgacaaaaggtaagaaagaaaagatacttttccatttcttttcttttcttttttttttttttttttttgagagggagtctcgttctgtcgccaggctggagtgcagtggcgcgatctcggctcactgcaacctctgcctcccgggctcaagcgattctcctgcctcagcctcctgagtagctgggattacaggcacacgttaccacgcccggctacttttcgtatttttagtagagatggggtttcaccatgttggccaggatggtcttgatctcttgacctcatgatccgcctgccttggcctcctgaagtgctgggattacaggtgtgagccaccgcacccggccatatttttctatttctaaagtatccataatcgtttgagacaacacagtgttccagaagaagagagannnnnnnnnnnnnnnnnnnnnnnnnnnnnnnnnnnnnnnnnnnnnnnnnnnnnnnnnnnnnnnnnnnnnnnnnnnnnnnnnnnnnnnnnnnnnnnnnnnnatttcaatttacaaagacagaaaatagggataaagtttcctttttagaaattattttcggctgggcgcggtggctcatgcgctgtaatcccagcactttgggaggcccaggtgagcagatcacgaggtcaggagtttgagaccagcctggccaacatggtgaaaccctgtctctactaaaaaaataaaaaaaattagccacgtgtagtggcacacgcctgtaatcctagctactcaggctgaggcaggagaattgcttgaactcgggaggcagaggttgcagagagctgagatcacaccactgtactacagcctgggcgagagagcaaaactccatctcagaaagaaaaaaaaagaagaaattagtttcaagtggagggatttagcgacatgcatcatgtcttttctggatatgtatggatatgggagaagaacttagggcatgtttcattgccctcttcaattcttaccataccaatagctttcatttactgagtacctactttataataggcactttagaacattgtatcacattaaattctactatcttatgaaaggtgagtttattttacagatcagaaaacagaagttcaggtaaatcagataaattgcctaagagcacctgctgtgatgtgcttccaatctgaggttctctccatgatccatgaaggtgaatagtcagacttgcagcaaaagtctttaggatcaacacaggcccagcacccaagacacataaggttccttaactcaggtgttctttcagctcttgggaaactgttttcctttcctttagcttgggtatctataattcttcttcctcacgagaataaacacacattttactctcacctgccacttcccctactatccattgttagagtccttcactcccaaatttcgccgcagactcccgcccagtctcactcaccattggttgggaaagctacgaagctccgcctttgaatagtgatgggctataaaagacggcacctttgagggaaaaggcagtaggtcaggcgctcacctttgcctgctctctggcaacagtgctcacagtttctgagccagtggaggtggcctggagcagcagcccatgctactctctgccggttattttgccatttctctgtgcccttttgacagctccagggatcggtgccagcatttgtactgccagttcaggcacctgcagatctggtggaaaagtgagggaggtgattgcagttgcttggagatgctccaggtgcaaaggagttgtgttgagtccacaggtgagaaagggacatgagaatatcaggtgggcttggagcgaggttgataaccaactattcccacgttttctctccacccctccttaggaggtaccaagaattttcctgattggaaaggggtggaagagccacttttcaatcatgtaaaaagtagtagtagtactagtagtagtrgtacttgtctttggtactaaagtaaagcattgtacaaagttgagtacagcattactctggctacaatatctaaaatggccaaaagagatatgttagctatatatttttaaatgggctactcatccttagaccgttggcatagtttgccttgtaaagtgcagtgaaggtattttgagggggatggaaggggagtgggcacaggaagaatgtcaggaggtactggtatgtgtggtctcttttcctccctctcctgctctaaaagtgagaagagggtctcacagccagtgctggttgggagaggtcttcttgtttctcactgctgaccctctatgccatccataactaaaccttcattttctgaacaggttttctggacc

SEQ ID NO: 706808 - DNA, 599 bp, Homo sapiens
ctactctaggtaactataatgtgaagccagaatacagaaccactggtttacctcctcagtgcatcctatcctcctggctctagtgattgcttcagaaataggaattcaacattacctaacagagggaracctggaccccaaacttttgtctatttggaagaggaggaaaggaagacaaagttctctttttctggctagatgtgaaactaaaaagatgtaaagtttggagattctgtaaccccgaggagcatgagaggtgcacagcctgtgcagagagaggcaaaaagatgggttctggtgaaaatgttttaaactatacgtgaagccaacatcaattctggacttcgaagctctctgagccagtacattctttttttggcttcagatgattgggatgggaagagggctgtcttttgttttttgttacttggcagcaggaactgtcctaaccaaaacactgccactggcaaattcataccaaaaatctagtttcccaggctggtctccacagaaacatagatcagtcagagttatggatttttttagggctagaatagaactcatcaagtttctagtataaaacacttattttacagatt

SEQ ID NO: 706809 - DNA, 2067 bp, Homo sapiens
atagggagtggcattggatctcaggacgatccttatagggatggctgaaaatacaggtgcgagcctttgtgaggcaggatagagtctgaggcacaggaccatgccaggttagtgagagtctcccagaagacccaagtggatggcagtgatgtctggagcccaaggcagtcacataggatttctaagatcatgactaaaagggatagttccaagaaagattgaggaaaaatgctggtcatgagatcaggaatccagaatgactttttttctatcagatctataaccatccacgatacttcatggagaatcactcctgagcttgatgtattcctgcatcacaacctgtaccacacaaactcatccccttcctggcagagctctgagtatactcctctgtctccatagtttggatcagaaaatgtagattccttcctgaggaccgcctgtctcatgaaggaggaggagaaggtggcacaggagtctttttaaaaggattttaaggtgatcatttgagccataaagaaaccaagtttttattcttcaaggcaaaaggctttttcaagccaggtgatgaaagtctaaattgctctacacagaagaacaggaggcacgtctccagatagatccaggtgggcacagtcttagtgaggggtagatatatgagatcatccgtatgggatcccagaagccaaaagactcacaggaaagggagttttcaaaccccatcatttcaaactcccagcaaaatattgccatagaaaagagttttccaaagtcaatccattactggctcagatattaatagaaaatcaggagtcaagaaaaggaagaaggtagagattttaaagtcaggcctggttttaatttatttgtggttattctaactagtaagtgaaacacactgcctgtctggtgccctgtcccaggcataaattgctcacccatcagaaaggaattaatttttttcaagggtgctaccttaaagccattagtttagcaaattaactgatattcctagaaaagctccttgcttgtgccaataaatatttaccgagttagtgacacctctaacagcacccccaaatcgctgggccacttccaaagggggagcagcttactttcaggaaatggattactcacttgtggaatgagaccaacacccaggctactcagtttcaacacactttaaaatgcaaaagggaactttcctgcctcaagctttcaaaccttttccagatggaccgaggcgggtgagcccattgtggtgcccaacaggcctggcttaggctggggctgcacacatctagctgtgcctcccatccctgccctgcacaccgtaccatgaagggggttacagacttccagtgggttgctgataagaggcatccctgagggcctgccctgtttccattggccagacacccccgcccccccccccaaccagaaacgggaaacctatggaaagggctcagctgggtgccgccccctcccccagatgctgttgttagtttcacttctcagctgcagctgcccacagctgtctggggatggagcagcagcaaggtagtagggtggtggcatctttttattcttccagacctgggcctttggcctggtagccagagtgggcaggcagcaggcctgctctgtgcagcgtttgacttgggggttaagccgggtgcctcagggcgggacctggaaggagaagctgagcgcagtccaccattcagttctgggtaccaggttttcaaagaggcattaagtgtagccagaggagggtggccaggaagctgcaggggcctggaaatcataccacctaaagattgttagaaaaaactggagactgttagcctgaaaaagatttaggtgaatggctgtcttcccctgaagggagagtagatttatctttttgtatttttttatcataacataaaatctgccattttaatcatttttaaatatacagtcctgtggcattaattatattcacaatgttgtgtgaccatcacagctatcaatttctagaactttatcatcatyccaaacagaaactctgttcccattaaa

SEQ ID NO: 706810 - DNA, 2315 bp, Homo sapiens
tccctttattggagaccagagggtaaaaaaagagaggtagtcagcaagagagaaggagcccaccccttccccaggcttacgcatttgatctgtcccttccagaactccaggttgaccatggcagaaagggctcagattccccttccagtgcttcttgccaaaatctgggaaataggaaccagagtaagagaggtcaacccactctctctctctctctttttttttttttttttttgcattgcagtgacttgtagaccattaaatgagtcacagctaatggtgataggatcttctgtttgtaaagctactgagctgctccaaccttgtacctcattgctgtggccagggacctgtcagtaattcagaaaaacaaaccacgggatttttttttttcctttataagtctatgttaatgcagaattgcagtagtgcttcctttctctctcctcttctctttgatatccaaagaaacctttaaaccctttcctctgcatctatttaagggacatgaaaataccactgagaatctctaacagtgttttaatcctgataacagatttgcatacaggtgataaaggccttttgtgtagcataaataaattcctccattgccttgtgaatctaccctcttctaaaagatattcatcaggagatagatttccaaattacttatgataggtacaaagaggatacgtgcatgctatatttttagactccacttgtacaagggctgggaagcccttaggcaaagatgcacattcagagacacactagtaacaattttagatggtgaaacagtaaccactcatgctttggggactagcmtgctgaagggaggctctgagaacatcctgtttgctggcattaatagtcctgaggtttgctgtttccgatcttccccttgtgaatgatcagtgttgacataggaagctctgtactgattcccctcccttcacggaagcctggcacagaaagcatgcccatgactgcccaaccactggttataagggagcaccggactgaaaaaatggagcttgtcaactctgggaatgaggctgacaagaagctgctcccctggcacattccttgaatcttcctcctgcttaggcctgtgtcctctccatcccacccccatttcattgatggttccagggctgagtgcccagagtgaggggatgtgtcttaatgctgatacaaatgggtctttaaaggtatataacaggcagcaaaagccatgtgtcacttgggtacgaaggggatgtatgtcctctttctacttcagagttttcaggggactgtatcacaattttggagcactagcaaaacccacttctgactttatgctacatggttatgtgtttaagcagctgagccccaggtgatgcgtagcaggtgaggctcaaccctgctgtaggtagactggcttggcatctgtcaatcggcatcaaaatagctgaaagaccaagggaggctgagacagccgttgcttttaactagcttctttccaggtgaagttcagtgtctgtttccaagaaagcctgtgttgcggttctagttggtaactgtggggaggaagcattggcctttgtgtttgaagggtaaggaggatcctatagaagggccattcaccaggagaaagatcttgtccaaagaagaatgctgattccactgtctggtttttggacacttattcttcttccttttactttgttttctttctttccttttctttttttttttttttttttgaggcccttatgcacactttcaacattctcccaaagtaggtcaaggtatgctcattgagtgctgccattttgaggtgagaaataaagataacaggttttttaagagaaatgagagaaaagttgaataaatgccctatccccattttgggacaaaagccaaaatattgcaaaggttaaggaatataccatatctaagcctctgtgattcctttcattagaattggtgagaactgtctcctcagagcctattcagtcagaaaaaaatggcacagacaagatctcatatccaggattttctttataggcccaaggggtgcagccagaaaacaggttatttgatggcctgctgtatttccaccttctctgacctattgaacttcccttcttccaagaacttccttggattgggattccaagtataaagtcaatagcaagttaaatggcaaaaaaaaaaaaaaaagtttgaaggaagaaacattatagatgatgaaggattctatttgtgggaaaagtatatttgcagtttagctgacaggtcagacagaaaaaatgtccacacccaaaaac

SEQ ID NO: 706811 - DNA, 2315 bp, Homo sapiens
tccctttattggagaccagagggtaaaaaaagagaggtagtcagcaagagagaaggagcccaccccttccccaggcttacgcatttgatctgtcccttccagaactccaggttgaccatggcagaaagggctcagattccccttccagtgcttcttgccaaaatctgggaaataggaaccagagtaagagaggtcaacccactctctctctctctctttttttttttttttttttgcattgcagtgacttgtagaccattaaatgagtcacagctaatggtgataggatcttctgtttgtaaagctactgagctgctccaaccttgtacctcattgctgtggccagggacctgtcagtaattcagaaaaacaaaccacgggatttttttttttcctttataagtctatgttaatgcagaattgcagtagtgcttcctttctctctcctcttctctttgatatccaaagaaacctttaaaccctttcctctgcatctatttaagggacatgaaaataccactgagaatctctaacagtgttttaatcctgataacagatttgcatacaggtgataaaggccttttgtgtagcataaataaattcctccattgccttgtgaatctaccctcttctaaaagatattcatcaggagatagatttccaaattacttatgataggtacaaagaggatacgtgcatgctatatttttagactccacttgtacaagggctgggaagcccttaggcaaagatgcacattcagagacacactagtaacaattttagatggtgaaacagtaaccactcatgctttggggactagcatgctgaagggaggctctgagaacatcctgtttgctggcattaatagtcctgaggtttgctgtttccgatcttccccttgtgaatgatcagtgttgacataggaagctctgtactgattcccctcccttcacggaagcctggcacagaaagcatgcccatgactgcccaaccactggttataagggagcaccggactgaaaaaatggagcttgtcaactctgrgaatgaggctgacaagaagctgctcccctggcacattccttgaatcttcctcctgcttaggcctgtgtcctctccatcccacccccatttcattgatggttccagggctgagtgcccagagtgaggggatgtgtcttaatgctgatacaaatgggtctttaaaggtatataacaggcagcaaaagccatgtgtcacttgggtacgaaggggatgtatgtcctctttctacttcagagttttcaggggactgtatcacaattttggagcactagcaaaacccacttctgactttatgctacatggttatgtgtttaagcagctgagccccaggtgatgcgtagcaggtgaggctcaaccctgctgtaggtagactggcttggcatctgtcaatcggcatcaaaatagctgaaagaccaagggaggctgagacagccgttgcttttaactagcttctttccaggtgaagttcagtgtctgtttccaagaaagcctgtgttgcggttctagttggtaactgtggggaggaagcattggcctttgtgtttgaagggtaaggaggatcctatagaagggccattcaccaggagaaagatcttgtccaaagaagaatgctgattccactgtctggtttttggacacttattcttcttccttttactttgttttctttctttccttttctttttttttttttttttttgaggcccttatgcacactttcaacattctcccaaagtaggtcaaggtatgctcattgagtgctgccattttgaggtgagaaataaagataacaggttttttaagagaaatgagagaaaagttgaataaatgccctatccccattttgggacaaaagccaaaatattgcaaaggttaaggaatataccatatctaagcctctgtgattcctttcattagaattggtgagaactgtctcctcagagcctattcagtcagaaaaaaatggcacagacaagatctcatatccaggattttctttataggcccaaggggtgcagccagaaaacaggttatttgatggcctgctgtatttccaccttctctgacctattgaacttcccttcttccaagaacttccttggattgggattccaagtataaagtcaatagcaagttaaatggcaaaaaaaaaaaaaaaagtttgaaggaagaaacattatagatgatgaaggattctatttgtgggaaaagtatatttgcagtttagctgacaggtcagacagaaaaaatgtccacacccaaaaac

SEQ ID NO: 706812 - DNA, 1115 bp, Homo sapiens
tttaaataaacgtgtgtgcgtgtgtgtgtgtgtgtgtgtgtgtgtgtgtgtgtaaatatgccttaaatatttggggaagtatatgtaagaaagtggtaaagtgggccaggcgcagtggctcacgcctgtaatcccagcactttgggaggccgaggcaggcggatcacctgaggttggaagttcgagaccagcctggccaacatggtaaaacccagtctctactgaaaatacaaagttagccgggtgtggtggcgcatgcctgtaatcccagctacttgggaggctgaggcgggagaaccgcttgaacctgggaggcagaggttgtggtgagccaagatcacgccattgcactccagcctgagcaacaagagcaaaaactgtgtctcaaaacaaacaaacaaaaaagtggtaaagtggtggctttggggaaaagaactgggcagctggggatggaaagggagagagacttttcaaggcatatccttttgtgcttttcacattatatgcaagtgcatatattacctattcaaataacgtgaaaagtgaaagaaaaaaacaaattttaaaaragcccctgcttgaaacactcagtttgccagaatctgcttttcttttgctaaggtggtcaaagttctgtaaggaggacacatttttcttttgcagatgattttgctaaaaaaaaaaaaaattcagagaaagcatctaatgactttgaaagaacaccagaataaacataatggattttacattctgatagttacacaaactcctcaccagtttagagttacaccttctaccattaggaagtacataaagtcagcctacatgcaggagacaaagattttcattctgccatgaaagtaaagaatttcattaaatatctctgatgatagcagctgcctggcttacttgggagcagaggtgaaggtaaatgtttccttaattattttgtgatgtttgaattttgtgctaaccacagaattaccagtttttatttattttttttaatttgagcatttaagacagtgtgattacatggaactacaaggtgaccatctcacactcctataatcactcccagcagcacctttgagttcaaagggcaaaggtgatag

SEQ ID NO: 706813 - DNA, 1115 bp, Homo sapiens
tttaaataaacgtgtgtgcgtgtgtgtgtgtgtgtgtgtgtgtgtgtgtgtgtaaatatgccttaaatatttggggaagtatatgtaagaaagtggtaaagtgggccaggcgcagtggctcacgcctgtaatcccagcactttgggaggccgaggcaggcggatcacctgaggttggaagttcgagaccagcctggccaacatggtaaaacccagtctctactgaaaatacaaagttagccgggtgtggtggcgcatgcctgtaatcccagctacttgggaggctgaggcgggagaaccgcttgaacctgggaggcagaggttgtggtgagccaagatcacgccattgcactccagcctgagcaacaagagcaaaaactgtgtctcaaaacaaacaaacaaaaaagtggtaaagtggtggctttggggaaaagaactgggcagctggggatggaaagggagagagacttttcaaggcatatccttttgtgcttttcacattatatgcaagtgcatatattacctattcaaataacgtgaaaagtgaaagaaaaaaacaaattttaaaagagcccctgcttgaaacactcagtttgccagaatctgcttttcttttgctaargtggtcaaagttctgtaaggaggacacatttttcttttgcagatgattttgctaaaaaaaaaaaaaattcagagaaagcatctaatgactttgaaagaacaccagaataaacataatggattttacattctgatagttacacaaactcctcaccagtttagagttacaccttctaccattaggaagtacataaagtcagcctacatgcaggagacaaagattttcattctgccatgaaagtaaagaatttcattaaatatctctgatgatagcagctgcctggcttacttgggagcagaggtgaaggtaaatgtttccttaattattttgtgatgtttgaattttgtgctaaccacagaattaccagtttttatttattttttttaatttgagcatttaagacagtgtgattacatggaactacaaggtgaccatctcacactcctataatcactcccagcagcacctttgagttcaaagggcaaaggtgatag

SEQ ID NO: 706814 - DNA, 2356 bp, Homo sapiens
ctctgaaaccagctatgcatcttcccacgaagtgactaagagtgaaatatcaccgtgttaacagttaggagagtgattttctggcccaagatacattttgccggcattagagactcaccggaagagatcttgaatgatctccagagaggtacctgggaccctttctcgaaggttaccttgcaggcttggaaggtagacaagcatatttgtaaatgatgggaagtatttgctgatttgggctttaaaggaatttactttcatattcctccagtggctcttttccagagcactataatccatgcttggaaactattctttatccatcatatccttgctgaagagtaaagtttgccccacagctgtctgacagccaagtcaccccaatttcaatgggagcagcacatgtttgtccagagctagaatttggctctttcacgctcaggcctaaagggcctgtttaatatattatgtaagaaagaatgagatcatataaatagtcctggctcctaccttgcaccaaaagtcatccttatttggtgcttccaaagttagaaaacaatacaggcaataaaaacattctcaggatcatgaataaataatggctaccttgtactcaaccatgggttttgtgayggcagcgtcagcatagcgggctgcctgctgcttttagcactggaaatttggactggtttcatttaacctctcagctgcttagaaggaacactctggaagtccactgaattctcacctgctttcgggatgcccaggcatcactgggacaaagctgtctaccgaagccctgggtcctgtgggcaggggtgggagggctctgcagcccttaggagggagcagcagcccagccccagcaggccatctacagggccttaggcagctgagtctaagaagagagagcctagcacttcttccggtcatcttattgactgagctgaagggagatcaaatttcggtcttctgtctgtgtaaatagtaatggctatcgctcttaaacttcagacctcagctcatggatctggattggtttatttttgagagctgaactctggaggccactcttccctactttctgaagcgtttgatgcctctatctgagcatggaacctactctgagtcatcagacgccacgcttagggcacatagaattaagtcgggggagtgatgaaaattcattcacttctctcctctgggacctaaatccattttagcattccacttgaatccaacaaggaatgccaaaatattaaagtgtggcattctcattcttttctctggaaagaagtgtttatgcaaaggaggcctaggtccctgcagagtcggcaagaagcctggcaagaggtttgtctcatttaagcagtaaatatattcagtggcagcagagatactgccaagtaagtttattccatttttagggagggaagggcaggagttttgctgctcctttaagttgctttttgcttttaaattttttgcatgaggttctctaaaaaagtaagactgtaaaagcagcttgttcaaaacttgacctcttcggcatgcccaagaatttgtgaaacaaaagagaaggcaatggataattgattctgttctctaaaggcccttctgacactggtcaggtactggtgtggtttctactggtgtagaaactggtgtagatactggtgtagatactggtgtggtttctactggtgtggtttctaccatgcaggcgtttagtctctgccagcaggaggacacagatggtgtctacctttctacagatgtctttaaatgtcaaagacatgagaagagaatctattgacattcttatcattgtgacaatgtggtagatcccttagcattacctatgccctaaatgatactcaaataagtgggctagggaaagattttattttatttttgagacagggtctcactctgtcacccaggctgtagtgcagtggcatgatcacggctcacagcagcctcaacctcctggaaatcaagtgatcctcccacctcagcctcttgagtactgggaatattaggcccgtgccatgatgcccagcgaattttgaaatttattttttgtagagatgaggtctcactgtgttgcccaggctgctctcgagctcccaggttcaaacgatcgtcccacctcagtcttccaaagtgctgggattacaggtgtgagccactgtggttggctcagtagggagagattttaaaagaaagcagaaggccaggcatggtggctcgcgcctgtaatccaagcactttgggaggctgaggcgggtggatcacctgaggtcaggagttcgagaccagcttggccaacctggtgaaaccccgtctctactaa

SEQ ID NO: 706815 - DNA, 1417 bp, Homo sapiens
ctcatccagaacttctttcaaaagaatcacaccacctaggcctcatgcaatggtgttccaggataaataagtcacttggggagaaaacaatagaatcatgagggatgggaccctcaaaattgtttgctccgtctcacatggtaaaaataagcttttccttgtaaaagggggtaaaatgtagggcatacagaatgctggaaggaggagggaacctccacacttctcagagccctgagatgatcgttccccgcagtttgtcatcaaactattagtgactgccgattgtgtctggcattgaatcttcggcgcgctcacagtatagagaccaaggacggtggactctctttcataatggcagtgtaaaccactttgcattaagtaggaataataacctttttttaaagaatgtgtcaaaataattacatttcttgttgctttcctttcttccacatcacatgagcaagcacatcagcctcacttgaacagatgaaagaaggacgttttttcagtgagggctgttctaagaggaacacaggaccaacagtgagagggcctccattccgtcatggctgactgggattttaggcactgcatgagctaattctagccaacattgtggatttggttatacctcttctttctcaggtgactaggaagccatactgtcaggaatatttgccctgcgaatgtcccgtatgatgtctgcaatgttgcagatactcctgccactagcaaattccctctactgtgttatttttcctttactaaaggtgatatcctccgaaacattcactctttaactcagaagccgaactttaaaaggggacttagtagtagctcggatgtaggtttcattattttgtgaagaattttgttcaaatgcatttgaaaatcatttttagaatttcagaataaagtccattcatgtttttcaatggtgcattcacaatacaacagatttgagcttggtgtggcctgttttgatgcaggttacctggttggcttagtttaaaattgatatcacaagtgccttaaagcgcatttcatcaaatgtttatatctaatgagatatttaggggacagatcattttttatatcttgaatggcctggtgtacaaaaatcacctcatcttcataaggaaggagaatcattctaatttgctaaagggggaacaaattattgatatcttctcatgttttctaatagtatgttagcaataaatagccttgatgttccagaaagcaaaaatctctgagctgagggaaaacaattctaccctgccgcgcgcgcgcacacacacacacacacacactcacactcactmacacacactctctcacgctcacatgcaccttcagtttttcccttgctgtccccccatatgggaggaagagaagatgtctccagaagtgtgag

SEQ ID NO: 706816 - DNA, 1189 bp, Homo sapiens
taacatttaaggccgggcgcggtggctcacgcctgtaatcctcagcactttgggaggccgaggtgggcagatcacaaggtcaggaaatcaagaccatcctggctaacacggtgaaamcccatctctactaaaaacacaaaaaattagccgggtgtggtggcgggtgcctgtagtcccagctacttgggaggctgaggcaggagaatggcgtgaacccgcgaagtggagattgcagtgagctgagatcgtgccactgcactccagcctgggcaacagagcaagactccgtctcaaaaaaaaaaaaaaaaaaaaaaaaagtaaagacttcccgttagtaatacaaaaagaactgcaatcaattgcaggcacaggcatttgcaggccaatgtctgcattctttggttgtcttcaaagtgtacctgaagtgtaatggaaggtgaaggctgtccattcctctttgggtagtttgaattgctctgtcttctttctgactgactctaacctccaacataacaagggttttcaaacttagcatgcattagaaccacctggagggccagtagaaacacaaattgctgggacccgctcctggagtttctgaatttgtaggtctgggatggagccccaaaatgtgcatgttaaacaaggtcccggccgggcgcgtgggctcaggcctgtgatcccagcactttgggaggccaaggtgggcggatcactaggtcaggagttcgagaccagtctggccaacatggtgaaaccccatctctactaaaaatgcaaaaatcagccgggtgtggtggcctgtgctactctggaggctgaggcaggagaatcacttgaaactggaaggtggaggttccaataagcagagagtgcgtcactgcactccagcctgggcaacaagagcaaaaatctgtctcaaacaaacaaaacaaaaacaaacaaacaaaaaacaacgaggtcccaggagatgctgatgctgctggtccatggaccacactttgagaactgctgccctttgtatatcaaaaggatggagatggaacaggaggtctaagattcctgtggggcaccattctcttccccgaccacaatcataaggagagtattacgtaagagaatgaccctctgtttcctaacaataacagaaaaattgacaatctgaagcaagagatgctcagacttttag

SEQ ID NO: 706817 - DNA, 1275 bp, Homo sapiens
ttggggtccattattctgtatactatatgagatgacactctctcttattaataatgatttttcttagtaattttattttatatgatatcaatgtagtcaccttcactttcttttcatactttatattgcatcaataattttgcacatctgcatttttgtatatagcatataggtatatttttaatttaaatttgattatttctgtcttataggtgaaatatttagctcattcacttttatcagaaatatggcatttttagatattcgcacatattaatttttgctttctattttaaaattttctatatctctttctttattcttcttttactcaagttattttgggttttatttatattttttttggctctgttggcttgggagctatataccttacttctatttttttagtagttacccccttccaggacctttcacctcacagatataacaaggtctgaagataatgccttaatgtcttttctatacaatagaaagacttttaactcacttaacctaaattcagcctctcatcacttacattctattttgtctaatgtctaagatttgtgctttattaaaaccttccttagaatttttaaaatatacttctttttcattgattcatgttaaaccatatttttattattttacactgataatttatttgttaagattcccctgttaagtctataaatttctttgcttaatatttttttcctttgtcacaaatattcattttgggttaatttttcctcttcttgcaatattaaaataattttagagtatgttagttggtaataaaattggctgttgtttgaaaatttatttagttctcattattgagtaataatttttgagaacacaattttgtttttacatttattttctcttacactttttatatactgtcttctggttgtccttattattattgagatgtttgttttaagtataattataatttttaagcccatattaatttttaactacttaaaaaaaacctttgccttaatgttttgcaattatattacaatgtctctagatatatcataatttcctttaccattwtagtattcattttatttcctggttctttatatttaatcagagttacagaagtcttaggaaatttcttgacaaatattataattcattaactctgtttattgctttcttctgtgacttcaattataccaacagtactccttttcatttgttcacatttattaaacctttatattttccatctacttgcctctcaatattccattc

SEQ ID NO: 706818 - DNA, 652 bp, Homo sapiens
gtgtgtgttatgtagtggagaggcaaacttgatacatttaatgctttaacattatatactgatgcattcctaattcaaagttacatcatgatatgaagaaacatacacgtgaagctattaagaaaacatttttgtttgtaaggattttgaaagttggaggatcaaataataaaactcagaatttttcctgtccaaaaaaaaaatgtagaacatgaaactcaccaaacgagagatatctgagaaattgtagtcagtccatgatttttctcccctctctgagaactatcaccctctattcaaacaaatctataagcagagtccttggtatcatgtttgtactgtgtgacatttgcctctaggccaaggctgattgtcccatgtattttttttrattttgagaatttaattttacatttttacacattcaaactcggttactttttaaatattccttttcattgtgtctttttgttcattcattttttcttagttgatgtatttcatgaaggtttattaattttttaatttgagtatccctatttctataatctttggtgtctataaatctcttgcttgttgtttctcttaactctaattgatggtgatttgttttctggttttgtgtgtgtgtgtgtgtaatgtttgattaata

SEQ ID NO: 706819 - DNA, 628 bp, Homo sapiens
ctgaaaaagtcycccacatgaggaaccccttgctgcagccaaattgaatgacctgcagcaattccttggatttggcttgcacggtcctgcctttgttcaagctgcttctcctgcttggggcacccttcctcttcaatgtttaccttcatggagaacttctatgcatccttcaagacttggctcaagtttctctaaagctaaaattgtaacaaaacacatgttgatacgttgtcagctccttgaaggtagggaccacatcatattcatgcttgttcctaccttaatatttaatctcctattattcttcctgggcttctttctattatttggccatgccatgtctcagttcaaatgtcacctctgcaaagaggcagtgtctgcagtaccgatctaaagtagcaccacctcattaacccaatcattctcttatcactctgtttcatttccactgaagcatttgccaggattagaaatgatcttatttatcttgatgttaatttgttgcccgccccaattatcccacccctcactagaatatattcctctgcccaggatataggacattgtctacttattcaccgatgtagctctagtgtctacaacagtgcctggcacaaagtagtatcaa

SEQ ID NO: 706820 - DNA, 628 bp, Homo sapiens
ctgaaaaagtctcccacatgaggaaccccttgctgcagccaaattgaatgacctgcagcaattccttggatttggcttgcacggtcctgcctttgttcaagctgcttctcctgcytggggcacccttcctcttcaatgtttaccttcatggagaacttctatgcatccttcaagacttggctcaagtttctctaaagctaaaattgtaacaaaacacatgttgatacgttgtcagctccttgaaggtagggaccacatcatattcatgcttgttcctaccttaatatttaatctcctattattcttcctgggcttctttctattatttggccatgccatgtctcagttcaaatgtcacctctgcaaagaggcagtgtctgcagtaccgatctaaagtagcaccacctcattaacccaatcattctcttatcactctgtttcatttccactgaagcatttgccaggattagaaatgatcttatttatcttgatgttaatttgttgcccgccccaattatcccacccctcactagaatatattcctctgcccaggatataggacattgtctacttattcaccgatgtagctctagtgtctacaacagtgcctggcacaaagtagtatcaa

SEQ ID NO: 706821 - DNA, 630 bp, Homo sapiens
aaacatgatgaatccatccaggaatgggagtaaaacatcttggactttccagtccacactgagccaccagctgactccctcagctgaggcctcaggcatcatagagcagaaggagcagccctgctgtgttctgtccaaatttctgacccacagaatagtgagatacagtcacaataaattgtttcagagcctttaaatttcgaggccgtttgtcatgcaggtgtagatttctggagcccctccaccctccaagactcactcattagcagattccttcccaatctcagaagggacttgggaaagataattccatgattggttaaagmcatgactcccatgaccatataatcagcttaattttaactcccattacaaagatgaagaaactgaggttcagggagggaaagtcatttacctaaggtcacacagtgcaaattcaaatccaggtatgccagattccagcatccagccccttccactgtaccagctgtcacctagttggcctctttatggagcccatggttggagctgagagagccttatggatggtctccaaaccaggccccccatgaatctcacccgccccctctccatgtgctccccgtgttttcccattggagaaatcccgca

SEQ ID NO: 706822 - DNA, 630 bp, Homo sapiens
aaacatgatgaatccatccaggaatgggagtaaaacatcttggactttccagtccacactgagccaccagctgactccctcagctgaggcctcaggcatcatagagcagaaggagcagccctgctgtgttctgtccaaatttctgacccacagaatagtgagatacagtcacaataaattgtttcagagcctttaaatttcgaggccgtttgtcatgcaggtgtagatttctggagcccctccaccctccaagactcactcattagcagattccttcccaatctcagaagggacttgggaaagataattccatgattggttaaagccatgactcccatgaccatataatcagcttaattttaactcccattacaaagatgaagaaactgaggttcagggagggaaagtcatttaccyaaggtcacacagtgcaaattcaaatccaggtatgccagattccagcatccagccccttccactgtaccagctgtcacctagttggcctctttatggagcccatggttggagctgagagagccttatggatggtctccaaaccaggccccccatgaatctcacccgccccctctccatgtgctccccgtgttttcccattggagaaatcccgca

SEQ ID NO: 706823 - DNA, 463 bp, Homo sapiens
caaaagacgtggataggaagctgcatggctaggaaacctcttctcagagtgcgtgaaaaggaagaaataaccaaagaacaagccacacctgggggcacctggtgattgggctcagaggaggggacaagttctggcccagctccatcactaaccgccggcatgagtgtggggacatcccttcccctctgccagcctcaatgaccgcaaatctcaaggaatgtccaatgagacctcagtctcaggccctattccaggctgtgggaatcctgagatgaatgaggcagtccccacctgaaaggaactcctaggccaggggagaaactagggggagaaagatgctaaatggtccatttcaatatcatgcagtaagggccaggatctggagtgaaaggaaggctggctcgacctgttttaagtggggmccatcggcactggggatgtgaggctggggggagatcattac

SEQ ID NO: 706824 - DNA, 659 bp, Homo sapiens
agttaaccttggcatgcccaaggttatacatctagttagagaggcagggtcaggattcagttccagctctgtctgacaccagaacctcagaagagtctccacccaggaggacctcagtgcagaaacagagaggcagggtgggcacggtgagacccagatagggttgccagcctgacagatttgaggagaaagaaaaggactgggaaattgggaggggatgggagaatccctttctcatcaaggcagctgcaaagrgaggaactggtggggactagaggcagtggggggcacagggagtggcagggaggcagtgccaggggaaaaggggggtccttttgagaatgtctgggacctcacaggtacagaaagaagcctgagctagagttaggggcttcagcctctagctatgcctgaagggtgctgtgacctgggcagattcctttctgttcctgggtctcagtttcctccttcgtaccatggagggtgagtccaggaactcttccaggccctcctttgggtctccagcctataactgagggcccagcccagagcagatgcctgaaaattgcttacagaatagtggcgtgagcagctgaatggaggggggtcagtggtggggcaagggctggcttaatggagtcacgcccttggatgtgatg

SEQ ID NO: 706825 - DNA, 1812 bp, Homo sapiens
  misc_feature 351, 352, 353, 354, 355, 356, 357, 358, 359, 360, 361, 362,363, 364, 365, 366, 367, 368, 369, 370, 371, 372, 373, 374,375, 376, 377, 378, 379, 380, 381, 382, 383, 384, 385, 386,387, 388, 389, 390, 391, 392, 393, 394, 395, 396, 397: n = A,T,C or G
  misc_feature 398, 399, 400, 401, 402, 403, 404, 405, 406, 407, 408, 409,410, 411, 412, 413, 414, 415, 416, 417, 418, 419, 420, 421,422, 423, 424, 425, 426, 427, 428, 429, 430, 431, 432, 433,434, 435, 436, 437, 438, 439, 440, 441, 442, 443, 444: n = A,T,C or G
  misc_feature 445, 446, 447, 448, 449, 450: n = A,T,C or G
gagagccatccagtgaattcaagggaatcatcattcccaaaaggtgatcaacaagtgctacttcccttcccaccccgtcttgcaggtgaaaaaaactgatgctcaacatcatactaacttgcgacagtgtcagaatcccaggcttccatctgcctatagagttcattcttttcctgttaccaaatgctgactcctttaattctttctgtggatttgggctctggtttctcagtctccatcagagccttgataaattggggtgtagtttgtgccttgcacaaagaaacagactgctgggcaggaagggctgaaagttagcctgtgctctacccaaaagccatgtcttctttnnnnnnnnnnnnnnnnnnnnnnnnnnnnnnnnnnnnnnnnnnnnnnnnnnnnnnnnnnnnnnnnnnnnnnnnnnnnnnnnnnnnnnnnnnnnnnnnnnnncaatgggtttttcagagaaagctgaatggataggctgaaatttgaactgcagagcgaagtattttagacttattatatgggtagttcaaaaatatcactgtttccttcaaaccacataccaattgtatatctcattccaaatcactgtacactagatgataatgattttgtaggagcctctgagaagaccattatgaattttgatgttttcagattaagtttaatcagcacccctctccccatccctaatgtaagtgttgctcaargcattcaggtgactgggtttctcacaagaacagaagcatttaaatgccttctgttaccaacccaataatgctaacctgaagccctgctttgctgttggattcagtggttaagcatcatagtagtggttcctggtaatttttccaaatcaaaagtttaagagaattaataacatgtagtaatttgatccaactttattctcttggaccagtcaagaccaattaaggagccaccatccatgccatgcctctgtttatcctaatgagaagtgcatggattgataatgaaggctggcagcttaatgtagctcaaaacataatttgtaaactctaatgaccagaatgttagccataagaatggtataaatggaactgcttctcagaatatattctgttttggtgtttctggatcactttgcttcattcactcaaggaaaaatattgccttgtacataatgcactaggtaatcatacagttgcatcttctactgaaaatgtttctctcagaatcatctgtttatgtacatatttgggttttgcatatgtaaagtcatgggatatttgagtagaaagggcttacaggctctctcatcaaattgtcttattttacagttaagattctgaggcccagagagaaaggacttaaccaaggccatttgacgacttactactagacctgggatgggactcaggcccacacatttgttccacactgagtagtttttagggcacttgaccttttatttttttggagtaccttatgttgcacaataacatttttctctgtcaggtttccagaatcttctggcctagtgccattttgtattttgcaccaagtggagagataacgtcgttggcgaagcatcctttcctctcctttgacttcttgcctttatttctgaatatccttcttgcagtgggttgaatagtggccctccaaaaaacatacttatgtcctaatccctgaaacctgtgaacatgacattatttggaaaaagagtcttcgcagaggtaattattgtaatccccaatgttggaggtaggacctggtaggaggtgattggaccacgagggtggatttctcatgaatagtttagca

SEQ ID NO: 706826 - DNA, 832 bp, Homo sapiens
tgaatgatttaaatatytgacaactaatatatatttaccaacaataagatgaaagaaaaacagaaaataggatgtaaaagacagtgttcataaaaataattattgccatcatcctaatagaaggtcttgtatattatgcttggaatttgcagtaaccattctattacatgccctacttttatagatacctctcttctttccttctcaaatcagtctgtcataaagtccctggattaattcagcctaaagcatttttgacatttcttaagtttatttgtcattagtttggcttgaaatttaaatgattttgcaatctggtctcaatttgcttttcaatttttctctatattctccttatgtaagttacagttttcctcctgtctttaaatcatatttcacactctagtttttatccatgcataaggctttacctattacttccataacattcccttatacatttcaggcaaatattttggtacttggcttgatcctccagggaacatttatttgaaattatatgtcatttagcatattttgctttttgctttgcgccttttaaaaagttattaacaactttactactcctactgtttaaattctggaagaataggttataagtggggttataatcacttttgcatttctctatcttaatactgtacacataatcactagatttacacacatatacaaacatatataatttatttgctttgcaaaaatttggtctttacattcccaccagattgcaagcttcctgaatgcaaagagttgaactgccttgttcacagttatatacctggccgctataagcatatccaggatatcc

SEQ ID NO: 706827 - DNA, 444 bp, Homo sapiens
cacacgtatatatatatgaagtaaaaactatgattaggactaagaaacacagaaaaaccaccattcaagaggttgccagatcaggctatagatggcatggtaataagaagataggctgttagatgtagttacaaaaaaagcttatttaccttaacaaaaaaaatcagtaaaaattaaaggatgtcaagacaaattatactgatagagtaagtaatgaaatgtcacaaataggaaagagagggagagagaatgtgtgactatgtgagtagaagatttcaaraaactgtgaaatgaatgacgcaataatcattgagagaaagtatactgccaagaatggtgagtttgcatagaataaaaaatgttgaccatgggtaaatgctaatggaaagggccggaggaaaggcttgaagatgctatacagagagatagtgctcctatgatcca

SEQ ID NO: 706828 - DNA, 667 bp, Homo sapiens
acacgtcactgtgttttctgggcctcaatttctttatgccttctccattctcccacttattaaggctcagagtcagaaggttattgatgcctctgtcttcataggccacattcctaaccagtttctgtcttagagtcatggcctccaaccacccctcctttccatcctggctgcccttgccagggttcaggcactcaccacctcttgccttgacactactaaggggtcctaacacatctcccatctccagtttctccccctcttccttcctccactccaccctcacaccactttcagattcaccgccttaaacacttctctaattctgtccttaacctgttcaaagcccatcagtggttccccattgcctctcagtaaaggtgatactgtgcttctcactcagccagtcccactcctctacaagctgcctcagcctctgtttttgtcccactgctcccctaaaagcaccaactctccagccagatagcacagcttgcttttcccacaccccctgtgccttctgtccccacccactcactcaccctgagttctctttctggagtgscctctacccaccacctccacctgcactccgatctctgtagagaaaaagcttttctatttgctttatgtataagaaagctaagcaaaacattattcattatta

SEQ ID NO: 706829 - DNA, 619 bp, Homo sapiens
tgagttgctgatgacgtgcagaacgtgtgtttgcccctggactgcccatgcaaaccttggtctctgagggcggcctcgttcccacccctcaccccaccccaagttggacagcccgatgaacctggtgtgtcagactgtgctctgtggctttgaacaagtaggtgaacctcttcgagccttagtattgccgttcgtgagatgaggccaataatagccagtgtacaggttgctgtgaggatgacagatgtctggtgtgcggagagtggcaccatgcttgacacatagtaggtgtgtgataaaggaaagctgctgttgttagctgacacttccctcttgcttctgttacctgatcaggtgctcccagcatctctcctyggtgggtggatccgggtcccattttacagatgggagatggagccacttgacagtgattcaccagcctgttggggactagaactcaggtctccaagtgagaggcccctcgctgggtgtggtggtacacacctgtagttccagctactcgggagactgaggtgggaggattgcttgagcccaggagttccaggttacagagagctgtgatcacttgattgcactccagccaaggtgacagagcgag

SEQ ID NO: 706830 - DNA, 927 bp, Homo sapiens
gcctttcattcgaggcaatgctctgtgattgtttataagtctcccagaactctgtccccaatcccctcttgcccacctgccatgtccagagagcgggaatcccccctagacacagattagccacaagtattgggaatttccacttactgtaagtagcaggaaaatgagaatcctgagccccaagccttaggtggggaaagaggtgaaggagatcctctgtcccccttccatctgtttccatcctttttctcttggggtcttaagtagttttccctggcagagtgtcctcccagartggacatcttggggtccctggagtcactgcactagagccaggatacctcgtgtccctcttcccttcccccaggatgggagggcagcaagggagagctgttgatgggcccggctggctagtctgagcttgaaaacacagatttcaggtcctcacttcatagccactgaaatagaatcagtggggcctgagaatcttccctttatgaagcagcctactccttctttctccttctttccctttcccagactcttctgggagaactgcagaatctctccccttcccatctactcctccccagcgtgacttccaaatgaggaaatccacctgatatgtgggatcagatatcctgggcttaagtctgtaacttcctagctgtgggactttggcaagtcacttcatctctcgaagcctcagtttcatcatctgtgagttgaccataatattccctgtctcaggggggtgcactcagggtcagatgagctaatgtcttcacagggtgctttgcaaaaggcacattttagtccaaatgctggtgactattcaagaatttcagtgccagatgtagaggtgttggtaagcccagggaaaccttctcctggcctgagcagtgagctctggagacagaaggggga

SEQ ID NO: 706831 - DNA, 927 bp, Homo sapiens
gcctttcattcgaggcaatgctctgtgattgtttataagtctcccagaactctgtccccaatcccctcttgcccacctgccatgtccagagagcgggaatcccccctagacacagattagccacaagtattgggaatttccacttactgtaagtagcaggaaaatgagaatcctgagccccaagccttaggtggggaaagaggtgaaggagatcctctgtcccccttccatctgtttccatcctttttctcttggggtcttaagtagttttccctggcagagtgtcctcccagaatggacatcttggggtccctggagtcactgcactagagccaggatacctcgtgtccctcttcccttcccccaggatgggagggcagcaagggagagctgttgatgggcccggctggctagtctgagcttgaaaacacagatttcaggtcctcacttcatagccactgaaatagaatcagtggggcctgagaatcttccctttatgaagcagcctrctccttctttctccttctttccctttcccagactcttctgggagaactgcagaatctctccccttcccatctactcctccccagcgtgacttccaaatgaggaaatccacctgatatgtgggatcagatatcctgggcttaagtctgtaacttcctagctgtgggactttggcaagtcacttcatctctcgaagcctcagtttcatcatctgtgagttgaccataatattccctgtctcaggggggtgcactcagggtcagatgagctaatgtcttcacagggtgctttgcaaaaggcacattttagtccaaatgctggtgactattcaagaatttcagtgccagatgtagaggtgttggtaagcccagggaaaccttctcctggcctgagcagtgagctctggagacagaaggggga

SEQ ID NO: 706832 - DNA, 714 bp, Homo sapiens
ggatccttggcatgaaataggagcaactgatatayccttgcttcccctggggactctcttgctctcaaaaaggcatcagccatcatctccatctagagaatatactagctgactcagcttgaccagcctgtcccaaaatgagaatctgggtaaaataagtattgaaacacttcattccttgtagattcacaaaacacattagcatattaaagactatgaagttctgcaggaaaaaaaacctatttaactttaatccaacattgccaagttttatttgaccatggaagatttttccaaaacacttacaaacagatcaaggacattaatctttcatgaaacactttagatccccagggtcctctccagctacatcattctgtgatttttttatttatgatgcattaaaagattaatctctatcagacttccatttagaaattcaccagaatgtgcaaaggcagcaggtaaaattgccgaagggtattataaaaataccctccagtgatttttgaaacttaaactgaaatatttatttaactatatatttcagtttgtatattatatatatatgtatatacacacatatatatgtgtatatatatatttgtgtatgtatatctatatctatgtatatatggcattatatccattttacagatgcagaaactgagctttagagggggtgagcaattggtccaaagccacacagcacac

SEQ ID NO: 706833 - DNA, 714 bp, Homo sapiens
ggatccttggcatgaaataggagcaactgatatacccttgcttcccctggggactctcttgctctcaaaaaggcatcagccatcatctccatctagagaatatactagctgactcagyttgaccagcctgtcccaaaatgagaatctgggtaaaataagtattgaaacacttcattccttgtagattcacaaaacacattagcatattaaagactatgaagttctgcaggaaaaaaaacctatttaactttaatccaacattgccaagttttatttgaccatggaagatttttccaaaacacttacaaacagatcaaggacattaatctttcatgaaacactttagatccccagggtcctctccagctacatcattctgtgatttttttatttatgatgcattaaaagattaatctctatcagacttccatttagaaattcaccagaatgtgcaaaggcagcaggtaaaattgccgaagggtattataaaaataccctccagtgatttttgaaacttaaactgaaatatttatttaactatatatttcagtttgtatattatatatatatgtatatacacacatatatatgtgtatatatatatttgtgtatgtatatctatatctatgtatatatggcattatatccattttacagatgcagaaactgagctttagagggggtgagcaattggtccaaagccacacagcacac

SEQ ID NO: 706834 - DNA, 2387 bp, Homo sapiens
tgacagatttgatttcaaaaacaattttaaccaaaaggtataactccaaggccacagttcaataaaggcattgaataatgtgaagaaatataggtatatttatttaatgttaatttttagattgtattacttatagcaacaaactgctaaatttaattgaatttaactgtttaattttattggaatcaaaaatttttgtagttgttcagtaaggtcaatttgtgtttttgatgaataactttcatatagctattaaaatgaggctaaactggttactgaagtagaatgcgaaaaagttaattattgagcaaaattctgatgaggtttggtttctaagattaaaagtaaaaaactatgactaactagtaactatgtagttatcaaaaaactgataatatttataaattatattgtaagaaaatttagtattttcttaaaaagtcctttagataggtttgtcataatttttttttttttttttttttttttgaggtgaagtctcgctctgtcacctaggctggagtgcagtggcacaatctcagctcactgcgagctctgcctcctgggttcacgccattctcctgcctcagcctcccgagtagctgggactacaggcgcccaccaccacgcccggctaattttttttgtatttttagtagagacggggtttcaccatgttagccgggatgatctcgatctcctgacctcgtgatccgcccgcctcggcctcccaaagtgctgggattacaggcatgagccaccgcgtctggaccataatttcttctttgtccattttgctgtctttccttggcctcactcataatgacctttttttaaacctgtttatgtatttgactctcatttaagtttctaggaacataccaatacaaagataagggttttttaaaatttatttttattttttgtttagtccttttttttttaagttctggggtacatgtgcaggatatgcaggtttgttacataggtaaacgtgtgccatggcataattcatatttgattcatgtggtcactgtatctctacaagttctattaatttcatgacagactcctttgtgtcttaaatgaaatggttcagtagttctcttatagctaaagagttcttattatatcaaggtggaactaataggacattacaaatttctagagcaaagaatctagcgaaaaatttttttaatcaacatattgaaatagrtagatttataaaattaatcttaaaaatgtattcttggaagaaacagttttagagagggttatgccttaggtttatattgtgtgcactctagtgactcagaaattcctgggaagggtctgatgactacacagggagccctcaacagttgatttgcctcaatgtttgcacgagaatttgggaacctgggaagaaagggattggggaacagtgcaggagtctctcagacactgggttccttgtcctatctcatacactgtacttgaacctaaagaaggaaaaactgctcatagaaattgtcttcaacctggaattctgtaagactctagggtacagtgagcagcattaagtgggacttaagtgaggaagaatagcattctctcttacatcagcttgtatatcacttgcttagagttttatgagtttctgggtgggaggtggtggtggtgtgcagtgcacagagatagagtgttggggccagtatgctgaatatgccatggctagtggacatggtcattcccaggagaagtattacagaagaggcaagaagacacatggctggcacctaagcttttgaaagaatagttgctcaatgggacctgtttgtgagcagtcagacaccacttagagattcccaaaacaggctgagcgcagtggctcacgcctgtaatcacagcactttgggaggccgcagcaggtggatcacaaggtcaggagttcgagaccagcctggccaacatggtgaaaacccgtctctactaaaaatacaaaaattagttgggcatggtggcacgtacccatagtcccagctactcgggaggctgaggcaggagaatcacttgaacccgggaggtggaggttgcagtgagctgagaccacaccaccgcactccagcctgggcaactgagtgagactccatctaaaaaaaaaaaattccaaaacaaattgggttaaatttaaggagaaccataggactttattagtagtgggtttcagagccagaaaaacaacaacaacaacaacaacaaaagtgtgtcctgggaatgtgactccatttatatccacatacccaaggaaaattgagttacataaaactgaaataatatagtgccttaaatggagaaactaagccctatagagaaactataagccctagagcgtttattaaatggca

SEQ ID NO: 706835 - DNA, 2387 bp, Homo sapiens
tgacagatttgatttcaaaaacaattttaaccaaaaggtataactccaaggccacagttcaataaaggcattgaataatgtgaagaaatataggtatatttatttaatgttaatttttagattgtattacttatagcaacaaactgctaaatttaattgaatttaactgtttaattttattggaatcaaaaatttttgtagttgttcagtaaggtcaatttgtgtttttgatgaataactttcatatagctattaaaatgaggctaaactggttactgaagtagaatgcgaaaaagttaattattgagcaaaattctgatgaggtttggtttctaagattaaaagtaaaaaactatgactaactagtaactatgtagttatcaaaaaactgataatatttataaattatattgtaagaaaatttagtattttcttaaaaagtcctttagataggtttgtcataatttttttttttttttttttttttttgaggtgaagtctcgctctgtcacctaggctggagtgcagtggcacaatctcagctcactgcgagctctgcctcctgggttcacgccattctcctgcctcagcctcccgagtagctgggactacaggcgcccaccaccacgcccggctaattttttttgtatttttagtagagacggggtttcaccatgttagccgggatgatctcgatctcctgacctcgtgatccgcccgcctcggcctcccaaagtgctgggattacaggcatgagccaccgcgtctggaccataatttcttctttgtccattttgctgtctttccttggcctcactcataatgacctttttttaaacctgtttatgtatttgactctcatttaagtttctaggaacataccaatacaaagataagggttttttaaaatttatttttattttttgtttagtccttttttttttaagttctggggtacatgtgcaggatatgcaggtttgttacataggtaaacgtgtgccatggcataattcatatttgattcatgtggtcactgtatctctacaagttctattaatttcatgacagactcctttgtgtcttaaatgaaatggttcagtagttctcttatagctaaagagttcttattatatcaaggtggaactaataggacattacaaatttctagagcaaagaatctagcgaaaaatttttttaatcaacatattgaaatagatagatttataaaattaatcttaaaaatgtattcttggaagaaacagttttagagagggttatgscttaggtttatattgtgtgcactctagtgactcagaaattcctgggaagggtctgatgactacacagggagccctcaacagttgatttgcctcaatgtttgcacgagaatttgggaacctgggaagaaagggattggggaacagtgcaggagtctctcagacactgggttccttgtcctatctcatacactgtacttgaacctaaagaaggaaaaactgctcatagaaattgtcttcaacctggaattctgtaagactctagggtacagtgagcagcattaagtgggacttaagtgaggaagaatagcattctctcttacatcagcttgtatatcacttgcttagagttttatgagtttctgggtgggaggtggtggtggtgtgcagtgcacagagatagagtgttggggccagtatgctgaatatgccatggctagtggacatggtcattcccaggagaagtattacagaagaggcaagaagacacatggctggcacctaagcttttgaaagaatagttgctcaatgggacctgtttgtgagcagtcagacaccacttagagattcccaaaacaggctgagcgcagtggctcacgcctgtaatcacagcactttgggaggccgcagcaggtggatcacaaggtcaggagttcgagaccagcctggccaacatggtgaaaacccgtctctactaaaaatacaaaaattagttgggcatggtggcacgtacccatagtcccagctactcgggaggctgaggcaggagaatcacttgaacccgggaggtggaggttgcagtgagctgagaccacaccaccgcactccagcctgggcaactgagtgagactccatctaaaaaaaaaaaattccaaaacaaattgggttaaatttaaggagaaccataggactttattagtagtgggtttcagagccagaaaaacaacaacaacaacaacaacaaaagtgtgtcctgggaatgtgactccatttatatccacatacccaaggaaaattgagttacataaaactgaaataatatagtgccttaaatggagaaactaagccctatagagaaactataagccctagagcgtttattaaatggca

SEQ ID NO: 706836 - DNA, 2387 bp, Homo sapiens
tgacagatttgatttcaaaaacaattttaaccaaaaggtataactccaaggccacagttcaataaaggcattgaataatgtgaagaaatataggtatatttatttaatgttaatttttagattgtattacttatagcaacaaactgctaaatttaattgaatttaactgtttaattttattggaatcaaaaatttttgtagttgttcagtaaggtcaatttgtgtttttgatgaataactttcatatagctattaaaatgaggctaaactggttactgaagtagaatgcgaaaaagttaattattgagcaaaattctgatgaggtttggtttctaagattaaaagtaaaaaactatgactaactagtaactatgtagttatcaaaaaactgataatatttataaattatattgtaagaaaatttagtattttcttaaaaagtcctttagataggtttgtcataatttttttttttttttttttttttttgaggtgaagtctcgctctgtcacctaggctggagtgcagtggcacaatctcagctcactgcgagctctgcctcctgggttcacgccattctcctgcctcagcctcccgagtagctgggactacaggcgcccaccaccacgcccggctaattttttttgtatttttagtagagacggggtttcaccatgttagccgggatgatctcgatctcctgacctcgtgatccgcccgcctcggcctcccaaagtgctgggattacaggcatgagccaccgcgtctggaccataatttcttctttgtccattttgctgtctttccttggcctcactcataatgacctttttttaaacctgtttatgtatttgactctcatttaagtttctaggaacataccaatacaaagataagggttttttaaaatttatttttattttttgtttagtccttttttttttaagttctggggtacatgtgcaggatatgcaggtttgttacataggtaaacgtgtgccatggcataattcatatttgattcatgtggtcactgtatctctacaagttctattaatttcatgacagactcctttgtgtcttaaatgaaatggttcagtagttctcttatagctaaagagttcttattatatcaaggtggaactaataggacattacaaatttctagagcaaagaatctagcgaaaaatttttttaatcaacatattgaaatagatagatttataaaattaatcttaaaaatgtattcttggaagaaacagttttagagagggttatgccttaggtttatattgtgtgcactctagtgactcagaaattcctgggaagggtctgatgactacacagggagccctcaacagttgatttgcctcaatgtttgcacgagaatttgggaacctgggaagaaagggattggggaacagtgcaggastctctcagacactgggttccttgtcctatctcatacactgtacttgaacctaaagaaggaaaaactgctcatagaaattgtcttcaacctggaattctgtaagactctagggtacagtgagcagcattaagtgggacttaagtgaggaagaatagcattctctcttacatcagcttgtatatcacttgcttagagttttatgagtttctgggtgggaggtggtggtggtgtgcagtgcacagagatagagtgttggggccagtatgctgaatatgccatggctagtggacatggtcattcccaggagaagtattacagaagaggcaagaagacacatggctggcacctaagcttttgaaagaatagttgctcaatgggacctgtttgtgagcagtcagacaccacttagagattcccaaaacaggctgagcgcagtggctcacgcctgtaatcacagcactttgggaggccgcagcaggtggatcacaaggtcaggagttcgagaccagcctggccaacatggtgaaaacccgtctctactaaaaatacaaaaattagttgggcatggtggcacgtacccatagtcccagctactcgggaggctgaggcaggagaatcacttgaacccgggaggtggaggttgcagtgagctgagaccacaccaccgcactccagcctgggcaactgagtgagactccatctaaaaaaaaaaaattccaaaacaaattgggttaaatttaaggagaaccataggactttattagtagtgggtttcagagccagaaaaacaacaacaacaacaacaacaaaagtgtgtcctgggaatgtgactccatttatatccacatacccaaggaaaattgagttacataaaactgaaataatatagtgccttaaatggagaaactaagccctatagagaaactataagccctagagcgtttattaaatggca

SEQ ID NO: 706837 - DNA, 2387 bp, Homo sapiens
tgacagatttgatttcaaaaacaattttaaccaaaaggtataactccaaggccacagttcaataaaggcattgaataatgtgaagaaatataggtatatttatttaatgttaatttttagattgtattacttatagcaacaaactgctaaatttaattgaatttaactgtttaattttattggaatcaaaaatttttgtagttgttcagtaaggtcaatttgtgtttttgatgaataactttcatatagctattaaaatgaggctaaactggttactgaagtagaatgcgaaaaagttaattattgagcaaaattctgatgaggtttggtttctaagattaaaagtaaaaaactatgactaactagtaactatgtagttatcaaaaaactgataatatttataaattatattgtaagaaaatttagtattttcttaaaaagtcctttagataggtttgtcataatttttttttttttttttttttttttgaggtgaagtctcgctctgtcacctaggctggagtgcagtggcacaatctcagctcactgcgagctctgcctcctgggttcacgccattctcctgcctcagcctcccgagtagctgggactacaggcgcccaccaccacgcccggctaattttttttgtatttttagtagagacggggtttcaccatgttagccgggatgatctcgatctcctgacctcgtgatccgcccgcctcggcctcccaaagtgctgggattacaggcatgagccaccgcgtctggaccataatttcttctttgtccattttgctgtctttccttggcctcactcataatgacctttttttaaacctgtttatgtatttgactctcatttaagtttctaggaacataccaatacaaagataagggttttttaaaatttatttttattttttgtttagtccttttttttttaagttctggggtacatgtgcaggatatgcaggtttgttacataggtaaacgtgtgccatggcataattcatatttgattcatgtggtcactgtatctctacaagttctattaatttcatgacagactcctttgtgtcttaaatgaaatggttcagtagttctcttatagctaaagagttcttattatatcaaggtggaactaataggacattacaaatttctagagcaaagaatctagcgaaaaatttttttaatcaacatattgaaatagatagatttataaaattaatcttaaaaatgtattcttggaagaaacagttttagagagggttatgccttaggtttatattgtgtgcactctagtgactcagaaattcctgggaagggtctgatgactacacagggagccctcaacagttgatttgcctcaatgtttgcacgagaatttgggaacctgggaagaaagggattggggaacagtgcaggagtctctcagacactgggttccttgtcctatctcatacactgtacttgaacctaaagaaggaaaaactgctcatagaaattgtcttcaacctggaattctgtaagactctagggtacagtgagcagcattaagtgggacttaagtgaggaagaatagcattctctcttacatcagcttgtatatcacttgcttagagttttatgagtttctgggtgggaggtggtggtggtgtgcagtgcacagagatagagtgttggggccagtatgctgaatatgccatggctagtggacatggtcattcccaggagaagtattacagaagaggcaagaagacacatggctggcacctaagcttttgaaagaatagttgctcaatgggacctgtttgtgagcagtcagacaccacttagagattcccaaaacaggctgagcgcagtggctcacgcctgtaatcacagcactttgggaggccgcagcaggtggatcacaaggtcaggagttcgagaccagcctggccaacatggtgaaaacccgtctctactaaaaatacaaaaattagttgggcatggtggcacgtacccatagtcccagctactcgggaggctgaggcaggagaatcacttgaacccgggaggtggaggttgcagtgagctgagaccacaccaccgcactccagcctgggcaactgagtgagactccatctaaaaaaaaaaaattccaaaacaaatkgggttaaatttaaggagaaccataggactttattagtagtgggtttcagagccagaaaaacaacaacaacaacaacaacaaaagtgtgtcctgggaatgtgactccatttatatccacatacccaaggaaaattgagttacataaaactgaaataatatagtgccttaaatggagaaactaagccctatagagaaactataagccctagagcgtttattaaatggca

SEQ ID NO: 706838 - DNA, 2387 bp, Homo sapiens
tgacagatttgatttcaaaaacaattttaaccaaaaggtataactccaaggccacagttcaataaaggcattgaataatgtgaagaaatataggtatatttatttaatgttaatttttagattgtattacttatagcaacaaactgctaaatttaattgaatttaactgtttaattttattggaatcaaaaatttttgtagttgttcagtaaggtcaatttgtgtttttgatgaataactttcatatagctattaaaatgaggctaaactggttactgaagtagaatgcgaaaaagttaattattgagcaaaattctgatgaggtttggtttctaagattaaaagtaaaaaactatgactaactagtaactatgtagttatcaaaaaactgataatatttataaattatattgtaagaaaatttagtattttcttaaaaagtcctttagataggtttgtcataatttttttttttttttttttttttttgaggtgaagtctcgctctgtcacctaggctggagtgcagtggcacaatctcagctcactgcgagctctgcctcctgggttcacgccattctcctgcctcagcctcccgagtagctgggactacaggcgcccaccaccacgcccggctaattttttttgtatttttagtagagacggggtttcaccatgttagccgggatgatctcgatctcctgacctcgtgatccgcccgcctcggcctcccaaagtgctgggattacaggcatgagccaccgcgtctggaccataatttcttctttgtccattttgctgtctttccttggcctcactcataatgacctttttttaaacctgtttatgtatttgactctcatttaagtttctaggaacataccaatacaaagataagggttttttaaaatttatttttattttttgtttagtccttttttttttaagttctggggtacatgtgcaggatatgcaggtttgttacataggtaaacgtgtgccatggcataattcatatttgattcatgtggtcactgtatctctacaagttctattaatttcatgacagactcctttgtgtcttaaatgaaatggttcagtagttctcttatagctaaagagttcttattatatcaaggtggaactaataggacattacaaatttctagagcaaagaatctagcgaaaaatttttttaatcaacatattgaaatagatagatttataaaattaatcttaaaaatgtattcttggaagaaacagttttagagagggttatgccttaggtttatattgtgtgcactctagtgactcagaaattcctgggaagggtctgatgactacacagggagccctcaacagttgatttgcctcaatgtttgcacgagaatttgggaacctgggaagaaagggattggggaacagtgcaggagtctctcagacactgggttccttgtcctatctcatacactgtacttgaacctaaagaaggaaaaactgctcatagaaattgtcttcaacctggaattctgtaagactctagggtacagtgagcagcattaagtgggacttaagtgaggaagaatagcattctctcttacatcagcttgtatatcacttgcttagagttttatgagtttctgggtgggaggtggtggtggtgtgcagtgcacagagatagagtgttggggccagtatgctgaatatgccatggctagtggacatggtcattcccaggagaagtattacagaagaggcaagaagacacatggctggcacctaagcttttgaaagaatagttgctcaatgggacctgtttgtgagcagtcagacaccacttagagattcccaaaacaggctgagcgcagtggctcacgcctgtaatcacagcactttgggaggccgcagcaggtggatcacaaggtcaggagttcgagaccagcctggccaacatggtgaaaacccgtctctactaaaaatacaaaaattagttgggcatggtggcacgtacccatagtcccagctactcgggaggctgaggcaggagaatcacttgaacccgggaggtggaggttgcagtgagctgagaccacaccaccgcactccagcctgggcaactgagtgagactccatctaaaaaaaaaaaattccaaaacaaattgggttaaatttaaggagaaccataggactttattagtagtgggtttcagagccagaaaaacaacaacaacaacaacaacaaaagtgtgtcctgggaaygtgactccatttatatccacatacccaaggaaaattgagttacataaaactgaaataatatagtgccttaaatggagaaactaagccctatagagaaactataagccctagagcgtttattaaatggca

SEQ ID NO: 706839 - DNA, 821 bp, Homo sapiens
tatagtcaaagataaaaatttggaaataatcagcgttaaacccacaagactggataagatcactaaggaaagagaatgtgtacagaaaagattggcaaggacaaagtcctggggctgtgcattgtttcaaggtctgagaaaggaaaataatacaatggagagggcagggatatcgttggaaaacttaatgaaggctagggaaggttagtgtttcaagaagagagtgaacggctttgttaaatgcagttgagtcaagtaggataaggacccaaaagtattcattggtttcagcaacacagaggtcgtagaaaagaacatttttagatttgaggagttgtttcttcatgaaatgattgaaattattgacatgagagaaattaagggacaaagaaacacattaaacaaccaaaagcatttcaacattccaaaagcaatcggagataattgcttcctcagaggcatgaaaaattctgaatagactgtcttcttgcagatacaaatgtaatggtaagcacaaattcaaccaaataattttgttgctataaataatcttaatacgattatcagttatttcatatgcctttttatagtgatgcgttacaactgaatagaatatccaggctaatacctaagtggtgatcagcctattgtaaacacttggaaaggaaatccttattataagctcttttataggtttccaaatraatgggaagagttttacctatataattattttccatgatctatttatgtattcattagttcaaataatcctttattaaatgtagccactgtatatgtgtattctaagctctatggaa

SEQ ID NO: 706840 - DNA, 821 bp, Homo sapiens
tatagtcaaagataaaaatttggaaataatcagcgttaaacccacaagactggataagatcactaaggaaagagaatgtgtacagaaaagattggcaaggacaaagtcctggggctgtgcattgtttcaaggtctgagaaaggaaaataatacaatggagagggcagggatatcgttggaaaacttaatgaaggctagggaaggttagtgtttcaagaagagagtgaacggctttgttaaatgcagttgagtcaagtaggataaggacccaaaagtattcattggtttcagcaacacagaggtcgtagaaaagaacatttttagatttgaggagttgtttcttcatgaaatgattgaaattattgacatgagagaaattaagggacaaagaaacacattaaacaaccaaaagcatttcaacattccaaaagcaatcggagataattgcttcctcagaggcatgaaaaattctgaatagactgtcttcttgcagatacaaatgtaatggtaagcacaaattcaaccaaataattttgttgctataaataatcttaatacgattatcagttatttcatatgcctttttatagtgatgcgttacaactgaatagaatatccaggctaatacctaagtggtgatcagcctattgtaaacacttggaaaggaaatccttattataagctcttttataggtttccaaataartgggaagagttttacctatataattattttccatgatctatttatgtattcattagttcaaataatcctttattaaatgtagccactgtatatgtgtattctaagctctatggaa

SEQ ID NO: 706841 - DNA, 1380 bp, Homo sapiens
caatgtttgctagagcagtactgtagtatgtaatttgcgcactcatgcttctaagataaagtttgaactttatattttttgtatmttttagttcctccagtcattagccctcatctaaaggaatatgttattgctgtggacaagcccatcacgttatcctgtgaagcagatggcctccctccgcctgacattacatggcataaagatgggcgtgcaattgtggaatctatccgccagcgcgtcctcagctctggctctctgcaaatagcatttgtccagcctggtgatgctggccattacacgtgcatggcagccaatgtagcaggatcaagcagcacaagcaccaagctcaccgtccatggtaggttgtttaacatgaattattttagtctgctgcactaccatggcaaagagaaaaggctaccaagagcaaatctgatggaagtcaaaaacccttaaactcagtaatccaaagtgtgtgtgggggtgtggtgtgtaggtgcacttcaaatctgttttctgtaggctgtgtttctgtgtgtttgtgcacataggtgtgtgagagagaaagacagattttattaatattgccaggatttttaatgtgttgctagtaccctcacatattgtgattagttggcttatgaagagtccgtttgtgttttgtgacttttctgctttacttctcaagcttcaagtcatcttggttcaaatgaatcatcatatgacctacattgtatgatttgactctaatgagaattaggagatctatttgattcattatattaaagtggcaaaatattacatgtatatttttataacagaaaaatatctttgtattaagacaacaaaatattgaaaaatcagcattgaaatatttttagtttttattatatattttgactaaggatagaatccacgttaatatcagtggtgggaaacaataccagattaaactgcttccagcctctattttcagaggtaattattataatgaggagtttctgccttttcatttttcagaaatttgtgaaagctgttttatttttcaagtgtattttaattttctgtaacttcatagtaacagagacaattttgagtggaaacatttttggttgaataatttagccaaaattaaaaatcatcatttatgagttttccaaataactcccctgctttcagttaatataattaaactaatcaatatacactatccatttgccttcaaataaataatactccttcttctcaaatgtctatagaaaatttaccaaaattgaccatatactaaacaaagaaattgttaataagtttcaaaaagatagaccataatttctacccaccatgcaacaaagctagaaatttgtaatgaactttgaa

SEQ ID NO: 706842 - DNA, 1177 bp, Homo sapiens
ttgataattacacaatgtatacatgtatggaaacatcacattgtactccctaaagatgcataataattatgtgtcaatgagagaaaaaagaaaaactgtgtgtctgggaggtgcagggtggggttgggtagcaaattcctgtacatcaattcacagaacatgaggagtaagaggagatgacataatgtgatcctgtacattcattattcacatatcaagtattaattattgaatatacgttatrtgacaggtatgtttctagccatcatttaactataattatgaacatgtgtggtgtggcaaacatgcaaatgcatcactaagaaagatatgatctcagccctcaacttcctccatctgtggaagacacagatactaaagaagtaattacttttcagtgtaatgaggattatatggataaaacaacattctgtgggatggtagatttcagattcgatctcctcaagcataaatctgagccctgaagagtaggactgtagagatgagtggggaattttatatacatttctcacctggaggtaatacaatttgaattgtcaatttgcactccctgaaactgagtgtaagaggaagagtagcaagagacaagacaagaactatatatgggcagatgccaaactatgcaaagctctgagaactttgaggaagtttggacctcattaccaaggcaatggaagaatcttaaggagaaatattttacagccagatttcgtttccaaaaaatccctctgacagagtgacagagtgaaaaatgaattgaagaggctgctgtattcatacagcctgtaaatgcaggggcctggtctagcatgtggcagggggagggggagagcggggagaaagaactcaggagcagaatcacagactggtgcatttctggatgaagaaaatgaaggagaaaaacaacaatgatattcttagtggaattcttaaagaacagcctgcctttaataaagttgaagagtttataagaataataatttctcaaaacagatttgaaaactggcttagaagaaagatgagaagttttagcatttcagcatatgttgaaaattaattccattaaactctgaaaagttcttcacttgaagcagtgctaccactcagaatgcaaacatcttaacttggggaaatattctttatttaattctatcca

SEQ ID NO: 706843 - DNA, 1853 bp, Homo sapiens
ctcatgcatgcacaagtgaatttgcatacacaagcatacatgtaccaccaacttgaaagaatagaatgtaaatcagtaagacaataactctctcgccaacctaggaatataactgacaccttttctatgataccttttctaagcaatttcaggaaaatggaaaaggagtggaagcatataaagtttttccctcttaatatgtgcgtaatataaattagaggcttattgtttgaattatgataatttatatagtttatatgcctatgttttatcagctgcagtataaaatgtaatcaataactcttcttgcttgatatgggattctaaaaagattataggaaaagaaactatgataatattatccatatagtataaaatatcctagagtccttgattggcaagagtaaccaaatattactgtacattataaaaccacacagaagttgattatccatgcagcaaaaaattatttcacatctgttctacacagctctttgctagattctaagattttgtaatgtgaataagacatggtccctgcacaaaataaatttattatatagaagtgaataaacaaatttggtgcttttagaaaataagatgtaaaggtataaagcatcaaggagaacagttaataatggagaaagaaagcaacagaatgatgtttgagcagagctagaaaaaatcataggaatatacctggctgaaagtaggagaaaacagcatgaacgaagacatgaaggtccaaagaggactgttagaaagacaaaagtacttctttataacagaagaataaaagtaaggaagaactgaagaagtccatccagtagaaatgggtgatgatcttggtctggaggcccttgtgtgttattctgggtattcgggatttattctgtgtaaatcccaggaaaccaacattgtttaagctgaaaggaaggattaatcagaagaagttagagatgtagagtgagttcacattttaacatttgtatatgaagttcctgtaggacacccaagtttgaaatgttctaaaagtagttagctatgagtctggggtttaggaaagaaatctggaattgaagatagagatttgaaagtcaacatcccacaatatgttaatggggaatgactcatccctgggggaaaataaatataatgaaaggaaagtggtcttagggcacaaacctgagaagtattgatttggaaggatccgtcagaatatgaggaaaattgaaaagtaattttcagaggtagaatcaaatggagtaatattacagaaatcaagagaagaaataatttcaaggattaagtaggtaacagcagaacatgttatggcaagatcatggatttagccttttgggggcacccttagcaactatttcagcagtttgtagtgaacagccctttcctgctgcattcagagtagctatgtctaaagaatttctgcgtggcaatgatactgacacagcctatactgcagtgtcatcaagcaaaggggtgagaaaacaactgccaatgtcaaggaaaaaagtgggccactaagagtcatgccactttccgccaccagcaatattagtgaagatgcaaagactccaattttagtaaatcagcacccacttctgtgctaaataccagcaataagtttgccaagacttcacatccatggtatattataaaaaataatgtgggcaggttagtagtttatatttaatacaagatgcagattagcatttttgatgcagaaaaggtatcttttatcattatgacaaaagtaaaagaagtgacagaaactcatttgargaaagatgtgtcctctatcattgtcacagaggcaatatttcttcaaacaacca

SEQ ID NO: 706844 - DNA, 2413 bp, Homo sapiens
aaatttcatcattacagatgtggaaaccaaggtatggagaggtgaaaagttttctaactggactctcaaaagctactgcatctactgtctttatccaggtcaaccatcaaaaagtcactaaatcagtatttctaaaactttgtttttattatgtgaagctcttaaacttttaattgtagacacttttaaatgtgtctgcattgcacatttactgataataatattatttatcattcattgagggtttattatatgtgttaacaactgttctaagaatgtaagccaaaatttgaaatttgcatatattagcaagtgctttttactttttcttcttttattttgttttaaacaagtgtttattcaagaatagttttagatttatagaaaatttgcaaaaacagtatagcaagttcccatataccccacactcattttcctgtattgttaacatctcatattactgtggtaccattgtcacaamtaacaaataaactttagaacattattattaactaaacttcatatattattattattgattaaactccaacagatttcattaattctcctctaaagccccttttctgttccaagtgttttagatggaaaaaatatataaggaaaatctacttttctttaatgtctcgtaacccacattaatttactgttttatcaggctttctcttcaagtatttctgtaatcccaaggggcatttatatgccacacatttatcttctggttcttgtgtctcccctccctgagccacgtcattatgaatacttcttcacctgtccccttgtcgtctggtaacatgagccagaccttccacaatatctctttaggttctggctcccactggggaagccaattcatctgctctagttggaagacaaccaatattgaaaacagttccttgtgaatcttttgtttctgttgtggcatgaagtataaaagagccaccttattaatggaatgaagctaaaatattaaacaatcttcagatcttcaattcaccttcaatatctccctctttctatgtacccactctccagatcaccaaatcttaatacatcctttgcaaaatctttgggcttatccatcctttgctttttattctgttgtgataatagaccaaagtttctttccttccttccttctttccttccttccttctttccttcctccctccctgcctccatctctcccttccttccttccttcttttctccctccctcccacctcccaatctttcatttcattcattctgtctgtcagggatatctgaatcttgctttgtttcctaatcagatataaccttcacctttaaagacatacatgttactattgagcagcgtgggagttagacataaattgtaagtggttgacataagtgactggagttattattctccttttaaaacataacttccaagaaatagtccagcgattaacagtgacccttcccacattttcaagatttagcatggtattttcttcacttatgaaataacttgcacacacaagatgtattattggctaggtaagctggttactggtgaagtgatagaacgtcagctatcagcagggttgccattggttacactcatgacccgtttgaaataattagatgtaaaagactagaacaagtttatgctcacaatcttggaattacagtcatttagattatggcatgacgtaaagaaatgtagagtctttctacttaggtattatatttcaaggtttgtttcagtgtgtatgaaatgagcatggactaaatattctttgcacatcagaagtgccctttgttatttctttacagtaatctgggtcctgcgtaatgctaggtagatacacattcaatcagatgtaaaaaaaaatccttcaaaatatacatttgcagagaatgagcatgtaaagtaagagtgtgaagtctaatcaattgtctcctctgccctttttgccattaaggcaagtttatttctagtttaaccagaatgacggaagtcagctttggtatgtttgtgtggtgttagtggtcacataatagacctgtcgtatggcacatctgagtgccaatcctgttttgcaaacatctattgtagttgtagtttttttcttttcttttctttttttttcttagaggaaattacctgggtcctggttagacatctccagttattttaaaacatgatggattagcagagaggagagaattaaaatacttttttgttttctctgacaaactttatgtccatttcttttagggaggaagcattgctactggtctctatcagattggtaggactttgaaacactttcaaggttcacagaggttagtgaatggggcactgaggaataagaaacatgcacccttcccacctcttttcttctctgatctcttctctcctccc

SEQ ID NO: 706845 - DNA, 617 bp, Homo sapiens
gattaagattcttcacatagagctcctggaacagtgcccggcacaaagaaagagctcaggaattattcgctcagtattgtcctccaaagttaccatcctcattttacagcttagtggatagaggcccagggaggttgaatgacttgcccatggtttttcagccatttggtggatgctcaggcccaagtgtgctggccaagacagggctctcgcctgggatacttacatttaggtaagtgggaaatgctcccargtacagtgttgtgggaagaaaagattatatgaccaagatcaattttgcatattaaagattgtggcttctaaggaaagatataaaaaagtcaatgaggtaaactcaagtattattcttttaagcttttcctggtggaactgttcatagttatattcgtgtgacaaatagttactggtacctactatgggctagaagtagaatatatgataggcacgggggtacagttgaggacagaaatagacagaagggctgggcacagtggctcacgcctataatcctagcactctgggaggccgaggtggttggatcacctgaggtcaggagttcaagaccagcctggccaacatggtgaaaccccatctct

SEQ ID NO: 706846 - DNA, 344 bp, Homo sapiens
tgggaagcccatttggataacctagaagttgaacctcatggaaaggtacttgaatccaattagatactgcgagagtatgtgtccaagattatgagtgtacactttattaaaaaggaataaagtaaacaagaaaaccagtaccttgatcaggggaatgcatggcttttagaaaaagtaaaagcatggctgggtgcggtggctcacgcctgtaatcccagcactttgggaggccgaggtgggcagatcacgaggtcaggagatcragaccatcctggctaatatggtgaaaccccatctctactaaaaatacaaaaaattagccgggtgtggtggtgggtgcctgt

SEQ ID NO: 706847 - DNA, 560 bp, Homo sapiens
ttcaccatgttggccaggctggtctcgaatcctggacctcaggtgattcgcctgcctcagcctcccaaagattacaggcgtgagctactgcaccctgcctcttggattaatttctgttatactgtttttcccctaatacttcctgtgattatttttatttccttctattttattttattttgacttttattatgaaaatttttagaatacaaaaaggtaggaaaaattaagtatggccgccaaacatgtatgcccaccttacmtatttaaagtggcttctttttccttttttaataagcattttgtggggagatattttgactatgtaaatatcccattcaccatcaaacttttaaattttcatttattatattagtctgaaccatggatttctgcatttttctgaaagttataatctgtaaccaccgttatttattttactggtcaaatttcccagatttgaccagtaggagccccttcaggctggtttctgtgtccttttgatgggtcctcatcattttttgagtactttcttactggtataagatactttcatactg

SEQ ID NO: 706848 - DNA, 1512 bp, Homo sapiens
tttaatacagtgtttaacatatttcataatttaaaaggaaattctgtcattccccacaacagtgttaagtactatctgttcaaagtaccaacatatctttcttcagctctgaattacgcattccgtttctaaggagctcaaaacataaagcccatgaaaaggtgctttaaggtttggaagcctggatgatgctccctatctcttcctccccactccccaaaccggaactgtctgggtcacagagaacatcctcagaggaaatcctgttttcccacttcctggtcagaggctgaactccaggaaaaggatggatttggggagagctctgtgtcctgcctcttcatgggaggtctggggccacaaaggggtgagggaggggctgatcacaaacacaacggaaagatgacatcaggtatccaagagtgtgagagcttgagggctttaagcaatcacttagtcctcctatgcgtgaggaccctggggtccaaagaagagatgggacctgctcaagttcacacaatgttgtaagcaagagctggggctggaattcaggactctagccttccaggttttactaccatatgccgtggcatgtgagtcagaaagttaggtactgagcaatcaaacccaggcctctctgttcgcctggacataccacaaaggacagaaaaggaaggcagcccccatgcacgcagacactcttcagccttcttacctttgcttacattactccctttgcctccaaactctctacaggttcaaagtcctgtggacccccgaaaacctctgcctcccctcccatcctaaaagaatcttcctggaatcctcatgtggaagtgatattatccttcttagagacttcatagcaggccaagcacggtggctcatgcattataatcccaacattttgagagggaggatcacttgagcccaggagtttgagaccatcctgggcaccatagggaggctctgtctctacaaaaaaataaaaataaaataattagctgagtatgatgccatgtgcacctgtagtcccagctactcaggagactgaggcacttgactgcaggagatcaaggctgcagaaaagaaaagaaaagaaaaaaaaaagaaaagagaagaaaagaaaagaagttccatagcgctttctctggtccttktcttgtcctctcagaattcattacaaccagcttgggagctcctcaagaacagggactgtgtgtgatcctcttgtccaaggaagagctacacggaaaagatctgctgaatgctcctgctatgtcatgggcgatgtgctagactctgaggagcataacgaagaaaaagaaggtgctgttagatcctagtgttgtaggtgtgcatgtgtgcatgctcggactcatatgtgcagaatcatattcatctaacactgatcagagtcctactcagtatctcatttagacctcaaaatagcccttccaggtaagtggaagcaaatatgcagcttcacatgcagacactcagaagtactca

SEQ ID NO: 706849 - DNA, 1512 bp, Homo sapiens
tttaatacagtgtttaacatatttcataatttaaaaggaaattctgtcattccccacaacagtgttaagtactatctgttcaaagtaccaacatatctttcttcagctctgaattacgcattccgtttctaaggagctcaaaacataaagcccatgaaaaggtgctttaaggtttggaagcctggatgatgctccctatctcttcctccccactccccaaaccggaactgtctgggtcacagagaacatcctcagaggaaatcctgttttcccacttcctggtcagaggctgaactccaggaaaaggatggatttggggagagctctgtgtcctgcctcttcatgggaggtctggggccacaaaggggtgagggaggggctgatcacaaacacaacggaaagatgacatcaggtatccaagagtgtgagagcttgagggctttaagcaatcacttagtcctcctatgcgtgaggaccctggggtccaaagaagagatgggacctgctcaagttcacacaatgttgtaagcaagagctggggctggaattcaggactctagccttccaggttttactaccatatgccgtggcatgtgagtcagaaagttaggtactgagcaatcaaacccaggcctctctgttcgcctggacataccacaaaggacagaaaaggaaggcagcccccatgcacgcagacactcttcagccttcttacctttgcttacattactccctttgcctccaaactctctacaggttcaaagtcctgtggacccccgaaaacctctgcctcccctcccatcctaaaagaatcttcctggaatcctcatgtggaagtgatattatccttcttagagacttcatagcaggccaagcacggtggctcatgcattataatcccaacattttgagagggaggatcacttgagcccaggagtttgagaccatcctgggcaccatagggaggctctgtctctacaaaaaaataaaaataaaataattagctgagtatgatgccatgtgcacctgtagtcccagctactcaggagactgaggcacttgactgcaggagatcaaggctgcagaaaagaaaagaaaagaaaaaaaaaagaaaagagaagaaaagaaaagaagttccatagcgctttctctggtccttgtcttgtcctctcagaattcattacaaccagcttgggagctcctcaagaacagggactgtgtgtgatcctcttgtccaaggaagagctacacggaaaagatctgctgaatgctcctgctatgtcatgggcgatgtgctagactctgaggagcataacgaagaaaaagaaggtgctgttagatcctagtgttgtaggtgtgcatgtgtgcatgctcggacwcatatgtgcagaatcatattcatctaacactgatcagagtcctactcagtatctcatttagacctcaaaatagcccttccaggtaagtggaagcaaatatgcagcttcacatgcagacactcagaagtactca

SEQ ID NO: 706850 - DNA, 1479 bp, Homo sapiens
atttctactttatttaacttctatttaattttaattcatctagaatttatttcagcatagatctgaaaaaatttaactttatttttcctccaaataaccaatgattctagtaccacttattaaataatcattcctggccaggcgcagtggctcaggtctgtaaccccagcactttgggaaactgaagcaggtggactgcttgagtccaggaggtggagaccagcctgggcaacatggcgaagccctgtctctactaaaaaaatataaaaaatgtctaggcacagtggctcacgcctgtgttcccagcactttgggatgctgaggtgaacagattgcttgagctcagcagtttgagaccagcctgggcaacatggtgagatcctgtctctttttaaaataacaataatttttaaaaatacaaaatattagccaggcattgtggcatgtgccttagtcccagctactcattaggctgaggtgggagaatccactggggccatgatcacgctactgcactctagcctgggcaactgagtgagacctcatcaaataataattccttttccactgatttacaatgccaccaaattcttacacatatcagagtctgtctttatttcactggtctatcagaactatactgttttgttagagtagcattataatgtttgtttatattaatatgacaagtacctgatctttctttaaaagtttctcgactattgtaaattagttatgtcacttttttcgttacctcccattccctctttcctagtcttccaaaaagaaaagtcctattgagattttgactaaaattaaacctgtaaatgagtctaggaaaaacttagagcacatacaaggacttatacagtcaaagacagtataaaaaagacagggaggccaggcacagtggctcacgcctgtaatcccagcactttgggagaccaaggcgggtggatcatgaggtcaggagatcgagaccatcctggcgaacacggtgaaaccccgtctctactaaaaatatttaaaaaattagccgggcgtggtggtgggtgcctgtagtcccagctactcgagaggctgaggcaggagaatggcgtgaacccaggaggcagagcttgcagtgaaccgagatagtgcmactgcactccagcttgggcgacagaggaactccgtctcaaaaaaaaaaaaaaaaaaaaaagacatggaaaaaaatcttcccaatgtgcctttttgtcagctctcttcttataaggtctgcagaaacaccactgactcttatttatcttgtatcccacaatttgaacagcagttaaatttttaaatagattttaacagttctttggttgattcttgaggttcgctatctttcccgccccaaatcaaaacaactttagtcttcctttcaaacatatatatatttagtcttccgtattttatatatatagttatccctcggtatcagtgggagattggttc

SEQ ID NO: 706851 - DNA, 1479 bp, Homo sapiens
atttctactttatttaacttctatttaattttaattcatctagaatttatttcagcatagatctgaaaaaatttaactttatttttcctccaaataaccaatgattctagtaccacttattaaataatcattcctggccaggcgcagtggctcaggtctgtaaccccagcactttgggaaactgaagcaggtggactgcttgagtccaggaggtggagaccagcctgggcaacatggcgaagccctgtctctactaaaaaaatataaaaaatgtctaggcacagtggctcacgcctgtgttcccagcactttgggatgctgaggtgaacagattgcttgagctcagcagtttgagaccagcctgggcaacatggtgagatcctgtctctttttaaaataacaataatttttaaaaatacaaaatattagccaggcattgtggcatgtgccttagtcccagctactcattaggctgaggtgggagaatccactggggccatgatcacgctactgcactctagcctgggcaactgagtgagacctcatcaaataataattccttttccactgatttacaatgccaccaaattcttacacatatcagagtctgtctttatttcactggtctatcagaactatactgttttgttagagtagcattataatgtttgtttatattaatatgacaagtacctgatctttctttaaaagtttctcgactattgtaaattagttatgtcacttttttcgttacctcccattccctctttcctagtcttccaaaaagaaaagtcctattgagattttgactaaaattaaacctgtaaatgagtctaggaaaaacttagagcacatacaaggacttatacagtcaaagacagtataaaaaagacagggaggccaggcacagtggctcacgcctgtaatcccagcactttgggagaccaaggcgggtggatcatgaggtcaggagatcgagaccatcctggcgaacacggtgaaaccccgtctctactaaaaatatttaaaaaattagccgggcgtggtggtgggtgcctgtagtcccagctactcgagaggctgaggcaggagaatggcgtgaacccaggaggcagagcttgcagtgaaccgagatagtgcaactgcactccagcttgggcgacagaggaactccgtctcaaaaaaaaaaaaaaaaaaaaaagacatggaaaaaaatcttcccaatgtgcctttttgtcagctctcttcttataaggtctgcagaaacaccactgactcttatttatcttgtatcccacaatttgaacagcagttaaatttttaaatagattttaacagttctttggttgattcttgaggttcgctatctttcccgccccaaatcaaaacaactttagtcttcctttcaaacatatatatatttagtcttccktattttatatatatagttatccctcggtatcagtgggagattggttc

SEQ ID NO: 706852 - DNA, 685 bp, Homo sapiens
atcaaaagaaaggagtgtaaatatgcttttaatgactatctttaaggagatttaaaggcatagtcaatgaaatgaggcaatctgagtgagccctctcaaaagtagatctatttaataaatatggagcaaaaaaaacaaggaagaacatgttactctgatacagtaagtcacctgacagagttaccatcttacatatttaaataaaaagtcaatgctgtcttattaataacatgttatcagtcaawtattaatgtttaatatgacatggactacctcaaccatatctagcatagatctaaaataatttaaaaaaatttttctgttccaaaccatgtgagaagaccaaagggagaaaaaaagcagaacataaagtttcagtgggataaaaagaagagaaaagcaagagcactcaaatttggctccctgaaaatgtggagtatctacagagaaaagtcagtaatcctgaagagttggctgataactttggtggcagtcacatctccctagaaatgtcacagacccatgtgaagacgctcaaaggttaccaaatgtagatgccccaactttggaaagctgccatagtccaacccagtggcaaccatggcaatttttgggcaagtaatattacagaaaaaataatcagtttgaaagctcaagctaatgtagcttttaagcaccaggacaa

SEQ ID NO: 706853 - DNA, 1385 bp, Homo sapiens
tggaggctatgagaggtaacacttggcctgtccttttgccactggtcgtgtgctgccaagtgggagggctcgtgtggcatcaaaccatgccttatcttaaggctaacatcacatttcctcaacttggccagaggtgctgcagagagagacctgcacagtatttgcagaatttgttcaataattattgttaatcgttgatttcactgaagatcaatgtttgctttttgctcttataaacaaaacaggaatattcataacaatggattctagtaaggctcaagtaccatttgtgttgagtgtctgtatgccgtcatagtattagaagtttcatacacgctaacattcatcttcacaggaacgtcagaaggcaggtggtattaggtcacatagctaataggggacagattaggaattggctactgctcartttgaatcccaaatcagtgctctctctcttgtgcctctaaagccccaggacccagacagggcagtataggtaacccttagcagactactctcaacagtgtttggcccttgacaaaatgccacaaagttggaacgtgtagccctgagaagggttgttggcagaggctgcagagtggctttcagagtggttggccagctaagacatctgcatcaatgcctcgcaccactgggtgttcagttttccctctgattaaatcttgtctaccctgtgcccatagagtcagcatgtgctgcgagatcacaacgtgggagatcgttccccaatactgagatagagacaccgccccatagacgcagttacacactgccatgtgtaaacagatcaggaaaggagcaggtgcccagcccaaccggagctccagttcacacaaaagttttagaaaacccaagaggtaaaagtttagagaatattgtcttcttcaaacctccctctaacactgtaaagtgataatagacaagaatgtaaaaacttgggggaaaaaaagctaaagctcaattattgacactgttttaatgacctccacagatagatttgagaggtataggagcaaaaatgactttaaaataaataagttgttaaagttttattggtgctgcattcccaacctgaggttttctttgatgaaattcagatgaagtttcacatcttgtgctgtggaatcctatgaaatgcttagagattcaaatggtttgtgttggttaaagcaagctttaggctttgttcttcattatgctaatcagtttttcccccagcttaattgaagtgtaaagtcatttgaacaacactggtcttttctgtacacaagaaggttaagaacctcagacagctcatgctgctgccaagaagtctcccagtcgtattcttcagattaattacctgcagaaacagaagtaagaaa

SEQ ID NO: 706854 - DNA, 1540 bp, Homo sapiens
cctttttctgggagcctcccctggctctctagtctgagagcagtgcttttcagatggtgtcgtaactgcctgttaactttatctgtgactctgtagctctcctcccttcaccatgctgcacacaccgcttgccctcccttaggctctggaggcccaggccgtgccattcttattctttgtatctctagtactttacacagcacttggtgaacatgagtgctcaataactatttgttgaatggatggaaggatattgtatacgatcaggcatcacttaatgacaggcacattctgagaaatgcattgttaggtgttttctcattgtgtgaacatcatggagtgtgtgtttacagaaaccttcatggtccagcctgatggtctagcctgctgctcctgggctacagacctgtacagcacatgactatagggaatactgcaggcagtggtaacacagtgttaaatattggtgtatctaaacatagaaaagataccataaaaatacagtattataattttgtgggaccacagacatctatgtggtccatcattgacagaaacacccgtgtctagcccatgactgcatttcatttgaaagccacagccattcaagaactatgtaaacagcaccacctatgggtagacaattttaacaccacattttacactggaagatgagacttacgcattttttactgaaaaaaatgtttcactcttcaagccatggggtcatttatgttttaataaatttcaaaatgataagtgctaatattcttcatattgttttagttttgagactgttagctgaggagtctggaaatacaaaggtttttgcagtgaaaggaggaggaagagggaagccatattaattaataacatgttggacgcattgtaacatatcttatttaatcgtgccaataacctgttcctcacagtggttgtattcccatttttagattaaggaggttaagctggtggaggtgaagcccctcacccaagccctagaacacggatccagctggcctcaaaatctgtgctccttccaccatgttaagctgggaagtattggttggaaatgtctatgaagcagtcgcttttgtcccaaataaagtctccagcaayttctaaacattttgaatagatggttcttaaatgaccctatttctaataaaaagctgcttaaggacaatttttgtagagtcattatttccatggtggagtattctgacttccagcaggaactttatttcatcacgtgaagtcatttttaaaagcagtcatgtggctgagcccagtggctcacacctggaatcccagcactttgggaggccaagacaggcagatcatttgaggccaggagtttgacaccagcctggacaacatggcggaaccctgtctctacaaaaaatctaaacattagccgagtttggtggcatatgcctgtagtcccagatacttgggaggctgaggtgagaggatggcttgagccaggaggtggaggttgccgtgagccgagatcacaccactgcacttcagcctgcgc

SEQ ID NO: 706855 - DNA, 1351 bp, Homo sapiens
ggctcagatagtgacagcgagactgcctttaaacagtcataaagagcaaacccttcacctaccctctccaaaaccaacgtaagacatgccagtaaggaggagagtggaatgccaccacctatgccatgatggaatttctagattaaaaggtgtctgttgccttggttattccttccttactaactggattctgttatcaacatttgcatttctcttaggggaaagtttcttatgcatcaagttatataactgtctaaaagtagcttttctttttctgcctatgatctcctaaactgcaaactaatagttcatgtatatctttccatatatcttttttaacaccttttgtaataaggtagatgctgttgtctagcatcttaaccttatttagaaatgcatttaaaatgcaaaaaatggacaagtatgtaattgatgaaatacattcatttaattttaattgttctagttttttcttaagttcagaattaaaacataaaagtcaaagttgtgtatttatcagcatgtgctttagtgttcatttcattttcaggaagcatgaaattactcactgaaaatgtacttgctgtaagctcgcagggccacattgtgagcgcacttgtcaggatccctgaaccgtgtccagattttaagactggggggcaggtcaggtgttggcctgcgggctagtgagggctccgggctccggggcaggcaggccagccacacttgcagtactccaccgtctctttatctagcccttctgtctctgtctccgaaatcacaagggaaacgccgggtgacacactgcaaaggtaggcagcatttctgaaacctcatagctctctgagcaaagctgttacccaggctacagaaacctttttcatacaggcaaacagatgctctccttgtatgaaaatgtttttgtgttgcaaaccacttcgattcattttaagttaaacgcatccctgagcatttactcggatgggctttaataagtggctgtaatttggatcccaattggtattggctgactgcaggaatttttttttcatctatgtaaaccttaagagagctatagggccacccctggatgtcccactgtttgacttggtatcatgcactgctgctggcctcttcccactagcrcctttgggtttggtggcgtgtgtgctgttatcctaacctgcctggaacaaacactgctttccctggctgcattttgattttagatgtagcctgtctgaatcaccagtacaaaacagtgccaaggctgacttcagtgctttttttgcctagttcagtaagttaaaattctgcagtaagtaagctcagtcctaaggtttcttaatca

SEQ ID NO: 706856 - DNA, 1115 bp, Homo sapiens
cagcactggcttgcattttgctttcaaaatttcaatgaccagtaagagacagagaagagactgatggaagccaaagtcagaggaaaaaaaattcattattatatttactatggaacctttccaaagctcagacagcatttttattgatgacaaaaaagtacattctgtagacaacgctattgggaacattttgtatctggccgatttatctgagccagttagacatatgcttctacatgtcatcaattcccctggaacaaattggtataataaagacgtattttttcttcctatgggaaaacgcaaactatcttctttattgtttacctacattttttcaaggtaaaattattttaaattattcaaaagcattaaatcatgctactattcccatgtaaaaattaataatatatgttcaaatgtaacatttactgaaaacattttctaccgttgttttactgtttcctttttctcagtttctactagtcatttaattttcagtgctattgcataaatataatttctacaaagatactgattgagacattgaataaacccgttttgtctctgttaaagtccactaccattgtttcattttaaataactatcttctcatattaatagcctgacatttaaaaaatacacaagaactcactataattagataataattaccataaaattaggtcaaaataatagctagaatagcttagagattttctaatacaaattctttcataagacattaataataggrctttgtgtatatcaggcactaattacagctgctgtatactgacctaatgatcgaaatgctttaaatgggtcatttcattagatcacttctcaggtctgtgtgatgagtgttattgtcacccctattaacaaatgaagaaatttaaattcagagaagcaaacatggaggaaagagtggaaggaatgaaagaaggaaatcagttggcaaagaaccaaggatgtaaaatgccagtgatgtagtcaagacacgtgccagctcctaaaacaagaatataaacagaatataaacagaaaaatcataaatagtggtaggctgctggaaaacttactaataacagaatgcaaattttagctaaaaa

SEQ ID NO: 706857 - DNA, 647 bp, Homo sapiens
aaaacaaaaacaaaaacttaaccaatgcagagaatttagaaggaaaatgtccactctgcttcacccaccccaccctagccttaaaactcttgagtctttatacatagggaggaaaaaaactaaatcatacccatttggcttctaaaattggagtacttgaaactcaaatttttagaattaaatggtttttacatttatactgctttaattcatcaaattggtatgagaaacaaggatttggtcccattcctggaaagagtacaacgcaacagagcaaaacatgtgcaaagcaggctaaattagcagaytagagaacccgtgcatattgaaaactagaattgagtgtttttagtataagggaaaccactttcatagatcaatggaaaaagttgatagtttaaaaagaaaacatggaatgaaagtgaacatttcttcttttagcaacccaattttattttatatgtctcatttatgtatttattttattaaatatcatgggaattcctaacatttgcatagtactttgtagtttataagtgcttttcactaagttgtttcacttgataatggaccaggcattcaaattaaatagaaatatttctccttttagcactgtggtgaccttcgtagattttttttttatgttg

SEQ ID NO: 706858 - DNA, 645 bp, Homo sapiens
tgcttgggtctgaccagcaccaaggatctcagatttaagttgtacatcttcacctgggtagatgcaatgctgaatttgagttccattccactgtctatgtttgtctyggctgtttgtctgagggtaaattgttgaaccattttgtgcctcaatgacatcatctatgaaatgatggaaaggaagtcggtgagtcccttacaaaagtgtggggaagataataaggtagtaaagcagattttcctttgaatatattagatgtgaacattctctggatgacatacatcttgaccataagtgaaagttgcaaacagcaaatttgaataaactcaatcagaatcagactgtgttcctacaaacactctactcttcattctgatattagtttgagtggaagtcctttttattaagataattgggttaggggtgagaggaaagtgaagagtatggatgatttaatgttgtgttttattatgttttttagtagatttagttttgcttgagaaatctgtggcatggaggaaagagctagagcctctcaccctatcacacaaataggcctgtgacagtggatgccctatttaacatctacgtgtctaggtgccccatttgcaaaatgtggattgctcccatctgcttagcccctct

SEQ ID NO: 706859 - DNA, 645 bp, Homo sapiens
tgcttgggtctgaccagcaccaaggatctcagatttaagttgtacatcttcacctgggtagatgcaatgctgaatttgagttccattccactgtctatgtttgtcttggctgtttgtctgagggtaaattgttgaaccattttgtgcctcaatgacatcatctatgaaatgatggaaaggaagtcggtgagtcccttacaaaagtgtggggaagataataaggtagtaaagcagattttcctttgaatatattagatgtgaacattctctggatgacatacatcttgaccataagtgaaagttgcaaacagcaaatttgaataaactcaatcagaatcagactgtgttcctacaaacactctactcttcattctgatattagtttgagtggaagtcctttttattaagataattgggttaggggtgagaggaaagtgaagagtatggatgatttaatgttgtgttttattatgttttttagtagatttagttttgcttgagaaatctgtggcatggaggaaagagctrgagcctctcaccctatcacacaaataggcctgtgacagtggatgccctatttaacatctacgtgtctaggtgccccatttgcaaaatgtggattgctcccatctgcttagcccctct

SEQ ID NO: 706860 - DNA, 681 bp, Homo sapiens
gctctcaggctggtaaccctgaagccttccctgagtgcaggttacctgcaggcaggctgaggggcacgggtggcaccaacagtagccaccactttagaatttttgtcttgagctgagtgagaagagcagggaaggtgagttgagctgaatcrttcctggggcaggtctgcaagcagattgtccaaggctccttattgaggcctttgttgttgagccattccttcgtgttagtgaggtctccatgcctcttctaaaaacatacttacttttctccctaaattacttaaaattagtttgttcctttacactttcagagtgaactgacacactattctagccaactctagctcaggagggatgagacagaagagttgggaagatcttttcctcttccacctctttctgtggtttctcacctcactgattctgcagcccctagaacgctgcacggctggtacttagctgaaggaggtcacatcctggtgaaagggaagagatcctttaaggggatatgccatgtggcaccatgttgctggttcccaagcattggatgggcttgctcactcccttggatattctgacacagagcttcagacatggcagggccagggtctctgggattttccaaaagaactttgagatttaataaaatacctcttttaaagttgtttttaatggagc

SEQ ID NO: 706861 - DNA, 681 bp, Homo sapiens
gctctcaggctggtaaccctgaagccttccctgagtgcaggttacctgcaggcaggctgaggggcacgggtggcaccaacagtagccaccactttagaatttttgtcttgagctgagtgagaagagcagggaaggtgagttgagctgaatcattcctggggcaggtctgcaagcagattgtccaaggctccttattgaggcctttgttgttgagccattccttcgtgttagtgaggtctccatgcctcttctaaaaacatacttacttttcyccctaaattacttaaaattagtttgttcctttacactttcagagtgaactgacacactattctagccaactctagctcaggagggatgagacagaagagttgggaagatcttttcctcttccacctctttctgtggtttctcacctcactgattctgcagcccctagaacgctgcacggctggtacttagctgaaggaggtcacatcctggtgaaagggaagagatcctttaaggggatatgccatgtggcaccatgttgctggttcccaagcattggatgggcttgctcactcccttggatattctgacacagagcttcagacatggcagggccagggtctctgggattttccaaaagaactttgagatttaataaaatacctcttttaaagttgtttttaatggagc

SEQ ID NO: 706862 - DNA, 639 bp, Homo sapiens
atctgcccaagaacatggtaacaggaagcaaaagttcttcaagtaggatagtagaagtaacagtaagagggaccattcttggacttttgcttgctggctatagcagagagaacactacatttggatgctggctgaaggcatgttgtttagggcaacaccccaattgcataaagggttggctcccaagctggtgccattcctgagtcttcagcaggtcattccagcacacatcaagccagcctctgggtgatgggatgcatggaaagactmgtgaattcgatgtgtgtgggcccgttgccgcagcctctttgcagtaaaatgtttcctgagcagaagcaacattgtgtgggaaaccatggcaatggattgtgcgttttctaagtccaagaacagtagctctggcagacgcgctgctggcagggaggatacatccctaactgcaatatgtgtgtgtccctgtgaggacaaagtgctgttcctgccatgatggagggggccaatgtattcaatttgtcaccagatagctgactgctgccatatttattatagcactggtggaagccgagcagaagacagagggtaaagttgctggttgatgccgctcacacatgccaaccttctggtggaaagccgaatgca

SEQ ID NO: 706863 - DNA, 686 bp, Homo sapiens
ttacctttttaaaaataggttgtagatactttttgggagtagttttctcattggagtaaattttaaattattttcttctattgaaaggtaatgagataacctttttcatatttttcttgtctaggaaagtttaatgctcttgtatggtgctcaatcacagtagctcatgatttggtttccttctttgtattgtctgtttaaactataatgtaacacctattttgttttatgtatatatatgaattttttttttttttttgagacagagtttcgcttttgttgcccaggccagagttcagtggtgtcatctggggtcaccataacctctgcctctcgggttcaagcgaytctcctgcctcagcctcccaagtagctgggactacaggcacgcaccaccacactcagctaatttttgtatttttagtagagacggggtttcaccatgttggccaggatggtctcaatctcttgacctcgtgatccacccgcctcggcctcccaaagtgctgggattacaggcgtgagtcactgtgcccggcctgttttatgtattttttttaaactgccccttaccttacttctttatagaagcaggtgtggaggcataaataataataaaatatttgattttcagtatatatggtagttcattctgctatatctaaaataattcatcatctgaaatt

SEQ ID NO: 706864 - DNA, 664 bp, Homo sapiens
ctcttggaggaaggtaaggaggaatgcaaacaaactactggggtgaaatccaataatagagttgggccctactgggggctcctgggaagaaacagcccatctaacgttacttccactgctatctcattgtccaaatcctgcaattaaaacctttcattaggccaggcgtggtggctcacgcctgtaatctcagcactttgggaggccgaggtgsgtggatcaccaggtcaggagttcaagaccagcctgaccaacatggtgaaaccctgtctctactaaaaacataaaaattagctgagtgtggtggcacacgcctgtaatcccagccactcagaggctgaggcaggagaatcgcttgaacttgggaggcggaggttgcagtgagccgagatcgtgccactgcactccagcctgggtgacagagcaagattccatctcaaaacaaactttcattaataccgtaccttacagacttaaggtgtggccaaagaagtgatcctgtctgctcacaatgccagccattttccctttgaagcaaccaggagaaagatttaatggggcctcataaatgggtaagggaagaagtacagccaacatcaaactgagctactaagtcaggctttcaactcaggcttagcatcctttctgcttcagcacagtagct

SEQ ID NO: 706865 - DNA, 612 bp, Homo sapiens
agtacattaagctatctctcacactttaaacatcaatggcaaaactaaaggtatagtaacaattatatctaatttggctctacatttcttggggaaaaaagaataaacacatttgctatgttattggtgaagaaagtctggagaaatagtattttcttctaatgtcttcatttagaaacaaaatactaaaattatgtaaatatgtgaacttatctttacaatacaaaatgcaacaatttcaaacagcatgacatgaaagcagtttttgtctagttttgatgccataatacgtaactgcttttgacattttaatatacattcagtctccaaataaaacatactgtaatattatgtttatagttgtcaaaaattatgttcattttgcatactttaaacagtttgcatcactcaaataagataaatcaatttttcctatattttaaataatattaaaaattgcattaaaatrtatttttaaaatgttagcattgtggtaggaagcctctgagattgccccagtgattcccacctcctggtatttaggcccttgtgtaatcccaaccccatgcatgtgggctgaatctagttacttgctcctaagagaatatggca

SEQ ID NO: 706866 - DNA, 663 bp, Homo sapiens
aatcccatgggctgggagactgacttcattcactttctttcaaacgagtctttaagaacaccgctatcaatctttggtgtccagccgtgacgattatttttaaaagtacacatgtgtttcaacaggaaatagtttcaaaatttggttgtattttagaggaaaataaaacattttaaactttatccccaactttataccttgaatacagaatcaacaggcaaatcatttatttaaagaaaattaaattagattttttccatcatttatcattttcttttcttcttgaagtggaaacttgcccagcaagcaaagccttgagttgttaaaaggcaaaatggagactcacatagtgtcccaggccccaaggtacaggctttatgaatatactcccttttgtatatcaatttttaaaaagtaataatttttttccagggtagaaagagtagattcaaagaactgcagaagaataaacttgaaatgagacttggaggtgctgtagttyagtccttttattacacaaatatacaaactgaagcctagagtgctccattaatttgaccaaaagttaatagacaggtggtagctatggaaaacaacgtcaaaaaattataataaagttttggcttatctgtttttgatattataatatgttttaaagagaat

SEQ ID NO: 706867 - DNA, 1060 bp, Homo sapiens
cccaataatgattgtacttttcccaggtaatagtggtttattaatcttataatagcacctaaataatagtcaacttgacattaaaacaaacaaataagcatccttaagtatcaaattgaacttacagtgttttcttctccaggcaaaattaatttcctaaccttgaaattggattttcatctgtcttctgtgtgcacatagatcagtctttaagaatcagaaatgtaaacccttatcttaggtagcagttggatgttttctgaacacttgcagatttggtaggaggggtaaatatggcttagcctaataagaagctattttgagaacttttttttaagaacatgggaaactgaaagatcattttattctacttttaaatatttaagctgcatcaaagtcccacagcttattcagtttatagtttggttaatttttgttgtaaactgaatagcaattattgttcacaaatttctgcatagcattttacaggatgacactaggagctggaaaaagagcgagagataaagatgaaaaacacatattttcaggtttctttattacaaccgtagactcttttttacaacaaagaaaaagccatttccttagtagatgttctcacaccatgaaggacagtactaatgcatgaggaatatgtcatctatgattaatgctgatgattcagtgaaacacagcaagatactgaaataatgggatttttctgcattttaggaatgcaatcatcttaacacatggtccatggaacattttaatacaagtgctatgtttttttatttttagtagttatttaacatcataatgtaatgagttctgtataaataatgaaacacacatacgtataactcttctttttctaaatagaaatcacatacacatatggaaattcagtcagttcatttaattaaactaacttagaaattgccagtggattggcagctccctccataccttaagcttccatgcagggttaaactccttttygaagatgataaaagtagcctgagggtctgcttctataggagtagaaaaactgttttctgaa

SEQ ID NO: 706868 - DNA, 629 bp, Homo sapiens
ttgggaagggatctatgagaacacgttttccccttggtaactaggggaaggaaataaatgtgggagacagggaggtgtgtgttttctgcgagagcccagagactcaccactgaaccctaaggaaagtcactctgccacttactacctctgtgacattgaatggttttataaaayccagatttcttaagatacggggttgatatctgtcgtagagttgttttgaaggtaaatatatgtacaaaaatgtctaccgcagtatcactcctggagcagggctctagtgtgccaagcacggcccctctggattgaaaaaggaagtgaaaatactaaagttgcccaaatgagtcacagataatagaaaggtttgtttgtatatagaatcttagcttcttagcagcaatgtgactggcactgcttgggtgccacattagaagaaggagactcagagtgagggagggagcatggagcccttccatgtggaaccagtgtggctgtgattcacagagtaatcaaggcatgcagcactgtgagcagctggaacactgccctgggcacagacagcgctgttgtggccaccctgggactccattggcagctgtgcccagagaacagcacctagggagtgaagg

SEQ ID NO: 706869 - DNA, 2593 bp, Homo sapiens
  misc_feature 1928, 1929, 1930, 1931, 1932, 1933, 1934, 1935, 1936, 1937,1938, 1939, 1940, 1941, 1942, 1943, 1944, 1945, 1946, 1947,1948, 1949, 1950, 1951, 1952, 1953, 1954, 1955, 1956, 1957,1958, 1959, 1960, 1961, 1962, 1963, 1964, 1965, 1966: n = A,T,C or G
  misc_feature 1967, 1968, 1969, 1970, 1971, 1972, 1973, 1974, 1975, 1976,1977, 1978, 1979, 1980, 1981, 1982, 1983, 1984, 1985, 1986,1987, 1988, 1989, 1990, 1991, 1992, 1993, 1994, 1995, 1996,1997, 1998, 1999, 2000, 2001, 2002, 2003, 2004, 2005: n = A,T,C or G
  misc_feature 2006, 2007, 2008, 2009, 2010, 2011, 2012, 2013, 2014, 2015,2016, 2017, 2018, 2019, 2020, 2021, 2022, 2023, 2024, 2025,2026, 2027: n = A,T,C or G
tatttatgtattacatttatttctaatttccacagctggcatcaaagtgatatgtaatgtttcaacagttgttacttaaaacagagatagtactttaaatacagtaacacacaaacaaattaaaggctccttttagtattaatctgtttcatcctatttgcctcttgtaggttgtaaagcatatcacagagtaaaaatgtaaacaaaccagagaagagaagaaatggagtggaacacaaattatgtrttcaaaccagaagtgaaagaggaaggaaattggaagacaatctggcagtatctatcaaaatttcaaaaggctatttcctttcatacagcaatctcaccaccaggaatttaggtgaaggatatatttggaaaagtaccttgagatgtcaagtgtgtgtaagaacaggtaggcttatgctgtggcaacaaacaattccccaaatattccggcttagcatgttcattttatttattatgcaaagagcatagtaccgcaggtcagtgggaggctctactccacaaagtcactcagggatccaggctgaccaagcttctatcatctttgagctgtgccttctagaacttgtgatatctatagtcactacagcaggaaaggaggagcacatgaagatccagcacctgttcttttatgtcaccacatcattccagctacggcccattgccctcaacctatgtgcaagtgaggctgagagaaatagtggagtacctcgattatctgatgagccctcctgtctctccacaaaccaaaatatgttcatgaagcagtatgcagaacagcttaaaaaccatattttgcctgtagatgatggacaaaataaacaagcatattatgtggcagttttttttttaagtagatctgagcgtgctgatgaggaatggtctccaagacatattacttaccaaaaatacatggcataaaacagtatttctgatgtgatctctatagagatcatttagaaacactatttatatgcaagtgtgtgcatatatcatttttctgaacagatagacaagactgattatgccagtgcttactttgagaaatggaggaggggatggaaaaggaatcataatttttaatcagataaagttatagtgttatttttacccacattttaaaaaaaacctaaaaagataaatttaatagattagatagtagattatattatgaaatgcttgtacattttctcaagactgataatggcattgtggttatacaagagggtttcatcttccgagatgctgacatgtgggaagaaagtattgtgagatctgaaaattcttcagccaaggaatgtgtgtacacatccatatacacacatacacacatactgatgtacatagaaacacacagagcatgagcatatgtacaaagtgctgattattgactctacatagaagatagctgggagttcattgttctgtctttcaacttttctgtatatctgaaaatttccaaagtaaaatactaggaaaaataaaaagaaccaaagggataaaaagcacatcacctgcaaacagaaagctccacagatctccagtctccctaccttagggctctgcagagttcataggtagacatacttgaatgtcagaaatcagatattgatacccaaaaccaagaagcatcacagaacacgcgggtgccgatggtctgcagtagaaaagttttcccaaaggatttctgtttgctgctataaaaagctggggtgaccttataaagcatttgccagactcttcaaactgcctaatcactgttgtaatagtagtacctgcttggccggcggtgctggttaaaaaattctattgccatatttcaaacactttctggaatctgttcttaaagttagcaaattgagggtaccgagctcgaattcgtataagtgttcaactgttaaaannnnnnnnnnnnnnnnnnnnnnnnnnnnnnnnnnnnnnnnnnnnnnnnnnnnnnnnnnnnnnnnnnnnnnnnnnnnnnnnnnnnnnnnnnnnnnnnnnnnagacggaggcgttgtgaacgcgacgcgggtggcagtggcgaggggagttaggaggcgggagaagagaaggggcggggagacaagataaggcgacggagcaggcggggccggggcgcaacaagggcctggcagactgcggggcgcgggggtgggcgggaaaagttagataaagaagaacaaataaaaaattacaagacgctgtgcgggggtgaggttctggaagtgggcataattgaagctcgaaaacaacgcacagggaatgaaaaaccatgtggctttaatccatgttctcgtggtccctgaggcgatggtgactcaggagagagcatgtcccaccaggccatctttaggaggtgaggacttggtatgccacctttccaatggacagctgcctctccctgtggttaacgtccacagcacacgaggctttattggctccactcattgtgttgcacacaaacgttaatgcctcccactttttcagcaactgtttgaagcaaaaaacccagtcccggcagcgcggcctcagtgggagcttcagagaccaaactatcaaggtacatttt

SEQ ID NO: 706870 - DNA, 2593 bp, Homo sapiens
  misc_feature 1928, 1929, 1930, 1931, 1932, 1933, 1934, 1935, 1936, 1937,1938, 1939, 1940, 1941, 1942, 1943, 1944, 1945, 1946, 1947,1948, 1949, 1950, 1951, 1952, 1953, 1954, 1955, 1956, 1957,1958, 1959, 1960, 1961, 1962, 1963, 1964, 1965, 1966: n = A,T,C or G
  misc_feature 1967, 1968, 1969, 1970, 1971, 1972, 1973, 1974, 1975, 1976,1977, 1978, 1979, 1980, 1981, 1982, 1983, 1984, 1985, 1986,1987, 1988, 1989, 1990, 1991, 1992, 1993, 1994, 1995, 1996,1997, 1998, 1999, 2000, 2001, 2002, 2003, 2004, 2005: n = A,T,C or G
  misc_feature 2006, 2007, 2008, 2009, 2010, 2011, 2012, 2013, 2014, 2015,2016, 2017, 2018, 2019, 2020, 2021, 2022, 2023, 2024, 2025,2026, 2027: n = A,T,C or G
tatttatgtattacatttatttctaatttccacagctggcatcaaagtgatatgtaatgtttcaacagttgttacttaaaacagagatagtactttaaatacagtaacacacaaacaaattaaaggctccttttagtattaatctgtttcatcctatttgcctcttgtaggttgtaaagcatatcacagagtaaaaatgtaaacaaaccagagaagagaagaaatggagtggaacacaaattatgtattcaaaccagaagtgaaagaggaaggaaattggaagacaatctggcagtatctatcaaaatttcaaaaggctatttcctttcatacagcaatctcaccaccaggaatttaggtgaaggatatatttggaaaagtaccttgagatgtcaagtgtgtgtaagaacaggtaggcttatgctgtggcaacaaacaattccccaaatattccggcttagcatgttcattttatttattatgcaaagagcatagtaccgcaggtcagtgggaggctctactccacaaagtcactcagggatccaggctgaccaagcttctatcatctttgagctgtgccttctagaacttgtgatatctatagtcactacagcaggaaaggaggagcacatgaagatccagcacctgttcttttatgtcaccacatcattccagctacggcccattgccctcaacctatgtgcaagtgaggctgagagaaatagtggagtacctcgattatctgatgagccctcctgtctctccacaaaccaaaatatgttcatgaagcagtatgcagaacagcttaaaaaccatattttgcctgtagatgatggacaaaataaacaagcatattatgtggcagttttttttttaagtagatctgagcrtgctgatgaggaatggtctccaagacatattacttaccaaaaatacatggcataaaacagtatttctgatgtgatctctatagagatcatttagaaacactatttatatgcaagtgtgtgcatatatcatttttctgaacagatagacaagactgattatgccagtgcttactttgagaaatggaggaggggatggaaaaggaatcataatttttaatcagataaagttatagtgttatttttacccacattttaaaaaaaacctaaaaagataaatttaatagattagatagtagattatattatgaaatgcttgtacattttctcaagactgataatggcattgtggttatacaagagggtttcatcttccgagatgctgacatgtgggaagaaagtattgtgagatctgaaaattcttcagccaaggaatgtgtgtacacatccatatacacacatacacacatactgatgtacatagaaacacacagagcatgagcatatgtacaaagtgctgattattgactctacatagaagatagctgggagttcattgttctgtctttcaacttttctgtatatctgaaaatttccaaagtaaaatactaggaaaaataaaaagaaccaaagggataaaaagcacatcacctgcaaacagaaagctccacagatctccagtctccctaccttagggctctgcagagttcataggtagacatacttgaatgtcagaaatcagatattgatacccaaaaccaagaagcatcacagaacacgcgggtgccgatggtctgcagtagaaaagttttcccaaaggatttctgtttgctgctataaaaagctggggtgaccttataaagcatttgccagactcttcaaactgcctaatcactgttgtaatagtagtacctgcttggccggcggtgctggttaaaaaattctattgccatatttcaaacactttctggaatctgttcttaaagttagcaaattgagggtaccgagctcgaattcgtataagtgttcaactgttaaaannnnnnnnnnnnnnnnnnnnnnnnnnnnnnnnnnnnnnnnnnnnnnnnnnnnnnnnnnnnnnnnnnnnnnnnnnnnnnnnnnnnnnnnnnnnnnnnnnnnagacggaggcgttgtgaacgcgacgcgggtggcagtggcgaggggagttaggaggcgggagaagagaaggggcggggagacaagataaggcgacggagcaggcggggccggggcgcaacaagggcctggcagactgcggggcgcgggggtgggcgggaaaagttagataaagaagaacaaataaaaaattacaagacgctgtgcgggggtgaggttctggaagtgggcataattgaagctcgaaaacaacgcacagggaatgaaaaaccatgtggctttaatccatgttctcgtggtccctgaggcgatggtgactcaggagagagcatgtcccaccaggccatctttaggaggtgaggacttggtatgccacctttccaatggacagctgcctctccctgtggttaacgtccacagcacacgaggctttattggctccactcattgtgttgcacacaaacgttaatgcctcccactttttcagcaactgtttgaagcaaaaaacccagtcccggcagcgcggcctcagtgggagcttcagagaccaaactatcaaggtacatttt

SEQ ID NO: 706871 - DNA, 1281 bp, Homo sapiens
tgtataagggttcccttttctctgcaaccttgccagcatctgttattttttactttttactaatagctattctggctagtatgagatgacatcttattgtggctttggtttgcatttctctgatgatctgtgatattaagttcataaatgtaacgttaatgtccactgtaaaacccagcctgctcaatcagagagagtagagatagttaagtaattatctataatatcgaagcaatctgccctctcttgctttttggttcatccagaaatccacaaaatgagcccctccacacaggccatctcacaggtggtctctgctccatcagaaccttgggtcgcaattgtctttctcctctgtcaccctgcaatctccggggctcacctgggtcactgattactttgctmctcatttcttaggatctaacccactacggcaaatggaccatgtgcaggtggcatcagaaaagtggggaaagtgtggccacacctgcccaaaagaccagcagcagacgccactgtcattcttcttgcttctcagtaggatgctgacctcaccacctccacttaacttaccattttttttaatttgtaaatcactttcaactccttctctccctccttaaaaatgtattttaaaatgcgaaggaaattccaaggatggcaatgcatgccctttctaattaatgttataataaaatggtatatttgtatttatttttctataaacacacattcacatatatacacgtgattaaattgcatattagtgctgcccatctataaaacattcttctcattgaaacagtcacaggctctgactggagttccatttcacccagcaccagcattccagcagtgttctgctgtatacctgtgcacagtgccccaaatatatatatacacatatatatttatatacatatatatatttatacatatataaatatgtataaatatgagtcaggccagccgagaaatttactctatgattactaataggttgatgtcactctttttgccttatttctcctataatatgggaattattacactaaatttatacatatataaatatgtataaatatataaatatatatttatatataaatgtatatatacatttatgtacatatatttataattatatattcaaattcatgcacacacacatacatttttgtttggatcattcaaaataaaatatgcttgaagtaaagtcaccttaatagtaaaaaatcaaattgaaaaaagacaaagttaataacctgacttatgactatc

SEQ ID NO: 706872 - DNA, 1281 bp, Homo sapiens
tgtataagggttcccttttctctgcaaccttgccagcatctgttattttttactttttactaatagctattctggctagtatgagatgacatcttattgtggctttggtttgcatttctctgatgatctgtgatattaagttcataaatgtaacgttaatgtccactgtaaaacccagcctgctcaatcagagagagtagagatagttaagtaattatctataatatcgaagcaatctgccctctcttgctttttggttcatccagaaatccacaaaatgagcccctccacacaggccatctcacaggtggtctctgctccatcagaaccttgggtcgcaattgtctttctcctctgtcaccctgcaatctccggggctcacctgggtcactgattactttgctactcatttcttaggatstaacccactacggcaaatggaccatgtgcaggtggcatcagaaaagtggggaaagtgtggccacacctgcccaaaagaccagcagcagacgccactgtcattcttcttgcttctcagtaggatgctgacctcaccacctccacttaacttaccattttttttaatttgtaaatcactttcaactccttctctccctccttaaaaatgtattttaaaatgcgaaggaaattccaaggatggcaatgcatgccctttctaattaatgttataataaaatggtatatttgtatttatttttctataaacacacattcacatatatacacgtgattaaattgcatattagtgctgcccatctataaaacattcttctcattgaaacagtcacaggctctgactggagttccatttcacccagcaccagcattccagcagtgttctgctgtatacctgtgcacagtgccccaaatatatatatacacatatatatttatatacatatatatatttatacatatataaatatgtataaatatgagtcaggccagccgagaaatttactctatgattactaataggttgatgtcactctttttgccttatttctcctataatatgggaattattacactaaatttatacatatataaatatgtataaatatataaatatatatttatatataaatgtatatatacatttatgtacatatatttataattatatattcaaattcatgcacacacacatacatttttgtttggatcattcaaaataaaatatgcttgaagtaaagtcaccttaatagtaaaaaatcaaattgaaaaaagacaaagttaataacctgacttatgactatc

SEQ ID NO: 706873 - DNA, 678 bp, Homo sapiens
attgaacaggctttggagccagaaagagttaagtttgaatcctaattctgccactaactagttgtgtgaacttaagccagttgcttaaccactgttcccatctgctcctaagtgaaataagacaatcctgcctacctygaaagctgttgaaagcatagatgactgcaaagtacctatcatggtgcctggcacatagtaaatcattaataaatggtactaccattcttgcaggccagaactagcatttatatatcaagggtctaaatgaaagtcccatgagacaaatacagtaaatgtttaataacatttgtaatttcctttgagccaaaccacgggaagacaatcaagcccatatagccatgctgcataacacgcacagctcaagctactccttaatgtttccctatttgtaatgcggcagaaaatcatgtacctgcttgtctctctgaggctcaaagtatagccagagggctgagcagcagctgagcatctgccttctccttgaaattcagggtcagcaggaggacagacccacaagaacactcacaaggggggacagttctttgcaaggcagatgtaagaacaaatcctaagcaggaaaatgtgtgcatgcgtgcagatgaaaaggtaggtatcatgagcgctctcatatgatgtgcgagctaagtttatattatt

SEQ ID NO: 706874 - DNA, 1563 bp, Homo sapiens
ttgtgaatggagaggtggaggcggatgaattaagccaattaattggaaaagaaatacttacttcagtagcataccatctgaagcaataggatggaagtttaagacttgttaattaagaccatgaaagaactccatggacaatgttgaaaagggttttcacattaactgtgtgtgtattaggaagggaaaaatgttttcactgagattcctgaaaccatattgcaacatgagtttccctcttgaccttgcagcttatgttggtctgcttttcaatattaaaagaaaaatgtggatcccatctatgaagtcatagctcatttaggggtgatgtggtagataggtcctggttagttttgaaggacctaattgctatattaggttttattttctaatccaagatggtgactttttgttggaggtgggagatactaaagaaaaatgttccatctggatggaattttgtgggcaggtaagtttttagtgtctccatccacaaccacaacaacattatgtgccctaattagttacgtgtgtgaagtgggcctaactggagtagccagtgagaatgacttggacgttttcagaagaattatttgcaggttggaaaattctcacttctatttccaggattgttcagtctggaggaacagtacaaattaaagtgcactgttttagaagtgggactggattttggcattggcagctccataattgtagttttggccaaagatcactgatggcttttgactcatcacgcgtgaggagctcctgcaggaatgctgaagaaaaaaggaagggattccatgaagggaagtaaaaaccagagcagaaacaccgagcttcccagttcctctcccccaccaccccttacgctagtgctgcattctatcaaaagacagaaggaaagatgaaggctggggatgctacctccttcccgcaagcaatgccttattctggccttcagcttaatacatcatctcttctagcttgaatccttgcaggtactcttttttggagatgagacggacaccgttgaaatgtatatacaatgacagagtttattctcaggctatgattctgcgtcttttgctaaggatgtcaaatctggatattctcggttcttgtggtcccgtattattggttagatgaggaaagttaacagagatgggttgagtggaagtagctgggcccaccatgtcctggatcttaatgttggataagtctgctgtattgtttgttgaactctgcaagcccagcatctgttttaacacgcggctggaatktggggagacagccctttccatcaagcttgaggctgtgacctgaggcatacatcagtaacgtcacagaatcatgatcagaaaggtctaagggtgaagtcacagaatcatgatcaataagatctaagggactgggaaaccaatatgctgttatttttgtgctgcatgttgaccaagcacctgaaatgaaggaaataagctgtgttttgcaggatttctgatgaaggcagacctcacctggctcactcagtttctccgtgtcttgagctggagatgttaatca

SEQ ID NO: 706875 - DNA, 638 bp, Homo sapiens
gaaattcatatctatttcataaatatatgaaattcatatctatttcatatatatatgaaattcatatctatttcatatatatatgaaattcatatctatttcataaatatatgaaattcatatctatttcatatatatatgaaattcatatctatttcatatatatatgaaattcatatctatttcatatatatatgaaattcatatctattttcatatatatttcatatatattttccatatatatatatataaattcatcagaacaaggttgtctttttttcttctgaccacaccaatgtaatgaaacagtaagtgtgaaaaagaaaaaaaaaaatacaggaatcaagagcccaaagaatttttaaggaaaccatgattgaataggttatatcagactgactggtctcctaactttgattctgcccacaccattcaatagaaagaggacatggaattccagctattccctccactatagaatttactacattttaaatttaaacaggttaatttaagctacagtaataatttgagacagaatctcatcaagcacagattcaaartaccacactttgaggtcagagtggagagagcttttcccttgggatgaacatgagaaggttaattaaagagga

SEQ ID NO: 706876 - DNA, 616 bp, Homo sapiens
tgggtttacaggcacatactaccacgccccactaatttttgtattttctagtagagacaaggtttcaccatgttggccaggctggtctcgaactcctgccctcaaatgatccacccrcctcagcctcccaaagtgttgggattacaggtgtgagccaccatgcctggcctcaacacctatctttgattggttgagggctgctctgagaggaattaactgcctggctcctctgccctgcccctctgcactggcaaagtggggtctggcagccacaggaagcccttgaatggggaagcagagagggaagagtaagatgccattggcctgccagtaggaagcccatgacatactggtggagccccagccctgttagtacagaaaagatacctggctgatatgctctgctatatccatctttgagcctagatgatgttaattaactctttaaaaatatattaaagctgtggtggcatctgagaaaagatggtatgcttttaaaaggtaggagtgaacagctcatacattgtcccaggagtgggctttattacagagatgggggagctctgacctgttgaagaccaagattccaggaagaaatgtttgttcacaagcaggt

SEQ ID NO: 706877 - DNA, 788 bp, Homo sapiens
ccacgcccagctaattttttgtatttttagtagagacaagattgcactattttggccaggctggtcttgaactcctgacctcaggtaatccacccacctcggccccccaaagtgctgggattataggcatgagccactgcacccggctatattcaactttttaagacactgccaaactgttttccaaagtgacaataccatgttacaggttggaggtttccgtcagcaatatatgagggtttcagtgtctccaaatcctggccttttatgagtcagaggaaaaactttcgcagaagtctacaagaggacttcccagggtaactacagtagcccatgacaaacactagtcactgataagcagacacatctgagaggcttagactggtcaactaacaccccaggcccgggaaggggctcataatgcttatcagtgcccagtgtcagaacacagttgaagggggatggctattggatacgaacccagcaaaggcattcatatgtccatgcgtcagggtaagcttggattattgatttaaacatacagattggagccagatgctgtgtgtatgtcacaatcatgattttattttatttatttatttatttagacagagtctcactctgtcacccaggctggagtgcaatggcttgatcttgactcacagcaacctctgcctccctggttcaagcgattctcctgcctcagcctcccgagtagctgggattacaggcacccrccatcatgaccggctaatttttgtatttttagtagagacggggtttcacca

SEQ ID NO: 706878 - DNA, 635 bp, Homo sapiens
agtaagcaggttatacctttaaaacatataggaaccacaggaagaaaaataaattttatgaaatagccagttagttgatatataacaagtccgagatgccagcaaggcttctggatataaatgcccacaggcagctgaacatacagaactagaacttggagagaaaacagacyggagcaatatatctgggggtcatccatcctgccactgcagtacgagagagaccaaaaagagagccaaggacaaaacttcaagaaacatctacaggtgttggtagaaaaagggcaactggctgggcgtagtggctcacccctgtaatctcagcactctgggaggcagatcacttaagcccagaagttcaagaccagcctggacaacatggcaagacccccatctctaccaaaaaaatacatacaaaaattagttgggtgtggtggtacactcttgtggtcccagctactcgaggggttgagctgggagggtcatttgagccctggaggcagaggttgcagtgagctgagattgcaccaccgcactccagcctgggcaacagagtgagaccctgtcccctcccccccaaaaaaaggcaactaaataaacagtggttagagagggagaggagaaactgaaaagta

SEQ ID NO: 706879 - DNA, 641 bp, Homo sapiens
tattctgaagttagtcacggtttgtctagcgatgtgtgttaagaattttatcctggttggtactcagtggattcagtttgcttatgtgttttccagttctgagaaattcttgctcattattgcctcctctccattttctcaattttttgcctcctcttgtttccttgctctgtgttcttggtgaattactcaactcagtcttccagcttactaactggctcttcatgttagtctgttctgtcattcagtcatctattgagtttatttcaacaactgtttttatatccaagatagctaactggctttttttcaaaattgtgtgttatttcatggatgagatttccttctttagctcagtctctttcatagtgtagccttcttcagatatttgaggactctcagttgtgcattaatctcctctgagaggattcctgcccatcgttttgctgttgtgattgtggttgccatcatctctatagcttcccatctgtttcctttccccagaagggccttactgacttggcccttagagagttccctttttgttttcagcatggctatatatatatattttaaatctcctaacatttccatggtttggtgtggargtggcagaagaatttacagtatcttgactaaca

SEQ ID NO: 706880 - DNA, 2259 bp, Homo sapiens
atgaaaaatatattttcaaaaaagaggaaattagaagttgcatgttcagattgtgaagttgaagttctcccattaggattggaaacacatcctagaactgctaaaactgagaaatgtccaccaaagttcagtaataatcccaaggagcttactrtgtaagtaacagctgaggaacccagagtaaatctaaattattatcaatcaattggttctttttcattccttcccctctttcttttctcctcatttgtatttatcattttgcttcaaagttgttaagtctaacactttgagaaatccaggacatgtaaaaatctagccaatataccatcctcagtgttccagttttggaattttaccttatatgactttagtcaggttttttatggatgtcataagttttgctgttttttaaaattttctatcattttatctgcaaagttttcataggttctcttccttttccaaatgtacttcaaaaattatttatgattatatttcctttctctagggaaaggaataaacatagatgttcttacttaggttaatttataataattaaggatatttatgtaataatggatattatctgtacttgagtaaagagaatgaagagaatttttagtgatacagaataacttttttttcctttttagggaaacgaaatatgataatatttcaagaattcaatatcattcagttattagagatcctgaatccaagacagccatttttcaacacaatgggaaaaaaatggtaaaaaatgcaaaatgtagttgggacccttcttttcttttttaaatttttttttttttttttttttttttttttttttttttgacgcagagtctcactctgtcacccaggctggagtgtggtggcacagtcacagctcactgcagccacaatctcctgggctcgagtatcctcctccctcagcctcccgaatggctgggactacaggtgcacaccaccatgcccagctcttatttagtagagatggggtctcactatattgcccaggctggtctccaactcctgagctctagcagctgttgtgcctcagcctcccaaagttctgggattataggcatgagccaccgcacccagctgctggggcccttctgagatgtaaactattgccttcctatcctttacttagctcaaaatgtttgtgttactttatagtgtgtagaatttcttttattgttttggaatggtggacggtggaaatgctaggaccatgttctgtttacttagtatcatccacggcagttgacatgtttccagcttggctgtatgaggagaatgctggtcatgatctgacagtgtgctccactgagaccgagaggtatcccattctgagagtttgtgggagaagctaaagtcttcaggagttaatagtgatatataagaaaagggacaaagtaatttaggtgaaggagaacaaggtttttgttttttgttttgttttgttttgagatggagtttcactcttgttgcccaggctggagtgcaatggcacgatctcagcttattgcaacctctgcctcctgggttcaagcgattcccctgcttcagcctcatgagtagctgggattacaggtgcctgccaccatgcccagctacttttttgtatttttagtagagacggggtttcatgatgttggccagctggtctcaaactcctgacctcaggtgatccacccactttggcctcccgaagtgctgggattagaggcgtgagccactgcgcctggctgaaggttttaagatgtatgagaaagaagagatgcaattttatgaaagaatcatccagaaaacagtattttatgtggtagcctctgagggtaccctttgcattgtgaactaaagattagtcagagactgaaacgtagaagcagagaaagagaaaagagaacaaagagagacataatggtagcttactttagggcttgttgatgaagagtaaaaactctgctttaggtgttatgcaaatatttgccctctgcctggtaatggtacagtagctacctccttaaggtcagagaattatgaaaagattggccatggtgtcacacagacccaggtgtaacctccagctctgctgcgtgctagctgggtggtatctccatacatacatttcttttatctgtaaaaaggtaatagtatatgtttcagaattatgaggattaaatgagataagcatcagcaacttgcttagcatccaactaagtgctcaatacatgttgaccattc

SEQ ID NO: 706881 - DNA, 2259 bp, Homo sapiens
atgaaaaatatattttcaaaaaagaggaaattagaagttgcatgttcagattgtgaagttgaagttctcccattaggattggaaacacatcctagaactgctaaaactgagaaatgtccaccaaagttcagtaataatcccaaggagcttactgtgtaagtaacagctgaggaacccagagtaaatctaaattattatcaatcaattggttctttttcattccttcccctctttcttttctcctcatttgtatttatcattttgcttcaaagttgttaagtctaacactttgagaaatccaggacatgtaaaaatctagccaatataccatcctcagtgttccrgttttggaattttaccttatatgactttagtcaggttttttatggatgtcataagttttgctgttttttaaaattttctatcattttatctgcaaagttttcataggttctcttccttttccaaatgtacttcaaaaattatttatgattatatttcctttctctagggaaaggaataaacatagatgttcttacttaggttaatttataataattaaggatatttatgtaataatggatattatctgtacttgagtaaagagaatgaagagaatttttagtgatacagaataacttttttttcctttttagggaaacgaaatatgataatatttcaagaattcaatatcattcagttattagagatcctgaatccaagacagccatttttcaacacaatgggaaaaaaatggtaaaaaatgcaaaatgtagttgggacccttcttttcttttttaaatttttttttttttttttttttttttttttttttttttgacgcagagtctcactctgtcacccaggctggagtgtggtggcacagtcacagctcactgcagccacaatctcctgggctcgagtatcctcctccctcagcctcccgaatggctgggactacaggtgcacaccaccatgcccagctcttatttagtagagatggggtctcactatattgcccaggctggtctccaactcctgagctctagcagctgttgtgcctcagcctcccaaagttctgggattataggcatgagccaccgcacccagctgctggggcccttctgagatgtaaactattgccttcctatcctttacttagctcaaaatgtttgtgttactttatagtgtgtagaatttcttttattgttttggaatggtggacggtggaaatgctaggaccatgttctgtttacttagtatcatccacggcagttgacatgtttccagcttggctgtatgaggagaatgctggtcatgatctgacagtgtgctccactgagaccgagaggtatcccattctgagagtttgtgggagaagctaaagtcttcaggagttaatagtgatatataagaaaagggacaaagtaatttaggtgaaggagaacaaggtttttgttttttgttttgttttgttttgagatggagtttcactcttgttgcccaggctggagtgcaatggcacgatctcagcttattgcaacctctgcctcctgggttcaagcgattcccctgcttcagcctcatgagtagctgggattacaggtgcctgccaccatgcccagctacttttttgtatttttagtagagacggggtttcatgatgttggccagctggtctcaaactcctgacctcaggtgatccacccactttggcctcccgaagtgctgggattagaggcgtgagccactgcgcctggctgaaggttttaagatgtatgagaaagaagagatgcaattttatgaaagaatcatccagaaaacagtattttatgtggtagcctctgagggtaccctttgcattgtgaactaaagattagtcagagactgaaacgtagaagcagagaaagagaaaagagaacaaagagagacataatggtagcttactttagggcttgttgatgaagagtaaaaactctgctttaggtgttatgcaaatatttgccctctgcctggtaatggtacagtagctacctccttaaggtcagagaattatgaaaagattggccatggtgtcacacagacccaggtgtaacctccagctctgctgcgtgctagctgggtggtatctccatacatacatttcttttatctgtaaaaaggtaatagtatatgtttcagaattatgaggattaaatgagataagcatcagcaacttgcttagcatccaactaagtgctcaatacatgttgaccattc

SEQ ID NO: 706882 - DNA, 2259 bp, Homo sapiens
atgaaaaatatattttcaaaaaagaggaaattagaagttgcatgttcagattgtgaagttgaagttctcccattaggattggaaacacatcctagaactgctaaaactgagaaatgtccaccaaagttcagtaataatcccaaggagcttactgtgtaagtaacagctgaggaacccagagtaaatctaaattattatcaatcaattggttctttttcattccttcccctctttcttttctcctcatttgtatttatcattttgcttcaaagttgttaagtctaacactttgagaaatccaggacatgtaaaaatctagccaatataccatcctcagtgttccagttttggaattttaccttatatgactttagtcaggttttttatggatgtcataagttttgctgttttttaaaattttctatcattttatctgcaaagttttcataggttctcttccttttccaaatgtacttcaaaaattatttatgattatatttcctttctctagggaaaggaataaacatagatgttcttacttaggttaatttataataattaaggatatttatgtaataatggatattatctgtacttgagtaaagagaatgaagagaatttttagtgatacagaataacttttttttcctttttagggaaacgaaatatgataatatttcaagaattcaatatcattcagttattagagatcctgaatccaagacagccatttttcaacacaatgggaaaaaaatggtaaaaaatgcaaaatgtagttgggacccttcttttcttttttaaatttttttttttttttttttttttttttttttttttttgacgcagagtctcactctgtcacccaggctggagtgtggtggcacagtcacagctcactgcagccacaatctcctgggctcgagtatcctcctccctcagcctcccgaatggctgggactacaggtgcacaccaccatgcccagctcttatttagtagagatggggtctcactatattgcccaggctggtctccaactcctgagctctagcagctgttgtgcctcagcctcccaaagttctgggattataggcatgagccaccgcacccagctgctggggcccttctgagatgtaaactattgccttcctatcctttacttagctcaaaatgtttgtgttactttatagtgtgtagaatttcttttattgttttggaatggtggacggtggaaatgctaggaccatgttctgtttacttagtatcatccacggcagttgacatgtttccagcttggctgtatgaggagaatgctggtcatgatctgacagtgtgctccactgagaccgagaggtatcccattctgagagtttgtgggagaagctaaagtcttcaggagttaatagtgatatataagaaaagggacaaagtaatttaggtgaaggagaacaaggtttttgttttttgttttgttttgttttgagatggagtttcactcttgttgcccaggctggagtgcaatggcacgatctcagcttattgcaacctctgcctcctgggttcaagcgattcccctgcttcagcctcatgagtagctgggattacaggtgcctgccaccatgcccagctacttttttgtatttttagtagagacggggtttcatgatgttggccagctggtctcaaactcctgacctcaggtgatccacccactttggcctcccraagtgctgggattagaggcgtgagccactgcgcctggctgaaggttttaagatgtatgagaaagaagagatgcaattttatgaaagaatcatccagaaaacagtattttatgtggtagcctctgagggtaccctttgcattgtgaactaaagattagtcagagactgaaacgtagaagcagagaaagagaaaagagaacaaagagagacataatggtagcttactttagggcttgttgatgaagagtaaaaactctgctttaggtgttatgcaaatatttgccctctgcctggtaatggtacagtagctacctccttaaggtcagagaattatgaaaagattggccatggtgtcacacagacccaggtgtaacctccagctctgctgcgtgctagctgggtggtatctccatacatacatttcttttatctgtaaaaaggtaatagtatatgtttcagaattatgaggattaaatgagataagcatcagcaacttgcttagcatccaactaagtgctcaatacatgttgaccattc

SEQ ID NO: 706883 - DNA, 2259 bp, Homo sapiens
atgaaaaatatattttcaaaaaagaggaaattagaagttgcatgttcagattgtgaagttgaagttctcccattaggattggaaacacatcctagaactgctaaaactgagaaatgtccaccaaagttcagtaataatcccaaggagcttactgtgtaagtaacagctgaggaacccagagtaaatctaaattattatcaatcaattggttctttttcattccttcccctctttcttttctcctcatttgtatttatcattttgcttcaaagttgttaagtctaacactttgagaaatccaggacatgtaaaaatctagccaatataccatcctcagtgttccagttttggaattttaccttatatgactttagtcaggttttttatggatgtcataagttttgctgttttttaaaattttctatcattttatctgcaaagttttcataggttctcttccttttccaaatgtacttcaaaaattatttatgattatatttcctttctctagggaaaggaataaacatagatgttcttacttaggttaatttataataattaaggatatttatgtaataatggatattatctgtacttgagtaaagagaatgaagagaatttttagtgatacagaataacttttttttcctttttagggaaacgaaatatgataatatttcaagaattcaatatcattcagttattagagatcctgaatccaagacagccatttttcaacacaatgggaaaaaaatggtaaaaaatgcaaaatgtagttgggacccttcttttcttttttaaatttttttttttttttttttttttttttttttttttttgacgcagagtctcactctgtcacccaggctggagtgtggtggcacagtcacagctcactgcagccacaatctcctgggctcgagtatcctcctccctcagcctcccgaatggctgggactacaggtgcacaccaccatgcccagctcttatttagtagagatggggtctcactatattgcccaggctggtctccaactcctgagctctagcagctgttgtgcctcagcctcccaaagttctgggattataggcatgagccaccgcacccagctgctggggcccttctgagatgtaaactattgccttcctatcctttacttagctcaaaatgtttgtgttactttatagtgtgtagaatttcttttattgttttggaatggtggacggtggaaatgctaggaccatgttctgtttacttagtatcatccacggcagttgacatgtttccagcttggctgtatgaggagaatgctggtcatgatctgacagtgtgctccactgagaccgagaggtatcccattctgagagtttgtgggagaagctaaagtcttcaggagttaatagtgatatataagaaaagggacaaagtaatttaggtgaaggagaacaaggtttttgttttttgttttgttttgttttgagatggagtttcactcttgttgcccaggctggagtgcaatggcacgatctcagcttattgcaacctctgcctcctgggttcaagcgattcccctgcttcagcctcatgagtagctgggattacaggtgcctgccaccatgcccagctacttttttgtatttttagtagagacggggtttcatgatgttggccagctggtctcaaactcctgacctcaggtgatccacccactttggcctcccgaagtgctgggattagaggcrtgagccactgcgcctggctgaaggttttaagatgtatgagaaagaagagatgcaattttatgaaagaatcatccagaaaacagtattttatgtggtagcctctgagggtaccctttgcattgtgaactaaagattagtcagagactgaaacgtagaagcagagaaagagaaaagagaacaaagagagacataatggtagcttactttagggcttgttgatgaagagtaaaaactctgctttaggtgttatgcaaatatttgccctctgcctggtaatggtacagtagctacctccttaaggtcagagaattatgaaaagattggccatggtgtcacacagacccaggtgtaacctccagctctgctgcgtgctagctgggtggtatctccatacatacatttcttttatctgtaaaaaggtaatagtatatgtttcagaattatgaggattaaatgagataagcatcagcaacttgcttagcatccaactaagtgctcaatacatgttgaccattc

SEQ ID NO: 706884 - DNA, 2259 bp, Homo sapiens
atgaaaaatatattttcaaaaaagaggaaattagaagttgcatgttcagattgtgaagttgaagttctcccattaggattggaaacacatcctagaactgctaaaactgagaaatgtccaccaaagttcagtaataatcccaaggagcttactgtgtaagtaacagctgaggaacccagagtaaatctaaattattatcaatcaattggttctttttcattccttcccctctttcttttctcctcatttgtatttatcattttgcttcaaagttgttaagtctaacactttgagaaatccaggacatgtaaaaatctagccaatataccatcctcagtgttccagttttggaattttaccttatatgactttagtcaggttttttatggatgtcataagttttgctgttttttaaaattttctatcattttatctgcaaagttttcataggttctcttccttttccaaatgtacttcaaaaattatttatgattatatttcctttctctagggaaaggaataaacatagatgttcttacttaggttaatttataataattaaggatatttatgtaataatggatattatctgtacttgagtaaagagaatgaagagaatttttagtgatacagaataacttttttttcctttttagggaaacgaaatatgataatatttcaagaattcaatatcattcagttattagagatcctgaatccaagacagccatttttcaacacaatgggaaaaaaatggtaaaaaatgcaaaatgtagttgggacccttcttttcttttttaaatttttttttttttttttttttttttttttttttttttgacgcagagtctcactctgtcacccaggctggagtgtggtggcacagtcacagctcactgcagccacaatctcctgggctcgagtatcctcctccctcagcctcccgaatggctgggactacaggtgcacaccaccatgcccagctcttatttagtagagatggggtctcactatattgcccaggctggtctccaactcctgagctctagcagctgttgtgcctcagcctcccaaagttctgggattataggcatgagccaccgcacccagctgctggggcccttctgagatgtaaactattgccttcctatcctttacttagctcaaaatgtttgtgttactttatagtgtgtagaatttcttttattgttttggaatggtggacggtggaaatgctaggaccatgttctgtttacttagtatcatccacggcagttgacatgtttccagcttggctgtatgaggagaatgctggtcatgatctgacagtgtgctccactgagaccgagaggtatcccattctgagagtttgtgggagaagctaaagtcttcaggagttaatagtgatatataagaaaagggacaaagtaatttaggtgaaggagaacaaggtttttgttttttgttttgttttgttttgagatggagtttcactcttgttgcccaggctggagtgcaatggcacgatctcagcttattgcaacctctgcctcctgggttcaagcgattcccctgcttcagcctcatgagtagctgggattacaggtgcctgccaccatgcccagctacttttttgtatttttagtagagacggggtttcatgatgttggccagctggtctcaaactcctgacctcaggtgatccacccactttggcctcccgaagtgctgggattagaggcgtgagccactgcgcctggctgaaggttttaagatgtatgagaaagaagagatgcaattttatgaaagaatcatccagaaaacagtattttatgtggtagcctctgagggtaccctttgcattgtgaactaaagattagtcagagactgaaacgtagaagcagagaaagagaaaagagaacaragagagacataatggtagcttactttagggcttgttgatgaagagtaaaaactctgctttaggtgttatgcaaatatttgccctctgcctggtaatggtacagtagctacctccttaaggtcagagaattatgaaaagattggccatggtgtcacacagacccaggtgtaacctccagctctgctgcgtgctagctgggtggtatctccatacatacatttcttttatctgtaaaaaggtaatagtatatgtttcagaattatgaggattaaatgagataagcatcagcaacttgcttagcatccaactaagtgctcaatacatgttgaccattc

SEQ ID NO: 706885 - DNA, 1296 bp, Homo sapiens
ttgcctactgtggtagtctccttcatcttctcctttttaaataattattttgctgggtgcaggggctcacacctgtagtttcagcactttagaggctgaggtaggaggatggcttgagcccaggagttctggaccagcctgggcaacatagtgagaccttgtctctattaaaacttttaaaatggccaggcacagtggctcacgcctgtaatcccagccagcattttgggaggccaaggcgggaagatgacctgaggtcaggagttcaagaccagcctgaccaacatggagaaaccccgtctctactaaaaatacaaaattckcatggcatggtggtatatgcctgtcatcccagctactcgggaggctgaggcaggagaattgcttgaacccaggaggcagaggttgcagtgagctgagatcatgccattgcactctagcctgggcaacaagagtgaaactccatctcaaaaaagaaaataaaagaaaaaaacattaaaattagttgagcctggtggcacgtgcctctagttccacctactcaggaggctgaggtgggaacattgcttgagtccaggaggttgaggctgcagcgagccgtgctcacactattgcactccagcctgggcgccagagagaccctgtcttaaaaaataaataagtaaatacataaataaaaattaataaataaataagtaaatctctcactgcattgctcagtgattctttttctttgacttaaaggacatactcttttaccctgctcatattatgtttctggtttttttccttctgggattttcctctcaccccattgtgttgtttctgcccgtgttcctttttcctccactgaggagatgatccctgaattactttattgaggatgactcacaatcagggagcaacaagtcgccaataaagttgacagtgcttcttagggaccccatttgtggcaataaaatttgcaactaggcaagagaaatttcaatttgcaatacagtgtttttaattgttcagatacgtctttaaaatacagtatggcaagttaaagtcacttacgaactgctgagatttttcttaccaaaaaaggtgctgcctagaaagaacttttcagcagtgatgctcagttgttggctcaaacatttgcagtctgaaatgatgaaactgtgcttgacacatagtacagagggacatgtttcttccatatcttgattgggagaacctttgaactagaagtggcactacccaggttggtgaattgagtagatcctttaggtactggtgcattttagccct

SEQ ID NO: 706886 - DNA, 1880 bp, Homo sapiens
gtgatgatgaacatattaaaattatagaatcatttgaaggttattattatccagcagtaacacagtagatgcctttacagaactgaatgtaatgagagactagtattgtgtccctttgtgaagtctttaaattataacagtttcaaaatatatgaagattttgaccaaatcagaacaaaggccattcatgatataaaccactttgagacagtaagagctattggttgggtctatagggccactagtctaggcctccgataatttatgcaccaggagaaatgtctttgaggaacagataattgcctgcatgcctctcctagacatgttggtggaagctgcaacaggagtggttattattaatcccttttagaggacaatactagtctcacctctgaaccacccatcaatattgtgctcaattagcactttgtttcaattgacaatgaaattatatactgaaaacagcatgaatccatgacctgaccagaagcattctctagccagtgaatgatttttctatccttgcctccttttcaatttaacaaaagaggataacactgaattcagactacaggtgtgcagatcctcattgttttaagtcatcagaaagaacacaattaaaaattaatttaaaaactaggaatatttatatcgtctttcctcatagttttcctcttctggtcttttgccttaatagttatttactatttctcattcatatttggtagaaagtgtcattatacaatgtataacaaaggtcttgagaatacaaatgtataactctttcatataattataatccaaagaaatctttaatatattcatgttaaacatcggtttatatgatatttgcaatccatgtgaaaaaaccattttacaaaaacattaaaataaagcccaagtttttgtatttgagtgattcagcttaagaagacttatataatttatgaaataaatacatatcatttgagcataatgcaacacacctttaaaaaccacttgtttgaaaagaagcaaggcatatccactgattatatacaactactgctttcaaaattttcacttttaaccagtagacttttcatcagtgttttatattgtcagggtgttttttgtttttgtttttatgatttaatgtatttaacttgtttctctattagaacagaaaaaacacatacttctttatttcttctgcattcctttccatttgttggccatgacagcagttagattatacccctttctactgaagcgttgtgctaagttttgggagggcaggagaaaatatcttcagcttgaaaaaaaaaatacttgaataaacaggtaatttttktattaagatatacaatggtcactttctttagtgagttatgacaatctacctctgaagtacaacatgttagagtcatttgctctggacaaagtcactttcaggaatggttttattacaatgaaaaggaataggtatactggctcttaagtgccactattgccctttatgagaatgagaactagattagctggcacgcttatatcccacactctttatgagccttatatgttttggggtattttcatcattttaatctggatgatgttattttcagaaacatcctaaaacaattttcaaagaagcaaggaaaaggttaacactgaacttgcataatattcagtcatgaaaatgcatttgaatacatttgtttagcaatgctaacatagcaatcttcagaagttgcccagagatatcttttgaggtttcatattatgttaaacatgcaaaagcataaaaacagggaaaaaggaaatggtataacaataaaaaggtttaaaatgatgaggaatattcatttgcttccctgattaaaattaagttatataat

SEQ ID NO: 706887 - DNA, 1840 bp, Homo sapiens
gggcaaccaagagagcccctgtctctacaaaataaataataattaaaaaaaatacctaggtgtggcggcatgcacttgtagtcccagttaccaaggaggctgaggcaggagaatctcttgagcccaggaggtcaaggctgcagttagctaggaggctgtcaccactgcacttgctccagcctgagtaaccgaaagacactgtctctgaagaaaaaaaaaagttaaaataaatccaaaaatatgtatagtaaatgttctcaaagacataaggcacaatatttgaacctgaagaagaaattagcaatcataaaatattttttcagtatgaaaaccatatctgttgaaatgaaggattaaatatatggtataaacagcagaagggttaaatttgaggagtgctcattagtgagatggaagataatgttcaaataataacaaatttttttttaaatttagaaaactagacttcacatgtactgctgatgggagtacagactgatgcaactatccagagagcaatgtggagtgaaatgaaatccaaacctatgaaccagcagtcctactcttgatccacatggcaaataaacttaagtttaaactcatgaaaggatatgatatccaktagagacaattgttgttgcagggagttggaaggaggcaaagaatctatcactgtaatacacacacacacaattgtttataaaaatggaatacaggccaggtgtggtggctcatgcctataatcacagtgctttgggaggccgaggcgggcagatcacaaggttaggagtttgagaccagcctgtccaatatggtgaaactccatctctactaaaaatacaaaacttagccaggcgtggtgacacgcgcctgtagttccaggtactcgggaggctgaggcagaagaatcgcttgaacacgggaggcagaggttgcaatgagccgagatcacgccactgcactccagcctgggcaacagagcgagactccatctcaaaaaaaaaaaaaaagaagaagaagtaatagtgtgctgtgcagcatgaaaaaaaaatgaggtaaagatacacacgataacaataataggtcttaataatatagtgttggatttacaaaagtaaaaactatatatacaacatataactcaaaaacaaccacaaaattttatagttttcaaaaaatgcatattcaagggtctaccacaaacacatgaatgcaattgaagtaagagggagaagcagaaggaaataaaaatagagattagagattagggcaagataaaataattagataaaataaaccaagaaattcctattttatttatcatgataagaatgtactttaaaaagaggatgactacataaaatgagttagggaggagtacctctttttctattgtttggaataatttcagaaggaatgataccagttcctctttgtacctctggtagaatttggctgtgaatccgtctggtcctgggcctttttttttggttggtaggctataattactgcctcaatttcagaacttgttattgatctattcagggatttgacttcttcttggtttagtcttgggagagtggatgtgtccaggaatttataaattttttctagattttctagtttatttgtgtagaggtttttatagtattctctgacggtagtttgtatttctgggggatcagtagtgatatcccctttatcattttttattgtgtctatttgagtcttctctcttttcttctttattagtctgggtagtggtctatctattttgttgatctgttcaaaaaaacccctcctggattcattgattttttgaaggacttttcatgtctct

SEQ ID NO: 706888 - DNA, 1840 bp, Homo sapiens
gggcaaccaagagagcccctgtctctacaaaataaataataattaaaaaaaatacctaggtgtggcggcatgcacttgtagtcccagttaccaaggaggctgaggcaggagaatctcttgagcccaggaggtcaaggctgcagttagctaggaggctgtcaccactgcacttgctccagcctgagtaaccgaaagacactgtctctgaagaaaaaaaaaagttaaaataaatccaaaaatatgtatagtaaatgttctcaaagacataaggcacaatatttgaacctgaagaagaaattagcaatcataaaatattttttcagtatgaaaaccatatctgttgaaatgaaggattaaatatatggtataaacagcagaagggttaaatttgaggagtgctcattagtgagatggaagataatgttcaaataataacaaatttttttttaaatttagaaaactagacttcacatgtactgctgatgggagtacagactgatgcaactatccagagagcaatgtggagtgaaatgaaatccaaacctatgaaccagcagtcctactcttgatccacatggcaaataaacttaagtttaaactcatgaaaggatatgatatccagtagagacawttgttgttgcagggagttggaaggaggcaaagaatctatcactgtaatacacacacacacaattgtttataaaaatggaatacaggccaggtgtggtggctcatgcctataatcacagtgctttgggaggccgaggcgggcagatcacaaggttaggagtttgagaccagcctgtccaatatggtgaaactccatctctactaaaaatacaaaacttagccaggcgtggtgacacgcgcctgtagttccaggtactcgggaggctgaggcagaagaatcgcttgaacacgggaggcagaggttgcaatgagccgagatcacgccactgcactccagcctgggcaacagagcgagactccatctcaaaaaaaaaaaaaaagaagaagaagtaatagtgtgctgtgcagcatgaaaaaaaaatgaggtaaagatacacacgataacaataataggtcttaataatatagtgttggatttacaaaagtaaaaactatatatacaacatataactcaaaaacaaccacaaaattttatagttttcaaaaaatgcatattcaagggtctaccacaaacacatgaatgcaattgaagtaagagggagaagcagaaggaaataaaaatagagattagagattagggcaagataaaataattagataaaataaaccaagaaattcctattttatttatcatgataagaatgtactttaaaaagaggatgactacataaaatgagttagggaggagtacctctttttctattgtttggaataatttcagaaggaatgataccagttcctctttgtacctctggtagaatttggctgtgaatccgtctggtcctgggcctttttttttggttggtaggctataattactgcctcaatttcagaacttgttattgatctattcagggatttgacttcttcttggtttagtcttgggagagtggatgtgtccaggaatttataaattttttctagattttctagtttatttgtgtagaggtttttatagtattctctgacggtagtttgtatttctgggggatcagtagtgatatcccctttatcattttttattgtgtctatttgagtcttctctcttttcttctttattagtctgggtagtggtctatctattttgttgatctgttcaaaaaaacccctcctggattcattgattttttgaaggacttttcatgtctct

SEQ ID NO: 706889 - DNA, 1840 bp, Homo sapiens
gggcaaccaagagagcccctgtctctacaaaataaataataattaaaaaaaatacctaggtgtggcggcatgcacttgtagtcccagttaccaaggaggctgaggcaggagaatctcttgagcccaggaggtcaaggctgcagttagctaggaggctgtcaccactgcacttgctccagcctgagtaaccgaaagacactgtctctgaagaaaaaaaaaagttaaaataaatccaaaaatatgtatagtaaatgttctcaaagacataaggcacaatatttgaacctgaagaagaaattagcaatcataaaatattttttcagtatgaaaaccatatctgttgaaatgaaggattaaatatatggtataaacagcagaagggttaaatttgaggagtgctcattagtgagatggaagataatgttcaaataataacaaatttttttttaaatttagaaaactagacttcacatgtactgctgatgggagtacagactgatgcaactatccagagagcaatgtggagtgaaatgaaatccaaacctatgaaccagcagtcctactcttgatccacatggcaaataaacttaagtttaaactcatgaaaggatatgatatccagtagagacaattgttgttgcagggagttggaaggaggcaaagaatctatcactgtaatacacacacacacaattgtttataaaaatggaatacaggccaggtgtggtggctcatgcctataatcacagtgctttgggaggccgaggcgggcagatcacaaggttaggagtttgagaccagcctgtccaatatggtgaaactccatctctactaaaaatacaaaacttagccaggcgtggtgacacgcgcctgtagttccaggtactcgggaggctgaggcagaagaatcrcttgaacacgggaggcagaggttgcaatgagccgagatcacgccactgcactccagcctgggcaacagagcgagactccatctcaaaaaaaaaaaaaaagaagaagaagtaatagtgtgctgtgcagcatgaaaaaaaaatgaggtaaagatacacacgataacaataataggtcttaataatatagtgttggatttacaaaagtaaaaactatatatacaacatataactcaaaaacaaccacaaaattttatagttttcaaaaaatgcatattcaagggtctaccacaaacacatgaatgcaattgaagtaagagggagaagcagaaggaaataaaaatagagattagagattagggcaagataaaataattagataaaataaaccaagaaattcctattttatttatcatgataagaatgtactttaaaaagaggatgactacataaaatgagttagggaggagtacctctttttctattgtttggaataatttcagaaggaatgataccagttcctctttgtacctctggtagaatttggctgtgaatccgtctggtcctgggcctttttttttggttggtaggctataattactgcctcaatttcagaacttgttattgatctattcagggatttgacttcttcttggtttagtcttgggagagtggatgtgtccaggaatttataaattttttctagattttctagtttatttgtgtagaggtttttatagtattctctgacggtagtttgtatttctgggggatcagtagtgatatcccctttatcattttttattgtgtctatttgagtcttctctcttttcttctttattagtctgggtagtggtctatctattttgttgatctgttcaaaaaaacccctcctggattcattgattttttgaaggacttttcatgtctct

SEQ ID NO: 706890 - DNA, 1840 bp, Homo sapiens
gggcaaccaagagagcccctgtctctacaaaataaataataattaaaaaaaatacctaggtgtggcggcatgcacttgtagtcccagttaccaaggaggctgaggcaggagaatctcttgagcccaggaggtcaaggctgcagttagctaggaggctgtcaccactgcacttgctccagcctgagtaaccgaaagacactgtctctgaagaaaaaaaaaagttaaaataaatccaaaaatatgtatagtaaatgttctcaaagacataaggcacaatatttgaacctgaagaagaaattagcaatcataaaatattttttcagtatgaaaaccatatctgttgaaatgaaggattaaatatatggtataaacagcagaagggttaaatttgaggagtgctcattagtgagatggaagataatgttcaaataataacaaatttttttttaaatttagaaaactagacttcacatgtactgctgatgggagtacagactgatgcaactatccagagagcaatgtggagtgaaatgaaatccaaacctatgaaccagcagtcctactcttgatccacatggcaaataaacttaagtttaaactcatgaaaggatatgatatccagtagagacaattgttgttgcagggagttggaaggaggcaaagaatctatcactgtaatacacacacacacaattgtttataaaaatggaatacaggccaggtgtggtggctcatgcctataatcacagtgctttgggaggccgaggcgggcagatcacaaggttaggagtttgagaccagcctgtccaatatggtgaaactccatctctactaaaaatacaaaacttagccaggcgtggtgacacgcgcctgtagttccaggtactcgggaggctgaggcagaagaatcgcttgaacacgggagkcagaggttgcaatgagccgagatcacgccactgcactccagcctgggcaacagagcgagactccatctcaaaaaaaaaaaaaaagaagaagaagtaatagtgtgctgtgcagcatgaaaaaaaaatgaggtaaagatacacacgataacaataataggtcttaataatatagtgttggatttacaaaagtaaaaactatatatacaacatataactcaaaaacaaccacaaaattttatagttttcaaaaaatgcatattcaagggtctaccacaaacacatgaatgcaattgaagtaagagggagaagcagaaggaaataaaaatagagattagagattagggcaagataaaataattagataaaataaaccaagaaattcctattttatttatcatgataagaatgtactttaaaaagaggatgactacataaaatgagttagggaggagtacctctttttctattgtttggaataatttcagaaggaatgataccagttcctctttgtacctctggtagaatttggctgtgaatccgtctggtcctgggcctttttttttggttggtaggctataattactgcctcaatttcagaacttgttattgatctattcagggatttgacttcttcttggtttagtcttgggagagtggatgtgtccaggaatttataaattttttctagattttctagtttatttgtgtagaggtttttatagtattctctgacggtagtttgtatttctgggggatcagtagtgatatcccctttatcattttttattgtgtctatttgagtcttctctcttttcttctttattagtctgggtagtggtctatctattttgttgatctgttcaaaaaaacccctcctggattcattgattttttgaaggacttttcatgtctct

SEQ ID NO: 706891 - DNA, 595 bp, Homo sapiens
gtgccataacacccggctaatttttgtatttttagtagagacagggtttcaccatgttggccaggatggtcttgatctcttgacctcgtgatccacccaccttggcctcccaaagtgctgggattacaggtgtgaaccaccacacccagctactgtattactttttatgcytccagaatttttctgtgttgttgcaggtgtctgttgtgccttaatttttgctattgtagaggattctattatgtgcaattgcgcagcagtgtatgtatctgttcccctgtggatggacatttgggttgtgtccagtgtctcttgaccacctaccttgtgccatgcccccgaccctcctgccattactccacaatctagctacatccacaaagccatgacttcacaaaaccctgtcttccacttctgagctccagaccatataaaaggcataatggtgtttattgagcacttactctgagctagaaacgattctcaacattttacatgtggtagcgcatttaatattcacagcaacacaaatgggaagtaatattcttatcaccgttttacaaatgagaagaccaaggcccagaagagttgaata

SEQ ID NO: 706892 - DNA, 595 bp, Homo sapiens
gtgccataacacccggctaatttttgtatttttagtagagacagggtttcaccatgttggccaggatggtcttgatctcttgacctcgtgatccacccaccttggcctcccaaagtgctgggattacaggtgtgaaccaccacacccagctactgtattactttttatgcctccagaatttttctgtgttgttgcaggtgtctgttgtgccttaatttttgctattgyagaggattctattatgtgcaattgcgcagcagtgtatgtatctgttcccctgtggatggacatttgggttgtgtccagtgtctcttgaccacctaccttgtgccatgcccccgaccctcctgccattactccacaatctagctacatccacaaagccatgacttcacaaaaccctgtcttccacttctgagctccagaccatataaaaggcataatggtgtttattgagcacttactctgagctagaaacgattctcaacattttacatgtggtagcgcatttaatattcacagcaacacaaatgggaagtaatattcttatcaccgttttacaaatgagaagaccaaggcccagaagagttgaata

SEQ ID NO: 706893 - DNA, 595 bp, Homo sapiens
gtgccataacacccggctaatttttgtatttttagtagagacagggtttcaccatgttggccaggatggtcttgatctcttgacctcgtgatccacccaccttggcctcccaaagtgctgggattacaggtgtgaaccaccacacccagctactgtattactttttatgcctccagaatttttctgtgttgttgcaggtgtctgttgtgccttaatttttgctattgtagaggattctattatgtgcaattgcgcagcagtgtatgtatctgttcccctgtggatggacatttgggttgtgtccagtgtctcttgaccacctaccttgtgccatgcccccgaccctcctgccattactccacaatctagctacatccacaaagccatgacttcacaaaaccctgtcttccacttctgagctccagaccatataaaaggcrtaatggtgtttattgagcacttactctgagctagaaacgattctcaacattttacatgtggtagcgcatttaatattcacagcaacacaaatgggaagtaatattcttatcaccgttttacaaatgagaagaccaaggcccagaagagttgaata

SEQ ID NO: 706894 - DNA, 1229 bp, Homo sapiens
atctggaggtctttactcaaagtaagttctcctcttgtcccccaacatgattctctcagagataaaataccaaaaaaaaaatacattatgaaaaaaatgtgtggctgtagagaaaacatcagtgttaaagactggggataaattaatccaaatttctgttacctaatattttcctttgcctttgatacttcccattcaatacttgagtgattattttattcattcaataaacatcgattaatggctcattatatttgaaattaaaacataaactaataatgtagagtaaagccaccaagcaccatttggaataacagagaaaacatataaacaaatcattgtaatatcataaaataaaataccaagyctagtatgtccatgaaattcctctagatgctgacagaattcctaaattctcattctggattcaaacttcagaaagtccaagattctccaggacattacttccaacttacattcttagggaactcctgaacacagaatttctccctctcagacctctccagctcaaatcacaattcaaagtactacaggtattcccaggggctatcaaccaggtcctgacctcctcagcagagctaattcaaagtggaaatgaggtagtcaacaactgggccctcctttacataagattcatttggcagactcttactgaccccaactatatgccaggcactggtctaggagctgaacacagaacaatcagcaaggcccctccctcaggagcttacgtgctaggggcaaaagcccagcaacaaccagatagacagagaaatatgtattatgttatcacaccctgctaggtcctatgagggagataaagcagaggaaaggaagagaggaaaagagaacaggaactttttaaagatagcccagatagaggaggggatatttgagagaacagagaagaaagagggagagagtcacgtgaatgtcaagaggagagtgttccaggcaggagaacaccaaggctcagggacagggaatgtgctccctgatctcccagggcagctcctctgctagctatggttggtcattcaccccatggcacttacttcatgccttccccaatgtgagaaagctgcttgaattcccacgattacactacattaacgtatctctaaaatatgtcttttctgctggatatgaattttgagttgttgaggtctaagttacaaacttcccagaagtagaacccagttgtcata

SEQ ID NO: 706895 - DNA, 1229 bp, Homo sapiens
atctggaggtctttactcaaagtaagttctcctcttgtcccccaacatgattctctcagagataaaataccaaaaaaaaaatacattatgaaaaaaatgtgtggctgtagagaaaacatcagtgttaaagactggggataaattaatccaaatttctgttacctaatattttcctttgcctttgatacttcccattcaatacttgagtgattattttattcattcaataaacatcgattaatggctcattatatttgaaattaaaacataaactaataatgtagagtaaagccaccaagcaccatttggaataacagagaaaacatataaacaaatcattgtaatatcataaaataaaataccaagcctagtatgtccatgaaattcctctagatgctgacagaattcctaaattctcattctggattcaaacttcagaaagtccaagattctccaggacattacttccaacttacattcttagggaactcctgaacacagaatttctccctctcagacctctccagctcaaatcacaattcaaagtactacaggtattcccaggggctatcaaccaggtcctgacctcctcagcagagctaattcaaagtggaaatgaggtagtcaacaactgggccctcctttacataagattcatttggcagactcttactgaccccaactatatgccaggcactggtctaggagctgaacacagaacaatcagcaaggcccctccctcaggagcttacgtgctaggggcaaaagcccagcaacaaccagatagacagagaaataygtattatgttatcacaccctgctaggtcctatgagggagataaagcagaggaaaggaagagaggaaaagagaacaggaactttttaaagatagcccagatagaggaggggatatttgagagaacagagaagaaagagggagagagtcacgtgaatgtcaagaggagagtgttccaggcaggagaacaccaaggctcagggacagggaatgtgctccctgatctcccagggcagctcctctgctagctatggttggtcattcaccccatggcacttacttcatgccttccccaatgtgagaaagctgcttgaattcccacgattacactacattaacgtatctctaaaatatgtcttttctgctggatatgaattttgagttgttgaggtctaagttacaaacttcccagaagtagaacccagttgtcata

SEQ ID NO: 706896 - DNA, 1229 bp, Homo sapiens
atctggaggtctttactcaaagtaagttctcctcttgtcccccaacatgattctctcagagataaaataccaaaaaaaaaatacattatgaaaaaaatgtgtggctgtagagaaaacatcagtgttaaagactggggataaattaatccaaatttctgttacctaatattttcctttgcctttgatacttcccattcaatacttgagtgattattttattcattcaataaacatcgattaatggctcattatatttgaaattaaaacataaactaataatgtagagtaaagccaccaagcaccatttggaataacagagaaaacatataaacaaatcattgtaatatcataaaataaaataccaagcctagtatgtccatgaaattcctctagatgctgacagaattcctaaattctcattctggattcaaacttcagaaagtccaagattctccaggacattacttccaacttacattcttagggaactcctgaacacagaatttctccctctcagacctctccagctcaaatcacaattcaaagtactacaggtattcccaggggctatcaaccaggtcctgacctcctcagcagagctaattcaaagtggaaatgaggtagtcaacaactgggccctcctttacataagattcatttggcagactcttactgaccccaactatatgccaggcactggtctaggagctgaacacagaacaatcagcaaggcccctccctcaggagcttacgtgctaggggcaaaagcccagcaacaaccagatagacagagaaatatgtattatgttatcacaccctgctaggtcctatgagggagataaagcagaggaaaggaagagaggaaaagagaacaggaactttttaaagatagcccagatagaggaggggatatttgagagaacagagaagaaagagggagagagtcacgtgaatgtcaagaggagagtgttccaggcaggagaacaccaaggctcagggacagggaaygtgctccctgatctcccagggcagctcctctgctagctatggttggtcattcaccccatggcacttacttcatgccttccccaatgtgagaaagctgcttgaattcccacgattacactacattaacgtatctctaaaatatgtcttttctgctggatatgaattttgagttgttgaggtctaagttacaaacttcccagaagtagaacccagttgtcata

SEQ ID NO: 706897 - DNA, 594 bp, Homo sapiens
agattttttggtgattattctcacacgtgtctgatagtctgtaaagcttaatctttgatatttccaggaatgcatatcctaaaagaatgtaaaaggaatcaaacagacatataaaagaaatgaactagttagcctgagagacatatactcctattactttttccattttgtttgctctattttctacttaattggtaaaagacatatttaatacactgtgcctttccactgggttgcccttggttgtgactaatcctgggaaccagatttcctaatattgtgggctaattacatgttttcactattaaccaatgcttggatttacataatttgctgtaggaggagcaagcagaagaattagagatggatgcgttgttcatattttgtattagataaaaattttctgctggctggaagaaatttcttaaatctatattagatattgggaacatttttcttctcagctarcttccatgtaacatcttcttatttggttactaactgtctcagacattcaaggatgaaaccacatcaagcacttcttcagaatgtgagagcaagaaatacaattctcttaaggaaaaagcaagtaaa

SEQ ID NO: 706898 - DNA, 897 bp, Homo sapiens
tcattgtaaagaggaaataaaatgacatagaagtatgtgaagtaaaaagccaatctctatcaattcttcctacccactcaccaagcgtaagcacttttaatgttgatgtgtatcctttcaaccacttctatgcatgtgtaaacacgatttataatgcttagcgaaaaatgagatgatacaacatatgttgtcctataacttcctttatttatacaacatatatcatgaacaatctttcatttcaatatatttatataaatcatgttcttcttattggctgctaaatgcatatgcatactttactaagctacttctctattgaaaggcatttaggtggtctccaacatttttggctaaaacayaaactgcattggtcatttttgaactttttcccttgaccatttgtgtgcagttaagatttatggaataataggctatgtatttgtaaactttaagtattacagacaaatttctccccaaaataaaatagaacttaacaccttataaaatttggctttttccaagctgatgttcgagataaatttatctaactcacgcttgatggatattgaaatgcagcatgaaacaaaaatataagtaaaaacacacacattaactcaatggcttatatttttctaccatgccatactaaaatattctgtatctgtctgaatctaagaataattcatatcaatattttgagagactgaacaatgttcacaatactttggaaaatgaaaagaagcaaatcaaagagtatattcagttttgaacctacctatctattactagcaggataaattcagctatattgcataataaattagcctggaaattccactggtctaacataatgattaattttttacttatactctatgtatgtttcaggttatc

SEQ ID NO: 706899 - DNA, 897 bp, Homo sapiens
tcattgtaaagaggaaataaaatgacatagaagtatgtgaagtaaaaagccaatctctatcaattcttcctacccactcaccaagcgtaagcacttttaatgttgatgtgtatcctttcaaccacttctatgcatgtgtaaacacgatttataatgcttagcgaaaaatgagatgatacaacatatgttgtcctataacttcctttatttatacaacatatatcatgaacaatctttcatttcaatatatttatataaatcatgttcttcttattggctgctaaatgcatatgcatactttactaagctacttctctattgaaaggcatttaggtggtctccaacatttttggctaaaacataaactgcattggtcatttttgaactttttcccttgaccatttgtgtgcagttaagatttatggaataataggctatgtatttgtaaactttaagtattacagacaaatttctccccaaaataaaatagaacttaacaccttataaaatttggctttttccaagctgatgttcgagataaatttatctaactcacgcttgatggatattgaaatgcagcatgaaacaaaaatataagtaaaaacacasacattaactcaatggcttatatttttctaccatgccatactaaaatattctgtatctgtctgaatctaagaataattcatatcaatattttgagagactgaacaatgttcacaatactttggaaaatgaaaagaagcaaatcaaagagtatattcagttttgaacctacctatctattactagcaggataaattcagctatattgcataataaattagcctggaaattccactggtctaacataatgattaattttttacttatactctatgtatgtttcaggttatc

SEQ ID NO: 706900 - DNA, 761 bp, Homo sapiens
agaccctgtctccaaaaatgaaaaaacaaaacaagagtccaatatggaagtcagtcagggggcctgaattcttagactcaaatgtgcttctgacagacacgctgggtgagtctggtcaacccacttaccctctctgggtttcaattttctcattagactgccttttgtctacattttcttccactgagtctatttgacaccacaggtaataagtgtgaactgcctgtattggtttttgttgttgttgttgttgttttgagacggagtctcgctctgccgcccaggctggagtgcagtcgtgcgatctcggctcgctgcaagctctgcctcccgggttcacgccattctcctgcttcagcctcccgagtagctgggattataggcacccgccatcacgcccggctaatttttttgtaattttagtagagacggggtttcactagttagccaggatggtctcgatctcctgacctcgtgatccgccctcctcggcctcccaaagtgctgggattacaggcgtgagccaccgygccgggccaactgcctgtattgttgactgctgtacctccagcaactagaatgaggtttagtacatagaagatgtttaattctgttgaaagggcaaattccttagtggtgtgctctgaggttttatatgtgtggcttttgcttttagcataactttgagtaacagtggagaggagaaaataaagatcaggatcagtttcttggacaagagaacgtccttgcctaaaaaccaa

SEQ ID NO: 706901 - DNA, 884 bp, Homo sapiens
ctgagagagggctggtcacggtggctcacacctgtaatcccagcactttgggaggccgaggtgtatggatcacctgaggtcaggagttcaggaccagcctggccaacatggtgaaaccccatctctactaaaaatacaaacaaaattagcctggcgtgrtggcaggcacctgtaatcccagctacttgggaggctgaggcaggagaatcacctgaacctgggaggtggaggttgcagtgagccgagatcgcgtgattgcactccagcctgggcgacaagagcaagactctgtctcaaaaataaaaaataaaacataaaaaagaattctgagagaaaagcctccaaaagtgagatttttcttgctctaatcaagtccaactctaactttgttttctttctgcctccctatttctgagcctatcttgacaatccagtttagcagccaccttagcagagacaaagaaaatactggactcaacaatttgaggcccagatggtcctactaagtaactttaagatgtgaaagcacttgggttccatagagtactttgggttgattagtacaatcttgaaatccttcttaaataacattaactcatacatgcaatcaatagccctaactgatttatatcaattctaactaacaattatttttgaaaatgagttttgtggatagaatacaaaacatactgtctcaaaagtatccgtgaccttctaattcttcatattgttgtccatatttatcattgcaagaatagagatacatctgagtatcaaatgtttaagaaagtctactgacaaaacaataaattaaatggaatacttacccatgtttccactaaaatagtctatatcagactttagaattgatatagaaaccccca

SEQ ID NO: 706902 - DNA, 1509 bp, Homo sapiens
ttacagattgcaatgccatcttatattacatataaataaataaatatacacacacacacacacacacacacagaagacaatcctataaaacagagccgcactgagttttgtatttagcctagaaataataattaattgcttgttagtgatttatagtggtttactttttatcaaactgataaactaaataatgtaatagcaagtttaagcacaattaggtgtttattgaaatgtgaagtggtttcagatatttctcctgtaggtgattattttacttagagaatggaggcattttttatgttgcctgtatgtttactaatctttcaaaattgtatatcatttttattatctaaaggatttctctcattcactacatctggtaggtgaagaagaagcaggcattcattgggatggtgagcatggcaggagcaacaagaattctatcatcaaggaaatttaaagttttggtaaagactrtatattttaatgccaatgctaattctaaggaaacaacagatgtagcagcagttacgataaaaaccaagtgctcttgtctgttaagctgttttattgcaagtttctgtaatatttttgatgaaaacaaataacaaaggaggataaaagcaccattagcaacaagcaacaacaaaaagatagttattactggtagaagaacgccaaaagttaatgcctgtgaaaaattttttaaatatgagccataaatgagcaggctaaatacaaatatagcacaaaaataggttgagacaactttgtaagagctgaactgtaaattgaattcaattttgatgaatgaactctgctgtgatgaggtgtgtatatgtaagtggaaatcagtctacctatctattgattggaaaggagggcatttgaccatcagttttctcagatttcattccgttattgatcaagtttattatttaatgacattatataatgtaagtgatttaagatacttcaggataagatatttaaggcatttcaatatggaatctcttctatgccattaagaaaaaatcactttggtacatgacacatgagttaaattctcagtagttactctttgtcttaatctaattttgtcagtttttctgggacaatctggtttatgcacattattattgatacggaagtggggcagggaaactctgcgtagagaaaagcatgtccctggctagggctccaccccaaaggacctaggtgaggacaggcactcctgctttcccgcccaaatgttgcattttccaagaccaccctggcccaccatgcctccatcctgggcctataaaaacccgagaccctagtgggcagacacacaagcggctggacagcgtgaggaacacatcggcggaagaagacacaagcggctggtcatccagggcagatggcaaaatagctcgcccggcaggccattgactagtggaacaacacagagtctggccagagccgtcggagaaaagtccggtcaccgagcggcccgattccggggga

SEQ ID NO: 706903 - DNA, 1509 bp, Homo sapiens
ttacagattgcaatgccatcttatattacatataaataaataaatatacacacacacacacacacacacacagaagacaatcctataaaacagagccgcactgagttttgtatttagcctagaaataataattaattgcttgttagtgatttatagtggtttactttttatcaaactgataaactaaataatgtaatagcaagtttaagcacaattaggtgtttattgaaatgtgaagtggtttcagatatttctcctgtaggtgattattttacttagagaatggaggcattttttatgttgcctgtatgtttactaatctttcaaaattgtatatcatttttattatctaaaggatttctctcattcactacatctggtaggtgaagaagaagcaggcattcattgggatggtgagcatggcaggagcaacaagaattctatcatcaaggaaatttaaagttttggtaaagactgtatattttaatgccaatgctaattctaaggaaacaacagatgtagcagcagttacgataaaaaccaagtgctcttgtctgttaagctgttttattgcaagtttctgtaatatttttgatgaaaacaaataacaaaggaggataaaagcaccattagcaacaagcaacaacaaaaagatagttattactggtagaagaacgccaaaagttaatgcctgtgaaaaattttttaaatatgagccataaatgagcaggctaaatacaaatatagcacaaaaataggttgagacaactttgtaagagctgaactgtaaattgaattcaattttgatgaatgaactctgctgtgatgaggtgtgtatatgtaagtggaaatcagtctacctatctattgattggaaaggagggcatttgaccatcagttttctcagatttcattccgttattgatcaagtttattatttaatgacattatataatgtaagtgatttaagatacttcaggataagatatttaaggcatttcaatatggaatctcttctatgccattaagaaaaaatcactttggtacatgacacatgagttaaattcycagtagttactctttgtcttaatctaattttgtcagtttttctgggacaatctggtttatgcacattattattgatacggaagtggggcagggaaactctgcgtagagaaaagcatgtccctggctagggctccaccccaaaggacctaggtgaggacaggcactcctgctttcccgcccaaatgttgcattttccaagaccaccctggcccaccatgcctccatcctgggcctataaaaacccgagaccctagtgggcagacacacaagcggctggacagcgtgaggaacacatcggcggaagaagacacaagcggctggtcatccagggcagatggcaaaatagctcgcccggcaggccattgactagtggaacaacacagagtctggccagagccgtcggagaaaagtccggtcaccgagcggcccgattccggggga

SEQ ID NO: 706904 - DNA, 1509 bp, Homo sapiens
ttacagattgcaatgccatcttatattacatataaataaataaatatacacacacacacacacacacacacagaagacaatcctataaaacagagccgcactgagttttgtatttagcctagaaataataattaattgcttgttagtgatttatagtggtttactttttatcaaactgataaactaaataatgtaatagcaagtttaagcacaattaggtgtttattgaaatgtgaagtggtttcagatatttctcctgtaggtgattattttacttagagaatggaggcattttttatgttgcctgtatgtttactaatctttcaaaattgtatatcatttttattatctaaaggatttctctcattcactacatctggtaggtgaagaagaagcaggcattcattgggatggtgagcatggcaggagcaacaagaattctatcatcaaggaaatttaaagttttggtaaagactgtatattttaatgccaatgctaattctaaggaaacaacagatgtagcagcagttacgataaaaaccaagtgctcttgtctgttaagctgttttattgcaagtttctgtaatatttttgatgaaaacaaataacaaaggaggataaaagcaccattagcaacaagcaacaacaaaaagatagttattactggtagaagaacgccaaaagttaatgcctgtgaaaaattttttaaatatgagccataaatgagcaggctaaatacaaatatagcacaaaaataggttgagacaactttgtaagagctgaactgtaaattgaattcaattttgatgaatgaactctgctgtgatgaggtgtgtatatgtaagtggaaatcagtctacctatctattgattggaaaggagggcatttgaccatcagttttctcagatttcattccgttattgatcaagtttattatttaatgacattatataatgtaagtgatttaagatacttcaggataagatatttaaggcatttcaatatggaatctcttctatgccattaagaaaaaatcactttggtacatgacacatgagttaaattctcagtagttactctttgtcttaatctaattttgtcagtttttctgggacaatctggtttatgcacattattattgatacggaagtggggcagggaaactctgcgtagagaaaagcatgtccctggctagggctccaccccaaaggacctaggtgaggacaggcactcctgctttcccgcccaaatgttgcattttccaagaccaccctggcccaccatgcctccatcctgggcctataaaaacccgagaccctagygggcagacacacaagcggctggacagcgtgaggaacacatcggcggaagaagacacaagcggctggtcatccagggcagatggcaaaatagctcgcccggcaggccattgactagtggaacaacacagagtctggccagagccgtcggagaaaagtccggtcaccgagcggcccgattccggggga

SEQ ID NO: 706905 - DNA, 591 bp, Homo sapiens
tctcctgcctcagcgtcctgagtagctgggattacaggcgtgcaccaccacgcccagctaatttttgtatttttagtcgagatggggttttgccatgttggccaggctggtctcaaactcctgacctcaggtgatccgcccccctcagcctcccaaagtgctgggattacaggcgtgagccaccgcgccagccacttttcaactttttaaaacataaagtgatgtattagatggtgggatgttttttgttaatgctcttattcagcaatgtaaaaagttgatacccrttgtctctcgcctccttcctacaccccctcctcctccacctttcttttttaagactgctgcagtactcagtgtgtccttgtgacaacagtgaagttctttaggggcttcagtgtgctccctttagcaattatgtggacttacatttgtgcttacctcttgacttgcagggtgcttcccctcccaccacattttttttttttttagatggagtcttgctgtcttgcccaggctggagtacaccaatgcagtttctcggctcactgcaacctctgcctcccgggttcaagcgattctcctgcctca

SEQ ID NO: 706906 - DNA, 591 bp, Homo sapiens
tctcctgcctcagcgtcctgagtagctgggattacaggcgtgcaccaccacgcccagctaatttttgtatttttagtcgagatggggttttgccatgttggccaggctggtctcaaactcctgacctcaggtgatccgcccccctcagcctcccaaagtgctgggattacaggcgtgagccaccgcgccagccacttttcaactttttaaaacataaagtgatgtattagatggtgggatgttttttgttaatgctcttattcagcaatgtaaaaagttgatacccgttgtctctcgcctccttcctacaccccctcctcctccacctttyttttttaagactgctgcagtactcagtgtgtccttgtgacaacagtgaagttctttaggggcttcagtgtgctccctttagcaattatgtggacttacatttgtgcttacctcttgacttgcagggtgcttcccctcccaccacattttttttttttttagatggagtcttgctgtcttgcccaggctggagtacaccaatgcagtttctcggctcactgcaacctctgcctcccgggttcaagcgattctcctgcctca

SEQ ID NO: 706907 - DNA, 599 bp, Homo sapiens
actgaggaaaaggaagaggagtggttggtcttgctgtgtcaagggtggcagaaatggccagaaaggcaggcaaacttggtataaattttatcgaaaaaaattcacatataagtgaacttgtgcagttcaaacgcatgttgttccatagtcaactgtagtgtttttgaataaagtctttatattttagtctgttttttttttttwattttttatttctttgagacggagtctcgctttgtcgcccaggctggagtgcagtggcgcgatctcggctcactgcaagctccacctcccgggttcacgccattctcctgcctcagcctcccgagtagctgggactacaggcacccgccaccacgcctggctaatttttttttttctttttgtatttttagtagagacggggtttcaccgtgttagccaggatggtctcgatctcgtgacctcgtgatcctcccgcctcggtctccagaagtgctgggattacaggcgtgagccaccatgcccagcctagtctggctatttttttaagtttcacaattgatacaactgctgccaacccaatactacaggtgtttgaattaatagatcagattacc

SEQ ID NO: 706908 - DNA, 655 bp, Homo sapiens
ttgctttcagctaaccactgagagactgaatcagaaggactggggactactggggaagtttttccactttgttgaatccttttaaatatatcttcttatttctaaggcatcaatttcttctgtcctagaattatgttttcatcattggttatttatataatgataacagttatttgcattatgtaagtgtgttcactgggccctgggaaccctactgatttaagtgccaccatcaggggaagaggctcaagctctgtcctccagctgccagtgaacacaagctcagagccaggctcatgtttgcagagagtaggcactggcatccagaaagccaaggagcacaaactcrttactcagagaagtttgggtgagggaggaaagctcagcacagacagctaaatctgcccctaccttggatcctggaggctactgggcaaagccacccaataggatgtaacaaaaccacacacctgtccatggagccactgagccgtggtcatgaaccaagcccctctgcaccaagctcaaagttggcaccaggccactgtccacccatcagactggctttttttttttttttttttttttttttgagatggagtctcgctctgtcgcccaggctggagtgtagtggcaggatctcggctcactgcaa

SEQ ID NO: 706909 - DNA, 655 bp, Homo sapiens
ttgctttcagctaaccactgagagactgaatcagaaggactggggactactggggaagtttttccactttgttgaatccttttaaatatatcttcttatttctaaggcatcaatttcttctgtcctagaattatgttttcatcattggttatttatataatgataacagttatttgcattatgtaagtgtgttcactgggccctgggaaccctactgatttaagtgccaccatcaggggaagaggctcaagctctgtcctccagctgccagtgaacacaagctcagagccaggctcatgtttgcagagagtaggcactggcatccagaaagccaaggagcacaaactcatwactcagagaagtttgggtgagggaggaaagctcagcacagacagctaaatctgcccctaccttggatcctggaggctactgggcaaagccacccaataggatgtaacaaaaccacacacctgtccatggagccactgagccgtggtcatgaaccaagcccctctgcaccaagctcaaagttggcaccaggccactgtccacccatcagactggctttttttttttttttttttttttttttgagatggagtctcgctctgtcgcccaggctggagtgtagtggcaggatctcggctcactgcaa

SEQ ID NO: 706910 - DNA, 1440 bp, Homo sapiens
tccttcgccaatgtggagcctcagtcaaaaggcagcctgttgcttcattctgccaagagggaccctcttcgtacctctgtgcctgtccatatgcttttcctaattatctggccagctgtgactcattatctgagatttaattcacacttcattcctgaagctttccaagatgccatctcctacctccttaatgttcccagcatgtacctgacaatatcacctaataagcggtatgatagaggagactcagaggagtgtgtttacatctacctttattgaggaagaggtctgtgactactgagccttacactgagcctggcacagagcagttctcgatggtctatgattcttggattttggaagcaatgggaaataccaacatgtaaacagttcctggtttcttgggataagtattcaagtctggtcagttgcctttatccggatattttgttgtcttcatgacttcatttctctcctttaatgctcttgttctgggatctcatgcttgaattctttttttctgtttgagtttaaaataataacatgggccgggcatgtggctcattcctataatcccagcacttctggcggccaaggctggagcattgcttgagcccaggagttggagaccagcctgggcaacatagttagatcctgtctctacaaaaaaataaaaatagctgggtgtagtggcatgggcctgtagtcccagctactccggaggctgaggcaggagaatcgccttgagcccacgagttggaagctgcagtcatttaggatcacactgctgcactccagcctgagccacagagcaagaccctgcctctaaataaaaatcaaaataaatatgataataacatctttaaaaagtgcaataagtgtcacagcattcttttgataaggtttctttaaagcacactagacattaatcttgcgggcaggaagtgggtgggtggtacatgtagagatagtgcaggataaaaaaatatatatcttaaaaacttggtaaaggtggccaggcgcagtggctcatgcctgtaatcccagcactttgggaggccaaggcggacggatcacaaggtcaggagatcgagaccatcctggctaacatggtgaaaccccatctccactaaaaaatacaaaaaattagccaggcgtggtggtgggtgccagtacctgtagtcccagctactcgggaggctgaggcagsagaatggcatgaacccgggatgcagagcttgcagtgagccgagattatgccactgcactccagcctgggcaacagaacgagactccgtctcaaaaaaaaaaaaaaaaaaacaacaaaaaacttggtaaaggtataatccctttttctaacttttctattttttgttaatagcatcaccattttcctagcttccaagtcctctttctacgttaagggtttttgttttttgt

SEQ ID NO: 706911 - DNA, 1043 bp, Homo sapiens
taggatacatcataccaatcctcataacataaagctacaagtggttaccttgccatttatgttaagcttttttttttaactgtctttccactattttccatctgtgtggctcttctccaagacaagttgaatttattttgcaatagaacaggctaaaaaatttctgctaaaaaaataaaaagagaaaacctccctctacgttatattaagactgctctcttctctcagttgacttagttatacataagcaagttaaaaatccataggtttccttctttaaacctttctgctccacactgtttctattctgcatagtttaatgatagagaacagaatttcccattcaaagaagagcatgaggtgaacaagctccacttatgatatgtgagatacactcaaagcccctgatgagcagacagcagctcctcctggaacctccctaaaggcatcgccaaggtgccctgggccctgcattagcatgtgccatggaaggctgacactccagttcaggctctggatgaggtcgggttgtgcagacacctgagagaaacaccagaagattttcttcccctgctcaaatcccatgatgtgactctcctgctccagaagttcaagagaaatggaagagcttttactcaacttcactgtcaatatatctctcagtcgtgcctcccacccacactcatcaacaagataagttggacttacgtaacaaggataagtcaacaaggataagttgacttctgataagttcwgttaccatcacaataatgtacactatttttagaccttgaaatttttatgttttcatgtttcttttagaaaataaatcaatatatcctgtgccaaacagctgtaacagatgcagatttaccttgccacctcattagaagaaacaaacaactataaatcttgtattacatccaaagagttgtcagcctgaaataaaagctggcaaggatccaagtggcatgtgcccttgattccagtcattttgcctgcagttcttacatatgtaaattgagaaactgtgagcagaagca

SEQ ID NO: 706912 - DNA, 773 bp, Homo sapiens
ctttcttgtaaactgggttgaatcatgtgtatttggtttcttaattatagacaaatttctcactggatgaaaagtctgctaattagtgattttaaatgtcatccagatatattagtagacaggtgttattttagaaatacagggcaacatgacctcttgtgttgtarcctatacaaaggtaaaagtctatatggtgttatttaatgacaaaagaaaaataaaatcctcaaaatacacctccttcccctcatatgcactcactggcccattgaagaaccaggttgttatcttgttatctgactggattaagttactatgtcatgactgactacaaatactatagctttatattataatgtcagagaagtttaaagctgaagaggccttagaaattctcatgtctaaccttctttttttttttttttttttttttttttttgagacagagtattgccctgtcacccaggctgaagtgcagtggcatgatcgtgatctcagcactgcaacctctgtctcccaggttcaagcaattctcctgcctcagcctcctgagtagctgggattataggcacctgccatcatgcccagctaatttttgtatttttagtagacatgaggtttcaccatgttggccaggcttgtcttgaactgctgacctcaggtgatctgcctgtctcggcctcccaaagtgctaggattataggcgtgagccactgtacctggccctaacttttatttatttattaattaaattatttatagagacaaggcct

SEQ ID NO: 706913 - DNA, 1252 bp, Homo sapiens
tgctctgccatgcttttctgaatctttaaaataagtttttcattaattttagcatacagtgaagggaagtaacctgtggcttataaataatggcaacagctttatggaaacacctaaaaatcaccaggggcacataacaagaaagttctccatctccaggtgcgaaaacacgctggtgattacttgttgagcaagaccctgtcagcttttttattacaatacattattgggtaatagttttaaaattatttatagaaagaaatcgagctgtgccgagaattccatcatttaatatgttgtctgtgaatctcattagcctttttagcctaggggttaggaaggaaaacagagcgttggctgtattttgaagattgagcactatatacactttttgtcgggggcttgttgaccttatgttaagttgcttctttgcgagtctttctgtgttacagctctggtttccatggtatttacataaacctagcaacagtttgctgtgtagaggcagtggcagggcccaccatctcctctgccaagaaggaggagcagcttaggatgcctgctgtgcaggccatcaatgggcaagtctctttcaggtaagttacagaataggtaagaattggggtgagatgggatgtcagctgctccccagtgtatgtgtggcctctcctctgtctccaggtgacagaggcagctccagtattctgtttttgaaacccatccggtgagttctcccatctagccccaggccaagcagcatgggtctcggcagaagctcatcctgggagtgggctgctctagagaacacgactccatgctgtccccaggcctgtgttctccactgaccccacagctgcatggccagtaggccttaggctaagttcaggaaggacccatctgaaatactcctcctaaatgaagagccgttctctggtataagagggatgttagtgtggtcagaacaaggctaaatccggaatcgggagagtgtgacaaatatcaacgaatggattattttcaaatgtgatctctctaatcagctgtgcagggtgataagaaagagcaaggggcttggacactggccccagaatggtgcaatgagttctttatacctcacaacatggcaggaacatttaaaaaacaargtaaaaggaagtcactgggagcaaacagaagaagtgaagagctgacttagagcacagtgaccttgggcaaataaacttctataagtctcggtttctttctccataaa

SEQ ID NO: 706914 - DNA, 1264 bp, Homo sapiens
aattgagaaaaattctgacccatagccgtgtttagcaggaaagatgcgtgactgatgagtggtacctactagagttgatgagtgggaagtagtgatgttgtgtctcacatcctctcatagtttttgtttgtttgtttgttttaagaaggaaactaaaacctagcacagtcaactggccaagctcacagagttaaatctctggcttccaattcaagtgatactgaggccacaccacactggtgtggttactacagacctcctaggaggacagcagtcagctgcccctgacttaacagagtaccacttcaagtggacatagtgtttgacatctccttgacgtgtctgatggccttcacagagagccaagaagccaaggcccaagagactatttggatcgatgatgattgtgttaatgataacccatttatttagtatttctatgtccctggtcctataccatgcctttgatgcttgttttctcatttaattacaacaatcttatcagtgggtgacaatctcttcattatgcacatgaggaaaaaggggtccagataggttaaactctgcagagtcacaagctagcaagtctcaaagtctcacagactccagagcatgtgtttttaatcactggacatctcctttgtgcttgtgaatggtgccatccctagaggtagcatagatgcatcctccgagtaccatgargaaagatgtacatgtaaagtagcaaaggaagctggggtcagtgggtggtcgatgctcctgacagacaacatttaggcgtcggggaagaatgtccttgccatctcatacagagtttccctatttctgtgtgtgctgccgtgactccagcaagagttggatggaattggggagatcaagtctccagttctttatttctgctccctgtagctaattgcataatgactcataaaagttaaatttctggtgagcatgtctgccatgctgttttgctaacgggcatggacgtttcctgacttcagaagaaaatgagccctgatgctggagaaagggacaacctttccccctaacaaattttgcctctcttgtccctaagttatgaggagcctgagtagacagtctcattctgggagctctgggctcctccccatggtgctccaggggctggtggctggcttgcattgagcctgtttactgtgtggtgaaggcagaagacctggtcattgtattcctaattttacctgagttaactatagccagataacacaggtcttggactcaggtc

SEQ ID NO: 706915 - DNA, 646 bp, Homo sapiens
acttgtctacaagccaatcaggaagacatatgaaaggtgaacagaggcagcattttagctccttctgcaccctaggattgtacagtgccacagtctccagtagcatgctctgaacatgatcactgtatcrctcttccagatggaaggtgatcctgcaatcagtgggctttgcttagcacagtgtaggctacagtcagaaacctgactctgcgagaacattccttaggtgccgggagcaggagagggaggctggacactccatgttgcctgaggccaccaccctttggactaagagacagaaagaaaatcgcgctcacctctggaaagaccaagtcgttgatgtcctgcttcccctcttcagggctgttctacctataaggccatctcctgaagtcaccgtgttttttatataacattttgtccttttagaaattatcctgacgcatgtcaagagctttcacaccgaaaaaatatgtcacattagcttccaagtttctgattgtctaaataacgcagcaactcaacatacagctgtctggcattttgacagtacaataacccataattcttcctgccactcaacacttcaaggttagcattttgtagtttgctctcaaggagtagtcatttaaattttcaagagcaa

SEQ ID NO: 706916 - DNA, 646 bp, Homo sapiens
acttgtctacaagccaatcaggaagacatatgaaaggtgaacagaggcagcattttagctccttctgcaccctaggattgtacagtgccacagtctccagtagcatgctctgaacatgatcactgtatcactcttccagatggaaggtgatcctgcaatcagtgggctttgcttagcacagtgtaggctacagtcagaaacctgactctgcgagaacattccttaggtgccgggagcaggagagggaggctggacactccatgttgcctgaggccaccaccctttggactaagagacagaaagaaaatcgcgctcacctctggaaagaccaagtcgttgatgtcctgcttcccctcttcagggctgttctacctataaggccatctcctgaagtcaccgtgttttttatataacattttgtccttttagaaattatcctgaygcatgtcaagagctttcacaccgaaaaaatatgtcacattagcttccaagtttctgattgtctaaataacgcagcaactcaacatacagctgtctggcattttgacagtacaataacccataattcttcctgccactcaacacttcaaggttagcattttgtagtttgctctcaaggagtagtcatttaaattttcaagagcaa

SEQ ID NO: 706917 - DNA, 730 bp, Homo sapiens
cactcttaccacctgggaggtgaggacagcaccttggcaaagctaagctaggttacagtgtggccattgtgggctctcttcacagcccytatttgactgtggtttgtgatactgatggagattaacgaaattgtcattctgcttcacgtcactgcttctcagagctttctgggcttttcctctccccctctctccccaactcagtgctctctcagagtggctgcagcccatctgcctggcatgtttgcttgcctttctttttaacctaaaacattttggaggatgcctatcaagttccacaccctgtgttggctgcaaggggtacaaagatgcgttaattcagtcctgaccctcaaatgtcatctaggatgagaatgcgaacaggtaactgtggtgaagtatgaagaagacataatcctggggctgtggaagaatcagaagtgtcccgtttgtaaagcatatcatgctgttcctggtgcatgacaaacctctagtctgctgcctcagtggacccctttgtattcctattctatagtatttgttttgaccagacttatccccaaaagtcttctcacttttgctcctttttgctccttgtctgctttgacttacttcccattgtttttgtacgcagtgggcacctaataagtaatcgatggtgtggcctcatcacctggcctctgggtacctctatcctggccctattcttgctacttgtaagttcccagga

SEQ ID NO: 706918 - DNA, 730 bp, Homo sapiens
cactcttaccacctgggaggtgaggacagcaccttggcaaagctaagctaggttacagtgtggccattgtgggctctcttcacagcccctatttgactgtggtttgtgatactgatggagattaacgaaattgtcattctgcttcacgtcactgcttctcagagctttctgggcttttcctctccccctctctccccaactcagtgctctctcagagtggctgcagcccatctgcctggcatgtttgcttgcctttctttttaacctaaaacattttggaggatgcctatcaagttccacaccctgtgttggctgcaaggggtacaaagatgcgttaattcagtcctgaccctcaaatgtcatctaggatgagaatgcgaacaggtaactgtggtgaagtatgaagaagacataatcctggggctgtggaagaatcagaagtgtcccgtttgtaaagcatatcatgctgttcctggtgcatgacaaacctctagtctgctgcctcagtggacccctttgtattcctattctatagtatttgttttgmccagacttatccccaaaagtcttctcacttttgctcctttttgctccttgtctgctttgacttacttcccattgtttttgtacgcagtgggcacctaataagtaatcgatggtgtggcctcatcacctggcctctgggtacctctatcctggccctattcttgctacttgtaagttcccagga

SEQ ID NO: 706919 - DNA, 825 bp, Homo sapiens
gcagggatattaaaagtactttttaaaaatacaatttagctctaattcagcattctgaatttccaacaatgtaagtgaaatttttaattaaaaagggaagagtttccagttaagatggcagattgaacatgtgaatttacctttgctccatctccaaatccccatgacgcaacagtgtatgagtgtcccattgctgccataataagtgatcatgtactcagcaacttacaacaacacaagaccattatctcatagtcttctgcaaggagtccagcacaggtctcaccacactaacactgaggagctggcagtactagattcctgtgtggaggctctaggggagaattcttgctttgctttttctagtttttagaggctgcctccagtccctggctcctggctccyttcccctatctgcaaagccagcaacactgcatctctctaacactccgacctcacatctttctctaactacagactgaaaagtttctccactttcaaaaaatcatgggattagttagggccaatttgaataatccacaataatctcccaccacaaggtcattaacttaattaaatttacaaagtccctttgccatgtaacatatttacagggtctggggattaggacatggacatctttggtgggaggacattatcctgtctaccttggacaattactttgtgtttgtttctttttaacaaaacaaatacacaagaatggggacatctggtaaaggaattttgaaagagtacacatggaagtgagggaaaagggggctggattccatacttgcagtggagaacactgggaactaagtgtat

SEQ ID NO: 706920 - DNA, 825 bp, Homo sapiens
gcagggatattaaaagtactttttaaaaatacaatttagctctaattcagcattctgaatttccaacaatgtaagtgaaatttttaattaaaaagggaagagtttccagttaagatggcagattgaacatgtgaatttacctttgctccatctccaaatccccatgacgcaacagtgtatgagtgtcccattgctgccataataagtgatcatgtactcagcaacttacaacaacacaagaccattatctcatagtcttctgcaaggagtccagcacaggtctcaccacactaacactgaggagctggcagtactagattcctgtgtggaggctctaggggagaattcttgctttgctttttctagtttttagaggctgcctccagtccctggctcctggctcctttcccctatctgcaaagccagcaacactgcatctctctaacactcygacctcacatctttctctaactacagactgaaaagtttctccactttcaaaaaatcatgggattagttagggccaatttgaataatccacaataatctcccaccacaaggtcattaacttaattaaatttacaaagtccctttgccatgtaacatatttacagggtctggggattaggacatggacatctttggtgggaggacattatcctgtctaccttggacaattactttgtgtttgtttctttttaacaaaacaaatacacaagaatggggacatctggtaaaggaattttgaaagagtacacatggaagtgagggaaaagggggctggattccatacttgcagtggagaacactgggaactaagtgtat

SEQ ID NO: 706921 - DNA, 849 bp, Homo sapiens
agttttgtttaacttttattttaagttcaggggtacatgtgcagggtagttgcataggtaaacttgtgtcatggaggttgttgtacagattatttctatattatattttatatctccaagctgcattgtccccacttccatcctgtgtggtcaataaactaactgaaagcatcatgatttttaactgagctatagatttccattaaggaaagagcccaacatttagaaatctgaatttatttacagtaaataacgcaatcttatatgtaatccatggtactttatcactacctgggacattttcctgttctagttctcatttatatcttcttttttttttttcttttagggcagtgtgtgtgtgtgtgtgtgtgtgtgtgtgttgctactaaaaaaaaaataaaaagtggagtcctcagggaatatgtcacccttgtatgcatgcccaaccccactgaatgttgctataatcccagctttacattcagcaccctgagccccaacttgtaacctcatcccactctggaagcttctccctgagccacagctattatacatttaagttcataaatactggctctaggagtttttctgcatgttaaattaatcttacattaggcattttgttaygtaaagatccatttctgtcatttaattccttacaactttagctctgtcatccttaaactatgaataatttctaactcatatggatactctaaaaacatgatgacaaggggttggaggagcaaagcaagtgcctctcactaggtagtgcataaagagtacttgtttcatgccacaggggagaggtaaatttttgtaccaaatgattgcagatcttttctt

SEQ ID NO: 706922 - DNA, 639 bp, Homo sapiens
catttcaaaaactaagccatcggtgcccagctagaacacaaaattttcacattgaatgaaaagcacgctatttctccaccaacataagagtaaaaagtaaaacagatgtcctgtctagcagatcctgatgattacaaataatcataatcctctaaactcattatgtttaacatgcaagacaaagtacagctaagctttctccattttaactactcctcttagtcagtcagctcatagctgatctacccagaaaagacaactggctactcttycaacgcaccatgacaacaagtcagactttaagagctattcacaaactaggagaaaaacaagaagtaaaagagaccagacaagcaaaggatgcacaggttagtgaaggggagctggtgggaagggtggggaaggctgtgaacaagcagttagtcacgagatagtagtaatcaaggtacgtacttgatgcagcttcataagtaattatctatagctacagaaaactgtttaacacaactctagaaataaatcctcaacacagacttgttttgagtcctaagctgagattctttacagacaaaatgctttgagtgaaaacagaagggagacaaaagctgcccactactgaaacttaagagacgaaaacac

SEQ ID NO: 706923 - DNA, 1078 bp, Homo sapiens
tgagtcatacccagcattttttaatgaaaaagttagaatggaaaatatcagatatacatatcatgtattaggtgattgtgtaaaatatattccttactgtggactgtagggaagaagtttaaaaggtactgctctggaaaatactgccaaatagaggctgctaaaattagaaatacccagagttctgaaagtgccggccagttccaaatgagaacttgaaaataaagagaaccaagtagaataaatgcattgggcaagatctgaaaatatactcaaccttcattttacttgtattcatacaaattgtgttcttccttctgtactctcccactggtatattccatcaggaatagccctaaaggtagctttaaagctgccattttgagcaggcctatgtacagttcctaatatctgataaacaattttctttactttactagaattaccatactcttagagaaataagcccagcatcagccagtgtcaaacacacacctgccaagtgttgacttttacaaaaggcacaataaatcatttgcccctagagtattcaaccctaacaattactttgttaaataagagttcttgaaataaggaaatttttattattttcagaggattgcatgggagttcctcagtaaggttatttttataaccttactaacaaccatctccaaagagatggttaytcccagaagaatcaagaaaagagtagtcaagtacatctatttttgagaagaaatgttactggaaaataaggtatctaatgaggactataaacatgtgagaccggtgctggatgtagtggctcacacctgtaatcccagcactttggaaggccaaggcaggcagatcatttgaggtcaggagttcaagaccagcctggccgacatggtgaaaccccgtctctactaaaaatacaaaaattagccgggcatcatggagggcacctgtagtcccagctactcaggaggctgaggcgggagaactgcttgaacccgggagacagaggctgcagtgaaccgagatggcgccactgtactccagcctgggtgacagagcaagactgtctcaaaaa

SEQ ID NO: 706924 - DNA, 1006 bp, Homo sapiens
gttaccttttgtagtttatcattttgtttgttaaattcttgcctctttcaattcagtgtggccccctttaactttaatagtgcctaatttctgagtgtaggatatatgccccatagctaatttgatgacactcaagattgtattaattaataaggtaattgtctttcttagtcactcttagtcaatatctacatctattcacttgtttttattcaaccttcagataccattactggagaaattattctccaagcagaccctcttctagaatcccttgggtttatcttctcagagttgaaaagtactgctcaagctgggcgcggtggctcacacctgtaatcccagcactttgggaggccraggcaggtagatcacaaggtcaggagttcaagactagcctggccaaaatggtgaaactccgtctctactaaatatacaaaaattagccaggtgtggtggtaggtgcccgtaatcacagctactcgggaggctaaggcaggagaatcgcttgaacccaggaggcggaggttgcagtgagccgatttcgtgccactgcactccagcttgggtgacagagtaagaccccatctttaaaaaaaaaaaaaagaaaagaaaagtactcctcaaatgggagtgtagtctcatgaataataatcacagataggcatagtactggtaaaatgggagtgtaatctcatgaataataatcacagataggcattttagagacattattcaataggtaattgagacatgttaattaacatgatctattgaaaaatcaacagaatacatattaaacatatgtcctaaacctaaaagccactaagtagtattaagaatactgatttcatctttccagttaaatttttgttattcagagtctttataattatgtttaaacaataagcagagtaagggctagggaaaaaatgagggttttattctttgtttcttttaattaagacctcataatggctttagaaagtatgcaggacctaacaag

SEQ ID NO: 706925 - DNA, 1419 bp, Homo sapiens
gatggggtacaagtgtgctgaccaacgtcctagatacagtgggcccttgaacaatatgggggctagggatatcaaccctgtgcagtcagaaatctacggataccttctgactctcccagaatgtaactgctagtagcctactgctgaccagaagtcctaccaataacatacagtcatttagcacgtatttggtatgttacatgattatatactgtattcctgcaataaagtaagctagagaaagtgttaggaaaatcataacgacaaaatatatttattattcattaagtggaagtggatcatcttaaagatcttgatcttcattgtcttcacgttgagttggctgaggaggagggggcttgatcttgctgtctcaagagcagcggagtcataagaaaatgcacatttaagtggccccatgcagttcaaatccatgttgctcaaggctcaactgtacaccgaactgaaaaatgattccatttttagtaggaaatggcctactctaagtcctactgcttccctttgcacttgatggcaagggtctttaactgtgtcagtggagctggtttggctccactgatagagactccctgaccatctgataggccacttttgttagaggagaaggtacccccttgcctacctgttcttttcttacttcatgggtcttgattcctgactcaggagcacccattacagaaaagccctgggactagatctaattttatttaatgaaaaacctatggagcatttactcttgcttctaataaattaacaagtcagggctttcttctgaataggagggtctcttgactctttgatatttgacttttgaaccagactagatgaggcagagcttcagcacatattttaccagtgtcttcagcaaatgcctttctctttgcaaagctccatattactaccaaaaattaacccaactaaattgtaatttctactcacccacatttattgagtactgtgtttccttgaaagatctcaaacaaggcaccttcttgcaagatcttcaccaccagaccttcatgatagtcacctcctcattaggctgagacgcatacacagtgattacgttcagacacagggactcctgtgtcttaagaccttgtgtgacccttgtaattaaagcattrcactttgcaaaggctgacagtggtataggggctgtctgaaactattcagccatagcctggtctctgctttctttttacaaatgggaggttggctaaggcagacacagggatggctaagagggataaaggacgtgacttccatagaaccttttgttcctagaggaacctctccatgaaacacacagtgaaactagattaaaccaaaaaacgccctcagctccagcagatcctgagctacaaagcacctcttccctaccgagccttctcaccc

SEQ ID NO: 706926 - DNA, 1205 bp, Homo sapiens
gggataaagagtgtttgtttacagagcttctgggatagactgctgcatgctgcatccgtacctctgttgcagaagcacatctgtcccattatgtctagtgacaaaaataagaccwacgcctcagtgaactttgcatacatctgaatgtaagcaagacaagtatatttgacattttaaaaaggttttttctttcacagttttcaaaataacataggagaagcaaaggaaaaaatatttcttgtgtttctaattcacaggttgcttgagactttttttggaggtgctagcattttattggccacagttttgaaggaaaatacaattaaatcatgcttctgtcgtttggggaaaaggaataacagattcattttttctttttttaaagatgagagagatagtatttggaatctatctttagactattctacctctgaatctaattgaagtaagaaattgggcaagaatggaatcttacttaccacccaggaaaaaagctaaacaattgtggctcagtccattttcccctgagactgtcttcagattgaggcgatcagtgttaaaatggatggaatcaccaggctctccacattctagtaagattgtagtacggttgaaagtcaaatgaaagtccagctcttcagtgtgtcatttcctcttgcagacaccagaccaagggcagtggtggtctggcgcttatattttgttattatttgttgagaccagaactctccttaaggatatatttatatatgttttaatattaaagtttcttttcaaggaatttatactaattagttcatgtaataataacatgtgcattccatttaaagttaccttgctaaattttctaagacttgttagcttccccatagtttttaataaaccaaaagatcaaacgaacagtccccagttgcccaaatattgagcagttaaggctggtttcagctcatctgaaatctgtaaacatttaaagagaacctctctcccagaagatagtgagcacggtggtattctccagtctcagaatattaaggttacttacagactagagaggccttcagtctatattaacgagttcctttcctaatctcacccttctaagaatatatttgatccaatttagggacagcaacattgaggccagagaaaaattaatggggtagtaactgtagacaccaaaacactccccaaatcttgagacatca

SEQ ID NO: 706927 - DNA, 1205 bp, Homo sapiens
gggataaagagtgtttgtttacagagcttctgggatagactgctgcatgctgcatccgtacctctgttgcagaagcacatctgtcccattatgtctagtgacaaaaataagacctacgcctcagtgaactttgcatacatctgaatgtaagcaagacaagtatatttgacattttaaaaaggttttttctttcacagttttcaaaataacataggagamgcaaaggaaaaaatatttcttgtgtttctaattcacaggttgcttgagactttttttggaggtgctagcattttattggccacagttttgaaggaaaatacaattaaatcatgcttctgtcgtttggggaaaaggaataacagattcattttttctttttttaaagatgagagagatagtatttggaatctatctttagactattctacctctgaatctaattgaagtaagaaattgggcaagaatggaatcttacttaccacccaggaaaaaagctaaacaattgtggctcagtccattttcccctgagactgtcttcagattgaggcgatcagtgttaaaatggatggaatcaccaggctctccacattctagtaagattgtagtacggttgaaagtcaaatgaaagtccagctcttcagtgtgtcatttcctcttgcagacaccagaccaagggcagtggtggtctggcgcttatattttgttattatttgttgagaccagaactctccttaaggatatatttatatatgttttaatattaaagtttcttttcaaggaatttatactaattagttcatgtaataataacatgtgcattccatttaaagttaccttgctaaattttctaagacttgttagcttccccatagtttttaataaaccaaaagatcaaacgaacagtccccagttgcccaaatattgagcagttaaggctggtttcagctcatctgaaatctgtaaacatttaaagagaacctctctcccagaagatagtgagcacggtggtattctccagtctcagaatattaaggttacttacagactagagaggccttcagtctatattaacgagttcctttcctaatctcacccttctaagaatatatttgatccaatttagggacagcaacattgaggccagagaaaaattaatggggtagtaactgtagacaccaaaacactccccaaatcttgagacatca

SEQ ID NO: 706928 - DNA, 1205 bp, Homo sapiens
gggataaagagtgtttgtttacagagcttctgggatagactgctgcatgctgcatccgtacctctgttgcagaagcacatctgtcccattatgtctagtgacaaaaataagacctacgcctcagtgaactttgcatacatctgaatgtaagcaagacaagtatatttgacattttaaaaaggttttttctttcacagttttcaaaataacataggagaagcaaaggaaaaaatatttcttgtgtttctaattcacaggttgcttgagactttttttggaggtgctagyattttattggccacagttttgaaggaaaatacaattaaatcatgcttctgtcgtttggggaaaaggaataacagattcattttttctttttttaaagatgagagagatagtatttggaatctatctttagactattctacctctgaatctaattgaagtaagaaattgggcaagaatggaatcttacttaccacccaggaaaaaagctaaacaattgtggctcagtccattttcccctgagactgtcttcagattgaggcgatcagtgttaaaatggatggaatcaccaggctctccacattctagtaagattgtagtacggttgaaagtcaaatgaaagtccagctcttcagtgtgtcatttcctcttgcagacaccagaccaagggcagtggtggtctggcgcttatattttgttattatttgttgagaccagaactctccttaaggatatatttatatatgttttaatattaaagtttcttttcaaggaatttatactaattagttcatgtaataataacatgtgcattccatttaaagttaccttgctaaattttctaagacttgttagcttccccatagtttttaataaaccaaaagatcaaacgaacagtccccagttgcccaaatattgagcagttaaggctggtttcagctcatctgaaatctgtaaacatttaaagagaacctctctcccagaagatagtgagcacggtggtattctccagtctcagaatattaaggttacttacagactagagaggccttcagtctatattaacgagttcctttcctaatctcacccttctaagaatatatttgatccaatttagggacagcaacattgaggccagagaaaaattaatggggtagtaactgtagacaccaaaacactccccaaatcttgagacatca

SEQ ID NO: 706929 - DNA, 1205 bp, Homo sapiens
gggataaagagtgtttgtttacagagcttctgggatagactgctgcatgctgcatccgtacctctgttgcagaagcacatctgtcccattatgtctagtgacaaaaataagacctacgcctcagtgaactttgcatacatctgaatgtaagcaagacaagtatatttgacattttaaaaaggttttttctttcacagttttcaaaataacataggagaagcaaaggaaaaaatatttcttgtgtttctaattcacaggttgcttgagactttttttggaggtgctagcattttattggccacagttttgaaggaaaatacaattaaatcatgcttctgtcrtttggggaaaaggaataacagattcattttttctttttttaaagatgagagagatagtatttggaatctatctttagactattctacctctgaatctaattgaagtaagaaattgggcaagaatggaatcttacttaccacccaggaaaaaagctaaacaattgtggctcagtccattttcccctgagactgtcttcagattgaggcgatcagtgttaaaatggatggaatcaccaggctctccacattctagtaagattgtagtacggttgaaagtcaaatgaaagtccagctcttcagtgtgtcatttcctcttgcagacaccagaccaagggcagtggtggtctggcgcttatattttgttattatttgttgagaccagaactctccttaaggatatatttatatatgttttaatattaaagtttcttttcaaggaatttatactaattagttcatgtaataataacatgtgcattccatttaaagttaccttgctaaattttctaagacttgttagcttccccatagtttttaataaaccaaaagatcaaacgaacagtccccagttgcccaaatattgagcagttaaggctggtttcagctcatctgaaatctgtaaacatttaaagagaacctctctcccagaagatagtgagcacggtggtattctccagtctcagaatattaaggttacttacagactagagaggccttcagtctatattaacgagttcctttcctaatctcacccttctaagaatatatttgatccaatttagggacagcaacattgaggccagagaaaaattaatggggtagtaactgtagacaccaaaacactccccaaatcttgagacatca

SEQ ID NO: 706930 - DNA, 1076 bp, Homo sapiens
aggggaacatcacacactggggcctgttgtggggtggggggagggatagcattaggagatatacctaatgtaaatgacgagttaatgggtgcagcacaccaacatggaacatgtatatatatatatatatatatatatatatatgtaacaaacctgcacgttgtgcacatgtaccctaaaacttaaagtataataaaaaaaaaaaggatgccaggtgaaagggggaatggagagaggasaagcaagagcaacccccctacctccacttgggttcccagcagtgctgcagacttccactcaggcagcacatcactgtgtcaagtgacaagccccaggggccctcagctccaggactcttactcttagcttggtgaagtgagacccctgaacctcaagatgtggagtcaaggctgctgtactctcacccccagaccctcaggtcagcagccctcaggtgtgtggaacccaggctctcagttgtccttgggtcaggacaaggactgtgcaggaatgaggtgctactttcctttgactttatggggagaagaaatgaggcatggggcagttaagcaggtttgccaaagtccatttactctacacatcaccctgctgcatgaaaggtgggaggttaggagctcacactctcaggaggcaggccaaccctgtgggtgaggaagttgttcctatgtgttccaagtggtatgctgctaaggccaagaatgacctgtgctgagggcaaagtaaaacctcaccttcggcacagctgctaaatcatgggctgcaaaggcctggccaggaacacacagggaggtgctaagtagcttgcagaaaccttctattctcaagtggtcccaatggctagaacattttcagagctaatgctcatgatctggcaatatatcttcccttctctcttcttccagtcatttataccactcaaacctttggtggggtcagacagactttataataaacacatgtccattggttcattgaaaagaggctcacaaatagggattctctccaaaattcataccagaagacagaatttctcctttcctcttttgccaatccct

SEQ ID NO: 706931 - DNA, 1076 bp, Homo sapiens
aggggaacatcacacactggggcctgttgtggggtggggggagggatagcattaggagatatacctaatgtaaatgacgagttaatgggtgcagcacaccaacatggaacatgtatatatatatatatatatatatatatatatgtaacaaacctgcacgttgtgcacatgtaccctaaaacttaaagtataataaaaaaaaaaaggatgccaggtgaaagggggaatggagagaggacaagcaagagcaacccccctrcctccacttgggttcccagcagtgctgcagacttccactcaggcagcacatcactgtgtcaagtgacaagccccaggggccctcagctccaggactcttactcttagcttggtgaagtgagacccctgaacctcaagatgtggagtcaaggctgctgtactctcacccccagaccctcaggtcagcagccctcaggtgtgtggaacccaggctctcagttgtccttgggtcaggacaaggactgtgcaggaatgaggtgctactttcctttgactttatggggagaagaaatgaggcatggggcagttaagcaggtttgccaaagtccatttactctacacatcaccctgctgcatgaaaggtgggaggttaggagctcacactctcaggaggcaggccaaccctgtgggtgaggaagttgttcctatgtgttccaagtggtatgctgctaaggccaagaatgacctgtgctgagggcaaagtaaaacctcaccttcggcacagctgctaaatcatgggctgcaaaggcctggccaggaacacacagggaggtgctaagtagcttgcagaaaccttctattctcaagtggtcccaatggctagaacattttcagagctaatgctcatgatctggcaatatatcttcccttctctcttcttccagtcatttataccactcaaacctttggtggggtcagacagactttataataaacacatgtccattggttcattgaaaagaggctcacaaatagggattctctccaaaattcataccagaagacagaatttctcctttcctcttttgccaatccct

SEQ ID NO: 706932 - DNA, 1076 bp, Homo sapiens
aggggaacatcacacactggggcctgttgtggggtggggggagggatagcattaggagatatacctaatgtaaatgacgagttaatgggtgcagcacaccaacatggaacatgtatatatatatatatatatatatatatatatgtaacaaacctgcacgttgtgcacatgtaccctaaaacttaaagtataataaaaaaaaaaaggatgccaggtgaaagggggaatggagagaggacaagcaagagcaacccccctacctccacttgggttcccagcagtgctgcagacttccactcaggcagcacatcactgtgtcaagtgacaagccccaggggccctcagctccaggactcttactcttagcttggtgaagtgagacccctgaacctcaagatgtggagtcaaggctgctgtactctcacccccagaccctcaggtcagcagccctcaggtgtgtggaacccaggctctcagttgtccttgggtcaggacaaggactgtgcaggaatgaggtgytactttcctttgactttatggggagaagaaatgaggcatggggcagttaagcaggtttgccaaagtccatttactctacacatcaccctgctgcatgaaaggtgggaggttaggagctcacactctcaggaggcaggccaaccctgtgggtgaggaagttgttcctatgtgttccaagtggtatgctgctaaggccaagaatgacctgtgctgagggcaaagtaaaacctcaccttcggcacagctgctaaatcatgggctgcaaaggcctggccaggaacacacagggaggtgctaagtagcttgcagaaaccttctattctcaagtggtcccaatggctagaacattttcagagctaatgctcatgatctggcaatatatcttcccttctctcttcttccagtcatttataccactcaaacctttggtggggtcagacagactttataataaacacatgtccattggttcattgaaaagaggctcacaaatagggattctctccaaaattcataccagaagacagaatttctcctttcctcttttgccaatccct

SEQ ID NO: 706933 - DNA, 987 bp, Homo sapiens
aatacaactcatgtttatcaaaaggagaataactgtaatcccaacactttgggaggctgaagctggcrgattgcctgagctcagaagtttgagacctgcctggccaacatggcgtaacgctgtctctaccaaaaaatacaaaattttccaggcatagtggcatgcacctctggtcccagctacttgaggggctgaggtgagagaatcacttgagccttcgaggtcaaggctgcagtgagccatgttcatgccactgtgctccagcctgggtgacggagtgagcctgtctcaaaaaaaaaaaaagaaagaaagaaagaaaaaagaaaaagaaaaaataaaagagcatgaatgtgtaagtgttggtacagccaaacaaatgaatagtatataacaatgagagtgaatgaactacaactgttaccaatgtagatgagttccacctgttgggctcagtgcctgataccccaaaacatggcaccttggcaactgataaaacaaagaaacgagatgatcatgagacccttcccccacccttctatgtgacagctggccataaaggaatcctctgacctacttcaccagaaaacagatcataagatcctccttccaggaccaggcatggtggctcacgcctatgatcctgtaagcgctttgggaggccaaggtgggaggacttgaggtcaggagttcgagaccagcctggccaacatggtgaaaacccgtctctactaaaaatacaaaaattagctggtcatggtggtgcacacctgtcatcccagctactcaggaggctgaggcaagagaattgcttgagcccaggaggcagaggttgcagtgagctgagattgtgccactgcactccagcctgggcaacagagtgagactccatctcagaaagaaaaaatgaaaaaggaaattgaagaaacctaaagaaacagagagacctgtgacttttccatgcttaggttagatgaagagtggatgatt

SEQ ID NO: 706934 - DNA, 987 bp, Homo sapiens
aatacaactcatgtttatcaaaaggagaataactgtaatcccaacactttgggaggctgaagctggcagattgcctgagctcagaagtttgagacctgcctggccaacatggcgtaacgctgtctctaccaaaaaatacaaaatttkccaggcatagtggcatgcacctctggtcccagctacttgaggggctgaggtgagagaatcacttgagccttcgaggtcaaggctgcagtgagccatgttcatgccactgtgctccagcctgggtgacggagtgagcctgtctcaaaaaaaaaaaaagaaagaaagaaagaaaaaagaaaaagaaaaaataaaagagcatgaatgtgtaagtgttggtacagccaaacaaatgaatagtatataacaatgagagtgaatgaactacaactgttaccaatgtagatgagttccacctgttgggctcagtgcctgataccccaaaacatggcaccttggcaactgataaaacaaagaaacgagatgatcatgagacccttcccccacccttctatgtgacagctggccataaaggaatcctctgacctacttcaccagaaaacagatcataagatcctccttccaggaccaggcatggtggctcacgcctatgatcctgtaagcgctttgggaggccaaggtgggaggacttgaggtcaggagttcgagaccagcctggccaacatggtgaaaacccgtctctactaaaaatacaaaaattagctggtcatggtggtgcacacctgtcatcccagctactcaggaggctgaggcaagagaattgcttgagcccaggaggcagaggttgcagtgagctgagattgtgccactgcactccagcctgggcaacagagtgagactccatctcagaaagaaaaaatgaaaaaggaaattgaagaaacctaaagaaacagagagacctgtgacttttccatgcttaggttagatgaagagtggatgatt

SEQ ID NO: 706935 - DNA, 987 bp, Homo sapiens
aatacaactcatgtttatcaaaaggagaataactgtaatcccaacactttgggaggctgaagctggcagattgcctgagctcagaagtttgagacctgcctggccaacatggcgtaacgctgtctctaccaaaaaatacaaaattttccaggcatagtggcatgcacctctggtcccagctacttgaggggctgaggtgagagaatcacttgagccttcgaggtcaaggctgcagtgagccatgttcatrccactgtgctccagcctgggtgacggagtgagcctgtctcaaaaaaaaaaaaagaaagaaagaaagaaaaaagaaaaagaaaaaataaaagagcatgaatgtgtaagtgttggtacagccaaacaaatgaatagtatataacaatgagagtgaatgaactacaactgttaccaatgtagatgagttccacctgttgggctcagtgcctgataccccaaaacatggcaccttggcaactgataaaacaaagaaacgagatgatcatgagacccttcccccacccttctatgtgacagctggccataaaggaatcctctgacctacttcaccagaaaacagatcataagatcctccttccaggaccaggcatggtggctcacgcctatgatcctgtaagcgctttgggaggccaaggtgggaggacttgaggtcaggagttcgagaccagcctggccaacatggtgaaaacccgtctctactaaaaatacaaaaattagctggtcatggtggtgcacacctgtcatcccagctactcaggaggctgaggcaagagaattgcttgagcccaggaggcagaggttgcagtgagctgagattgtgccactgcactccagcctgggcaacagagtgagactccatctcagaaagaaaaaatgaaaaaggaaattgaagaaacctaaagaaacagagagacctgtgacttttccatgcttaggttagatgaagagtggatgatt

SEQ ID NO: 706936 - DNA, 1069 bp, Homo sapiens
  misc_feature 516, 519, 524, 543, 544, 545, 546, 547, 548, 549, 550, 551,552, 553, 554, 555, 556, 557, 558, 559, 560, 561, 562, 563,564, 565, 566, 567, 568, 569, 570, 571, 572, 573, 574, 575,576, 577, 578, 579, 580, 581, 582, 583, 584, 585, 586: n = A,T,C or G
  misc_feature 587, 588, 589, 590, 591, 592, 593, 594, 595, 596, 597, 598,599, 600, 601, 602, 603, 604, 605, 606, 607, 608, 609, 610,611, 612, 613, 614, 615, 616, 617, 618, 619, 620, 621, 622,623, 624, 625, 626, 627, 628, 629, 630, 631, 632, 633: n = A,T,C or G
  misc_feature 634, 635, 636, 637, 638, 639, 640, 641, 642: n = A,T,C or G
tatgaagtgtagcttataccacgtgtgtgtgtgtgtgtatatatatatatatatayacacattctcgctctgtgttttgcattttttctttccacttaacaatatagcctatattttagaacatatttaaacttactttcatcttagcatgctgtgatagcaaacagtttcattatttttcagccatagaattttgtctataaaatattcacttcagaaatgtagaaataaagcatcaacattaacagaaacattgtctttttaaggtttttcttttttttcttttcttttcttttcttttttttttttttttgagatggagtctcatgctgtcgcccagactggagtgcattggcgcgatctccactcactgcaacctctgcctcctgggttcaagcaattctcctgcctcagcttccctgagtagctgggactacaggcgtgtgccaccacacctggctaatttttgtatttttagtagagacagaatttcaccatgttggggtacgcgagttncgnaattncgtaatacatgtgcatatnnnnnnnnnnnnnnnnnnnnnnnnnnnnnnnnnnnnnnnnnnnnnnnnnnnnnnnnnnnnnnnnnnnnnnnnnnnnnnnnnnnnnnnnnnnnnnnnnnnnaacatgccactgtactacagcctgggcgacagagcaaaaccccgtctcaaaaaaaaaaaaaaagttattttatttcttgcccaaccaccaaactatctgtctgggtttcccaatcagtttagagttattacatttctcttaatttgattgtatatagacactttacaggttgtataaaaatgaagtaaaaatttgctttgttttgaaaatgttgtaatggaaaggccaccggaatggatatgttaccactcctttcccaaacagccttgttggaggcccaagtgaagtgtgcacctggtcaaggtgcaagttacatctgattttgtctgtgactctccacaaatcaaaccctgcactttaacttcacgttctgccgttttcaggccatggtcacaagccaatccagttctattggaaacaaacctcc

SEQ ID NO: 706937 - DNA, 2237 bp, Homo sapiens
attttatctgatcttagtttttatttatttagtcttgtcatcttactatagggattgttagatgtctcctaaaatccactaaaagtaaaagaaagcaacaaataaacagatgaacaaataagaactcaccagggacttggtcatttttggctcttcggacaaaggggcagaaatctgagaaaacagatgggtagaggtacccatgagagaaggaactgtgccaatgtcacacatggacacatacatcatttagtgcccttgcaccttactcaaaaatttatttctggaactaccacattaaaatatcatcccatcccatattgtacaaagatttaagtgcaaaagttttaccataacatggttaataaaaaagaaagattagaaatgtttagatattcaataattgtggattgcttaaatactttataaaatatccaaaggatatactgttctattacgttattatactatctgatttcacaggcccttcaagttatcatcaaccctggtacctaactcctcactaccactcttcaatctgctctaagtgtcaattggtgcccagagactactcccagaagccattactgaaacctcagattcactgatttccatgccttgctgcccctgagccaggcctgcatcactcatcctacaatacctgatcacagagtcttcaattcctctaccctaatggtcctggctctctaccaatcaatcccacatccccatgactggcctctatgcctgtatgactaccgatcatgcatctccatcagccatcccaagagtcccaatcctaggcacacctgtttctgcactggggccttagcacacatacacatctcccaccactgacacaactaggctataagctcctccacatacacaaacaggaactcaatcaatgaacaaatcaggggaaattcttgcatgtatagaataaatttataaatagaaaacacttctaaatctaattgtgaaaaaccagactatttacagaggaaaaatgaaggaaataagaaaactcttcatctgcagtactgaaagctaaatgatgtcggaaatagcatctaaaagaccacttctctgtcagggccagagagacattttcagaaataaaagcacttgcagagtatctctatctttgagagaaacactggaagaagtccaaataaatgtaaaatgaaccacacaataaatcttgaataggaaaatattgtttagcaataattcttgcaaaagatatataattataaaaaaggacaatgtgacaatgtgataaagaggccactaaagagaaaattaataataccctatgataaaacattcctaataatctcaggaaaaaaacagaaaaaatggggtgcagaatggaaacaatgagcagaaatttcatcaatccaatgaaaatattatgtaaagaaaaggcagaaaataaaaagagctaaatagtaaacatcaaatggaaggcataaaatcagataaatcattatcacactaaactgagatgtaaaattctatcaacagagactataaattggatttgaaaaaagcaaaagtatctattgtaaacaaataggtaatctgacacagagacaaataggatacaaaataaagctctgggcaaagacatcatccaaatgcaatgaaagtaaaaacaagggtggcaatgtgagtatcaacgtggaattcgatgttaaaaagtgtttttcttggaattcgatgttaaaaagtgtttttcttttttctttttggttgaaaaaagggatcctataataataccacttaatacatgaaaaaggataaaaaatgcactaaccattaagtgtatgtatgcccatccctcagatgcacaaataaaattagcaaaaaagcacatataactgcaaaatgaactattaaaagtgatttttattgtatctcytccagaatatgaaacaagtagatcaaaattaggaaagataaagatttgaaaaataccaacaagcaagacttaattaaagagaattttggtccatacaacaaaatataatttttcttttatatctgttgaacaaagttcattgagtaacttggcttcaaggaaaatcttgataaattgttaaaagttgagacttgatagtctgcattttctgacaatacaataaaataaaaaacagctaaaacatactttaataatttgggaatgaataaactctcctaaataactaagattcaaagggaaacatcaaaat

SEQ ID NO: 706938 - DNA, 612 bp, Homo sapiens
aagaaaaataaatcgttctacccaaaagacacctgcatttgcatgtttatcacagcactattcacaacagcagagacatggaatcaacccaagtgcccaaaacagtggattagataaagaaaatatggtacatatgcaccgtggaatactatgcagccataaacagaacaaaatccatgcagtaatacggatgcagctggaggccattttcctaagtgaattaacacaggaacagaaaaccaaataccacatattctcacatttaagtgggagttaaacacataagacacaaagacagaaacagaaactagggattccaaaagggggaagggaaggagaaggcaagggctgaaaaactacctacggtactaggtttgctacttgggtgacagaatcattagaatcccaaacctcagcatcaggcgatatacccatgtaacaaacctgtgcrtttaccccctacatctaaaacaaaaatagtttttttttttttaaaaaaagtctagtgtgtttcaggagccagggatgagaaagctacaaggatggagtggtttaatactattaaatggtacagagaagataaggataagagcactgagaaataaataaatc

SEQ ID NO: 706939 - DNA, 1473 bp, Homo sapiens
tcaagattgtaaagatgacaaattagcagaaattggaaaagaaacatgctcctctctctactcaggtcactcacttatcttttgtgtacaaggaaaatatttgtcaggattttatcagacagccattatttaacatttattgaatgcttcctgactatatcacaatgtattgaattaccaaccaatgtaatactcaaaatatttacaaggtttaatatgctctccttgataggccaggataagcactttttgctcatcttagataagtattttgcttgtttatcttcacaccaatttcttaacaccaattttcatatcaattctcagtagatttctctttaccttttttaaattccgttttcttattttgaagaaaatctttaaattgaacacagataacacttttattttattttattttattttwtttttattttttgagacggagtctcgctctgtcgcccaggctggagtgcagtggcgggatctcggctcactgcaagctccgcctcccgggttcacgccattctcctgcctcagcctcccaagtagctgggactacaggcgcccgccactacgcccggctaattttttgtatttttagtagagacggggtttcaccgttttagccgggatggtctcgatctcctgatctcgtgatccgcccgcctcggcctcccaaagtgctgggattacaggcgtgagccaccgcgcccggccccagataacacttttatattcattcttaaactttcaagtgtactttgagatttagtttttttttttttttttctttcttaggtctagtttgaaatggctaggtaacaactgaaattctaggggatactcctttagccactattttcacaggcatagtcttacattcaggaaaatgtagagatatagaaaattactgatggatatgcagatatcctttaatgaaactaaggtcaatattacagtcttagaatgtaaaaaagagctgtaaatatgcattatcagtgagtcatttttcatatcagaaacacgcagaaacgtggaagatacatggcttcctcagtctaagtatgtgactcaaataacagacactgttttcagtgataggagaatcaaatttgcaattaaatcactgcccctgtagctcaaaagtggagtgttggcaaaacaatccctgacttcaaaactaacacccaagagcaaaatccatgacattcagctgcttattttgatagagatcattcattctgcccccaaccaaatcttcagaggtctggtttagggagatgattataccacccataaagtgtcatagtagttatggtgttctctgatatatctttgggaaacataccatttccaagtaagccctcagttcagggacaagatcagaattgagattgaaagctttagccataagatagtcttcaggctttttcatttgtaatatattgtgagatatgctggtagaaaaca

SEQ ID NO: 706940 - DNA, 1473 bp, Homo sapiens
tcaagattgtaaagatgacaaattagcagaaattggaaaagaaacatgctcctctctctactcaggtcactcacttatcttttgtgtacaaggaaaatatttgtcaggattttatcagacagccattatttaacatttattgaatgcttcctgactatatcacaatgtattgaattaccaaccaatgtaatactcaaaatatttacaaggtttaatatgctctccttgataggccaggataagcactttttgctcatcttagataagtattttgcttgtttatcttcacaccaatttcttaacaccaattttcatatcaattctcagtagatttctctttaccttttttaaattccgttttcttattttgaagaaaatctttaaattgaacacagataacacttttattttattttattttattttttttttattttttgagacggagtctcgctctgtcgcccaggctggagtgcagtggcgggatctcggctcactgcaagctccgcctcccgggttcacgccattctcctgcctcagcctcccaagtagctgggactacaggcgcscgccactacgcccggctaattttttgtatttttagtagagacggggtttcaccgttttagccgggatggtctcgatctcctgatctcgtgatccgcccgcctcggcctcccaaagtgctgggattacaggcgtgagccaccgcgcccggccccagataacacttttatattcattcttaaactttcaagtgtactttgagatttagtttttttttttttttttctttcttaggtctagtttgaaatggctaggtaacaactgaaattctaggggatactcctttagccactattttcacaggcatagtcttacattcaggaaaatgtagagatatagaaaattactgatggatatgcagatatcctttaatgaaactaaggtcaatattacagtcttagaatgtaaaaaagagctgtaaatatgcattatcagtgagtcatttttcatatcagaaacacgcagaaacgtggaagatacatggcttcctcagtctaagtatgtgactcaaataacagacactgttttcagtgataggagaatcaaatttgcaattaaatcactgcccctgtagctcaaaagtggagtgttggcaaaacaatccctgacttcaaaactaacacccaagagcaaaatccatgacattcagctgcttattttgatagagatcattcattctgcccccaaccaaatcttcagaggtctggtttagggagatgattataccacccataaagtgtcatagtagttatggtgttctctgatatatctttgggaaacataccatttccaagtaagccctcagttcagggacaagatcagaattgagattgaaagctttagccataagatagtcttcaggctttttcatttgtaatatattgtgagatatgctggtagaaaaca

SEQ ID NO: 706941 - DNA, 955 bp, Homo sapiens
agccaaaagacctttcgataccatgctacatatgaccacttaaattcagaattaataaaatgatgaatgtatatattaaaaaatatataatatacaagtatataatgtacaatataatcattttctagtacctaaaatttgtgcttttcaagagacaatttatagattgtatccatttcaaagaaaaaggattgcggttagaaacaaaatagtatagataggtatactgaaactgtatgaatgcatacttatagactgacaacagaagacagcctatatcctgtgagtcactggttcaaatccaattcagagtcataatggagtagagatgatatcactttactgctgttcaatgatctgtgtgaaatgagttgatagttcagtacatttttaatgaactgatgccaacatcacaaaaactataatcataaatggtactaattgcctctattgtaacacatttcaccttcatgcacatgtatctcaagaacatcattcccttctcaaaggttttgaaacgtgcctaggtgagtgctatagaaaaggcaagctaagcttgaatattaatatctgaaatgtatttcttcctggctaagaaagatcatgctaccatgtttatttattgtagtgtttactctcttatatatatttaactcttcagggaaaaccaataatacaaatattagccatttatgtttcaatatgccctcaayctatcaatatccttttgtgataaagactgtactaggaaccacagtgcttattatggatgactgtcaaacatagcttttacagtgactgatctactgaaaactcctagattttaatgtgtctttggtattatctcttgaggaatacctcttaactctggtgagtaaaaagaagtcaagtcttaagagaaaagcaatgaaacaaatgattcttgaatcttcgtaaagcatttctggaagtccct

SEQ ID NO: 706942 - DNA, 568 bp, Homo sapiens
ccacgcccggttcattttttgtattttagtagagacagggttttactgtgttgaccaggctggtcttgaactcctgagctcaggcaatctacctgccttggcttcccaaagtgctggaattacagacatgagccaccctgcccagcctcctggaggtttttatcaactttgatcatttttttctagtgtgtgtgaatgttcagttccctgttttgaatgttttatttttttctctctcagcaagctcatggttatgcttgggtcctagctgggtggatgtctgtgccacctgggaccctgggtgtatgagaaatgccagaagcatctttttagattctttggacacactcttgggggcagattgccaggagtgaggttatttggtcaaaggattgtagtcaagttttrtggttcattcattgcgcccccccccctcaaagggtcgcttaggtgtaatctagcctctgggcagtctggtgaggccagcatgaagaatggaaccttctagctcttccagagcctgaggctgggagccctacccaggggtctcagggtgcaccagggcaga

SEQ ID NO: 706943 - DNA, 602 bp, Homo sapiens
tcactagaccgtaaactctacgaagcaggaacaaaatggacttattcgttactgtgttgtgcctgacagaatgaatagtagtcgattttcagattcttctctccatcctctacttttctaagacttaggcctttcacaacacgtacttgaaactgagacttctcagtaagagaacttcgtttacttggttcaagtcttaagccacggagcccactaaatgacaaatgagaaaaaaaatcccagtcacttcgcgaccttcccccataaggcctcctcccgcaacagcaggcagcaagaacaacgcatttgtccagcatgtcctgcgcaggcgcccttcgcctggctcgctctgccccacctgtgccaggcagtaagccgcaagagcacttccgggagcccccgacccggttgttggtaagtcggcggcgacgcccacctgcagaacgggaccggcggagcgccagggctagagacgggacgtagcgacgtactgcgtgcgtgcgtgcgcacaaacgwgggcgcgcatgtcgggacggaactagaaaagctcagtggggctggcggcaactctaggtctaacatccctcggaagttcgtgcagc

SEQ ID NO: 706944 - DNA, 1544 bp, Homo sapiens
gtgggatgaggcccaaatctttaaaaagccatcaggctgtgccccctttgcaggatcaccagcctccctccatcccaggcccccagtgtcctctcattcctctggggcctgggcctgggaagctgttcccacagcttttcacctggttaactcctcacgccagtccaatccaaacccagggtcccatccaagtcagaagcacagcctcctctctcagggccccttgtgcttcctcccagcacagctcagacctgtcattacacatctggttctgtgggggacccctgtttctgccggtggacccctgtttctgccggtggactccaaacccaatgtttagctcaccccggcagtcctgaatgcctgacagataggcggcgctccacagatgtgaatgtggtgaaagaataaatgttggaaggagcatggggctggaggcaggctaaatttattattgattgattgattgattgattgattgattgacagaatcttgctttcccacccaggctggagtgcagtggtgcaatattggctcactgcaacctccatctcctgggttcaagcaattctcccgcctcagcctcccaagtagctgggactacaggcatgcaccaccatgcccggctaactttttgtatttttagtagagatggggtttcgtcattttggccaggctggtctcgaactcctgacctcaggtgatttgcccacctcagcctcccaaagtgctgggattacaagtgtgagtcactgtgcctggccattgcttgaagaatttagagaataaaacaccagcacagcacccagcatatagtagacactcagcaacatcaccgcccttcttttctcttaccctaaatctagtctgaagggagatatgggtgagaacacatttgctcccataattaccctgaattgtattggctgacacgtaaagcagcatttcccttggagagaagaatggtggaaagggtctggggccttgggtaccttataaggtccagaaaccctcttggcaaggcctgaatgccctacctcagctccatcagcattaccaccacctgaccttgtcctgagccataagccctggtgttagctgtggatacaggagcaagggcttggggcaggggtgaaattctccctagaactacaactggaatgacacccagcaggagaaagcctcaatatgactgtgtaagatcacggtggttcaggaatcccttttttcctacactgtcctgagcaggctgagctcagaaccacgaacatctgcacacacgggcagctggccccgtcaccggcctccaggggcagtgcccccgccattattagtcattactagagcaaacattagtacaagtacacacacaattgcagaatcattgctctgattggaaacactggtgtggagtcttgcaagcattcactgggtgagacrgaaactgtgaacttgtttttctaggctcagacacttctttcagatccagggctgacaaagaaaggcccattacgtggggcacctcccccaggacttcctcttc

SEQ ID NO: 706945 - DNA, 1161 bp, Homo sapiens
tgtaacaaaggtaacagcttttaagtttccactatagaaattgttcaatctcaccaggcgcagtggctcacgcctgtaatcccagcatgttgggaggccgaggcgggtggatcacctgaggtcaggagttcaagaccagcctggccaacatggtgagaccctgtctccactaaaaatataaaaattagctagacgtggtggcaggtgcctgtaatcctagctgtgcaggaggctgaaacaggagaactgctcgaacccaggaggtggaggttgcaatgagccgagactgcgccattgcactctagcctgggtgacaagagtgaaactctatctcaaaaaaaaaaaataaataaataagagaaattgttcagtctctgtatttatttatctatttaattatttatttattgagatggagtctcactctgtcgccaggctggagtgcagtggtgccatctcggctcactgcaacctccacctcccgggttcaagcgattctcctgcctcagcctcccgagtagctgggattacaggcatgtgccaccaagcccagctaatttttttatttttagtagagatggggtttcaccatgttggctaggatgatctcgatctcttgacctcatgatccgcccgccttggcctcccaaagtgctgggattacaggcgtgagccatcacgcccggccaatctctgtttttaaatgtgccttgactataaaatgaaaatttatctgattraattaagatatgcttttgtattttaataaaatgattagagtagcaacatgactggtgattgtatattttcactggatacattttaagaattacatgtttttttttcctttacatgctgttactgtgaataatataacttctactctgaattctgtggacctatggcgatggagcttagggagctctcagttgtactcaaggtgtgctcattatttttgttatggcagcctaggatgactattagagctcgatttccaaaagctccatttgattcacaaaagagggcttgggaagagggcaggtgacagggggcttgaagattttgttttgaacttctgttatggattgaattgtatcccctctaaagtcatatgttggaaccctagagtggctatatttggagatgagacctttaaggaag

SEQ ID NO: 706946 - DNA, 950 bp, Homo sapiens
cactgataaagaaagacaagaaagctaatgtctttcttgttggggaactttcatttaagtggggcgataccggtaagaagcccacaaaaaatagacaagaaaaattgagacagtggtaagagttacaaagaaacaaaacagtggtggactgtatggatatgggtttaagggaggctaatttagtttgggyagagttaggttcactgaagaagtgatgtttaaatagagacttgagtctcagtggagagatggtcatggagttctggaggcagagcattctagaagaaaatagcaagacaaaagccttaaggtaacaaaacgagtttgatttgttggaagaatgtaaagaacactaagttgcctgcaatattgtaaatgaggcagcaagcaataggagataggagataaagcccaaggtctgtgaagaggcttgcttgtagttgtagtatcctaagatcctatctatagtaaatacttaataaatatttgtttaaaaatttaattcataatttgagtaataatcagattatataagttttggttatcagtttaaattttaattgaagagagactgcagttttgatatacaggatgaacaaaagatgttgagactgcagattggaaagccatataggaagcaactccactcaatgcaatcagtccctttgcctggattgtttgtagaaggacaaagcttcgttaatggacattggaattatcttgtgaaatacaatgtatcgaattcttggagactcccagaatagaggaataggcaaaacaatattgaaaactcagaaggactctcaagataacaactttcaactgtaaaataatgatatgaaattttgttttaaaaatatgtgaagataatcagaacaagcaaaacacaaaaacacacacacatgtgcatgcgcgcacacacacacacacactcacacatacacatacat

SEQ ID NO: 706947 - DNA, 950 bp, Homo sapiens
cactgataaagaaagacaagaaagctaatgtctttcttgttggggaactttcatttaagtggggcgataccggtaagaagcccacaaaaaatagacaagaaaaattgagacagtggtaagagttacaaagaaacaaaacagtggtggactgtatggatatgggtttaagggaggctaatttagtttgggcagagttaggttcactgaagaagtgatgtttaaatagagacttgagtctcagtggagagatggtcatggagttstggaggcagagcattctagaagaaaatagcaagacaaaagccttaaggtaacaaaacgagtttgatttgttggaagaatgtaaagaacactaagttgcctgcaatattgtaaatgaggcagcaagcaataggagataggagataaagcccaaggtctgtgaagaggcttgcttgtagttgtagtatcctaagatcctatctatagtaaatacttaataaatatttgtttaaaaatttaattcataatttgagtaataatcagattatataagttttggttatcagtttaaattttaattgaagagagactgcagttttgatatacaggatgaacaaaagatgttgagactgcagattggaaagccatataggaagcaactccactcaatgcaatcagtccctttgcctggattgtttgtagaaggacaaagcttcgttaatggacattggaattatcttgtgaaatacaatgtatcgaattcttggagactcccagaatagaggaataggcaaaacaatattgaaaactcagaaggactctcaagataacaactttcaactgtaaaataatgatatgaaattttgttttaaaaatatgtgaagataatcagaacaagcaaaacacaaaaacacacacacatgtgcatgcgcgcacacacacacacacactcacacatacacatacat

SEQ ID NO: 706948 - DNA, 584 bp, Homo sapiens
caaaaaattagccagatgtggtggcacgcgcatgtagtcccagctactcgggaggctgaggcaggagaatcgcttgaacccacgaggcggaggttgcagtgagccgagatcgcacctctgcactgtagcctgggtgacagagtgagactctgtctcaaacaaacaaacacaaaaacaagaaaaccttgaatgactttctgagacccacaagataaatcagacaaatctcaggttgagtccagcgttgctacgtattacatgacattgtactgtaactgaatctgtttctacctatggatctrtgatgatggccaatgacaaaagggcatgtaaagttgtaagagtaatgttttctatgatcccgtatttgtgtgtatgtgtgtgtttgcatatgtttgtatgtttctataatcttggagaacagaatgagagaggatatatagcagactcaacattaattatctctgggaagtggggttggactggaggttagaaaaaaagtttttaactttaaaatacatttttctctaatttcgcttgttacaaagagcatataactaactatatgtatgcatacatcacaa

SEQ ID NO: 706949 - DNA, 666 bp, Homo sapiens
tggtcatatattgagactgaacaggtgtattttcaagttaagtatgccgtcactacttcctaagagctttttgaatatgaccaccttcctgaagtcaagttagcataaccagctgaatttataggcttaactctagcctaccaagctagcaaagaataaaagggctaacatatacacagacagcagatatgcctttgatttggtttatgattttagcatgctrtggaaacaacacagcttcctaacagcttctggtacttcaataagcagcatgagcacatacaggctttgctagatgctttgctactctctcaaggaagtgactgtaattaacgtcaaatctcatactagggaacaaacccataaagcaaaaggaaatgccctgtctgaccagtatgctaaacaggctgctctcgccacattcaatttgttcagcatattaaagacaacctggttactgcagattgcttccatgaaactttgagcaaattgcagttaaagcaccagactctgaaaaaagatactgggagaaatctgggtgttccctccaatcagatgggttcctatggagacaccaagactgcacctggtctctccagtctctctgaaacagagcttgatgaaaattttgcaggttatgattcataacagtaaataaacttgaaa

SEQ ID NO: 706950 - DNA, 1629 bp, Homo sapiens
ggaagacagtttaacagttacttaaaaatcaaacatacgccaatcggaagatctagccattccactcctaggtattatatttattcaagagaaatgaaagcatatttctacacagtatatatgctaatgttcatgacagccttatttgtaatagccaaaaactagaaatgacccaaattgtctatcacctggtaaatagataaacaaattgtggtatatccacactgtagaatactactcagcaataagaagggaatgaagtattgatatacacaacatggatgaatctcaaagtaactacgttgagtgaaagaagccagaccaaaagcaagtccamactgtatgactccctttatgtactacaatacatgctcatgcatgtctgctatatggacagatcctactgtacacacaattgttttctactctttcgattgtcacagctccatttttatcagatttttggaattctgaatgttatccatgtttttaatccatgatttttataaaacttcaatttagtgagtcagtttttgaaaaaagtctccacttagaaagctgataataagattctgaaaatgagttgagtcttaaattttgtgaagatttataatcatttatactttccataactgtatgttgtgaaaggataacactgttcctcagtcatctcctgtgtgtgcttgtatatttgacagtctgacttactctctgtggtagggttttagcagcagcagaagaaaatagcaaaatggagcaatcaaacttagaaaagttggaattgaatgtcagaaaactgcagcaggaactagaccaactaaacagagacaagttgtcactgcataacgacatttcagcaatgcaacagcagctccaaggtataaggcagcaaaacagtgaaagtgtgtgatttccttgcccttcgttagattctttgatttttcttacgacaagtaattcctgctaatgagcatggtgtttctttctaaaattagattgtggtaatgtttgcacaacttggaatatactaaaagcctttgaattgtacactttaaataggacatgatatgtgaattttatctcaataaagtcagttaaaaaaaaaaacctaattcatgttccttagagaacaattttaaaacagcaaaaagaaataaaaattgctgttgacctcactcctcatagattcctagtaacagtttggtgaatatccttccagatttttcctaggggtgtgtctagtttgaaaaacaaaaacaaagatgtaaataatgaagattttaaaattaccaaatgtttataaatatgataatttatttagaagaaattgctgagtaattctagctaataatatacttgttgaacattttttatatccttggtatttcattttctcacttaatcctcataacatttttatgagataaaaattattttactcatttgtaaataaggaaactgaagcttagttttcttgtgactgcttaaatgagaagtgacttgctagaggtcacacagctagtaattgacaaagccaatatagataaaaaatttattcccaaattgccttcctgaaaggttaagtttctatttctaccagcaatgcagaaggtagctgtttttaaacac

SEQ ID NO: 706951 - DNA, 1629 bp, Homo sapiens
ggaagacagtttaacagttacttaaaaatcaaacatacgccaatcggaagatctagccattccactcctaggtattatatttattcaagagaaatgaaagcatatttctacacagtatatatgctaatgttcatgacagccttatttgtaatagccaaaaactagaaatgacccaaattgtctatcacctggtaaatagataaacaaattgtggtatatccacactgtagaatactactcagcaataagaagggaatgaagtattgatatacacaacatggatgaatctcaaagtaactacgttgagtgaaagaagccagaccaaaagcaagtccaaactgtatgactccctttatgtactacaatacatgctcatgcatgtctgctatatggacagatcctactgtacacacaattgttttctactctytcgattgtcacagctccatttttatcagatttttggaattctgaatgttatccatgtttttaatccatgatttttataaaacttcaatttagtgagtcagtttttgaaaaaagtctccacttagaaagctgataataagattctgaaaatgagttgagtcttaaattttgtgaagatttataatcatttatactttccataactgtatgttgtgaaaggataacactgttcctcagtcatctcctgtgtgtgcttgtatatttgacagtctgacttactctctgtggtagggttttagcagcagcagaagaaaatagcaaaatggagcaatcaaacttagaaaagttggaattgaatgtcagaaaactgcagcaggaactagaccaactaaacagagacaagttgtcactgcataacgacatttcagcaatgcaacagcagctccaaggtataaggcagcaaaacagtgaaagtgtgtgatttccttgcccttcgttagattctttgatttttcttacgacaagtaattcctgctaatgagcatggtgtttctttctaaaattagattgtggtaatgtttgcacaacttggaatatactaaaagcctttgaattgtacactttaaataggacatgatatgtgaattttatctcaataaagtcagttaaaaaaaaaaacctaattcatgttccttagagaacaattttaaaacagcaaaaagaaataaaaattgctgttgacctcactcctcatagattcctagtaacagtttggtgaatatccttccagatttttcctaggggtgtgtctagtttgaaaaacaaaaacaaagatgtaaataatgaagattttaaaattaccaaatgtttataaatatgataatttatttagaagaaattgctgagtaattctagctaataatatacttgttgaacattttttatatccttggtatttcattttctcacttaatcctcataacatttttatgagataaaaattattttactcatttgtaaataaggaaactgaagcttagttttcttgtgactgcttaaatgagaagtgacttgctagaggtcacacagctagtaattgacaaagccaatatagataaaaaatttattcccaaattgccttcctgaaaggttaagtttctatttctaccagcaatgcagaaggtagctgtttttaaacac

SEQ ID NO: 706952 - DNA, 1022 bp, Homo sapiens
ctcccaaggtgctgggattacaggcatgagctaccgtgcctggctyatagagagtttatttttatttttattttcaagacagagtcttgctctgtcgcccagtctggagtgcagtggcatgatctcagttcactgcaacctccacctcccaggttcaagcaattctcctgtctcagcctcctgagtatctggaattacaggcgtgtgccaccatgcctggataatttttgtatttttagtagagacggggttcaccatgttggccaggctggtcttgcactcctgaccttgtgatccacacgacttggcctcccaaagtgctgggattacaggcataagccaccgcgcctagccagttttattacactgctgtagtcagtgcctacaaatttttctcatcctgccctttttggccaacattagctttaatcattatcctaaaaccaggaagctcaatctaccatgctttcatccttgaaataaatttgggaagtgacactcaggtcagaataatttatggtggatggagacaggtgagcagcaatggaactgtcaagggggaggatttttccactaccctctggaggggttagtggagccctgttgtatgaaaggaacttttaaaccatgtgtgtctctcaaaggggatacgctgataactagtgataggcagatcgtcataaagatggaatatagatgtctaaaatttaatcctaccagtaaccctgtgatgatgggtattattattctcattttacagacaattaatgaagactcagaaagggatagtagcttattatcaaaggtaatgctaacagactctgacgtgtatatacgcccagctgtatttgatctgcccatgaaaggccgatagaattatccccatttgacagctagagaagctgaggcccagaaggggaatgaagttatagagctagtgagtgtgtaagccagcaaaccacacctccatgtgttagatcgcagagttattttcttcctcctgtgctaggagcaaaaacagg

SEQ ID NO: 706953 - DNA, 1022 bp, Homo sapiens
ctcccaaggtgctgggattacaggcatgagctaccgtgcctggctcatagagagtttatttttatttttattttcaagacagagtyttgctctgtcgcccagtctggagtgcagtggcatgatctcagttcactgcaacctccacctcccaggttcaagcaattctcctgtctcagcctcctgagtatctggaattacaggcgtgtgccaccatgcctggataatttttgtatttttagtagagacggggttcaccatgttggccaggctggtcttgcactcctgaccttgtgatccacacgacttggcctcccaaagtgctgggattacaggcataagccaccgcgcctagccagttttattacactgctgtagtcagtgcctacaaatttttctcatcctgccctttttggccaacattagctttaatcattatcctaaaaccaggaagctcaatctaccatgctttcatccttgaaataaatttgggaagtgacactcaggtcagaataatttatggtggatggagacaggtgagcagcaatggaactgtcaagggggaggatttttccactaccctctggaggggttagtggagccctgttgtatgaaaggaacttttaaaccatgtgtgtctctcaaaggggatacgctgataactagtgataggcagatcgtcataaagatggaatatagatgtctaaaatttaatcctaccagtaaccctgtgatgatgggtattattattctcattttacagacaattaatgaagactcagaaagggatagtagcttattatcaaaggtaatgctaacagactctgacgtgtatatacgcccagctgtatttgatctgcccatgaaaggccgatagaattatccccatttgacagctagagaagctgaggcccagaaggggaatgaagttatagagctagtgagtgtgtaagccagcaaaccacacctccatgtgttagatcgcagagttattttcttcctcctgtgctaggagcaaaaacagg

SEQ ID NO: 706954 - DNA, 2224 bp, Homo sapiens
ctggttcatcttaaaacatttttccaaagaggtactcaaatatgtcatttacctataagccatcatgccatcacttagttaagactgtttttactgtttcaagaatttgatttatccttccttttgtcttactgtaggaaaagaatgcctcagccagatgaggaatactgtcttgtgtaaatatattcaaggaaaacacctccactacctcactgacttcataattggaatgtcacatggtttttttaatcaagatgcagtgaactgagattctgaaactccactgtagtttactttgcctgtaccattaatgccaatgtttttataaatcacttgtacatagtacatatgggaatagttgcatatgggaatttaaaccaacatgtggctgagcctttttttttttaatcttcgtaacatgtttaaaaaaaaacagtgattttaactgcatatttgaacctacaaactggtaaatcttattaacaaaaagaatgtacttaaggccctctttatttatagtgtcgagttatttttgaattttgcttaaaatctatttttcatatgaaaataaaagataacaatcaacttgggtctgtcctctgactttacacttcacaggtcattctatggaaaagccgtcaaatttttaccttattccaagtaagtaatctttcaggtggttttcttttacctggaggctgaagtacattatacttatcaatgaagatttcatcatttggaaatacatcaattataaaactattatgcttcagatgcctttccttagccaacatattctttggtggaaaatcaggaaaactttgtaccttggagaatgtgacccagtgataaattcaaattgtgttgcctttcagattttgaactaccataattaacagctcaactccatgatgtatacatttctttaaaaactagaatagcaactgctctcacagtctggcataattattcccaagggggaaatatgtaataagaagttttaaaatattctcgggaactcttttctagatcactactagacagcttttgagtcacaacaggtatgttaccctgttactaataatacagagcagcacagtgcagtcatccctcaccaccaaggtttttattccaaaacagttatttggctagacgtgaaccgttaagatacgggatcaatggagttacaataaagacaatgaaagtgacaatttattaatacacagtaagttctagaaggcatctttcaaaacaaaacttgatttcttttgtatttacattttttgtttcaagtcttagcaaaatgctaaaaggcctggcctagtcacaattactgacatccttctgggacacaattttctgggcctgtgttgaatgaggataaattatcttttctctaaaatgccacatgaaccctctctatattcccacatgaagaggaatggaaggtaattatttggtcttttcttctgtttaggggaatgaactgaaccactcatttttttaaaatcacacttaaaagacacatgggcaaaaaagttccccaaaactactgtcttaccgaatttgagaagggaggtaatgtatgaagcttaacagctggcttcaaaagacacctttccaaagaaattgtactacctctattaacgtgtaaaccaccaaccaaaaaaaaataataagttactccatcaaacacgttattatccataaaaaagacttcaacattgtactggaagatctatttaagcataaatagtactaagcaccaattactaatctgarggcctcctcacaggtccaagggcaatgagcaacctcaagaggcaggtgactgcacaagcagtaagctatggattaaaaattaaaaggatttcacattctttccaaagtgtactgcccggtgtctggcacacgcatgttacaatatgacaatctgctctatttgtgagcacctgagtgtattacaggggattacacatgcatatgatagaatctggctcccggtacagtcaaaggagaacagcatcagccaccaaatgtgctgatcttacactgaaaagggttgactgaaaacatttcaagggtaatgtaaacacaagaataaagctgtgggtctattacttagtgatgtggttttatatgctacatacgtagacctctctttatacaatgaatatggacagtgctgcaataaaaactgatgacacgtcaaattgttcacctg

SEQ ID NO: 706955 - DNA, 2224 bp, Homo sapiens
ctggttcatcttaaaacatttttccaaagaggtactcaaatatgtcatttacctataagccatcatgccatcacttagttaagactgtttttactgtttcaagaatttgatttatccttccttttgtcttactgtaggaaaagaatgcctcagccagatgaggaatactgtcttgtgtaaatatattcaaggaaaacacctccactacctcactgacttcataattggaatgtcacatggtttttttaatcaagatgcagtgaactgagattctgaaactccactgtagtttactttgcctgtaccattaatgccaatgtttttataaatcacttgtacatagtacatatgggaatagttgcatatgggaatttaaaccaacatgtggctgagcctttttttttttaatcttcgtaacatgtttaaaaaaaaacagtgattttaactgcatatttgaacctacaaactggtaaatcttattaacaaaaagaatgtacttaaggccctctttatttatagtgtcgagttatttttgaattttgcttaaaatctatttttcatatgaaaataaaagataacaatcaacttgggtctgtcctctgactttacacttcacaggtcattctatggaaaagccgtcaaatttttaccttattccaagtaagtaatctttcaggtggttttcttttacctggaggctgaagtacattatacttatcaatgaagatttcatcatttggaaatacatcaattataaaactattatgcttcagatgcctttccttagccaacatattctttggtggaaaatcaggaaaactttgtaccttggagaatgtgacccagtgataaattcaaattgtgttgcctttcagattttgaactaccataattaacagctcaactccatgatgtatacatttctttaaaaactagaatagcaactgctctcacagtctggcataattattcccaagggggaaatatgtaataagaagttttaaaatattctcgggaactcttttctagatcactactagacagcttttgagtcacaacaggtatgttaccctgttactaataatacagagcagcacagtgcagtcatccctcaccaccaaggtttttattccaaaacagttatttggctagacgtgaaccgttaagatacgggatcaatggagttacaataaagacaatgaaagtgacaatttattaatacacagtaagttctagaaggcatctttcaaaacaaaacttgatttcttttgtatttacattttttgtttcaagtcttagcaaaatgctaaaaggcctggcctagtcacaattactgacatccttctgggacacaattttctgggcctgtgttgaatgaggataaattatcttttctctaaaatgccacatgaaccctctctatattcccacatgaagaggaatggaaggtaattatttggtcttttcttctgtttaggggaatgaactgaaccactcatttttttaaaatcacacttaaaagacacatgggcaaaaaagttccccaaaactactgtcttaccgaatttgagaagggaggtaatgtatgaagcttaacagctggcttcaaaagacacctttccaaagaaattgtactacctctattaacgtgtaaaccaccaaccaaaaaaaaataataagttactccatcaaacacgttattatccataaaaaagacttcaacattgtactggaagatctatttaagcataaatagtactaagcaccaattactaatctgaaggcctcctcacaggtccaagggcaatgagcaacctcragaggcaggtgactgcacaagcagtaagctatggattaaaaattaaaaggatttcacattctttccaaagtgtactgcccggtgtctggcacacgcatgttacaatatgacaatctgctctatttgtgagcacctgagtgtattacaggggattacacatgcatatgatagaatctggctcccggtacagtcaaaggagaacagcatcagccaccaaatgtgctgatcttacactgaaaagggttgactgaaaacatttcaagggtaatgtaaacacaagaataaagctgtgggtctattacttagtgatgtggttttatatgctacatacgtagacctctctttatacaatgaatatggacagtgctgcaataaaaactgatgacacgtcaaattgttcacctg

SEQ ID NO: 706956 - DNA, 1536 bp, Homo sapiens
acttatcacgaggacaagggggaaaaaaagtctagatttaccatgcaggagagatttattactctacttgcctttgataacctgattacatctagttgtttagcagtttagtattgtgttaaactgtttttacaacagagttttttctttttttttaattaaacccagtaagatgtacagaagacaatgaggcagtaaaaagtactgcttccaacagacagaggtgaaaggtcaaatgaggggccacagcaaagaggtcactagcagccacagccttctctctggggttggggttcactggttagccggcctccctgcggggctgaaggtttgtgttgtacaccagactcagcagcattcagatccaagcttccatcctgaatgttctgatagattttcttggcagcctcaaggaaggcatcttctacattctctcccctaagaggcaattgataactttattggagaaccacagttttctacaaaagacaagacactgaccttttgctaatctttagttaactgccatgatgtctccaacttaaccactgtcatctaataagagattaccagaacactgagctaagagaacatggaaaactattttccttttttttttttttttttttttgagacagagactcactctgtcaccaggctggagtgcagtggcccgatctcagctcactgcaacctccacctcccaagttcaagcgattctcctgcttcagcctcccgagtagctgggactacaggagcacaccaccacgcccagctaatttttgtatttttagtaaagacagggtttcaccatgttggccagggtggtctcgatctcctgacctcgtgatccgcctgccttggcttcccaaagtgctgggattacaggtatgagccaccacacccggccggaaaactactttctatggaaagcatacatacatacgtgtactgaaagccctttctacaaaccctatttggacaactacatgtgttatatgcaatcattaaaatactgtatgttaatacacaccatgacaattcagataggtcatttctgtgataacagagaggatactccaaacagaaatgaaatctctctgaacatgctgaaaaaaattccaagaataatatggtctgctcagccaagcatgaactgagctgtttttaatcgggtaatggtgacataatcatgcttagccacgttaacacctccattcarttttctttggactaatagcacagctgagactaaacgaaaacaggttagcctctcctcaccacaagaaatttttggcctaataaatgaagaacaatgatgggtgtaccacagttcaatagcagacatggaagaacaattagaaaatgttcactatgcttctgagtagacactattcccttaaatcatgctttttaatgtgatcagaagtattacaggaagaacagattgaccaagcttgtctgagatgccaaactcaacctcacttgtgaaaagtcaaacactgtcatttgggaaaagtcaaacacttttgaaat

SEQ ID NO: 706957 - DNA, 599 bp, Homo sapiens
agtgttatatcttctcgtatggaagcaaaacaacaacaacaacagaaaaaaaataaaaactaatttttaaaaaggaaaaaagtaatttacctatgttgctacatttagcagtgcatcaattcccacacattcagagttgtttccttggagaagctttgtattattaacattttccccactagacctgcacatacacaacataaatagagcatcagaagttgtcgatcataaacctaaatatagctctaggctgtcaagtttctggttcccaggagtaacaacaacaaaacctatgtaatgaggactttgctgttaaagtcttctctgggaaacacttgtgttacctcgtaatttatcataaactctatttgatattctgcatctggtagtgaggtataagactgaaaccgcggcggggmgcggtggctcaggcccgtaatcccagcactttgggtggccgaggagggcggatcacgaggtcaggagatcgacgccatcctggctaacacggtgaaaccccgtctctactaaaaatacaaaaaattagccgggcgtggtggcgggcgcctgtagtcccagctactcgggaggctgaggca

SEQ ID NO: 706958 - DNA, 599 bp, Homo sapiens
agtgttatatcttctcgtatggaagcaaaacaacaacaacaacagaaaaaaaataaaaactaatttttaaaaaggaaaaaagtaatttacctatgttgctacatttagcagtgcatcaattcccacacattcagagttgtttccttggagaagctttgtattattaacattttccccactagacctgcacatacacaacataaatagagcatcagaagttgtcgatcataaacctaaatatagctctaggctgtcaagtttctggttcccaggagtaacaacaacaaaacctatgtaatgaggactttgctgttaaagtcttctctgggaaacacttgtgttacctcgtaatttatcataaactctatttgatattctgcatctggtagtgaggtataagactgaaaccgcggcggggcgcggtggctcasgcccgtaatcccagcactttgggtggccgaggagggcggatcacgaggtcaggagatcgacgccatcctggctaacacggtgaaaccccgtctctactaaaaatacaaaaaattagccgggcgtggtggcgggcgcctgtagtcccagctactcgggaggctgaggca

SEQ ID NO: 706959 - DNA, 599 bp, Homo sapiens
agtgttatatcttctcgtatggaagcaaaacaacaacaacaacagaaaaaaaataaaaactaatttttaaaaaggaaaaaagtaatttacctatgttgctacatttagcagtgcatcaattcccacacattcagagttgtttccttggagaagctttgtattattaacattttccccactagacctgcacatacacaacataaatagagcatcagaagttgtcgatcataaacctaaatatagctctaggctgtcaagtttctggttcccaggagtaacaacaacaaaacctatgtaatgaggactttgctgttaaagtcttctctgggaaacacttgtgttacctcgtaatttatcataaactctatttgatattctgcatctggtagtgaggtataagactgaaaccgcggcggggcgcggtggctcaggccygtaatcccagcactttgggtggccgaggagggcggatcacgaggtcaggagatcgacgccatcctggctaacacggtgaaaccccgtctctactaaaaatacaaaaaattagccgggcgtggtggcgggcgcctgtagtcccagctactcgggaggctgaggca

SEQ ID NO: 706960 - DNA, 599 bp, Homo sapiens
agtgttatatcttctcgtatggaagcaaaacaacaacaacaacagaaaaaaaataaaaactaatttttaaaaaggaaaaaagtaatttacctatgttgctacatttagcagtgcatcaattcccacacattcagagttgtttccttggagaagctttgtattattaacattttccccactagacctgcacatacacaacataaatagagcatcagaagttgtcgatcataaacctaaatatagctctaggctgtcaagtttctggttcccaggagtaacaacaacaaaacctatgtaatgaggactttgctgttaaagtcttctctgggaaacacttgtgttacctcgtaatttatcataaactctatttgatattctgcatctggtagtgaggtataagactgaaaccgcggcggggcgcggtggctcaggcccgtaatcccagcactttgggtggccgaggagggcggatcacgaggtcaggagatcgasgccatcctggctaacacggtgaaaccccgtctctactaaaaatacaaaaaattagccgggcgtggtggcgggcgcctgtagtcccagctactcgggaggctgaggca

SEQ ID NO: 706961 - DNA, 599 bp, Homo sapiens
agtgttatatcttctcgtatggaagcaaaacaacaacaacaacagaaaaaaaataaaaactaatttttaaaaaggaaaaaagtaatttacctatgttgctacatttagcagtgcatcaattcccacacattcagagttgtttccttggagaagctttgtattattaacattttccccactagacctgcacatacacaacataaatagagcatcagaagttgtcgatcataaacctaaatatagctctaggctgtcaagtttctggttcccaggagtaacaacaacaaaacctatgtaatgaggactttgctgttaaagtcttctctgggaaacacttgtgttacctcgtaatttatcataaactctatttgatattctgcatctggtagtgaggtataagactgaaaccgcggcggggcgcggtggctcaggcccgtaatcccagcactttgggtggccgaggagggcggatcacgaggtcaggagatcgacgccatcctggctaacacggtgaaaccccgtctctactaaaaatacaaaaaattagccgggcgtrgtggcgggcgcctgtagtcccagctactcgggaggctgaggca

SEQ ID NO: 706962 - DNA, 599 bp, Homo sapiens
agtgttatatcttctcgtatggaagcaaaacaacaacaacaacagaaaaaaaataaaaactaatttttaaaaaggaaaaaagtaatttacctatgttgctacatttagcagtgcatcaattcccacacattcagagttgtttccttggagaagctttgtattattaacattttccccactagacctgcacatacacaacataaatagagcatcagaagttgtcgatcataaacctaaatatagctctaggctgtcaagtttctggttcccaggagtaacaacaacaaaacctatgtaatgaggactttgctgttaaagtcttctctgggaaacacttgtgttacctcgtaatttatcataaactctatttgatattctgcatctggtagtgaggtataagactgaaaccgcggcggggcgcggtggctcaggcccgtaatcccagcactttgggtggccgaggagggcggatcacgaggtcaggagatcgacgccatcctggctaacacggtgaaaccccgtctctactaaaaatacaaaaaattagccgggcgtgktggcgggcgcctgtagtcccagctactcgggaggctgaggca

SEQ ID NO: 706963 - DNA, 672 bp, Homo sapiens
agaagaaaaaattgttactgcattttgtttacccactaacattgagctaaaaacaaaccgaggcaccacttgaaagttaaaaacccaaattcaaagctgtgccacaagctgtaactacttaatcaaagatatatccaaaaaataataaattagaaaggactgacgggggatctgatagacatcttcatttatctctcaggtgtaagaaaacctatatatatattctccaaaagaacactccaataaatcaaaccctcaatagcatgtaaaggtttatagttaaggtaattgaaggaaagaggtatttcaaaccatttatccaaattttgctgcaaattctctaagcattagattatgaattcttataagtaaatactgctccacacctgctcttacagaaattttccttgggaatgagtctgtcaagattctttttccagcctgagatttgggagttaatttctattcatgctgaaatcactggcattaattgggtttacccccttctgatttacgagcaaargaatgtaatttaaattctaggagggatgagaggcccatttgtgtagagttaactccttcagggtaaaaagttggggggaaaggtcccagtaatttggatagcaaagcttttgataaaggtttccttaaattggttccggatttcctatt

SEQ ID NO: 706964 - DNA, 1342 bp, Homo sapiens
ctctatctgtatttctttatgattaaaagagggtaatttttaaaaaaagtaaaagtaaataaagctattgatagaatatattatatgtataaattacatatatgttatataatatataacatcatttcatatatgtataaatatgtgatataaaattatatattatttatatgtaactttatatagatataaaagtttatctctgcttatagatatttccaaattaaaatgctgctagctttatgttaacctcagaatattttcaaactgtaattgcaaaatagtgtctactatgggagtgtaaaaacactaaataaggcaytgcttcttaattcctcagttgttgacatttcagaagcactaagatcaaagcctgatgttttgccggtatatgagatcaacaacaaccagttgtaagcaatgactgtgatataagacatttatgcagccaaaagacacatgacaaaatgctcatcatcactggccatcagagaaatgcaaatcaaaaccacaatgagatactatctcacaccaattagaatggcgatcattaaaaaatcaggaaacaacaggtgctggagaggatgtggagaaataggaacacttttacactgttggcgggactgtaaactagttcaatcattgtggaagtcactgtggcaattcctcagggatctagaactagcaataccatttgacccagccatcccattactgggtatatacccaaaggactataaatcatgctgctataaagacacatgcacacgtatgtttattgcggcactattcacaatagcaaagacttggaaccaacccaaatgtccaacagtgatagactggattaagaaaatgtggcacataaacaccacggaatactatgcagccacaaaaaatgatgagttcatgtcctttgtagggacatggatgaagctggaagctatcagtctcagcacactatcacaaggacaaaaaaccaaacaccgcatgttctcactcataggtgggaattgaacaatgagaacacatggacatagattggggaacatcacactccggggatggttgtggggtggggggaggtgggagggatagcatcaggagatatacctaatgctaaatgacgagttaatgggtgcagcacaccaacatagcacacgtatacatatgtaacaaacctgcacgttatgcacatgtaccctaaaacttaaagtataataataaaaaaagataaaaacaaaacaagaaaaaaagaaataagacaaagatcctttttaattccacttcacaagcttatattaaagaacaattattacatgtataattaatacactcgtatata

SEQ ID NO: 706965 - DNA, 3581 bp, Homo sapiens
ttaatatattaatattatttcttaaataaccatatttgttctataatttttcctttgctctagttttcttatgctgtacataactgtttctttattgaacaggatagtccacagtagctgcactgttcagatccaaagtttccaaggtaatgcagcaggaaacagaaaaaaaaacaggtagcatatcagcaattaataatacctgataagaaatgacttcattcattttggctcatcacacatcagtagtaactagtcttataacctttacctaattacaaagtattctgaaaaatgcagggaagcacattaaatatgagatgaacaacactttatcagccatagtcccttacacagaataggcaagtcagtaaaatatctttgataaaaatatcgtgtgaataagagtgtatgacattataacaaaaggcaaagatactatgttaatgaagaaatcctagagacttaaaagaaagctagttaatatgcaacagatttgaaacaaatgaaaggataaatgcaaattcaaaatagggcacgataagctaatctcaatatttagaaaaatttgacaaataattgctccacattgtgaacactatctcttattctgaagagaatacccaagattttcagagtcacttggtaaaaaatctcaaaggttttccagatattctatcaccacatatcataacttcaagtactcttctcctcaaagggaaagtaacaaagcagaattattcattggggattatggtgataaaatattcacaattcctattaaagcaataatgtgccagtttttaaattactgaactattctttttgttatttccaagggaatctgattagcaaagatagaacatactaacatggttttgctttgggattcatcgcatgtctgattaaagaatatttaaaaatacatttcagatatcttctcctcacttgctataaagaggctgaaatgacaattaggtagtctcatggttattaaattcagaggacatgaaggtaccttgtaacttgggaaattgaaccagaaatgcacataataacgtagacagtaaaaagaaataaaaggatcagacttatagttttaaaatagatccagttctgcatgcatagaattatcccccaaagcattctgtatataattttaagcatacaaatcaccttggtcaagcaacatgataatgcaagtacaagcctctacttagaaatttagttacttgccccagtaagaagtggtctgaaaatatctatgttgccatgtagaaaaagtaaattgtctatttttttcagattctttgaaccttgcttattgatccagccaatttacataaagaacctattttaatataagcaacccagttctataaacctgtagttaacaataattcaaagatgtttttatctagtttttctatgtttccatagttcaatacaattatatgaaataaatatcccatgctgctgtaacccaatgtttcactgcagttccaaattattgagcatagggtgaattttcaaatttgaaatttttaatgactgtttagtgagaggtcacaaattacatcagtactgttttcaagtagtcatatataccgccccccaccaaaattaactgattacagaagaagtatattttacttatgaattagaagaggttcatttttttctaatcaagtgggtcctttccaatcatagagaacatggagctagcaaatgtgtggaaaactgcatcacgcttcatattaccacctcccacttcttttaaaatgaagggagaggacactaaacgtaggcaggattaggttctccaattcaattccaattcatatattaatctgatgatctgtgggttcctgaggcatctgagtgtggctcctatgatcaggaaagagacagttattccgtgggcaagttctggcgggtggaaaagaacaagcacggaccagagtgcttgtctttttgcattagcctttccctgaaagagtatcaagggaagagccaactggactagttatgttgtttatcaagagcagccaaatatttatatgcacatttaacccctagataatgcactatcacttaaatcaaatacaattataattcttacattgcacctgcctgcaaattcaaacttctgtattttgacacaattgcctctacttgtttatgcattaaggcctatagcatcaactaattcaagagtcattttgatgaccagaaagggaaattttttaataactaataactatgttggtatttgcaaagaggaccctcaaaagggctttcctaaggattcctacttatacataacttatacataactactttatctatctcacagctaaagaggcatgcatagtatttgtactaaattaaggcctgaaaatgttgatataaacagatatttcgggggatgatctgaccaaacaccaaccaggtagatatgcctgtgattgatgtgaactcaacaacctaaaggaacatgatgataatgtaaataaatgaagtggatagggaataaaatatggtaaaatgaagagtgtagtttttggcttcaggagtcagcagctgctaagctccagctaattgttgacatgttgaaacatgggtttggtattgacaaatcttctgatttttacacaaactgagaaatatggcaaggcgtaaaggtggtatgtctcaagaaaggtaagaagaacagatattggaaagagaaagagtgaaaaaagagaaattgaggcaaagatcatcaaggtgcctatagctggggaaaaggctcaggttcctgcaataagagacacaattttctattttcctttgacttcacacagttattgaagggcattagcttaactaatgatccagtgtccagttctagctacttatttcaaacacttgtatgctgtttcacaaggtgatgattcaattaatgatgagtaaatatataagtgaggccaacaaagctcatatactgaaagtkaagttgtattcaaatacaaaataatctgaatgttagattccaagaactgtccaagtatagagaacaaggaaagttacttgaaaacataaataggttttcagtagaggctaaattcagatcaattcatgcaatgaaattttttatttgactctataaagttgattacttttattggttttactcacagtctgaatagattaacctcacttttaacccattagatatattatgctttatgttgaatttttgtaaacttcatcaattttttttttttttttaagtataaagacaggccgggcacagtgactcaagctgtaatcctagcactttgggaggccaaggctggcggatcacttgaggtcaggagtttgagaccagtctggttggcatggtgaaaccctgtctctactaaaaatacaaaaattagctgggcatggtggtgggtgactataacccaagctactcaggaggttgaggcaggagaattgcttgaactcggaagccaagatcgcaccactgcactccaacctgggtgatagagcaagactacatctcaataataataattaataataataataataat

SEQ ID NO: 706966 - DNA, 1795 bp, Homo sapiens
taatcagaaacacaaaggcatgtggcacttttacaacctactcaaaacctgtcaaataatgcaaacaacaaaacagagggcattgatatgaataatttatcatataatttcatattactactaagtatacgtggaaatctaaaggagaggaagggaggtcattgtaataaagcagttattaatgaatttcaaaatgaaaagaaaactgtattgtactaaagtctgttttaaaaattattctctttctccttctttctttctattttcagcacttgctctgactttgtgttggccccattttctcctaccattactggattccaaactcctttgtctgtgccctactccccactgtgcatgtggttgataaatagctgttagccattagcatcacatctttcaactaagaagtagttgggtcatttccatgacccaagagttaaagtagatcacataacaggaatgagaatcaaaatgcaatcagctgttttaccagcaacagtgagaggtacaaggcagtaggtatgtaattctgagacatacaccatatgctcccaaaatattccaagaaaatggtttctatactaaatttatatgctcagccaactttctaatcatgtaaatgatcaatttcctttatgctatatttccaaatgtgcacatttacttcatgtgtatatttgtcaggaagatgttctgagatgatctccaccaaaatggagtagtgtgacaagagggagagttgggttaagggaattgaatattcattacaggagaaaagagaagaagtttccaagataatgataactggaattctgaagaggactcaacagacagataaataacttgttcagtttggagcaggaggacaaagtgctctggtagctaataccagatatcattttaaatggtatcaaaaggtttgtgacaatattaatttgaaaagtaagatgtaaaaatagagcraaacagtgaggaaaaagttgtacaagaaaataaacataatactaatatgcagttcaactcagttatatagccaacgatagtagcataaaccctcggtagcaactggttatgtcactatactatattggttgcatggaagacagcaagtatgtgtggatgagagactgtaaggtatttaaatatatatcattcatattgtcttcagtggacaatatctaacattcaaaattttacaataagagcataagcctataatttagaaaaatggagatatataataatagaaaaaagctgaaagtgttgaaaaatatgatcactgagaagcacaaatttggttggatagggaaactaatgcttttcattataactttaaattttaaatttacctattttattctgagaaaaatattaaaatcattttgaaaagaggcatattttctgccaattccatcaaacagaaatacttcaggcaaagatcacatgtttaactcctctgaacactcactcagaccaggggtgaggattattgatcacagagaaactcattatatgtctgcatctgtgatctcaggagagaagagatcttttatcaaagacagcattaggtaggaaatgggaccatcaaactgacttttcagactactttaaaaagggatgcatgtaggtagaattttttaatatttaagaaaaaattctagcttcttaattatgaaatattaagcatggtatatttttgaagatttctaaatatatttagatgagtaaaatattctgtctgcagaaatttcatagaaagacttcaattcaaaatgtattttcatttaatttt

SEQ ID NO: 706967 - DNA, 2880 bp, Homo sapiens
gaattttaatagtctaaactatagaaaccatcttttttgtataattaatgagctccttggcttcaccagtaagttagtcgcctgagtaaaacatcttttttattggcaatgttttctatcttctctttcttatttgctgagctgtttcctactagctctaactttacttttgcattttcaagttcgctaaccttacattctagtttctctaccatgcttaagacatcagtttttgtgtatgggttgataccaacattaacaacaaacatgtaggctgtgcacggtgggttatgcctgtaatctcagcactttgggaggctgaggcgggtggatcatgaggtcaggagttcaagaccagcctggccaacatagtgaaaccccgtctctagtaaaaatacaaaaaaattagtcgggcttggtcttgggcgcctgtaataccagctacttgggatgctgtagcaaggagaattgcttgaacatgggaggcagaggctgcagtgagccaagatcctgccactgcactccagcccgggagagagtgcaatactctgtctcaaaagcaagcaaacaaacaaaaaaacatttatagtagtttgagtatataaataccattggcttcaatagtgtttaatcttatgcaccctttcctgcagatttaaggctaagaaccttttgcatcagagatttaatttttttttaatttttaatttttttaaatgtatttattttctaatgaggtctcactctgtcacacaggctggagtgccatgacacaattatggctcactgcaatctctgccttctgggctcaagcaatcctcctgcctcaacttcctgagtaactgtcgctgcaggcacatatcactatgcctggctaatttttgaatttttttgtagagacggggttttgctatgttgcacaggctgggacatcagatattttttaaagcaatattgctattatttttgtctttgtgctttaatagctagttactgatttccttatttggtacatgcatacaaaaggacaagtctagaattgaaaggcataattgttatgtatggatttaaaaatacataaatatatatttaacacaaacatacatgcatatacatacacatatatacccttattaatgctaactattaggccctttctcagtgtatagaaacaaatataactaaaaagttaatcttctacataatcctattgagtctggtacctattatggcttactttattgctaagaaaaatgagaccccggccgggcacagtagctcacgcctgtatcccagcactttgggaggccgaggcgggcggatcgcgaggtcaggagatcgaaaccatcctggctaacacggtgaaaccggtctctactaaaaatacaaaaagttagccaggcatggtggcaggcgcctgtaatcccagctactcgggaggctgaggcaggagaatggcgtgaacctgggaggcggagcttgcagtgagcctagatggcaccaccgccctccagcctgggcgacagagcgagactctgtttcaaaaaaaaaaaaaaaaaaaaaaagatgagaccccaaaataatatgaaacatgtccagtgtcatgtaactggttagtgatggcactggggttcaacccaagcagccttgcttcaaaggctgtgtgtgctttttaaaaatcatgtaatgtttctataagaataattaactttagacacatgttaaaatattacttatgggtgttttgccacaaagaatgaaattgcacttgggaatatgcaacattttgatgttctgaaccccgacaaaatgctttttaaagttcataacataaaagaaaaataaataaaaaatgcagtcgttttgtagatattctttctgcacttttattttctcacgtgaaaacaagtagtctctttgctaagttttacaaaaagtgtattcttacagtatcgtatgcaagtgataaaagcaggtatattggaggactgggttattttacattttaacttaggaccctaagtttcaagagattcttagagttaataactgataaaaatatttattacagttattagaccaattaaaagtaaatttttagttccagtaagcagttaaaattaaatattcataactttcataaaatgttcaaaatagcagttaaaattaaacattcataccatttggaatagtgtccaaaatgaagtgctgatatagaagactcattcagattatgttatagactatgtgtgaatgtgctatgcagaattctaagatgaatctcaattccttacattccctgtctccttaagtgaccttatcagggggaatccttaaaaggattccaaagagaagagactagaagcagcagatgctctctctctctctctcctcctggccttgcagaatcaaggtttcatgagttgtacaactgcaaggaaatgaatcctggtgacaaccaaatgagcttggaagaccctgagcctcataagagactaagcctagccaacacttggttgaagccttttgagaacctgaacaaagaaaccaactaagccatgcctatatttctgacccacaagaactatgagataataacatagtattattttaagctgctaagtttgtagtaattttctacagcaatagaaaactattaagtgatctcttacagaaaaaagatagaatgtttcccaaataaaagcattttccaactttgataattttmtatcatatgcacatacatggtttttctactatgcttgagacatcagtttttgtttataggttgatcctaacattaaaaacaaacttttatagtagtttgagtatatgaatactattggcttcaatagtgtttaatcttatgcacctttcctg

SEQ ID NO: 706968 - DNA, 639 bp, Homo sapiens
ttttatatttttagtagagatggggttttgccatgttgcctaggctggtctcaaactcctagactcaagcaatctacctgcctctgcctcccaaagtgctgggattacaggtgtgagcactgcacccagcctaagtttcattatccatcttattattctattgtaaaagtttttatttattctsgaataaaaggccttatcaaatatgtgttttgcaaatatttcctcccaatttgtggctttttaaaaatttttcttaattgtgttttcaaacacaatttctttatttggatgaaatctaatttattaatttttatggattattcttttgtatcatatctaagaaatctctgcctaacacaaaatcaggaagattttcaccttcaattgcttctaaaagttttatatagttataggttttatttattttttatttttttaacaggctttattcactttatttttcttgtataaaaccctatgttgtagccacagctggagcctgagtccgctgcacggagactctggtgtgggtcttgacgagttggtcagtgaattcctgacagggagacttggtaaatacaatcttccagaggtcgggggtcaggtagctgtaggtcttagagatggcatcaaagg

SEQ ID NO: 706969 - DNA, 599 bp, Homo sapiens
tttgtatttttagcagagactgggtttcaccatgttggtcaggccggtcttgaacttctgacctcaagtgatctgcccaccttggcctcccagagtgctgggattacaggcgtgagccaccgcacccagcctgtaattcatttttgtatcactcataaaacataccacaatgcctagtgtacaaytggcattaattaaatatttgtttcaaaagacaagagtgagtgagggaggaacataagtagctctgtatctcaaaatgttagttcagcataatatgattgagtcatcagtttaaattctagccccacctactttcagtgtgaacatagactggttacttaacttatttgagcctcagtttcctataatatgacaatggtaatatctacttcttaggacaagtaaaaataagatgatatacttaagcatttagcacaatgtttgataataaacagcgaatatagttcctacttatattagtaataacaattatcaaatatcactatctgtttcttatccttataggaaactctgctcttaaagacaaagaagatcagtttgggagaacaccacttatgtattgcgtgttggctgac

SEQ ID NO: 706970 - DNA, 2364 bp, Homo sapiens
ggcctggtgtgtagacctgtgtccgtccttcctgaggtcttgctgaggttggcccccgagccccattgtctgtggcctggtgtgtagacctgtgtccgtccttcctgaggtcttgctgaggttggcccccgagccccattgtctgtggcctggtgtgtagacctgtgtccgtccttcctgaggtcttgctgaggttggcccccgagccccattgtctgtggcctggtgtgtaggcctgtgtccgtccttcctgaggtcttgctgaggttggccccccgagccccattgtctgtggcctggtgtgtaggcctgtgtccgtccttcctgaggtcttgctgaggttggccccccgagccccattgtctgtggcctggtgtgtagacctgtgtccgtccttcctgaggtcttgctgaggttggcccccgagccccattgtctgtggcctggtgtgtagacctgtgtccgtccttcctgaggtcttgctgaggttggcccccgagccccattgtctgtggcctggtgtgtagacctgtgtccgtccttcctgaggtcttgctgaggttggccccccgagccccattgtctgtggcctggtgtgtagacctgtgtccgtccttcctgaggtcttgctgaggttggccccccgagccccattgtctgtggcctggtgtgtagacctgtgtccgtccttcctgaggtcttgctgaggttggcccccgagccccattgtctgtggcctggtgtgtaggcctgtgtccgtccttcctgaggtcttgctgaggttggccccccgagccccattgtctgtggcctggtgtgtagacctgtgtccgtccttcctgaggtcttgctgaggttggcccccgagccccattgtctgtggcctggtgtgtagacctgtgtccgtccttcctgaggtcttgctgaggttggcccccgagccccattgtctgtggcctggtgtgtaggcctgtgtccgtccttcctgaggtcttgctgaggttggccccccgagccccattgtctgtggcctggtgtgtagacctgtgtccgtccttcctgaggtcttgctgaggttggcccccgagccccattgtctgtggcctggtgtgtagacctgtgtccgtccttcctgaggtcttgctgaggttggccccccgagccccattgtctgtggcctggtgtgtagrcctgtgtccgtccttcctgaggtcttgctgaggttggccccccgagccccattgtctgtggcctggtgtgtaggcctgtgtccgtccttcctgaggtcttgctgaggttggccccccgagccccattgtctgtggcctggtgtgtaggcctgtgtccgtccttcctgaggtcttgctgggccctttgtgtcccccactgggcatcactggaaagcgccgatgtgaggaaggcacacgtggcatcttgatctcaaagttgtgagaggagcgtagccaggtagggtggtgttggggtacatggatcttggagggaccatttccgaatagtcaggaaaccccagaaacagttttttctgtctatcaaatttgacattaggttttagaatgagggccctgcagtaagaaggtctgtggctcccaagggaattgtttcggggttggggtcagaggtctgagtggacagtgcgtggacaaggcaggacactaggagccagggagctgaacccttctctgggcgctgggtgtggcccaagcacacctggggcagaggctttgtgggtcagctggtccactgggggctgcagacactgtgggcagaggtgctgccggtggcaaggtgggcaccttgttccatggggtcgggggacacagcctttcattttctgactttgcagtaaagtgtgtgggacaatgacctgtgaaagtttttaaaggaagttctgtgtcttctgcggaggagcgtggtctccgtggtgttcataggagccacgcacggtgctcagagcatgcccagaacgcacaggcctgccttgctttggagctttgcagaaggttacgaatgtcagtgtcagaagcatcatgacaggaacaagggtgacacgggaagcaggctcgattggcttttttatgtaactgtaagtgtaaaaaattattagttacttcaacatgatttttttgatgataaaattagtttttttttcattataggaagtttgggaagtaaactgtaaagaagaaaatacagtcacttgtaacgtcacctggcccagactgctaaaatttcggggtgtctcacttcagcctgtgtctgctgcatatctgcttctgtgtttttctgtaattacagttctcctgtgacccaagtctgtgctttgccttgtcctgtgtctggtgc

SEQ ID NO: 706971 - DNA, 1310 bp, Homo sapiens
ggcaggcacggcaggcagggctttcccaggaagggcagggaagaacattccagaccttgtgtggccggtggggagggtgcatgggccaggaggtgcgggacggttgtccctgtgacagtcctgagcggggagcatcccgatgggattccgtttgagcggcatggctttgcgagttctcttcctgcagtgtggctagactgtctctccctacctgaggttatttacctactcacctgtgttttcatgtcggcgttgtgagttttcttttccttgtagtcactaatctgtccaggattaattttcatgtgtcactcaaggtggcctcttttctccccctgggctgagtggcttgtccattgccatgtsggactgctccctgtgcccatgggtctcctcctggccttcgctccatcctgtttggtgcctctggtgcaagacatcagcctcatcctgtatttcctgtcccaggcctgtctcttcccggaggagccttggaatggcatttagaggaaaatgactctcgagcagtttcggcagcgctgggggtgctggtcatgctggtcacatttttaacacagcacattctccccctcctgtaaattctgtgaaattgtatttttatctcttctcttgcacagaaaagcttagatcctagtaacataaacatatttacttacttggcttctgctaccctatacttaaacacagattcagaattacaacaataacatgagagtaaagtttaaggtttctttgcactctttgtctttagaatttattctttaaggatgttagatcagtactgtgttcaaaactccactgaaatgatccttttttgtgttggttatgttaccaatttgatacacaatttagttatgttttggtttgttttcaattttactttttttgtttcattttgtattttgagggtataaaacatttatgtggttcaaaatacacatactcgcatgcatacacacatatattctttttctcctattataactaatgtagcatatacgctaatttttaccttgacattttttcttaatataatctggagatcatctctggtagcattttattttaattgaaaaacttgaagttttatgtgtagtacactcaggaaattactctgaatagtgatgcttttctgcataattcaagcactaaaacttaaaaaaaataattttggaaggaaatagtttaaaaaatacatatatttttctctgccaaggcaaaaagcatataataagcacaagttagctctgcctgggaatattgggctggagacaggggaggctcagtct

SEQ ID NO: 706972 - DNA, 1358 bp, Homo sapiens
ctgttcagtgtaaccgatgtctgcagtcctccactctggggtttcctgagttttttttttttttttaaattcagagtttatttcatcattcctctttgacagttatttagatttttccagtttttacaattatacactgcaatgaatatcctctttttgtacatgtgcatataattctctgtgaaaggttttttaaaaatggaattcctggttcaagggaatatatacatttaatattttggtagatattgttaaattcccctcaaaaaaagctctaccaatttaaataagtactgatagtattttaccattttaatttgcatttccttgtggatgtggtggagcatcttttcatgtgtttcttcatttttattttttcttttgtaaattgttgttcatattctttcctaatttttcattgggttgttgattgttttcttagtgacttatgggagccttttatacattctatgagaaagaacaatgcagcccctccctgacaggggtcagacaggagttagcctgcgcctagcacctaggtccaggtgtttcctacctaacacaaactcagagaacttcagcatcagacaggcccattctgtgactgtgacggagcaagacaaaaatatgaccactctgtaatcgtgtctgagcacaaataaaaacaagaacactgtgtaaatcacacaaataaccaaacatctccctctcccagctcacatgagagccttctgttgcttaaccaattagagccttagctccatgcctgattcatttttattaagtgatttgcactgggaaggtttttctgtctcacagaactctacagaaaattttctagactatcatctttctttgccttaatacttagataccagtgtatacgtaagtgtatcctgctttgactgttaagaaccatagggaaggttaactccctgcacttctttctccasgtctatggaagtagaatgtacaggaaattggcttgaaatgttagtactgggatttttttttttttttttgtacctaggaattttaccaaaagcctgtttttcataaagtctcagatatgagcttgccctcttctgataaaaagattttatcaataaaaggaatttttaaaagatcatcatcaatttaaaaaagattctgttattgaattgaactcttgctctattagcagcaataaattgttacatgtaaaattgaaggtagagtgtcatgatcttagttttcggtgccataagataaagatacctttgctgccattctacttgagtgtgtcgtcctcatttccactacctcctgctaagaggcttttcaagctatatttttatcatatcttaaaatttatttcc

SEQ ID NO: 706973 - DNA, 1521 bp, Homo sapiens
ggtttgtggacacatgttacccatttagagaataatttatttttgaatgtgtatgatacctaagtgatatgcatatatataattaagacattttaaatctcttcagatatttcttcataagatacatgtatctatagatagctatatacaaaactacttacaaataataaatagacattgttttatacagttctttccaaagaaatgcaggatttcttatccwagtccttcctccccgagtccagttatttacatatttttgtctttaagtgttagattgcttgtttctgctgcctattgttggtagttttgtcttttacacatttgctgttagatttagttattttgaaatgttgaacttgaaatgtaatgaaaaggacacatcagaatttatcatcagggaagatatcttttatgttgagcagctgctatctgatcttgacagactgtcctcttagaggactgttgaagtccattctagtcattttgtaacttcataactgcagaaagaaatgatgcaaggactgtttagtggactgagatggctgagcaggttcttggcctgaattatccagaggagataggtggatctagcttcagaggaagtctacaccccattcccttctgcttacaatgtacccatgatatgtgtttagcacagtaatactgtaacaggacatcacatggaaaaatcaaagcagctggctcactgtatttaactgaaaagaatgcctacagattggatatttaatagggaaaattaaggcactttaataacaaacttcattatgtgaaacttgttgaatattaacatacaatataccttgtatattaatgccatagtttttagaaacactaatttaaacaacaaatttaaggggtgctggcatatcccagtgacaccttcagttttattgctgcttagtattttctagtaaattagttttaattattggtagtctgttgggcaccatttgggaaagaaataaattggtctcagtgtagcagacttgtagccaaaaactttgaataaaaaataagtataataaagaatattatttcatttttaaaggaattgtattattttgaagtgctgtgtggttgatatggtttggttgtgtctctacccaaatctcttattgaattgtagttcccataatccccacatgggagggacccagtgggaggtgactgaatcatgggggcagttttccccatgctattctcatgatagtgattgagttctcacgagatttgatggttttataaggggcttttccccctttgctcagcacttctctttcctgccgccctgtgaagaagaaggtgcctttctttccctttgccttccgccattattctaagtttcctgaggccttctcagccatgcagaattgtgagtcaattatacctcttttttaaataaattatccagtctcagatatttcttcatagcagtgtgagaatggactaatacaatggtcttaatcaatttgaaggtatgacactctttgctttgga

SEQ ID NO: 706974 - DNA, 1521 bp, Homo sapiens
ggtttgtggacacatgttacccatttagagaataatttatttttgaatgtgtatgatacctaagtgatatgcatatatataattaagacattttaaatctcttcagatatttcttcataagatacatgtatctatagatagctatatacaaaactacttacaaataataaatagacattgttttatacagttctttccaaagaaatgcaggatttcttatcctagtccttcctccccgagtccagttatttacatatttttgtctttaagtgttagattgcttstttctgctgcctattgttggtagttttgtcttttacacatttgctgttagatttagttattttgaaatgttgaacttgaaatgtaatgaaaaggacacatcagaatttatcatcagggaagatatcttttatgttgagcagctgctatctgatcttgacagactgtcctcttagaggactgttgaagtccattctagtcattttgtaacttcataactgcagaaagaaatgatgcaaggactgtttagtggactgagatggctgagcaggttcttggcctgaattatccagaggagataggtggatctagcttcagaggaagtctacaccccattcccttctgcttacaatgtacccatgatatgtgtttagcacagtaatactgtaacaggacatcacatggaaaaatcaaagcagctggctcactgtatttaactgaaaagaatgcctacagattggatatttaatagggaaaattaaggcactttaataacaaacttcattatgtgaaacttgttgaatattaacatacaatataccttgtatattaatgccatagtttttagaaacactaatttaaacaacaaatttaaggggtgctggcatatcccagtgacaccttcagttttattgctgcttagtattttctagtaaattagttttaattattggtagtctgttgggcaccatttgggaaagaaataaattggtctcagtgtagcagacttgtagccaaaaactttgaataaaaaataagtataataaagaatattatttcatttttaaaggaattgtattattttgaagtgctgtgtggttgatatggtttggttgtgtctctacccaaatctcttattgaattgtagttcccataatccccacatgggagggacccagtgggaggtgactgaatcatgggggcagttttccccatgctattctcatgatagtgattgagttctcacgagatttgatggttttataaggggcttttccccctttgctcagcacttctctttcctgccgccctgtgaagaagaaggtgcctttctttccctttgccttccgccattattctaagtttcctgaggccttctcagccatgcagaattgtgagtcaattatacctcttttttaaataaattatccagtctcagatatttcttcatagcagtgtgagaatggactaatacaatggtcttaatcaatttgaaggtatgacactctttgctttgga

SEQ ID NO: 706975 - DNA, 1425 bp, Homo sapiens
attttgggaggccggggcaggtgaatcacctgaggtcaggagttcaagacaagcctgaccaacttggagaaaccccgtctctactaaaaatacaaaaaaaaaaaaaaaaaaatagcaggatgtggtggcacatgcctgtaatcccagctactcggaggctgaggcaggagaatcgcttgaacctgggaagcagaggttgcagtgagccaagatcgcgccactgcactccagcctgatgacagtgtgagatgctgtctccaaaaaaaaaaaaaaaaaattaaaaagaatgttttaattctttagttccctgtctgagattcactgaytggtaagaagaaagttaaagaatctcctttgactttttttgatatagatatttaaattctattactttatagtaaggttggggtttattttctttgctttataatagaagagcattgattattctctttgctttataatagaataccatttaaataggagttccctgagtgtgtttacaatcatttgatctggctaaactattttaatgttaatgaaattttaaaattttggaggaaaaaatttaaaaactacacaggtgcacaaagaaataaaaatcacctgctttttcactatgtagagaccattgtctactatttctcaattctgtgttacatctgtatgttaataactgtaggattagggactgagtactgtttttaacctgcttttaaaaaatttacatctacattttttcccatctaaatagtgaggaagagtatcagaattttgtaggcttgtggtgatggttaaattagataatattaatgttgggtacttaacataatatatggctcttaatactctccagatttcagatatagtctgttttaccattactgcctttttatcaaacctattctcaaaaaagtgagaaaagtgctgagattacaggcgtgagccaccatgcccggcctcatggttctttcttaataataaattagaagaagtagaattacagggtcaaaaagtatccattttaaagctttcaatgtaattgcctgtttatcttctagaaagtttgacctagttgtattttagagtgtcattttcttgaactttatcatcattaaagttttaaatttggaacactggcaatttgataagtatattaggattcttcttattgcaagtagcaaaatacaactcaatctagtttaagaggggaaaatgtagtcattggctaacacaatctaattttggtttaagagacaaatctagagtctcaaatgatctcagagtgtaataatccctgacttttgtcttgatattacttggcttgtatacctttgctctatttgcatgctggccttactctgccactgacaggctgtctgtatggtgtggaagaggacggctagcatccccatacctgcatcc

SEQ ID NO: 706976 - DNA, 1558 bp, Homo sapiens
ttcattcctttttttggacactggtggctcaytacctaaagcagtctatttatattttctacatctaattttagaagcctggctacaatactgcacaaacttggttagttcaattttgatcccctttctacttaatttacattaatgctcttttttagtatgttctttaatgctggatcacagacagctcattttctcagttttttggtatttaaaccattgcattgcagtagcatcattttaaaaaatgcacctttttatttatttatttttggctagggagtttatccctttttcgaattatttttaagaagatgccaatataatttttgtaagaaggcagtaacctttcatcatgatcataggcagttgaaaaatttttacaccttttttttcacattttacataaataataatgctttgccagcagtacgtggtagccacaattgcacaatatattttcttaaaaaataccagcagttactcatggaatatattctgcgtttataaaactagtttttaagaagaaattttttttggcctatgaaattgttaaacctggaacatgacattgttaatcatataataatgattcttaaatgctgtatggtttattatttaaatgggtaaagccatttacataatatagaaagatatgcatatatctagaaggtatgtggcatttatttggataaaattctcaattcagagaaatcatctgatgtttctatagtcactttgccagctcaaaagaaaacaataccctatgtagttgtggaagtttatgctaatattgtgtaactgatattaaacctaaatgttctgcctaccctgttggtataaagatattttgagcagactgtaaacaagaaaaaaaaaatcatgcattcttagcaaaattgcctagtatgttaatttgctcaaaatacaatgtttgattttatgcactttgtcgctattaacatcctttttttcatgtagatttcaataattgagtaattttagaagcattattttaggaatatatagttgtcacagtaaatatcttgttttttctatgtacattgtacaaatttttcattccttttgctctttgtggttggatctaacactaactgtattgttttgttacatcaaataaacatcttctgtggaccaggcccctttgatcagcttttatgttcaaatattaataatatttgcttcaacacctccaactcataaaattgtttaccaacaatttaagcacttatgaaaattacatggtactggttatttctacatttatcttagtgccatcaccttaatgtatgttgagtccctaaatgtcatgttaaataataacaaccataatatcccattgaaaagagtatgttgttagaaaagaaacatcatttttaagtttctgagcctattaaaatgctcaaacacaaaatattagtatttttaaaatatgaatgggatgagtgaagcagttctcagcattatagtcacaatgttacaaaggctagagcttctctgaagatttctaatctgttcccattaacagattaataaa

SEQ ID NO: 706977 - DNA, 930 bp, Homo sapiens
cagttgttttacccctaaaatgcagtaaagcatgcacacaaaaaatggaataattcttaatggagaagatattccaccccwctagggatagataacccattcattgccacagaaatgcagtttgttccaaatttagttagtaaattcaaataatttctttcaactgctaaggaaaactcaactaagcaagaccataaagccatgttttttgcctgagaagaaaagagcccgattaaaagaaaacgaaaatataaaggggaacacaaaatgtgaacttacattgttcaaatattggcactatcagaggttagattcataagagaggaaaccttagcgtactaggaaagcaacacaacgtttcttcttctccattacatctgaggtaataagaaacgctgatcctgagacatcagaccgacaatcacccacaaattgctcttgactacccagcagggacaaaataatattaattttataatacagcaagtaaatgtcttccttaggaaacaaagtaaggttctagggacaaccctcttctgttgcttttacttctaaaggtagcaatcctgttcatctgaaaggtacatggacaaacaatctaattaccttctgggtactccaactccagaagtagccacttgtgactcaaacccagaattaaaataagttttctggcttttacagctgctgtttccagagtatgtcttttgcccttatgtgaaacatcaaagcacattgcttgccatacagtgctttgaatgaaaataccattaaatgattatgtttcaatgtcagaattatgactttatattttaattttcatttttttctcagttctttgcttcatcttgaggatattgtgtttgttaggctctttcagatgcaaaaaatagaaacgggtgcgggttcctttagttaagggaatacgaa

SEQ ID NO: 706978 - DNA, 930 bp, Homo sapiens
cagttgttttacccctaaaatgcagtaaagcatgcacacaaaaaatggaataattcttaatggagaagatattccaccccactagggatagataacccattcattgccacagaaatgcagtttgttccaaatttagttagtaaattcaaataatttctttcaactgctaaggaaaactcaactaagcaagaccataaagccatgttttttgcctgagaagaaaagagccygattaaaagaaaacgaaaatataaaggggaacacaaaatgtgaacttacattgttcaaatattggcactatcagaggttagattcataagagaggaaaccttagcgtactaggaaagcaacacaacgtttcttcttctccattacatctgaggtaataagaaacgctgatcctgagacatcagaccgacaatcacccacaaattgctcttgactacccagcagggacaaaataatattaattttataatacagcaagtaaatgtcttccttaggaaacaaagtaaggttctagggacaaccctcttctgttgcttttacttctaaaggtagcaatcctgttcatctgaaaggtacatggacaaacaatctaattaccttctgggtactccaactccagaagtagccacttgtgactcaaacccagaattaaaataagttttctggcttttacagctgctgtttccagagtatgtcttttgcccttatgtgaaacatcaaagcacattgcttgccatacagtgctttgaatgaaaataccattaaatgattatgtttcaatgtcagaattatgactttatattttaattttcatttttttctcagttctttgcttcatcttgaggatattgtgtttgttaggctctttcagatgcaaaaaatagaaacgggtgcgggttcctttagttaagggaatacgaa

SEQ ID NO: 706979 - DNA, 1089 bp, Homo sapiens
gtttggcagtttcttacaaagttaaacatgtgcatgacatacaatgcagaaattccacttcaaggtaagaggaatgaaaacgtatgtatacagaaaaatctatatgaaaaaactgactaaccaaatgtccatcaattgctgaatgaacaactttggtatacacattaaataaaattctcttcagtaataaaaagatcaactactgatacatgcmacaacacggggaattttaaatgtattatggtaaatgaaagaagccagacttaaaagtctacctagcatatggtttcatttgtatgacattctggaaaaggtgatactacagagagaagaaacagatcaatggttgccagggcctgaaagtgggaggaaaagtttgacttcaaagagacaacagagaattttggaaggtgatggatatgttatatcattactggaatggtggtggtaacataacatttgcatctgtcaaaactcataaaactgagcacaataggtactgtatttaaattataccttgtaaacctggctttaaataagttgtgattcttattagtcagtgacttcaacaccattttagccaacttgtatgaaatatatagcaccactatttccaaatgtattgcaatgcttctctcaaatggagaaatgcaggaaccaaataaaaatcatacagttttgtgcagtgaagacacaaaagacaaaaacatttcccccctccttgtctgccacctcgtcttcaacctatttccctttgctgtttcttggtagttacagtgaagattaaatcctacctttttagactgctcattgaagattaagtaaattcaagggttggcatgaaaacattctaaatggtttgagttctttcaacattttgcctaatagcatttttgctcatatatcttatcaattaaggggtaattttagataagtgaacatcattagaagggtgcatactaagtgtggatattgaagcactcatatggcctcatcaagaataatttgattaaataacttggacagattctgtttctttataattctatgaggaacaaaaatgggagagtatcagctccctaggggaat

SEQ ID NO: 706980 - DNA, 1089 bp, Homo sapiens
gtttggcagtttcttacaaagttaaacatgtgcatgacatacaatgcagaaattccacttcaaggtaagaggaatgaaaacgtatgtatacagaaaaatctatatgaaaaaactgactaaccaaatgtccatcaattgctgaatgaacaactttggtatacacattaaataaaattctcttcagtaataaaaagatcaactactgatacatgcaacaacacggggaattttaaatgtattatggtaaatgaaagaagccagacttaaaagtctacctagcatatggtttcatttgtatgacattctggaaaaggtgatactacagagagaagaaacagatcaatggttgccagggcctgaaagtgggaggaaaagtttgacttcaaagagacaacagagaattttggaaggtgatggatatgttatatcattactggaatggtggtggtaacataacatttgcatctgtcaaaactcataaaactgagcacaataggtactgtatttaaattataccttgtaaacctggctttaaataagttgtgattcttaytagtcagtgacttcaacaccattttagccaacttgtatgaaatatatagcaccactatttccaaatgtattgcaatgcttctctcaaatggagaaatgcaggaaccaaataaaaatcatacagttttgtgcagtgaagacacaaaagacaaaaacatttcccccctccttgtctgccacctcgtcttcaacctatttccctttgctgtttcttggtagttacagtgaagattaaatcctacctttttagactgctcattgaagattaagtaaattcaagggttggcatgaaaacattctaaatggtttgagttctttcaacattttgcctaatagcatttttgctcatatatcttatcaattaaggggtaattttagataagtgaacatcattagaagggtgcatactaagtgtggatattgaagcactcatatggcctcatcaagaataatttgattaaataacttggacagattctgtttctttataattctatgaggaacaaaaatgggagagtatcagctccctaggggaat

SEQ ID NO: 706981 - DNA, 873 bp, Homo sapiens
ctagaaaacaatgtaacacagctgacaaatatttctagttacattttataagttcaaggagataaaagatgagaatttcagcagagaactgaaatctgaaagaaagagaattctagatttgaaaaaattaacaaatgaaattaactcaatttataggattaacagaagattaaatgcaaattaagaaagaattcatgacttgaaagataagaaagaataaagattccaagttaattttattccaagttaaatttactctgaatggtcttacgtaagtaaacagacttccttgggttttgaaaatatgaggaaacaagccacatgaacaagagtaaacaaaaataataataaaaagctctatcagaccacagttattttatatcacagaataattaaatgaagaatataaaataatgtgtttaaaatatttaaggaaataaaaagtaattaaaaccatgagctggtaattaacatagtawcatggaagagaaagatttgaaaactagtcaaatataactcttccccctatgtacaaaaatcatcatcattaacatgtaaaaagccaatagaaaccttaaattgtagataggactcagctgattagaggtaagtagggtacttaaggatagaactgaagaaattttgtagaaggtacacagtgagaaaaagagataaaagcaggaaagagcaaggaagatcagagacatggaggataaattaaaaaatatatatatacacaaaagacctaagtggagttccagaagaagcaaaaagaagttcaaagaggccatagttgaagaaataatggatgagaaatttctagaattaatgaaggatatgaattcttggattcagaaaatataactaatccca

SEQ ID NO: 706982 - DNA, 1585 bp, Homo sapiens
ccccctgcaaaaaaaaaaaaaaaagaaaaagaaaaactggtttttagtggtgaccctgaacctgtgacatccatgtgagacatgtccctcgcacttttcactggcagcaaggacacctgaaaatcccaggacttgccaaagtgggcaacaatattaaatgggtcattccctaaggatgtccacattcaacccatgcacacatgggcacactcacacaccagcaggctcatctttgtacaaactcacacttaatctccaaaggcagaatatattacgttggaaatacccaatttggacttacaccaatttcatgataaatagcatctttccatttcccatcaacagtggccatcagaaaagtaatgcatttcatagaaacaatattttaagttgaccttgtgtttagtgtccatttttgtgtcttaaccccagatcaagattcccatgagtaaatctattcacctagaacgaagagccacggactctcattcacatgtccatccatccccttcccttgcatacctgcccacgcatacccacaccgaatgctctatacctctgctacaagccttgtgccagctgaggacaggcatgtcataaacacctcctggtgaaataggaaactgaggcagcatgtggaccattgaaacgagagagcagagttccagtctgggccagcactgtgtctatgacccatcccagctgggtttcacattgggtagcatcaaaggagggcagttggcattgtaagcagataggggtgtgggagagtttaccctgaatttcagtagccaacaaacagaagtcaaaccagaaacacttgctttgctcagcatttaagtttttgaatgaggaaaatggcccttttccattgtatcttgaaaagcgttgttccctgggaaaacgctcccaaagttktcacaccttttgatgatggcaacttaaatgttcaattctggactttttttttttttaaataagaaatgccctctcgttggggcataagctctcacaacagtgtggcaggatggcttttcttaacacagaaccatagaaattagagcagaggggagactaactattaggtaatttcttccctgccccatttgtggaggtttgtttcctatagcaaattctcctggtgttttgtccagcaaggttgaaatgattcaagtaatggggcttccagtagggacatatggttattttatccagttagcatgtttctttcactttgcctataaactggccggtcacagaaattggatctgcaggtaggtgactctggatcttgaggggatcttggggtttaaataatgtgggttctgtttgtaaagattttgtgtaaataggttgcacaattatataaagtattgcttccaacaaacatctagtctgttttatgtcaaatgtgaatcactgatgaacacgtgaaccctcagatattttgtccaaagcacagatgactctctcaaagataggaaactgatggtttgtgtcctagtgtgacagtcacaaatttccaaaagacctttttcctccctctgatgaaaatttcattcaagtaatgcttttaagtagaaat

SEQ ID NO: 706983 - DNA, 1585 bp, Homo sapiens
ccccctgcaaaaaaaaaaaaaaaagaaaaagaaaaactggtttttagtggtgaccctgaacctgtgacatccatgtgagacatgtccctcgcacttttcactggcagcaaggacacctgaaaatcccaggacttgccaaagtgggcaacaatattaaatgggtcattccctaaggatgtccacattcaacccatgcacacatgggcacactcacacaccagcaggctcatctttgtacaaactcacacttaatctccaaaggcagaatatattacgttggaaatacccaatttggacttacaccaatttcatgataaatagcatctttccatttcccatcaacagtggccatcagaaaagtaatgcatttcatagaaacaatattttaagttgaccttgtgtttagtgtccatttttgtgtcttaaccccagatcaagattcccatgagtaaatctattcacctagaacgaagagccacggactctcattcacatgtccatccatccccttcccttgcatacctgcccacgcatacccacaccgaatgctctatacctctgctacaagccttgtgccagctgaggacaggcatgtcataaacacctcctggtgaaataggaaactgaggcagcatgtggaccattgaaacgagagagcagagttccagtctgggccagcactgtgtctatgacccatcccagctgggtttcacattgggtagcatcaaaggagggcagttggcattgtaagcagataggggtgtgggagagtttaccctgaatttcagtagccaacaaacagaagtcaaaccagaaacacttgctttgctcagcatttaagtttttgaatgaggaaaatggcccttttccattgtatcttgaaaagcgttgttccctgggaaaacgctcccaaagtttycacaccttttgatgatggcaacttaaatgttcaattctggactttttttttttttaaataagaaatgccctctcgttggggcataagctctcacaacagtgtggcaggatggcttttcttaacacagaaccatagaaattagagcagaggggagactaactattaggtaatttcttccctgccccatttgtggaggtttgtttcctatagcaaattctcctggtgttttgtccagcaaggttgaaatgattcaagtaatggggcttccagtagggacatatggttattttatccagttagcatgtttctttcactttgcctataaactggccggtcacagaaattggatctgcaggtaggtgactctggatcttgaggggatcttggggtttaaataatgtgggttctgtttgtaaagattttgtgtaaataggttgcacaattatataaagtattgcttccaacaaacatctagtctgttttatgtcaaatgtgaatcactgatgaacacgtgaaccctcagatattttgtccaaagcacagatgactctctcaaagataggaaactgatggtttgtgtcctagtgtgacagtcacaaatttccaaaagacctttttcctccctctgatgaaaatttcattcaagtaatgcttttaagtagaaat

SEQ ID NO: 706984 - DNA, 1162 bp, Homo sapiens
tgctcctatgttaattcccagaaactaaaatgtttttaatttagctgacatcagctgtaaggtttccatccacaatattaatcaaactgactttcttccatccttccagaaaaatgttttttgagatacaacgtgcataccattaattattttagtttcaaattatttggtaaaatgctttaggcaggataaatcatttccacatgatttgttttaaatttataaaggattttcttaaaagttaattccatttttatgtctttttttataataatggtgattccattaatatttgaaaattcttcattcagaactgaatttaatatgcttattaaagtaataggatttcaacagttcttttttatcaataaagaattttatatactgtaaaaattggatacttgaaaacatctcaagcaaataatcatctaatattgatatcaatagaaataattttatataaacacatatagcatacatgtttatacaacatataaacattcaagtatgtatgataacgtgtatttcctcaaatctatattatgagcttagtgctaaagtttttatctttccatattcatcactcttaggcaaaaatgacagctaaaggaaacagtcagttgcttttttaaaacagtcactaatcacaggaaatgttaatataggaatttactatttctttccaaatggagactctaacagaagaatgygaaggaatagcacaatatattacgtgtgtcaaaattttaaagatactctgctagaatattcatattttgcagtatctggctacaaatatggctttgcttcattttcagttttccagacattctctttgattcatatcatggctgtacgtgctttgtttggttttggaaggattttgtttggctttttcaatatttctccttcgttatagcttcacaagttggctaaagactgaggaaggggaagtattcatctttaaattctaggttcaattaacaattacaaatgtcagaaacaagatcactacctggcctaacaactgtaagcatcacgcaaccaacattctcatttcactcaggagagaaaaacagtgcaagctgataagttcacattagtaagcacatcttctgctggaatataaactggaaacatctcttaataaagaaagaaaaag

SEQ ID NO: 706985 - DNA, 1162 bp, Homo sapiens
tgctcctatgttaattcccagaaactaaaatgtttttaatttagctgacatcagctgtaaggtttccatccacaatattaatcaaactgactttcttccatccttccagaaaaatgttttttgagatacaacgtgcataccattaattattttagtttcaaattatttggtaaaatgctttaggcaggataaatcatttccacatgatttgttttaaatttataaaggattttcttaaaagttaattccatttttatgtctttttttataataatggtgattccattaatatttgaaaattcttcattcagaactgaatttaatatgcttattaaagtaataggatttcaacagttcttttttatcaataaagaattttatatactgtaaaaattggatacttgaaaacatctcaagcaaataatcatctaatattgatatcaatagaaataattttatataaacacatatagcatacatgtttatacaacatataaacattcaagtatgtatgataacgtgtatttcctcaaatctatattatgagcttagtgctaaagtttttatctttccatattcatcactcttaggcaaaaatgacagctaaaggaaacagtcagttgcttttttaaaacagtcactaatcacaggaaatgttaatataggaatttactatttctttccaaatggagactctaacagaagaatgcgaaggaatagcacaatatattacgtgtgtcaaaattttaaagatactytgctagaatattcatattttgcagtatctggctacaaatatggctttgcttcattttcagttttccagacattctctttgattcatatcatggctgtacgtgctttgtttggttttggaaggattttgtttggctttttcaatatttctccttcgttatagcttcacaagttggctaaagactgaggaaggggaagtattcatctttaaattctaggttcaattaacaattacaaatgtcagaaacaagatcactacctggcctaacaactgtaagcatcacgcaaccaacattctcatttcactcaggagagaaaaacagtgcaagctgataagttcacattagtaagcacatcttctgctggaatataaactggaaacatctcttaataaagaaagaaaaag

SEQ ID NO: 706986 - DNA, 626 bp, Homo sapiens
tgtttctcccctctgactctttctcctccctgtttctccctctgattcagcctcctccytctgattctgcctcttccctagaacttgcctcctccctctgactctgcctccctctgacctctcactctgtcttggcctgctgtcaccaggtgtatgcctactctcccccaccaccacatcctcttgctccctgttccagaggaattggccctgcactcttcaaacccaggcaatgctcaagcacagcgcaggcatctctcggtcatcctggggacggtcatccccgggacggtcatccccaggacagccgcgagagcctcctctcctccccacgtgagctggtgtaggattgactcttatctgttggtcaagagtcgctgaggcaaacatcacacccagccactcttcctcggcccagcctgccattcaacaactgcagcccagcgccctacgtgtaaaaggcgctgtcaacatttccattatagggttctcttccgagagtttacaagccaactgggaaaacaaaatgagcccaggtggaaagtttgccttacaagggagcaaatctatgcaaaaaagagcacggtgcagctgcgttcttggagaccaggagactctgcattgaa

SEQ ID NO: 706987 - DNA, 626 bp, Homo sapiens
tgtttctcccctctgactctttctcctccctgtttctccctctgattcagcctcctccctctgattctgcctcttccctagaacttgcctcctccctctgactctgcctccctctgacctctcactctgtcttggcctgctgtcaccaggtgtatgcctactctcccccaccaccacatcctcttgctccctgttccagaggaattggccctgcactcttcaaacccaggcaatgctcaagcacagcgcwggcatctctcggtcatcctggggacggtcatccccgggacggtcatccccaggacagccgcgagagcctcctctcctccccacgtgagctggtgtaggattgactcttatctgttggtcaagagtcgctgaggcaaacatcacacccagccactcttcctcggcccagcctgccattcaacaactgcagcccagcgccctacgtgtaaaaggcgctgtcaacatttccattatagggttctcttccgagagtttacaagccaactgggaaaacaaaatgagcccaggtggaaagtttgccttacaagggagcaaatctatgcaaaaaagagcacggtgcagctgcgttcttggagaccaggagactctgcattgaa

SEQ ID NO: 706988 - DNA, 626 bp, Homo sapiens
tgtttctcccctctgactctttctcctccctgtttctccctctgattcagcctcctccctctgattctgcctcttccctagaacttgcctcctccctctgactctgcctccctctgacctctcactctgtcttggcctgctgtcaccaggtgtatgcctactctcccccaccaccacatcctcttgctccctgttccagaggaattggccctgcactcttcaaacccaggcaatgctcaagcacagcgcaggcatctctcggtcatcctggggacggtcatccccgggacggtcatccccaggacagccgcgagagcctcctctcctccccacgtgagctggtgtaggattgactcttatctgtyggtcaagagtcgctgaggcaaacatcacacccagccactcttcctcggcccagcctgccattcaacaactgcagcccagcgccctacgtgtaaaaggcgctgtcaacatttccattatagggttctcttccgagagtttacaagccaactgggaaaacaaaatgagcccaggtggaaagtttgccttacaagggagcaaatctatgcaaaaaagagcacggtgcagctgcgttcttggagaccaggagactctgcattgaa

SEQ ID NO: 706989 - DNA, 1000 bp, Homo sapiens
tccagttattatgcaattttttatttaattaagtgaaataaacacatccttaccttaaagcaagtagaatggcagcaaatttgtaattcatctaaaatcattttagtttctacacccaagggttttcggcagtaagtgcacatatctctttcaatgacagacctatagaaatgtaagcaattaaaaataaatttgccataatacagaagacagatgtattccctataaactcacatggcaacggtatattaattttgatgatactttactttagaaaatttcacaaaaaaacaaggaaagtttggagtttatttattctagtaatataattgacttctagttttctcaaaatgatatcaaataattaacatgagagaaagtcccaaattattaattcatcagaaatcaagagtaaatctgggtgggacaaagatgttcagtttcctaattgaattaggaaatatctcaagtactcctcagaagtactagagggcttttaattatgaatttacatatatcatgttacagattacacggaaaaattatgctgcagattaatatacatttttaactctcagaatattcaacaggcccaaaatagaaatccattcaagagcacatagataaactcacaaaatgatgagtctgtagtgcctgggactgtagggggcagagtcaccaaaacactcctcttggtgccactgtaagactcaggatataaggatacctatcgtgacaaaatttataccctccagcaagacataaccccaccacaaatttgatggggaagaaaagagagttttgttatttattaaataacaaatactaaatatttgttaaaataatgttcaatgataaatgatctgtagatgtgatcagcagaatccaaaatatcttragtcacaccagaaccttaagaaaggatccttttccttttttaaggtcttaggacactcttaaatagcaccctgcagagtatactagtttcaggatattagca

SEQ ID NO: 706990 - DNA, 1559 bp, Homo sapiens
atttctttgggggcatgtatcaaattttattcatttttttctatactcatgacccaggagaatacctagcataaagtaggcatttaataagtattcaatgcataaataaatataggctctagagaagtaggctctaaagtactacaaaataaaaaatgaatcattcattctttcagcaaatgtatattgagtgctgattttgtgccaggtgacggagtaataagaaaaatattgttcctgcggtcacgaagcatcaaaaattcctcagccctcaagtaccctccaatcattaagcatctttgaacatcactattccagagaggtgcagctttaatttcataaattaccatttcattgtgtcaagtttgtacattctcaaaactgaattatttgaagccaggattttcttatttctcacccatgccaatgaaactattttcaatgacatttttcagactcaattaaaaatgaataaatcggtcgggcacrgtggctcatgcctgtaatcccagcactttgggaggccgaggtaggcggattacctgagatcaggagttcgagaccagcctggccaatatggcgaaaccccgtctctactaaaagtacaaaaattagctgggcgtggtggcgggcatctgtaatcccagctactcaggaggctgaggcagtagaattgcttcaactcgggaggtggaggttgcagtgagccgagattgcgccactatactccagcctgggtgacaagagtgagactctgaaaaaaaaaaaaaaaaaaaaaaaaagaataaataaaagctccagtccaaaagcagtttatcttctaagggaatcccctgcctctagatccagagcttccatcactcccaattagctgagacaatttgagaaaatccaggtaatacagtgacagtgggtgtcccaagtgcaaagagaaaatgggaaggacttcaatttcatgaaagaagtgggattgaattttattaaacatcatggctgggaataactgagctagaggacatatcctcttaggctcccaataggccagggatcttgtgacattcacagggtacagtgagcagtgctggataatgtacatgctcaataaatgaatgaatgcctgatgatcagagcctgagccaaatttttcttcccagaaacaaactgtttcctggtttaataaatagcatacccagtgtgagccctagagacacacagggctctaatcttcttctggttctaatgatggaggaggcaagcagagattaggacttggttaatagtttgtttagtcatcatttctttagtttatcaactttgccctggcagcactcactggccagtacacatcgctggggagttctgatcttccccgcctgtggcaaatgtaagcacagagccaagcagagtgttgcaaccctgtaccatttagaaggaaggcaaaaggggaactgttcctttcagtgcctagtggctttggctagaccaaatttaagatcccccctttttttttaattagaaaaattcttgagtgtcagcctcaggaaaatatatgtagtgga

SEQ ID NO: 706991 - DNA, 1559 bp, Homo sapiens
atttctttgggggcatgtatcaaattttattcatttttttctatactcatgacccaggagaatacctagcataaagtaggcatttaataagtattcaatgcataaataaatataggctctagagaagtaggctctaaagtactacaaaataaaaaatgaatcattcattctttcagcaaatgtatattgagtgctgattttgtgccaggtgacggagtaataagaaaaatattgttcctgcggtcacgaagcatcaaaaattcctcagccctcaagtaccctccaatcattaagcatctttgaacatcactattccagagaggtgcagctttaatttcataaattaccatttcattgtgtcaagtttgtacattctcaaaactgaattatttgaagccaggattttcttatttctcacccatgccaatgaaactattttcaatgacatttttcagactcaattaaaaatgaataaatcggtcgggcacggtggctcatgcctgtaatcccagcactttgggaggccgaggtaggcggattacctgagatcaggagttcgagaccagcctggccaatatggcgaaaccccgtctctactaaaagtacaaaaattagctgggcgtggtggcgggcatctgtaatcccagctactcaggaggctgaggcagtagaattgcttcaactcgggaggtggaggttgcagtgagccgagattgcgccactatactccagcctgggtgacaagagtgagactctgaaaaaaaaaaaaaaaaaaaaaaaaagaataaataaaagctccagtccaaaagcagtttatcttctaagggaatcccctgcctctagatccagagcttccatcactcccaattagctgagacaatttgagaaaatccaggtaatacagtgacagtgggtgtcccaagtgcaaagagaaaatgggaaggacttcaatttcatgaaagaagtgggattgaattttattaaacatcatggctgggaataactgagctagaggacatatcctcttaggctcccaataggccagggatcttgtgacattcacagggtacagtgagcagtgctggataatgtacatgctcaataaatgaatgaatgcctgatgatcagagcctgagccaaatttttcttcccagaarcaaactgtttcctggtttaataaatagcatacccagtgtgagccctagagacacacagggctctaatcttcttctggttctaatgatggaggaggcaagcagagattaggacttggttaatagtttgtttagtcatcatttctttagtttatcaactttgccctggcagcactcactggccagtacacatcgctggggagttctgatcttccccgcctgtggcaaatgtaagcacagagccaagcagagtgttgcaaccctgtaccatttagaaggaaggcaaaaggggaactgttcctttcagtgcctagtggctttggctagaccaaatttaagatcccccctttttttttaattagaaaaattcttgagtgtcagcctcaggaaaatatatgtagtgga

SEQ ID NO: 706992 - DNA, 1559 bp, Homo sapiens
atttctttgggggcatgtatcaaattttattcatttttttctatactcatgacccaggagaatacctagcataaagtaggcatttaataagtattcaatgcataaataaatataggctctagagaagtaggctctaaagtactacaaaataaaaaatgaatcattcattctttcagcaaatgtatattgagtgctgattttgtgccaggtgacggagtaataagaaaaatattgttcctgcggtcacgaagcatcaaaaattcctcagccctcaagtaccctccaatcattaagcatctttgaacatcactattccagagaggtgcagctttaatttcataaattaccatttcattgtgtcaagtttgtacattctcaaaactgaattatttgaagccaggattttcttatttctcacccatgccaatgaaactattttcaatgacatttttcagactcaattaaaaatgaataaatcggtcgggcacggtggctcatgcctgtaatcccagcactttgggaggccgaggtaggcggattacctgagatcaggagttcgagaccagcctggccaatatggcgaaaccccgtctctactaaaagtacaaaaattagctgggcgtggtggcgggcatctgtaatcccagctactcaggaggctgaggcagtagaattgcttcaactcgggaggtggaggttgcagtgagccgagattgcgccactatactccagcctgggtgacaagagtgagactctgaaaaaaaaaaaaaaaaaaaaaaaaagaataaataaaagctccagtccaaaagcagtttatcttctaagggaatcccctgcctctagatccagagcttccatcactcccaattagctgagacaatttgagaaaatccaggtaatacagtgacagtgggtgtcccaagtgcaaagagaaaatgggaaggacttcaatttcatgaaagaagtgggattgaattttattaaacatcatggctgggaataactgagctagaggacatatcctcttaggctcccaataggccagggatcttgtgacattcacagggtacagtgagcagtgctggataatgtacatgctcaataaatgaatgaatgcctgatgatcagagcctgagccaaatttttcttcccagaaacaaactgtttcctggtttaataaatagcatacccagtgtgagccctagagacacacagggctctaatcttcttctggttctaatgatggaggaggcaagcagagattaggacttggttaatagtttgtttagtcatcatttctttagtttatcaactttrccctggcagcactcactggccagtacacatcgctggggagttctgatcttccccgcctgtggcaaatgtaagcacagagccaagcagagtgttgcaaccctgtaccatttagaaggaaggcaaaaggggaactgttcctttcagtgcctagtggctttggctagaccaaatttaagatcccccctttttttttaattagaaaaattcttgagtgtcagcctcaggaaaatatatgtagtgga

SEQ ID NO: 706993 - DNA, 1199 bp, Homo sapiens
ctgcgtgggaatgggggtcccttgctccctcacaggaacagggaaagagagttgattagtgctgcttaaatgtgttgcaattaattactcgccagttttcttgcactccggggcttaggctggcctataaatcttagtcccaggttagttgtaaaatcttgatttatctctctgtctagatgtgctaacacatttgttggcttgaattatttaaagttatcatgaaaaaggtctgatttctattgcctgccctgatttgcactttaaatatagttccctgttgcagtttaccagaattcatgttgaaaatggaaaaggggaaattacttttaaacagcagtttggcatgtaaaagcatgatttaccctggaatatttctccaactgcacattaaagcactaaggccaaattttcaacaatattttccctactgaatctggaaattaatatgaagcaaacagcaaacattgagcctcaggtagccactcctgtgtacccctttggttggggccaggttggagggatctttccctcactccttcttttctttgtcagtcaccagcccagactcaaattgcagtatgcactcgttagcattgttgaaggtgacaggcaatttcttacctcccttgctaatttttctcactttgctcatctctttgcaccatctctctttcatttccatgaaaccaggatttttatggataagaattctgtaaatggttagttattttaatattggatttattagtgrtatagcatattcagtgccttcacaatatatttggttcctttttatttttatttttatttttttaagaggcagggtctctgtcacccaggctggagtgaagtggcatgatcatagtttactgcagcctggaacttttggatacaaggagtcctcccacctcagcctcccaagtagctgggactacaggtgtgcactagcaagcctggctaagcattaattttttctttttctttttttggagagatggggtcccaccatcttgcccttttgacctcaagcgatcctcctgcctcagcctcccgaagtgctagaattacaggcacgtgccaccacgtccggccacgtttggttccttgatgatttcttttgatttatttagattacacaaatttaaagataaaaccaactggcagccgggcatggtggttcatgcctgtaatctcag

SEQ ID NO: 706994 - DNA, 633 bp, Homo sapiens
ttggacactgaggcctagaatgtctcctacgaaacacatcacaggagtgcataggctactcagaaatataataagaacttgcaagataaattcaaaatagtcctagcacctgctttaaggaacataagctaggggacaagaaaaccctactggaacaagaacagagtccctctgggcagcaagtcaggctaagctggtctctacatcccacacacaccaggcctcttccctctaacccccttgtcctgaactgttcctaccaagagatgactctcatgataacccagcttcttaccaaagttactgccttcagttaagctgacttctataagtacaaatgtctttgattttactaaactttgtgaaagtaaggtaactttatgcaatagaccgcatcgtgtttcccattcccctacccccaattcatatgttgaagccctaatccccagtgtgacagtatttggagatagggacttgagggaggtaattayggttagatgagattgtgagggtggggccccgatcctataggattatcatcctaaataaaagagatgtgagagagctcactgtctgtccaccatgggagggcatggccagaaggcagccgtctgcaagccaggaagagagccc

SEQ ID NO: 706995 - DNA, 1221 bp, Homo sapiens
gacccattttagacttatgatctccagaactgtaaggtgataaatttgcattgcattaagccaccaagtttgtgttaatttgttactgcagcaataggaaactagtgccgtgaccaacagaatatggcaggaattagggcctgtaaatagccaggttagtgagcttggatgtttccctggtcagatcttcagatgattacagttccagtcaggagcttgactgcaatctctgggagtccctgagctagaatcacctagctaagccagttacagattcctgacccacagaaatgtaagataatcaatgtttactgttttaaacatcttagtttgggggcaatttgttatgcagcaaaagataactaattagtacagagtgaaaaggtaggttgagagggattgtgtacagttttgaatgctagactcattgccttctcagtggggaaccccagaaagtttttaatctgtgaagtgaccaactcaaaataatagcaagattgatctatttggatatattatagaaaagaggttggagggaggaaaaatagatgtagtaaatttagataataatattagatattgtaacgaaagcctgctctagggctatgaatataggaagggaaaggaaagaacatagatcaaactacaaagaaactcagtaggacttggtgactgaaggtgcttaacgcaaagggaaactgaggaattggcgatggtgtgttttgagtttgagagaacaatgatataattctgaaaatgtatttttttccagtaagagccagtttttcaaagtttcttttgcagtagtcctctcttatccatggttttgcttttgcagtttcagttacctgtggtcaactgtggtccgaaaataggtgagtgttgtacaagaatagagagagagagagagagacaccacattcaygtaacttgtattatagtatattgttattattgttctattttattattaattattgttatcaatctcttacagtgcctaatttataaattcgactttatcatagctatgtatgtatgggaaaaaagacatggtatatttagggtttgttacaattcaaggttttggacatccactgtggatcttggaatgtatcccctacacataaggggaagtgggggcgctactgtactttctaaaaccaagttggataattgaaaatgttgagaaagaagtttaggataaaggacttcattacc

SEQ ID NO: 706996 - DNA, 2143 bp, Homo sapiens
gctgaaaaaattaatacttataaatcagccattttttttcaatagtaacactgagagaatgagaaaatacctgcaattagtgtattttaaattagtccttctttccttttacagctgccagtggagggcatattgatcagagaaaggaccaaatagacaaaaatgcagaaaacagatctatggtgtaaagtgccgaagtaattgatccttacctagtaaatattcacatatgttaacgtaagttaatactgttaggaaactgagaccaatttcataaacaatatgcaactatttggaaatttcaattatagatgctcaacaaatatcaagtaagcacatttaaacctaaagacgagtgttcggatatttcagtggaacattttagtattggttctgactgtaataatcctggccaatatgtgtagactcttttagtagtcattgtttccaagctgattgggcagagaccatgtctattgcacttttgaatagcaacttgaatcctcttggcttctggaacatataaaataacaatgttctccagaaatgctgccatttggtaacttctctttggagtgcaaacttaaattcttggttataagtagtatgtgcatatgccccggtgtccacatgcacagatctctatgggcatcaaataaggtatgcttgctgggaaatagaatgatttttgaatgcataagaacccaaagaggatgacataaacttagcgaagttttcaagctccagtctttattatgtatgtatgttttaaattaaggagcaatccaaaggttgaaaatcagggaaatcagaggcagttaattttatcagagaaaaaaattggaagataaaagctttggaagatatcagagcaaaaattggaagataaaaaaatgagaggaatagcaaaaacaaatttttaaggtaaaactataaattttcttttgaaattgtacatattcgttggactcaatagtcatcttctcttactggaactaactaagagttagtccctgtgactgcttacaaggcagagccaggtaattgatgcgtcagaaacctagctgttgaaccactgtgtgaatctttaggccatgaggcttaattctaattttaagcagatttggctcttataaatcctaaagagttataaagccttgagttattttcttgaaaatatctgataattcaatttataatttattcttaacactctctttaaaaaaaaaagaaagaaaacttaaagtataataataataaaattaaaaaaaaaaaaaagaaaagtaagggaccagatcaggggtagaacaaagctgcagacatatatttttcaaacctgctgtcaaggaaatcagaggcataagaaaacttgaacagaatcaagaaatttaccatttagttataaaattagatgcagcattccatatctcatccaaatataataatctattgggaaatcatattcaggagtggcttctccatcgaaggtataattcccttggaagattcacatgtattttatacagtttatccctaaaaatgtttaaagacaagtctgtgtaaaatgtgaagtacttgacttccttattagtgactttatctgaggcatggtctaccatagtagtgattacactgcccattaaccagtgagtattgatctatttattcctgaaaattttccctccccatttaaaaataagcagaaataaaaacctggcttcgtcatttgtgatggatgctaaagtcatgactagataaaagacttcaatttatcagtttatgtctgaagccgaaaactacttgttgatctcttaaattcaaaaggttacttggaaacactcaaggccaaattggagaaaaatgattaatccattttagtaagtgcttctttcttataaatggaatttaactccttgggcaaatgtaacgttctttttacttctgtgattgctaaagtttctttaggataaacatagaaaaraaatgggagtagagggaatacacacacacacatgcacacacacacacacacacacatgctgcaaccacacaaagcacaaagcaattgttgaatatgtctgtgacctttgtttatgttcatatttcaaagtcaagataagccaattttcccacctagagattt

SEQ ID NO: 706997 - DNA, 867 bp, Homo sapiens
caaaatgccaactttgctttaaaagattctgttgctggtacatgattctctaagacctgctctggtaaaaatcaatgactcagaagttcccacaagacccctagcattatcctagaccatgwggtcccaagtcacagacactcagtagaagttgttatttcagacaagttcttaccattagggacaccagcagtccattcccattgtaacccagggtaaagtggatgctaaatttgatagcccagttcatttagtttctgtaccacttattttgtgcctggatacttaagctttcatattcaattagctattttcatgcaaccctgtccttacttatataccttcaaagcactactggtatcactttggaaaccttacctagcattggtcttacttaacacatcatgcatgttttgtaaatatgtgatgggttgatttctacacatttgtaggtaccaatgactcttaaagatgtgctgtacgtgaaaggtcagaagctaacaagactgttctagaaattatttttctattaattaataataaacattgaacatattattaaacatctctcttaaagatggcttgagataagcaacttactggtgaggaattaaaagtcgatttcctagcagtatgagcggagtcagctcctttctagcaagggctggcttcacaacaccgttagctaaaaagctgagtccacaaagtggaggtgccacagcaaagagaagcggagtgctacaagaatctgacccaaacatggccatctcctcctatcttcttcatcttcgtccttctgaattcacaaaactgagtgagtacaatctggaaccatttccaaggtttgggaagggatttaaaaaaaat

SEQ ID NO: 706998 - DNA, 1221 bp, Homo sapiens
taagtcttcatagtctagtgtagtgatgagagccccggatcgaagaccttggtttaaaactcattaacaacttaggtaggcaaacccagagtactggacaaaaagatcccaaatccccttctaattccagcatctccagttttgatctgaacatgacaaaatgccatgtctgtttgaggcagtcgcattttcactggtgaacactatgaactaccaaggaaactctctcccatatcccctatgtgctcccagcagagccctggctctgtgtgtctgatggggtaagggcttttccgccatgatgtgtttaaaaataactttagttagaattttttccttggatgttttaaagcaagaagaaaaatggctgtgtttatttacctctgcctgaggttggagtctgcccagcttgctgctttcctaggtggtcagcgtgcccaagcttgaggatgggatgataccttccgtgcggtggcagaactcaataggttcctccgagctttactgtttctccgtctttgaatgtgataaaatgaattgtcaacctgttttcactcgttggttccttgaagtgatagctttttgttgcatagcctgagcctcttcttgtggaggatgctacattttgactggctaaagaaatatggagaaaggtgaggacaaaaacaaattagcaataaaaaccaacactaatttctgtttaaaacttttggggagggaaaacaaagcatttaagaaaatcatgttgcttaatacaaaaaagcaacaatgaatttcaatgatatgtaaataagtaactatttcaaatcaccaaattaccctttttaaataaggaaatatgtttttatttcagttctttggtacttcagagtcaaagctagagctcctaccgttcaaaatttttagtgatttatttaaagrtcaagatatagacattattctaaccactgaaacatatttttattcctttctgaatgttgtaatccaattacatagcagtacattttattaaatatattcagttcagttctgaagaaaaactggttttattatttatagcaattatgttttcaaatgtcctccttcagaagtaaacctggcagtttccattgagtttacctttttaacaaataattcagaatttaattactaaatttcataaggaacataaaactgaaaaatgtgaaaatttaaggttttgcttctgatgaaacatttaga

SEQ ID NO: 706999 - DNA, 1221 bp, Homo sapiens
taagtcttcatagtctagtgtagtgatgagagccccggatcgaagaccttggtttaaaactcattaacaacttaggtaggcaaacccagagtactggacaaaaagatcccaaatccccttctaattccagcatctccagttttgatctgaacatgacaaaatgccatgtctgtttgaggcagtcgcattttcactggtgaacactatgaactaccaaggaaactctctcccatatcccctatgtgctcccagcagagccctggctctgtgtgtctgatggggtaagggcttttccgccatgatgtgtttaaaaataactttagttagaattttttccttggatgttttaaagcaagaagaaaaatggctgtgtttatttacctctgcctgaggttggagtctgcccagcttgctgctttcctaggtggtcagcgtgcccaagcttgaggatgggatgataccttccgtgcggtggcagaactcaataggttcctccgagctttactgtttctccgtctttgaatgtgataaaatgaattgtcaacctgttttcactcgttggttccttgaagtgatagctttttgttgcatagcctgagcctcttcttgtggaggatgctacattttgactggctaaagaaatatggagaaaggtgaggacaaaaacaaattagcaataaaaaccaacactaatttctgtttaaaacttttggggagggaaaacaaagcatttaagaaaatcatgttgcttaatacaaaaaagcaacaatgaatttcaatgatatgtaaataagtaactatttcaaatcaccaaattaccctttttaaataaggaaatatgtttttatttcagttctttggtacttcagagtcaaagctagagctcctaccgttcaaaatttttagtgatttatttaaaggtcaagatatagacattattctaaccactgaaacawatttttattcctttctgaatgttgtaatccaattacatagcagtacattttattaaatatattcagttcagttctgaagaaaaactggttttattatttatagcaattatgttttcaaatgtcctccttcagaagtaaacctggcagtttccattgagtttacctttttaacaaataattcagaatttaattactaaatttcataaggaacataaaactgaaaaatgtgaaaatttaaggttttgcttctgatgaaacatttaga

SEQ ID NO: 707000 - DNA, 602 bp, Homo sapiens
gacctctacgtatcctcagaaataccaagctttccttttaggacttttgcatttgtttgtccttgtgtattttgttagcctcctgccttcccccttcctgattctttgtatagctgaccactaactggcaggcctctacccagtaccacctcctggatcacacttgcctagaccactgaatctaagtagccgctccttctcccttgcccacagtcacattatccagccttgggtaatgtgcattggatcttggatttcattgcccttatcaccatttggacttacccttctcattyttaccctctcctcactataatataaactccagaagagagtacacttcacttgttcaacactgctccactacctgaaacatagtaggtgctccataaatatgagggaattagttgaatgaatgaatgagtctttaacatgtgtttttgcttccccaaaaagaaataaacctaactctaccaaggaaagttgtgtggaagctcagagaaatgaggaagaaaatgagtaacaactctcaacatttagcttttttttacacatccagatattgcttttaattacttttttttcttatgctttaagttcta

SEQ ID NO: 707001 - DNA, 2450 bp, Homo sapiens
tgacgccagtctgggaagagttcgcttcctggtacctggtacagatggggttatcccacctcttctgacacacatgccatagaaaaaaccattcattcatctatttcattatttttactgaatattttatatgtgccaaccactgtgctaagcagcaaatatagaatagtgcatgtaaattaataaaagcacaaatatatataattacactcactggagttcaaagtgccagtgacaataatgatggtgatagcagccaacagtcactctgcatcccctccacatgagacactgtgctaagtgcctttatctgcagtatctgaacaaacttcaggccaggcaggagarcacagctcaatttgcttcgttcttgtctgagactcccagtggtcacattgctgtcttcaccacagagccccttgtagagccaaaataccatggtgagggagggtggatacaaaacattcacattgcacaccttcaccttcctctagcagcccctgggctgtcaccgtggcagcactttgatgctcagcccctcagacctgttgtgttggcaggaaaccagctaactgaagcagagtaaatgaagcaaacaccgcctcttgaaagggccatggtatggctgatgaggagacccaggatcagttactgctgtcttcatagcttgcatgaccacaggccagtcattcagtccgtctgtgtgtttcttcatctagcaagtaggaaggagaaacactcacatgtcttcaaatccacatgtgtcaaatccaaatatgctcttccctcttcctgctggacattctgtgatgcagattctccttccgcttcttacatctgtttttctttccttcaacctcagtgcatgttgtcatttatagtcaagcaattcattcctatttcttctcaccacccactttgtgcagagccttttacgctagaacctgcccaagaacaggaagacctgggttccattgcagataaccccagggttccttccctcccacactgtagttaatcccaattgcctggcaccaactcatacctgagctgtggaatcaataatttctggattttatgatccccttgtaaacgctggcaaaatcaatgagatttccataccagagggtggggaacaatgaagtagatgctattgataattagttcttttacagaaatgcaaggtaagtacagggtgtttatgccacttttatgcataatgaggcatttatacaaacaacatccacacagctagttgaactgcctggagcaaaataatattcaaccttcaaatttaataactgcataaacttagaactgataggatgctttctgctctggttttgaagtgcctaattaagtacattcaaggaggttattttgttttgttttgcttttagccccctccctttgaaacccacttgtggtcagtgttagagagctgatggttttcttaatgtgtcattgttatagaacatgcctgtgattctgtattcttcagtgtaatacctgtgtttctgtgaaataatctgtgagatttcatgctaagcattgctcttgtcttttctatttttattctaagtatattaactgatttccttggagggacgtgcttgcaagcttgggtgtatcttggtttatctaataaacatgctcctggcacatattgtgtaaatctaattttaacaaattgaatcatatatttaaatgcctgaggggcactcattttaagaaattaatcatattctgaattttcagggaatttttacacccaaattttattttctgataatctaggttttcacttgatttgctttatttaggtgacactgtaccaaattattaaattcattgaggaatttttaaaagcaaggcattgagggaaaggattctgggaagatggtagagtaaaaagcaccaggcatctgcctccctacctagacaacaattgcattgacagaatctgtctgatggaactttttttgaagtctggcatctattctaaggattgaaacattcacagaaaggcttagaaggtaaattgtggttaatttcagtcatataagctggtagcaaagtggcagctacccatcccccagtcctatggcagggagctgtgcacctgttcctagagtagcttgcacacagcttgtgggagccagtgcaggtgaaaaggaccctttcctccaaaacttggggacctgtgttctgattgctgcttctgaatgtggagctgcaaacacagagggggcaactattgctgtatccctccctcatttgttgcaagcccctccccctctggttgaagcaatttccagggaacttatatggccagtaaccccctttttctttttttctccttccccctcatttttctcctttgcttcttttggaaaccaggcatttaaaagcaatcacatgtgcaaaggcaactagaaagtcactatgca

SEQ ID NO: 707002 - DNA, 2450 bp, Homo sapiens
tgacgccagtctgggaagagttcgcttcctggtacctggtacagatggggttatcccacctcttctgacacacatgccatagaaaaaaccattcattcatctatttcattatttttactgaatattttatatgtgccaaccactgtgctaagcagcaaatatagaatagtgcatgtaaattaataaaagcacaaatatatataattacactcactggagttcaaagtgccagtgacaataatgatggtgatagcagccaacagtcactctgcatcccctccacatgagacactgtgctaagtgcctttatctgcagtatctgaacaaacttcaggccaggcaggagagcacagctcaatttgcttcgttcttgtctgagactcccagtggtcacattgctgtyttcaccacagagccccttgtagagccaaaataccatggtgagggagggtggatacaaaacattcacattgcacaccttcaccttcctctagcagcccctgggctgtcaccgtggcagcactttgatgctcagcccctcagacctgttgtgttggcaggaaaccagctaactgaagcagagtaaatgaagcaaacaccgcctcttgaaagggccatggtatggctgatgaggagacccaggatcagttactgctgtcttcatagcttgcatgaccacaggccagtcattcagtccgtctgtgtgtttcttcatctagcaagtaggaaggagaaacactcacatgtcttcaaatccacatgtgtcaaatccaaatatgctcttccctcttcctgctggacattctgtgatgcagattctccttccgcttcttacatctgtttttctttccttcaacctcagtgcatgttgtcatttatagtcaagcaattcattcctatttcttctcaccacccactttgtgcagagccttttacgctagaacctgcccaagaacaggaagacctgggttccattgcagataaccccagggttccttccctcccacactgtagttaatcccaattgcctggcaccaactcatacctgagctgtggaatcaataatttctggattttatgatccccttgtaaacgctggcaaaatcaatgagatttccataccagagggtggggaacaatgaagtagatgctattgataattagttcttttacagaaatgcaaggtaagtacagggtgtttatgccacttttatgcataatgaggcatttatacaaacaacatccacacagctagttgaactgcctggagcaaaataatattcaaccttcaaatttaataactgcataaacttagaactgataggatgctttctgctctggttttgaagtgcctaattaagtacattcaaggaggttattttgttttgttttgcttttagccccctccctttgaaacccacttgtggtcagtgttagagagctgatggttttcttaatgtgtcattgttatagaacatgcctgtgattctgtattcttcagtgtaatacctgtgtttctgtgaaataatctgtgagatttcatgctaagcattgctcttgtcttttctatttttattctaagtatattaactgatttccttggagggacgtgcttgcaagcttgggtgtatcttggtttatctaataaacatgctcctggcacatattgtgtaaatctaattttaacaaattgaatcatatatttaaatgcctgaggggcactcattttaagaaattaatcatattctgaattttcagggaatttttacacccaaattttattttctgataatctaggttttcacttgatttgctttatttaggtgacactgtaccaaattattaaattcattgaggaatttttaaaagcaaggcattgagggaaaggattctgggaagatggtagagtaaaaagcaccaggcatctgcctccctacctagacaacaattgcattgacagaatctgtctgatggaactttttttgaagtctggcatctattctaaggattgaaacattcacagaaaggcttagaaggtaaattgtggttaatttcagtcatataagctggtagcaaagtggcagctacccatcccccagtcctatggcagggagctgtgcacctgttcctagagtagcttgcacacagcttgtgggagccagtgcaggtgaaaaggaccctttcctccaaaacttggggacctgtgttctgattgctgcttctgaatgtggagctgcaaacacagagggggcaactattgctgtatccctccctcatttgttgcaagcccctccccctctggttgaagcaatttccagggaacttatatggccagtaaccccctttttctttttttctccttccccctcatttttctcctttgcttcttttggaaaccaggcatttaaaagcaatcacatgtgcaaaggcaactagaaagtcactatgca

SEQ ID NO: 707003 - DNA, 631 bp, Homo sapiens
aataaacttgaatggacccacatgatcaaacaatcccttacttgttttgacgagctataatagagctatgtcatgattgcagagtatgtttatacagctttttcccacttttcacaagaagttttctttccttaattattctctaaaacaaggagaacaccatatttatacaagtcttgtgcagaataaataattttagaaattttatttttagtacttaactttttagtgttttattttggatttccacatacatataatagtgtaattatcctgcagctacttttaggtagtttcaacaatatcaatattttcccaatcttacttcatctaytcctacaaacacagttgcagaaattttttttatattttgaaataattatagatttactggaagttgcaaaaaaataaatatacaaggagattccatgagacgttctttcagcctcctgcaatgtggtgatatattgcataattatagtaaggtatccaaatcaaaaatttgactttggtgcaatccacagcattttcagatttccacaagcacctatgggtgtatatgcatgtgtgtgtgtgtatgttctatgcaattccatcacttgtgtagtttcaaggagtcaccaccacaatg

SEQ ID NO: 707004 - DNA, 921 bp, Homo sapiens
tctcaattttcatgtattttcttattattgtaagagctactacttctccatctctattttcttttcatgagcatctgtatgttcagataaatgggagtacgatcttaagatarcttgaattttaagatatacctaccacagtgcctctgaactcacctcttctgtgaggattcatctactgaaagcttttcctggcagcaatatatgtacctctttctgatgcctttatctcttaattctgtttcaattgattgttttatgttatctatgtatccctagcagagaaactgaggactccttgtacagggtagttatttgtgtagatcatttaatatgtattattcatctcatccattattttccaaggcaatacagcaagcctgacaatcttagaggattgagttgcattctaatgacaaataaggttactgtagaaggacgaacactggtaaattattgtttagcaaggggactctaacagagtgttaggaattgctgttttatcaatataattgatatgatttaaagatcaaaacaacagaagataaactgaaactacaggcaggaattaaccatgggtagagatacagctcatgcgtgtgtttagagagcattaaacttaagatactcaaaatcagtgaaaatctatccaacttctgaagatcctttatgattaagaaatagcatctgctgttcagtaaagaaatgagtccagaaaaacactttcagacatgagacagcttggaaagcgtttgtctactaatgacaggatgaaattaaagtgagagcaagtatagtctaacctagttttgacacaattgatcttaggctgaagaaccatgaagtctcttgaataagggcactaagaaattaggacaagcatgattcatataagccccaatgtttgcaatgtgtctttca

SEQ ID NO: 707005 - DNA, 1281 bp, Homo sapiens
gctccaatggcgggttagataactgatgtaaataagtggtttctgcatttgaactatttagaggattcttataatttgtttgtatatttgttagctttatgttgtttggttttatggtctcaaaaattatacatatgggtgttctctatagctaaatgtctttctttatattgtaatgtgcaattgctttaggacccaacttagaattcaggatgtggattgacataggtgttccccatgctggaaaaatcagtagagaactgaggtgaagaatagtatttctgaaatatccctgtagacttttggcaataattaattttacttgcaaaataatagtttaattgctcctcttcccttgtctgtgccaagtcatgtcatctgttttttacttccagttttatgtatttttaaatggatcataaaaaaactccccaccctcttcttgacaaaaagctctgagctactcagaacaaaggagcaaagtaactacacttgaggtttttattgacatgtacacacatgctaagccttgacttacagtgtattttactcatttatgaaaaagatgagtcacctgtgtctgcatttgtcacatgtaagttatttattttcttagccacgtttccccacctggattattctgtaatgcaaaaaaaaaatattgtaaatggcttagctagaagttttatcatttcaaatttattcttttactttggtacagcacctcctattgctttgttattgtttttgttgcctgggattccaccaggragtataagacggaaacttctgcaagaaaggatgtacctaagtctttagttttacgttgctgtgcatctcgtattaagatcagacgaccctattgacaagcgccacttataagggagataacattttattatagatctgtagattcacaataaaagatagcgtgctaaaatacttgagatagtaattgcataatgttagacattttaagatgaagtacttaacaaaataaccccaaagaagaaagctactttggttgctgtctctgcaggaaatagctttgattgattacttttgcttttgttttggctcttcagatcttatcaagaaatgatgcctttgaatgaaaatatataatgtagttttgtttaattttgatttcattagattttgtggcagttttgataaggtgacagggctggctacagtttaaggaaagaattaattttgactcaaaaaactactcatgcaaacaaatcaataaatactattgataaatgaatacatgcacag

SEQ ID NO: 707006 - DNA, 1281 bp, Homo sapiens
gctccaatggcgggttagataactgatgtaaataagtggtttctgcatttgaactatttagaggattcttataatttgtttgtatatttgttagctttatgttgtttggttttatggtctcaaaaattatacatatgggtgttctctatagctaaatgtctttctttatattgtaatgtgcaattgctttaggacccaacttagaattcaggatgtggattgacataggtgttccccatgctggaaaaatcagtagagaactgaggtgaagaatagtatttctgaaatatccctgtagacttttggcaataattaattttacttgcaaaataatagtttaattgctcctcttcccttgtctgtgccaagtcatgtcatctgttttttacttccagttttatgtatttttaaatggatcataaaaaaactccccaccctcttcttgacaaaaagctctgagctactcagaacaaaggagcaaagtaactacacttgaggtttttattgacatgtacacacatgctaagccttgacttacagtgtattttactcatttatgaaaaagatgagtcacctgtgtctgcatttgtcacatgtaagttatttattttcttagccacgtttccccacctggattattctgtaatgcaaaaaaaaaatattgtaaatggcttagctagaagttttatcatttcaaatttattcttttactttggtacagcacctcctattgctttgttattgtttttgttgcctgggattccaccaggaagtataagasggaaacttctgcaagaaaggatgtacctaagtctttagttttacgttgctgtgcatctcgtattaagatcagacgaccctattgacaagcgccacttataagggagataacattttattatagatctgtagattcacaataaaagatagcgtgctaaaatacttgagatagtaattgcataatgttagacattttaagatgaagtacttaacaaaataaccccaaagaagaaagctactttggttgctgtctctgcaggaaatagctttgattgattacttttgcttttgttttggctcttcagatcttatcaagaaatgatgcctttgaatgaaaatatataatgtagttttgtttaattttgatttcattagattttgtggcagttttgataaggtgacagggctggctacagtttaaggaaagaattaattttgactcaaaaaactactcatgcaaacaaatcaataaatactattgataaatgaatacatgcacag

SEQ ID NO: 707007 - DNA, 1281 bp, Homo sapiens
gctccaatggcgggttagataactgatgtaaataagtggtttctgcatttgaactatttagaggattcttataatttgtttgtatatttgttagctttatgttgtttggttttatggtctcaaaaattatacatatgggtgttctctatagctaaatgtctttctttatattgtaatgtgcaattgctttaggacccaacttagaattcaggatgtggattgacataggtgttccccatgctggaaaaatcagtagagaactgaggtgaagaatagtatttctgaaatatccctgtagacttttggcaataattaattttacttgcaaaataatagtttaattgctcctcttcccttgtctgtgccaagtcatgtcatctgttttttacttccagttttatgtatttttaaatggatcataaaaaaactccccaccctcttcttgacaaaaagctctgagctactcagaacaaaggagcaaagtaactacacttgaggtttttattgacatgtacacacatgctaagccttgacttacagtgtattttactcatttatgaaaaagatgagtcacctgtgtctgcatttgtcacatgtaagttatttattttcttagccacgtttccccacctggattattctgtaatgcaaaaaaaaaatattgtaaatggcttagctagaagttttatcatttcaaatttattcttttactttggtacagcacctcctattgctttgttattgtttttgttgcctgggattccaccaggaagtataagacggaaacttctgcaagaaaggatgtacctaagtctttagttttacrttgctgtgcatctcgtattaagatcagacgaccctattgacaagcgccacttataagggagataacattttattatagatctgtagattcacaataaaagatagcgtgctaaaatacttgagatagtaattgcataatgttagacattttaagatgaagtacttaacaaaataaccccaaagaagaaagctactttggttgctgtctctgcaggaaatagctttgattgattacttttgcttttgttttggctcttcagatcttatcaagaaatgatgcctttgaatgaaaatatataatgtagttttgtttaattttgatttcattagattttgtggcagttttgataaggtgacagggctggctacagtttaaggaaagaattaattttgactcaaaaaactactcatgcaaacaaatcaataaatactattgataaatgaatacatgcacag

SEQ ID NO: 707008 - DNA, 1281 bp, Homo sapiens
gctccaatggcgggttagataactgatgtaaataagtggtttctgcatttgaactatttagaggattcttataatttgtttgtatatttgttagctttatgttgtttggttttatggtctcaaaaattatacatatgggtgttctctatagctaaatgtctttctttatattgtaatgtgcaattgctttaggacccaacttagaattcaggatgtggattgacataggtgttccccatgctggaaaaatcagtagagaactgaggtgaagaatagtatttctgaaatatccctgtagacttttggcaataattaattttacttgcaaaataatagtttaattgctcctcttcccttgtctgtgccaagtcatgtcatctgttttttacttccagttttatgtatttttaaatggatcataaaaaaactccccaccctcttcttgacaaaaagctctgagctactcagaacaaaggagcaaagtaactacacttgaggtttttattgacatgtacacacatgctaagccttgacttacagtgtattttactcatttatgaaaaagatgagtcacctgtgtctgcatttgtcacatgtaagttatttattttcttagccacgtttccccacctggattattctgtaatgcaaaaaaaaaatattgtaaatggcttagctagaagttttatcatttcaaatttattcttttactttggtacagcacctcctattgctttgttattgtttttgttgcctgggattccaccaggaagtataagacggaaacttctgcaagaaaggatgtacctaagtctttagttttacgttgctgtgcatctcgtattaagatcagacgaccctattgacaagcgccacttataagggagataacattttattatagatctgtagattcacaataaaagatagcgtgctaaaatacttgagatagtaattgcatratgttagacattttaagatgaagtacttaacaaaataaccccaaagaagaaagctactttggttgctgtctctgcaggaaatagctttgattgattacttttgcttttgttttggctcttcagatcttatcaagaaatgatgcctttgaatgaaaatatataatgtagttttgtttaattttgatttcattagattttgtggcagttttgataaggtgacagggctggctacagtttaaggaaagaattaattttgactcaaaaaactactcatgcaaacaaatcaataaatactattgataaatgaatacatgcacag

SEQ ID NO: 707009 - DNA, 600 bp, Homo sapiens
taggagaagaacttcccatgcagaggtatcagcaggtgcaatgtcctgggagaagtatgtgcctgagatggtttgacaaacagcaagagggttattgagctgtggagytatggtgagagaggagggaggagagtgaactaggtcagctcatggagggccaagtattccacagacagggccttcagactcatcatcagtggagagttgcgagcaggagagtgaggggacacatttggttttaaaagaataactaaggtaactgtaaattaggaaacagacttgtgcgtggggtcaggaatagaagcaggaagccacagggggaagctattgctcctggagtttagacgtggaagaccctgaaagctttcaacaggatagctccaaatgactacagtgcatagtttaccaagactcagggtctggggtaataactcataataaaacacagtcatatttctgaagaatgtatgactattcttattcagtgggataaagaaggaaaataaatggtcttatttcagatgaggtcaagttttcccatcaaatgaataatgagagtactttggattaacaaaggtttctggactgcagaattccaga

SEQ ID NO: 707010 - DNA, 600 bp, Homo sapiens
taggagaagaacttcccatgcagaggtatcagcaggtgcaatgtcctgggagaagtatgtgcctgagatggtttgacaaacagcaagagggttattgagctgtggagctatggtgagagaggagggaggagagtgaactaggtcagctcatggagggccaagtattccacagacagggccttcagactcatcatcagtggagagttgcgagcargagagtgaggggacacatttggttttaaaagaataactaaggtaactgtaaattaggaaacagacttgtgcgtggggtcaggaatagaagcaggaagccacagggggaagctattgctcctggagtttagacgtggaagaccctgaaagctttcaacaggatagctccaaatgactacagtgcatagtttaccaagactcagggtctggggtaataactcataataaaacacagtcatatttctgaagaatgtatgactattcttattcagtgggataaagaaggaaaataaatggtcttatttcagatgaggtcaagttttcccatcaaatgaataatgagagtactttggattaacaaaggtttctggactgcagaattccaga

SEQ ID NO: 707011 - DNA, 600 bp, Homo sapiens
taggagaagaacttcccatgcagaggtatcagcaggtgcaatgtcctgggagaagtatgtgcctgagatggtttgacaaacagcaagagggttattgagctgtggagctatggtgagagaggagggaggagagtgaactaggtcagctcatggagggccaagtattccacagacagggccttcagactcatcatcagtggagagttgcgagcaggagagtgaggggacacatttggttttaaaagaataactaaggtaactgtaaattaggaaacagacttgtgcgtggggycaggaatagaagcaggaagccacagggggaagctattgctcctggagtttagacgtggaagaccctgaaagctttcaacaggatagctccaaatgactacagtgcatagtttaccaagactcagggtctggggtaataactcataataaaacacagtcatatttctgaagaatgtatgactattcttattcagtgggataaagaaggaaaataaatggtcttatttcagatgaggtcaagttttcccatcaaatgaataatgagagtactttggattaacaaaggtttctggactgcagaattccaga

SEQ ID NO: 707012 - DNA, 600 bp, Homo sapiens
taggagaagaacttcccatgcagaggtatcagcaggtgcaatgtcctgggagaagtatgtgcctgagatggtttgacaaacagcaagagggttattgagctgtggagctatggtgagagaggagggaggagagtgaactaggtcagctcatggagggccaagtattccacagacagggccttcagactcatcatcagtggagagttgcgagcaggagagtgaggggacacatttggttttaaaagaataactaaggtaactgtaaattaggaaacagacttgtgcgtggggtcaggaatagaagcaggaagccacagggggaagctattgctcctggagtttagaygtggaagaccctgaaagctttcaacaggatagctccaaatgactacagtgcatagtttaccaagactcagggtctggggtaataactcataataaaacacagtcatatttctgaagaatgtatgactattcttattcagtgggataaagaaggaaaataaatggtcttatttcagatgaggtcaagttttcccatcaaatgaataatgagagtactttggattaacaaaggtttctggactgcagaattccaga

SEQ ID NO: 707013 - DNA, 617 bp, Homo sapiens
accagtgttccaccaacactgcaattcaacgaatcaaaagtcaaatccatgcttaacaggaaaagataaaagcatcaacttaaaggaatgaaacaaatttgaaaagcaatggaaaaggaaactcatatggagtgaaatccattcaagacacgttttattgtttttcccatatgcatttgctgcccagctttgactattaaacattatttttttcttctactaaaactaaayagtaatttgacttctagattcttccagggtcgtgctctgaacagaagcaaaatggaaatatttcagtagctttttagacaactatttcaaaagcaaacacatggttgtctgcagagttgtaggttaaagctataaatttattttattaaacagagaggaattggtgaaactgaaagacactataaccctgacattttcatgaaataatattcttgtctgattttttttttagtttttactcagatatcactcaagttacacataaatggtaatttttctttataataagcttccatctcttgtataaatttaatgtgttcagtgatgactgtggataaagtcacctaacggtgattttctaagggaggtaaactttattgtcataa

SEQ ID NO: 707014 - DNA, 946 bp, Homo sapiens
atggatatatcttttgggggatcactgtccaattcaccacactctttaaagtaagagttttacttaaacatatagctccataatacaattcattgaaggacagaaaatacaagggactgtttaaaatgccacacttggcccagcaccgtggcacacacctgtaatcccagaactttgggagggaaagacaggcagatcgcttgagcttaagagttcgagactwgcctggccaacatgatgaaaccccatctctacaaaaattacaaaaattggctgggcgtgggggtgtgcacctatagtcccagctactagggaggctgaggcgggaggatcgcttgagcccagaaggttgaggctgcagtaagctgtgatggtgccactgcactcaagtctgagtgacagagtgagacgctgtctcaaaaaaataaataaaatattacactttgagcaaacaataccaaagcaaaacaacaaaaaattaaagcaatagataatgcaaaattcagttatcaaatagtcaaatgagggaataagtacttgctttgttaaaaggatctgcaatagaactttccatagcaaacttcccatatattaatatgtgattgtttacatttttcagaggttcaaaattatacagagctggccacgtgcagtggctcacacctgtcaatcccagtacttcgaaaggccaaggcgggcagatcacttgaggtcaggaattcgaggccagcctggccaacatggtgaaactctgtctctactaaaaatacaaaaattagctggacatggtggggtgcatctgtaatcccagctactcgggggctgagacacgagagtcacttgaactcgattcaagcgattacagaggtggaggttgcagtgagcccaagatcatgccactgcactccagcctgggcaggagagtgagaatccaccttaaaaaaaa

SEQ ID NO: 707015 - DNA, 935 bp, Homo sapiens
aaatgctccaaaaaccagccatcacagtgttttcttcattaagaactagctctttgaaatgtgcctagttaatttttaaaatcctacttccaaatgagccctgacctttactcaaagtggtagttgtctttaaagcactgaccacaggaacaattaagctctttcactgagcttcagggtcacagcccaaatgctctacttttacaatcaagccaggcgcggtggctcatgcctgtaatctcagcactttggggggccaaagtgggtgggtcacctgaggtcaagagttcaggaccagcctggccaatgaaaccctgtctctactaaaaatacaaaaattagctggcgtggtggcacactcctatacttccagctactcgggaggctgaggcatgagaatctcttgaacccagaggcagaggctgcagtgagccaagatcatgcactgcactccagcctgggcaacagagtgagactctgtctaaaaaataaataaatagataaataaatatagcaaaatgtaatagctatgacctttgggtgttgggactatatgggaatttttcttttttcttcttttwcctatatattccaaattttctttaggacacttgtattatttttatcatagaaaaataaactttgtttgaatatagacatctgtggctataaatataaatcatcagtaaaatttctaaagggatcaatgcatgcagtctatattactaaaacacgtgtcctaaatgggaaaagaaaataactaagatctatattaaactgtggaatagtaaaaggaaaaaactttaatcaagcattctgcttgacttattagaaaaagtaattagaaccagaggctgtttgtatacgacaccaaaaaaaaagtagttaaaagaaaaagatcctaagtttgataaatgagttccaaaaaacaaaaa

SEQ ID NO: 707016 - DNA, 750 bp, Homo sapiens
tcatagcagatgagatcaaaatgaaagatctattaaaaatcatattgtggaataccaactaagatacaacaaatgtgaactctttacacatattccattctggaatcaactctgggttttttgtttgtttgtttttccttttaaatctaatgcacagccagcaaagcaaagatgggttgcccttaattttgatccccagaagcagctctgggttctcattttggcagattgcaatttatatacatctcatagcaaaccctgtagggtgttgtcagcaattagctctgacatcaaggagtttaacagtcattcaacattgatccaatgattgaacactggtaggcacaaagcaccgttaagcccagcagtgaaatttaagatgagaaagataacamagtgtctgtccccagagtgctgactatctattcacaagagtaatgtccctaatagctcttttgcagattgctgttaatttttgtttcgatcagatgtccatggattttgataaagcctaggacagaattgtgaaatagtgtgaaaagtcacagagaaatcactccaaaggagcataggtaatctgctaatgacaaattgtttctgcatagtacccattcttagtaatgttcaagtattttgaacaccaaaagtctcaattgtgaataatttttatttcttatttttcttacgtaaatgtaagatttgttttttatagaacatttaggaaacatataaaatacaaaaaagaaaatc

SEQ ID NO: 707017 - DNA, 501 bp, Homo sapiens
aattcctactgattatttagtaaaaaaaatctgacaattagagcatgtaggagagtggttaaatcatgggtttgaattttgataaactagcaatgcctgttctatcccttattctgggtacatattagaaacttaataaatacgtgttcaagaaattaagttgcaggtattctgaattttgctctttatctaaaatatatttactttagagccactataaatgttaaataagataattcttagcaatgtttctggcaaatagtatagactcaaaaatggaaactatcatattcatttattgttacacaaagacacaaagcttactttaattgagggmaataggagttgttagaagaagagaaacatgaaacacagagggagttatagttaaaagatgaaacacaccaatatatgtaaaaggcaaggcaagaaggaatactcagattccataagacaagtagggtcgctagaaaatgcagagattctggaaatcatgggata

SEQ ID NO: 707018 - DNA, 398 bp, Homo sapiens
  misc_feature 37: n = A,T,C or G
cttaattattaacgatatgtttactcttataatagcnaccattttcatttgtgaactctaagtattctatgtctgaataattatgtcttaatttttctccagacatacacaaatccatatwtaaaacaaatcagcaatacataaccttcacttacttcaaatgttttaaggaatgttgttttaggtattggtgacatcgtaaatcaatacgtgaatgtatctgttgacaagttcataggaatgatcctggtacacctggcagattgaaaggagccaggccatgtgaaaaactgtctatcagtgacttgctaccaatcttcctttgcatggagttgtcagcaggaaccattcctcacaggtccaaaagaataagcctcaaaaaaagcaagagggaatta

SEQ ID NO: 707019 - DNA, 610 bp, Homo sapiens
tgcatttcagctcgtgattttagaaaggcaacctccacaccatgtgtaaataccccaaagcaggaaagagctcaccatgttcaaggaaccaggtactaatgagtcagggcctgggaaaccaccaaagaggaactgagaggttttattctcagygcagtgagggcttccccaaggctttgaatgagcacagtcctcttacacctggtggcaataaacgaatcctctaaggcacttgctgactctcagtctgagtacttcaggctggcctccctcacaactgatttctatctcatcaactgatgtatttaaattgcagccaaaattctcatttttgcaattaaagtttaaacgtatttctatttttcaattggcaggttaaactatagccaagacatgttttttgggctttgttttgttttttgaggcagagtctctcactctgttgcccaggctggagggcagtggcacgatctcagctccctgcaacctctgcctcctgggagattctcctgcctcagcctccagagtagctgtgattacaggtgcatgccaccatgcccggctaatttttgtattttttaggagagtgagggtttcatcatgttggtca

SEQ ID NO: 707020 - DNA, 2040 bp, Homo sapiens
caattctggagagttgtcactattacacctattttcgagatgagatcattgaggcttggggaagttaatctctgtgtaaacatttcacaactcatggcaaggcagccagattcagactgaggcccagagggctcagcagtccccccacagtcattcttttactcttggctcctctatgtaaagttttccttcactgtttcatttgttgatgtaaaggataggatatgggagcttctttcctgtgacgagtttaccacccaggcctcagtggtaatgaactgaaaactgtaggttgcaaagctgcactctggcagctgcaatagtgctgcggcttcagtatcgacatccccactttggggttctcctctgcttgtagtagccgcggcattctackgaattatgcatcagcctccgctcataaacacccttctcccagttagatccaaacacgtgaaagcagccgtgccctgacttgttaatttctagattcaacacactgaggattgaatgcagaaactctggatggttgggttctcccgtaaagtggtagcttagcacacaacattccttgtcaaaagcattcccactacccagcacttcagcagtgagggaattacaacaatcagaaatcaagaggacaatggcattaagtctgaagaggtctttgttaaaagtgcatatacatgatgcatgctttcaggagaattttagaaataatacagtgcaaacaaagtcatcaagacttttcatgccttcaagcagtggccagcagggttctgagaatgaagaaaagtcacatcaaaagaaaatatttgaaactctcagtgaatttagttaaacaagtaaggaagtgaatactgtacatcctgtataatatttaaaggtgtgtctgagacatttttgtgcctctgtatctagtgaagtaaggggttgtgtagttcagtggcatcctgtggttgggtccatggaaacacgggttggtttggacacctgcagtgttttcttttggcctattaacaagatttctctgtgacctcgggctcggtgctatttttacaggtacgagagaattgaatcacatcaggatctgactcaaaaataaagtcttggcctttgcattaagatatgattattaattacaagtttgcagtgtaggtacatttaaggtgaattttaatctagcgagagcaaatctctaaatgttgatacaaaaaattcagttgtcttgtgctagtttttatataactgaaatatcactcccagtcaatgtgattctgttttaaatcatggctcttgataggaggtgctttctgacccccaggggacattcagcaatgtctggagacatttttagttgtcacaaccgggcgatggggtgtgctactgacgtctggtgagcagaggccagaaatgctgcaaaacatcctataacacacaggacggtcccccaacctagaattatagtatccagctcagaatgtccattgtactgaggccgagaaacctcgctttaaaacataagtcggatcatgtcattcccgactccagcctctctgctgctttctgagttgattcacattaagatccaaaggcttcctgaggctgagaggaccttgcatgccctgactcctgctggccttgggccccagccccccttacacgccttaggccttggcctcggtcttgccttcccggccctgtcagcctcccagcctctctctccttctccagcgtccagcagggcatggcagctgcactgtgttcaggccttctggatgaccttctgaaaaacagcacctgtcttcctcgccaggtcagttcctgtccccactccttgctttagttttctacacagtccttctcactgcatggcacagaacagcccaattgtttgttttgtgtctccttcctctggaatgtgggcaaatacaatgtgcgttgtattttcagtgcctagaatagagcccggctcacagatggcactcaattaatatttgttgaaaaagaaaaaagatgaatgaacaataaattagttttaat

SEQ ID NO: 707021 - DNA, 2034 bp, Homo sapiens
ggcaaaattcctctttctggaaaaattaactgtggttttcagtagctgttagtggactgtagcaagacaggcctgtgctcttgccaaggatctttctttcccgcccatccacactgttgtactatcccaaagtacctggtctcatgggcatgctctacatgaaatgagttaggggtcagccctgttctcagcagagacttgtcacagaatctttcaccaccatcggcagcaattagcactaattggtaccctgtgcacccgcagaacagcaagggcagtgatggagtgaacaggcaggacaaattaccctttcgcctctgggaagtgaacttattggttctgtgcgaagctgctctgttcccactacctcagctgggcctaggaggtggattaaggaggaatttattccctgaggctgtcaaacaaaaggattgaagaaggtcagttcactgagtgggcaaaacaaagcagctgagttatgaccacgaaacagccataaataggtctccacgtcctcactccgtattgcctcacccttcctatctctccctctcgctttccatttctccctataatattataaatccaatcaaagcaagtgctctgtcagcatttttctctccttagcctcagagtgcctgctgtttatactcattactgtgcaagccgggtcaccccgtggctgggaagagatgtggtcatttgtctttgctttgctactctatcaattcatcctatccacttcaccagagatacgggagtgacgtgaaaacaagtaaaatgggacctgtgcaaaactttggtctttgcagaatattaattctactacgtgcccttgggtttgtcattctaatatctctgccatagctactttaagtcaagaggttaaagaatccttgagcgaattatcagagaacaattaataatcctttcctctactacaagtagccaccagatgacttggcatcactcacaagacaacagaaggcaaagggatgttggcattctgccaccttagaaaactcgctcctcccttttgcttaagtcagatgccagcactcttctgaaggctgagcagagaggaatagaaaagggagtgggcgtttaattagcaaattcaccacaaataaacgacagcaccaggatatcatcagcgctcttctgtcttcctaagatgaggaatcggtttgaaactaaacaaaagccattcactttccaccttgcattacttaaaaaaatacttcttatctgagtttttaaccattcatctgggaggaaggaacctcaaaatggttgacctagaaataattcagctttgcagaggtgtctgagcccagacattaccaaagccaggagggaccttttagaagcatttataactagatcgatacgtcaacttgtcctgccctcagctcactcgagtttttgctgaaactgaaagaagagctagaaacaaactgccagaaggctcacagttgtcacagatcgtgtaaggagacaagtctagtttttgtagctcctttcccttcctagaagggctccaagcaagctgatgtgatatctggcctagatatcttttcattctcaatggctggtaaaacacctgatagaaaatgctcaacaactgcgcattacatgaaagaatggataaatgaatcatcactgaaaggctagacgaggtatagactttatagcaactaactgagttcattccactcagctcaatggatgctcttttctggagacctagagcaaaatgaaaaatatatgayattagccagaaaagtgacacactttcatttattcaattgacaaacatttattgacacctgtgacatgccaggcccaatgcaaggcaattgtacacaaaatgaaaaacatagactctgcctcataaagtttagtttagttgaaaaggcagagatcagaacacataaagaaagacaaagagatgtgaaatagccatcctagactacatcatggagagtacagagcaggaggctgcctgctctgggaatttatagaggaggaaca

SEQ ID NO: 707022 - DNA, 1119 bp, Homo sapiens
acagatgaatccaagagacttcaaagagaagtacaatgaagtaaaaccatccaaatctgacagctagtgttttcttatttagccggagtgagaagcaagaaggccctggacacagcaatatctctgggctttcacaggtgtgtagatgaatgaaaaaatggattgataaatgtataatccaatgtttcatatatattacatttttatatgtctatttaagaatttcttgtaattactgtcagtaaaggcaggatagcaaaactaagagcctcttttcatcttactcaatttagagataatagcggccaggcgtggtggctcacgcctgtaatcccagcactttgggaggccgaggcaggtggatcacgaggtcaggagatcaagaccaccctggccaacatggtgaaaccctgtcactactaaaaatacaaaaattagctgggcatggtggcacactcctgtagtcccagctacttggaaggctaaggcaggagaatcgcttgaacctgggaagcggaggttgcagtgagccgagatcgcaccactgcactccgatctggcaacagagtgagactccatctcaaaaaaaaaatgtttatagcactatttgatgtatgttttcagtgcttaacactatgccagaggatggaaagaatgggtaacctgtgaattttcagagaagaaacaaggaaattgaatttttggaatacaagttggctcttyccttgtgtacatgcagcctaggatagtggaatgagcaaaatattaaaaatctagtcctggcaccactggttatggtaaggggatttttgtataagtcaattagttgttgaatcattttctcatctgtaaattgaaaatggcactctcccctgagataatgcatgttacttgccatggaaatataagggtcaggattctatgaattaatttttaagtagcttagtatcattcaatagtattctaaaataccaggttacttatactacctactcatgtatgacatttgtgttagtataccttctattcatcaaaggggctatgagctagacctgcagattaacacgcagatgtggccttaaaaaaaaatcagttaatctgggatccagagaagtaggt

SEQ ID NO: 707023 - DNA, 1119 bp, Homo sapiens
acagatgaatccaagagacttcaaagagaagtacaatgaagtaaaaccatccaaatctgacagctagtgttttcttatttagccggagtgagaagcaagaaggccctggacacagcaatatctctgggctttcacaggtgtgtagatgaatgaaaaaatggattgataaatgtataatccaatgtttcatatatattacatttttatatgtctatttaagaatttcttgtaattactgtcagtaaaggcaggatagcaaaactaagagcctcttttcatcttactcaatttagagataatagcggccaggcgtggtggctcacgcctgtaatcccagcactttgggaggccgaggcaggtggatcacgaggtcaggagatcaagaccaccctggccaacatggtgaaaccctgtcactactaaaaatacaaaaattagctgggcatggtggcacactcctgtagtcccagctacttggaaggctaaggcaggagaatcgcttgaacctgggaagcggaggttgcagtgagccgagatcgcaccactgcactccgatctggcaacagagtgagactccatctcaaaaaaaaaatgtttatagcactatttgatgtatgttttcagtgcttaacactatgccagaggatggaaagaatgggtaacctgtgaattttcagagaagaaacaaggaaattgaatttttggaatacaagttggctctttccttgtgtacatgcagcctaggatagtggaatgagcaaaatattaaaaatctagtcctggcaccactggttatggtaaggggatttttgtataagtcaattagttgttgaatcattttctcatctgtaaattgaaaatggcactctcccctgagataatgcatgttacttgccatggaaatataagggtcaggattctatgaattaatttttaagtagcttagtatcattcaatagtattctaaaataccaggttacttatactacctaytcatgtatgacatttgtgttagtataccttctattcatcaaaggggctatgagctagacctgcagattaacacgcagatgtggccttaaaaaaaaatcagttaatctgggatccagagaagtaggt

SEQ ID NO: 707024 - DNA, 625 bp, Homo sapiens
ttcctcctcctaggttagtacagttcccagcccaatctgattgtctaaacattcagtgagttaattcaatatctccacccagaagttgccccagtactagtgtggtgcggcaaaaagaacagtgaagtcaaaaaccccaattgtgaattctggccctgtaacttcgtagctctgagaatttggacaagtcactcaatctctctgctcttctgttttctgatatgtgcgatatcatctcaaaaatttcttccagctcctgagatattagtgacaaaatcatcacaagttattttttcagcccttctaaatatagcttcatataatgtaatatattgaagtaaataatctagaaacatgtgaaatgaccaattcctctcacaatgaagatgtgcatcagaaataaaaaacaaagaacatgtttcttttaataagcaaaatagacccattctcagacttatgatcagaaataagrctgactcaaagttttcctcttccaaacagctgcctcttatttaattaaaaactactcttctaggtcttcaaatgtttactgtgtataatattagactttgtaaatatttcagtccattttatgtgctcatattttatcaccaactactaatta

SEQ ID NO: 707025 - DNA, 1428 bp, Homo sapiens
atacatatgattctcctaataacgtatttcataagaaatgttccagcttgattattttttaaccttaaaatgtataatataatcctacacatattttcaattaaggttttccaaaaagttcatttcttccaacatttcagaaatgtggagattttctaaaatttaaaaaaataacatttttctttcctcagtggaaaagaatacattttaagggagaaataaaagcactactatctaagaatattcttccaagcatgttgtacccagagtttggtatctagtgctatgtatgataattggatttaaataacaggaataaggactttgccataaaaattcagtgtgtctaactgctgtactttcytatgctttttatactttattagaagtaatttttttctgcaacttctataaagctagtgaatcaaaggcaagtctaggcagtaattgcataagtagaagaaaagtaattctggagttcattacagatgaggtgataaaaatctcccttctgttaatgttattgtataaagttgtgctaggatttctcttttatataatacttgatcttcaggaaataagcaatttcttgaattcaatagaaaatttaagaaaatttcattcttgtaaagaaacttgttgctataatggtcattgaaaattacctatgtgatagtgtagactcatatatttttcacattttgctttaagtttaaaatatggctggctgccttaattttatattcattgaatcatttgcttatataaaaacatgggtcgtagtgggcaaatacttttctgtgactttaaaaaattcagatatatttgtaatgattgcttcattaagatccttgattattgttattaataagaaatgcttgcctttcatatgaataatggtattgtagaagagacatataaaaattatttatagctaagctaagaagaaaatctcctggacatgtatgcctgaaataataatgtcacacacatgactgagcttggtggatgatttttaaatgtactaactaatttcctcctactttttgttttctcttttatccttttcaaaagccaagtccagaacaaaaaacttctctgctttgtctgcgtatctttggctgtgtttcactgtgacatgcactgctgttcttttagcaccaaaatgttggcacacattcctgaaaatttcacaccatctcttgctggatcagcaagcttaacccaccaaaatctggtgttgtgcaatggtttttgactgataatcaatctttatgctgctcgacagttgttgctgggacacggagtagagcaggtggcagatgtgccttgtcttttgagaaaagaaattgtaggtgagcttggacacagactagcatatcacatgtccattaaaaagagttaggataagtataatggggaaaagcc

SEQ ID NO: 707026 - DNA, 3467 bp, Homo sapiens
ttcattcactcttatttcacttgtttagcactttacgcttttaaagggtataagacaaaatttactcttcttacttgtatttcttacgtactatcattacttgattcttaatacatagtaggtactactgctcctatatgactgatgagaaaattgagacagccaggttctaatgaaagcctgatatcctggtctcactgcccttctctcttggcctttagtcagaatactgtgatcctagtgtataatccatctggcatcaaggccyggccatattagagaaatttctcacacattgaaagttaaagcaattccatgatcattggtgaaaaaaaattactattcgttagatgcagtacttaagggtttgtaaaatgttttcttggttcttcccaacatatgataaacatgtattagcttttagatgtaagaggcactatcaagacatagaaggattggcccactttatgcaatgacttaaaactggaaaaatgtaattgttctgcattgctttatatttagtaatattccttgtcactgcctgattcattcattcatttaaccaagatttgagtgtctactctgtgctaggcaatgtgctgggttgcttgttttacagtggtaccactgcgttgttattactaaaaataggaaaaaaatcacattattaagacaaaaagaacataaaacttatttatggtgatattttttaaatggaattatgtacatccaagtttttttttttaatggcaatttttaaaaatatctgagcagccctctctgggcctccttttcccaggaatatgtattaccttcattttctatacccctgatagctacacttttaattgcggtacaaataaattacatgaataatagcagagaaatgtcctagaagtcccaaagtatggtgaagagatgatttcaactaagataatgactctacattttctttataccctctttctgcatgtcagtcattagcaacaagtcccaacatctagtggagaaaaagcagcatgcatcatagtatatcttgaggaacaccacttctaaagacttacatttatgtgatggggttaagagtcttacggtcaataagtgtgggaatgtcaggttaaacaaactaaacatatttcattatcacaaggctgctcaaagtctttattgcatcatgaaacttgtggagctccaagaaggtggcctttggaaacttactggaccatggaaccctagtttagaagagcaaactgagagctaaaatagtgtttagtttaatatatctagaaagctctgcattgggagatttccatttacagctacaagtgacatgaatgttttagtaggctgccgatcctttaatgtgagttgagcagacacagaataaatatatgcccctcaaatgtggaggagagaccattcacaatgtggtaagcgccatgaaaacaaggactgcatttggttctggtttctactatagctccaacatctagcactacctagcacatagtagacacttgatcaaatttgtttcataaatgtacaaaggaatgaattttatagaaatgacagaaggctcatggagattttggaatgagtggccacactgtttttctgtctttaatgattttaatttccatatctagactttaagacggtacttaatttattttcttagaacaaaggagtaagaattattccaacagccttttgcatcacgaccctgtattaatctaataaaagaaaggttacactcctatttgttgatgaacagcacattaatgagatcttcttgaaataatcccatctctattatggaggcaaaattacattttccagcataattactgtgtcagtcaagctcccaaattttgatattaattttttcccttgcaaaggcaatattaacttattagtttgtcaaacctctggaaaatcaagggtaacctcatagttttaaatagtgattatcaacctctactgctctgtttgtttgttttaggatggagtcttgcttcactggccaggctggagtgcagtggcacgatctcggctcactgcaatcccgcctcgcggttcaagcaattatggtgcctcagcctcctgagtaggtgggattacaggtgtgtgcaaccatgcctggctaatttttgtatttttagtagagacggggttttgccatgttggccaggctggtctggaactcctggcctcaatcaattcacctgcctaggcctctcaaagtgctgggattacaggagtgagctgtagcacccggcctctactgctctcttattcttattctatcttttgtatatcttcctaccagccagaaggactgggtaagttttattttctataacagattttgaaagaaggattaatgagtctccttaaaatgtgcttttaaattacacatcacttaccttcctttaccttttcttaagattctatagcataagttctttgaaggctgggactttgaatgttttctctacagttatatccctagcaccaaagacaatgctagaatgaagcaggtgctctaaaaactctgctgaatgaatgccatgtttctcctccaactgagactcactgtttcaaagtaaaatatctgtttctgtctctctctctctctctaacatacacatacacacaccaaggaatacagggaagtcttgctgtatattatggcattttttcccatgaaaaatacatacatcatggaagtttggttctaacagatcatttagatgagttttggacagcctctgcattgcttaatgtcaacaaacctcctcttcttctgagctttaccccacctgagccatagaaccaagttaggaaagaatcatgactcacattattcacctgatcagggcttgggacatagggctaatcttgagctatgagcctgatagatctcaaaagaaaaggatattctccaacattgttcattcgggatattttattttgcagctaaccttgttttactagaaaaaatattttcctttttattataaattgtttatatctgcttaagtctgattttgttgtagattgggaccacgatttctctatagaatagtataggttctattttaaaaatacaacccaataggataagattcagtacattaacttactagctctatgaccttggtcaaggtactgaacatctctgagtctgttatgagaatattaatagcatgtttttcctaaattgttttgaggattaaatgagatagataatcatccatgtgagtgctggctactttcattaacacagtctctgaagggttgatggactaatagctatgatgattaagtacctaaacaagttcatcacttcctcgagtcctccttttattttctaacaagccactttcccctattcgacccaaagaagtagacacccacaacaagtatgctttatgggtcctattttattaccaagtatgaatccc

SEQ ID NO: 707027 - DNA, 643 bp, Homo sapiens
tttcccttcctgtccttggctaaatgcagaggtaattttatataattgcagtgataggattaatacaattttctgttctgcttttttcacttaatatcactttttttttttaatggaatctcagtctgtcgcccaggttggagtgcagtggtacaatctcggcctactgtaacctccacctcctgggttcaagtgattctcctgcctcagcctcctgagtagctgggattacaggcgtgcaccaccacacccagctaattctttttcgtatttttagtagagatggggtttcaccatgttggccaggctggtctcgaactcctgacctctggtgatcygcccgtctcagcctcccaaagtgctgggattacaggcgtgaggcactgtgcccggcccacatgtattttaaactattgataattgcaactcagaattcatgttaaattattctttaatgtaaaagagggtgatgtaagaggcttcctttaagcaccaaagacccactaaggttaacagatgtgcacaaggctgtgcctgtgttttctgggccgggtctgtgtcacaattcctccctcaacatcaggctctgctcccctgatgcctcgttcctggaacaatttaagatgctttcaattgaaagtct

SEQ ID NO: 707028 - DNA, 969 bp, Homo sapiens
taacagaaaagaatctgcttatatgctattcatacacttgttcacattataatgatgaactttggtttatcacatcattacagctgaaatgaggtcacaaattgggagaagatatttatacctcacatcatccacgaagtattaacatccagaataaagaatgtctacacatgaaaaagagaaacacaaatagccctttagaaaattgtccaacaggttagtcaccaaagaagggacctgaaagacaagtaaatatgtgagaagttcctcgacttcaccagtaaatggggagatgggaattgaagtcacagtgggatgcccttttcaccctcttcggtttgagaacaccaaatgttggcaagaatgtggatcaacaaaacttacccaattactagtggaaatgtaacattagtgcaaccwcttgggaaattaattacctcgtaaagatgcacctactctaaatgcaggaatgcaactcctagagcagtggttttcaactatggctgcatgtaacccccctgaggaacacacaaaaccaaacaaaattgatgtccaagccctagcccagaccaactaaaacagcaaagctccccaaaagattcttgtgtgcagccaggattaaatgagaatcactgccctgcagaaactctccacatgcacatgaatacttgtttatgggtgctcccaccagcactgttaatgatgagaagaaaaaaataacctaaatgtcaagtaactaaaatatggatagaaaattgtcataatcattgactagcaagaaaaatttgagctacataaacatgcatgaatcttgcagcaaaagtagttgcagaacaccacatatgcacatcatttacagatttaaaaccatacacacaatattatatttgaatgatgtataaatacgtagtataactatgaagaaacaatgggaaggccagagggtagacacaaatggggaaggaagtc

SEQ ID NO: 707029 - DNA, 969 bp, Homo sapiens
taacagaaaagaatctgcttatatgctattcatacacttgttcacattataatgatgaactttggtttatcacatcattacagctgaaatgaggtcacaaattgggagaagatatttatacctcacatcatccacgaagtattaacatccagaataaagaatgtctacacatgaaaaagagaaacacaaatagccctttagaaaattgtccaacaggttagtcaccaaagaagggacctgaaagacaagtaaatatgtgagaagttcctcgacttcaccagtaaatggggagatgggaattgaagtcacagtgggatgcccttttcaccctcttcggtttgagaacaccaaatgttggcaagaatgtggatcaacaaaacttacccaattactagtggaaatgtaacattagtgcaacctcttgggaaattaattacctcgtaaagatgcacctactctaaatgcaggaatgcaactcctagagcagtggttttcaactatggctgcatgtaacccccctgaggaacacacaaaaccaaacaaaattgatgtccaagccctagcccagaccaactaaaacagcaaagctccccaaaagattcttgtgtgcagccaggattaaatgagaatcactgccctgcagaaactctccacatgcacatgaatacttgtttatgggtgctcccaccagcactgttaatgatgagaagaaaaaaataacctaaatgtcaagtaactaaaatatggatagaaaattgtcataatcattgactagcaagaaaaatttgagctacataaacatgcatgaatcttgcagcaaaagtagttgcagaacaccacatatgcacatcatttacakatttaaaaccatacacacaatattatatttgaatgatgtataaatacgtagtataactatgaagaaacaatgggaaggccagagggtagacacaaatggggaaggaagtc

SEQ ID NO: 707030 - DNA, 601 bp, Homo sapiens
tctacctagagccactcaacatggtaagtgtcggaggaaagtggttaatttgtaaaatgtttcatgatcctgattagaagagaaataatgcttgtgtttgctttccaatgtattattcatctcttcacagcccaagaactccacatccttccccacctcccagtgtccygaggctctttgtcactcctctttgttgcttccgaaatgagaagacctctccctctggaggacggggacctcccgcctcgcctcgagtgggctctctctctccaccagtttctaatcccagggaaggtgaatgccttccactctctctctgagtagacagaaaggggcagaatgttgcccaagcaagatcaatgacaccgtctaaaagaaagtgccttctaggctaggaaatgcaatgcaccaaagtcatcatttctttaagaaataatttgctggtagttggttacagactttaaacaacaccagtcatgatagggagctaagagaagttctgtttttttaaccaaccctctgggttcagtgttatcttcctccttcacagtcaggcaaacaaaggacagggtgagaacctaggcttcaatttgaaaacaca

SEQ ID NO: 707031 - DNA, 657 bp, Homo sapiens
gataggcaagcgctttagtttttcattgatctgtagcagtgggccttcccaagaaggatcagaaaatgtcaagctgctgagttaactgaaaagacatcttttaaagatctcaataagagtttattttaaaatgagttacacaaaaataagcagatgtatttttgaagattaagaggtggtgaaatagtttgaaagcatagtattaggaatatggaggtaaataacgagaaacagatgaaaaaagttgaaattgttttctttggtgggtagggcaggataatttagaagactgttgtatttaaaatcttttaaataatatttgtctttttaaactatgtrcatgctttactttgataaaaatcaacatgaaataaaacattcttgtaaacagaatgttaatatcatttgaagattatatagtatatggtagcattataatagtgtcataacattttaatatagactctatataattatccagcttcaaaaattcatgattagatttatagttctgtctttggactatatttgttttggactatatttgtttatacctctctttttcttaactttattttttcttaactttgttattgatacatcatattcaagtcagggacgatcatcttcctatgttgctacccatagcaccttgca

SEQ ID NO: 707032 - DNA, 597 bp, Homo sapiens
tggtggagtgtctaatgccagtttatcatgtcatctcaaatactgtggaagatcgggggaggcgggaaatggcagtaagaaataatttcctaatgtgatgaatgagaagagtgaacttttctaaagaattaatgtacagagcatgagcagaggatcctaaaactggaagggactctagagatcaccyacctacttcaaccgttagttttacgtctgaggacagaggcctagagggtttgtggaacagttggaaatacaaatgataagctcaaaggtagtatgtagtagcctcttgatcccggtggcaatggagaattgagatagccgggaatctgaaacttctacaaatacaaatctaaccatgttaaaagtaccaaaacttttaaattttaaccctttttttggaaacttatgtaaaatgtctcattaacttttaatgatggcttacttttttcttaatcttttctttcatagagattctactctgttcttgattaacttattatcacaggtgatttgaggctttgggatatcttgagttgccatcttgcaaaaattccggatgtattagcctatttgagagctatgtgtactctt

SEQ ID NO: 707033 - DNA, 1512 bp, Homo sapiens
aatcaaacaagttggctctatttatatgctggctgacagacagaattttctcacacataatcatcagaaatcactaagaaaatatatccagttcaccaaaatagcaaaacctttggatacagtgtttactctcatcattagctttaatcacatgcttatttcattatcatttgtctttacatttcaatcttttaccataaaataataactattttgtttgatattcygcttccactttgcactttttaacaagaaaaagatgtcaataacatacattggaatgtgactgttcagtaccccactgcataattactttatgtgtcatacacagcatgttataaactctgtggattaatattctaaacataatttgtactgaatatactaaccctccattcatttacatgggaaacaagcacattttaaaactaccttaatcttttggtaatctgcactttctgctctttggttttaatattttattttctaatatagttcagtgcatatgggaggcaaaaagttgattgcttgataagcacatgtagaaaaacaggagaaaaataaaagcaaatctggaaagcagattgcttgataaagtcatttaggaaataggaaactaaaatcaaatctgtatcgcttttctgtacaaaatgcaatctgaaaagttggaagaataaagtttttaagccattcataatacatctgtgggccctaatgcaagacaacatatctagaagaaaggaagtgaaagctgtaacaaagaataaacatttaggatggaacaatattcaaaaaataagagacttaatgcttcctaccttcagtagtatcagtagtatctccgtggctctttcatggatagagttggcatcgatttggatatcagaaacagatggctctcagctccctcactaattctatcatcttctgtaaatctcttaactgttctgagaaaaatagcacctgcctcacaataatcaccaatcctgttctcctatttactgcttgtggtcccagtacgacagcaaactgagatacccatcaggtgctgagcaaggggtcttatgtgtctttgctcctcaaagcaggctgctcatcataatcactagagaagttttacaaacaaaacaaaacaaaacaaaaacacacacacaaaaaaaacgactgcctgggttcaaccccagaggtacagataaaattgacctgaggtgaggccagatagagaggactcttgttttatacttgttggttgcttgttttaaacgaccccaggtgtgtctgatgggcaggccgtgttaagagctcctgctggaactcaaatgtaaattagctgaatcctgataccatcacctgctccagctgcatgacttcaaacagaaagtagagaatgatcctgttgtggatttcaagaatctgaagttgaggaatgaaggctggaggatagaataaagaggtggggcaggaggttctctgccagcacaaaggtaagatgccaaaacagagaaagccaaa

SEQ ID NO: 707034 - DNA, 1512 bp, Homo sapiens
aatcaaacaagttggctctatttatatgctggctgacagacagaattttctcacacataatcatcagaaatcactaagaaaatatatccagttcaccaaaatagcaaaacctttggatacagtgtttactctcatcattagctttaatcacatgcttatttcattatcatttgtctttacatttcaatcttttaccataaaataataactattttgtttgatattctgcttccactttgcactttttaacaagaaaaagatgtcaataacatacattggaatgtgactgttcagtaccccactgcataattactttatgtgtcatacacagcatgttataaactctgtggattaatattctaaacataatttgtactgaatatactaaccctccattcatttacatgggaaacaagcacattttaaaactaccttaatcttttggtaatctgcactttctgctctttggttttaatattttattttctaatatagttcagtgcatatgggaggcaaaaagttgattgcttgataagcacatgtagaaaaacaggagaaaaataaaagcaaatctggaaagcagattgcttgataaagtcatttaggaaataggaaactaaaatcaaatctgtatcgcttttctgtacaaaatgcaatctgaaaagttggaagaataaagtttttaagccattcataatacatctgtgggccctaatgcaagacaacatatctagaagaaaggaagtgaaagctgtaacaaagaataaacatttaggatggaacaatattcaaaaaataagagacttaatgcttcctaccttcagtagtatcagtagtatctcygtggctctttcatggatagagttggcatcgatttggatatcagaaacagatggctctcagctccctcactaattctatcatcttctgtaaatctcttaactgttctgagaaaaatagcacctgcctcacaataatcaccaatcctgttctcctatttactgcttgtggtcccagtacgacagcaaactgagatacccatcaggtgctgagcaaggggtcttatgtgtctttgctcctcaaagcaggctgctcatcataatcactagagaagttttacaaacaaaacaaaacaaaacaaaaacacacacacaaaaaaaacgactgcctgggttcaaccccagaggtacagataaaattgacctgaggtgaggccagatagagaggactcttgttttatacttgttggttgcttgttttaaacgaccccaggtgtgtctgatgggcaggccgtgttaagagctcctgctggaactcaaatgtaaattagctgaatcctgataccatcacctgctccagctgcatgacttcaaacagaaagtagagaatgatcctgttgtggatttcaagaatctgaagttgaggaatgaaggctggaggatagaataaagaggtggggcaggaggttctctgccagcacaaaggtaagatgccaaaacagagaaagccaaa

SEQ ID NO: 707035 - DNA, 3360 bp, Homo sapiens
tgtagaaaggtctgtgaggaaacatttaatactggtacttatattcaggtcaacatctgggtaaaaatgggactataagaataatatacatatattctctttgtgattagttgaaagctagatcaccaaatttaaaaggatggattcacttgtaaataactttgagtgtgtgtctttgagctttttatggctcagttctctatgtaaaggtatttgaaaaatgttagcatctccttatatcggtaatgtttgtagcaattaaaatactatgttaatgcagagtaacatagaaaggttgcttgcatttcaacctttgtagtttggaaaccatttagaaatgtatttccttatccactttgctattatggagctaagtgcttggaatattatttgaagtgagatttctatgaaataaaatgaaacacaaaggaaatgtgtatttttatatttgcctttcaaccgataatacagcatctccatgcggattgaatccaagcctgtaacacagtgaagcctcctattagcaacagttctgtgaggctctttgctgagggtctgcctgtgtgccattccttcatgacagccatcctcctttgatgacaatgttccttttattgtgtttatgaacttgttaagaattgtaggaaccatgtttggagatgacactgtttctacattaaacgtttgaactttaaatataaatacaagcagaattgaagctatgaaattggtctgccctactgtgtctattatattgggagggaaagagaattgtagaagtaggaggttgtaagaaggaaagattaattgtttaattacagctgaataggagaataaaggtaacaggctcattgcataatatctaataatatccaaccccaacacacacacacgatagaacaacattgtttttgcccaaaattactattttacagaaaagatttataattacagagctaaaaagtaacattctggaaagattaatatgcatatagcaccaacaatgttgtcaaacttaaactgagttttcaccgtcctgataaattgatagaagctgttcttatccaccctaatcaaagttactttttctgtttctttataaatatatgtattcaaatgaaaatcatagtcctagtttgctctctgatcccagtttaatgaaggtagtcaggaaaggtcttttgaggaggtgctatttgaactgagtcctgatgggactaccgtgggaaggaggtgtccatgctgagttggagaatggctttcaaagcagaaggaatggaaaatgcaaaagccctcagagggagtgagcttgctatggggatgggtgagagaggttaaaaagagtgggaatgaggtgaggttggagaattctgcagaaggcagattttgctggaccttgaagactatgatatggaatttggatttttaattacaaggagaacccatggaatgtttgaagaaggaaagtgacatctaatgttcattttagaaggattatccttgtttttctgtgtagaaagaaacagaaaacaggagagacctttgcagtcatttgagcaaaatatactggttcagttatgtattcatttgtccagtcaacaaaaattcactggagtcccaccatatgccaaggaactgctgtaagtcctggggataccatggttattaaggtaaggatcttactctcatggagttttgactagtaggaggttcagtagtgttaagtcccatgaagacaatacaggtaattcaatggaatgggagtatctaattacattgagtgtcagggtcatggtggatcctgaatgactacaggaagccaagcatgagaaaatctccagaaagaacttcaacccaagggaagcacgagtgcaaagggcctaagatgagagcacgccaggcataaaacaacaacattgtgtctggaggattgagtgacggcggcgtgggcgggggaagtatctggcaactagagggaatcagctgcagcctcattagctgggtgaagtgactttctgtgagactgttgggcaaatgggcatggagagagagaaagagataaagattgaagaggagtttatggtgctgtgtcaactattaatgtttccttgggactagcacaggatgtatccacctggttaggagccccacactcctcaggccgtcatgtataaagcagttggctcatgaacttcatttttgtcaaattcctgttatcttatttaaatggtagtactggcttttagcattattgttattttgttttaaaaaaamcattcttaatgataattgtcaggaattgattttctgctcactactttactaaattctaaaatgactattgcttagaggcagataaaatatcttgttctttaagaacaacgtcgagctatatacattgggaatatccctcacactgtttaaaaccatattgctttaagtggtgtataatgcaacatttattgaactatttgaaagtccctaatgtgcagattcacgtgaaattaccccatgtgtctagtttgcaccacttaacatccttttaatggaagcaggtggaaaatgtgaaaaaaaaaatgactaaaatggctgtcttgcctattgtttgagcatgtagttgttctgaccagaaagtgaaaattattgaaaaggaaagttgttttttattagcttgaagacctgttccagaactgttattaaagtggatgctaagtggagtatgtgacatttgcttcatatgcacagtggatgattgattccctcagcctaactgatagagtattttttctcctgaccttggtgcaattacattatagttgcaattttcaacattatattttaatagaatttttgaatctctttgttattaataaagttaaatataatcagaaatgaaaatctctgctgaaatattcaccttgatacacttccactttgggctgcttccagttcccgtcattgctttgcccagagtaagcaataaatgcacatttgttggattggatgggcactcttcccccacgattattccatctcaaaaagaccaaggtgtttttcttcaaatggaaaagtcttctaagcaacaccctcgaaatatgaaatcagcaacaaaattcattacttgagatttttcatttagagaaatgatcataatgacatgctgtgttcacaagtgagattttctgtctttaagctcttaaagtatagtttgcctttaaattgcctccttttctaaatcaaacacagattaaacacccacataattacttttcggatagtttctttgccactgcatggatgtggaatgtgttgaaaatttgtagttattattgtttgaattttaagagctaaaataataaa

SEQ ID NO: 707036 - DNA, 3360 bp, Homo sapiens
tgtagaaaggtctgtgaggaaacatttaatactggtacttatattcaggtcaacatctgggtaaaaatgggactataagaataatatacatatattctctttgtgattagttgaaagctagatcaccaaatttaaaaggatggattcacttgtaaataactttgagtgtgtgtctttgagctttttatggctcagttctctatgtaaaggtatttgaaaaatgttagcatctccttatatcggtaatgtttgtagcaattaaaatactatgttaatgcagagtaacatagaaaggttgcttgcatttcaacctttgtagtttggaaaccatttagaaatgtatttccttatccactttgctattatggagctaagtgcttggaatattatttgaagtgagatttctatgaaataaaatgaaacacaaaggaaatgtgtatttttatatttgcctttcaaccgataatacagcatctccatgcggattgaatccaagcctgtaacacagtgaagcctcctattagcaacagttctgtgaggctctttgctgagggtctgcctgtgtgccattccttcatgacagccatcctcctttgatgacaatgttccttttattgtgtttatgaacttgttaagaattgtaggaaccatgtttggagatgacactgtttctacattaaacgtttgaactttaaatataaatacaagcagaattgaagctatgaaattggtctgccctactgtgtctattatattgggagggaaagagaattgtagaagtaggaggttgtaagaaggaaagattaattgtttaattacagctgaataggagaataaaggtaacaggctcattgcataatatctaataatatccaaccccaacacacacacacgatagaacaacattgtttttgcccaaaattactattttacagaaaagatttataattacagagctaaaaagtaacattctggaaagattaatatgcatatagcaccaacaatgttgtcaaacttaaactgagttttcaccgtcctgataaattgatagaagctgttcttatccaccctaatcaaagttactttttctgtttctttataaatatatgtattcaaatgaaaatcatagtcctagtttgctctctgatcccagtttaatgaaggtagtcaggaaaggtcttttgaggaggtgctatttgaactgagtcctgatgggactaccgtgggaaggaggtgtccatgctgagttggagaatggctttcaaagcagaaggaatggaaaatgcaaaagccctcagagggagtgagcttgctatggggatgggtgagagaggttaaaaagagtgggaatgaggtgaggttggagaattctgcagaaggcagattttgctggaccttgaagactatgatatggaatttggatttttaattacaaggagaacccatggaatgtttgaagaaggaaagtgacatctaatgttcattttagaaggattatccttgtttttctgtgtagaaagaaacagaaaacaggagagacctttgcagtcatttgagcaaaatatactggttcagttatgtattcatttgtccagtcaacaaaaattcactggagtcccaccatatgccaaggaactgctgtaagtcctggggataccatggttattaaggtaaggatcttactctcatggagttttgactagtaggaggttcagtagtgttaagtcccatgaagacaatacaggtaattcaatggaatgggagtatctaattacattgagtgtcagggtcatggtggatcctgaatgactacaggaagccaagcatgagaaaatctccagaaagaacttcaacccaagggaagcacgagtgcaaagggcctaagatgagagcacgccaggcataaaacaacaacattgtgtctggaggattgagtgacggcggcgtgggcgggggaagtatctggcaactagagggaatcagctgcagcctcattagctgggtgaagtgactttctgtgagactgttgggcaaatgggcatggagagagagaaagagataaagattgaagaggagtttatggtgctgtgtcaactattaatgtttccttgggactagcacaggatgtatccacctggttaggagccccacactcctcaggccgtcatgtataaagcagttggctcatgaacttcatttttgtcaaattcctgttatcttatttaaatggtagtactggcttttagcattattgttattttgttttaaaaaaaccattcttaatgataattgtcaggaattgattttctgctcactacttyactaaattctaaaatgactattgcttagaggcagataaaatatcttgttctttaagaacaacgtcgagctatatacattgggaatatccctcacactgtttaaaaccatattgctttaagtggtgtataatgcaacatttattgaactatttgaaagtccctaatgtgcagattcacgtgaaattaccccatgtgtctagtttgcaccacttaacatccttttaatggaagcaggtggaaaatgtgaaaaaaaaaatgactaaaatggctgtcttgcctattgtttgagcatgtagttgttctgaccagaaagtgaaaattattgaaaaggaaagttgttttttattagcttgaagacctgttccagaactgttattaaagtggatgctaagtggagtatgtgacatttgcttcatatgcacagtggatgattgattccctcagcctaactgatagagtattttttctcctgaccttggtgcaattacattatagttgcaattttcaacattatattttaatagaatttttgaatctctttgttattaataaagttaaatataatcagaaatgaaaatctctgctgaaatattcaccttgatacacttccactttgggctgcttccagttcccgtcattgctttgcccagagtaagcaataaatgcacatttgttggattggatgggcactcttcccccacgattattccatctcaaaaagaccaaggtgtttttcttcaaatggaaaagtcttctaagcaacaccctcgaaatatgaaatcagcaacaaaattcattacttgagatttttcatttagagaaatgatcataatgacatgctgtgttcacaagtgagattttctgtctttaagctcttaaagtatagtttgcctttaaattgcctccttttctaaatcaaacacagattaaacacccacataattacttttcggatagtttctttgccactgcatggatgtggaatgtgttgaaaatttgtagttattattgtttgaattttaagagctaaaataataaa

SEQ ID NO: 707037 - DNA, 1200 bp, Homo sapiens
tgccttcaactccaataaaaatgatctgagaaggagaaagaaaatttccccaagagatctacttttcgtatggagtgttataggattgccctgatgatggagatgatttcagggtgagagagagggtgtgacatttgtcatcattcattaggaaaggataagtcagagaagcccaatagaacctaatttctccccacttaagggactttaagggggaaaaaagcttagaatttattgtcagaaactggatccaggctctgccttttgttatctatgtgaacttactcttgcctttaatatcttggagtctgttttcttatttgcaaactagaaataattccaatrttagcacaatgtgaatattaagtgaggtcatgtatgtgcaagtgctcactgcagtacatgagttacatgggtggacagtgatatttgtattgaataaaaacacagagtttaaattctgcagtagtgggagcttaccctcaggctactgttagggtgagagatgatcttaaacagggacaatgtgcactgagccctatgccccgtagatgccctaaatgtgagtgcacattttgcaagccatgtggaccttgaatgtgagtgaaaggagggaagattggtcaccagggcctccactcacgctctctctttgtgtgcttttctctttgagacctccccctccataccagtgacctcataccagcatttgcttgctgatgacacaggccatcctcaatcataaatactttggagaccctatgtcaatgtgtttgttctcccaagatttcttgctgcgttaattcagtcgatatgtcttttatatcacatctatagattctcattctcaacctctctctcctcctgttgcaatatatttgttaaagaaatcgggctgcttgttctgtagagcttcctacattcttcctgtattctggattttgctgcttccatccccatgtctttaatgctttctactatctcgtatatttcttgcaaggtggaaattggatccagagtcttattcaggttcaaggttatattaagaataccttatagacaatgttgcgtacttccctttccatcttcaggaggcatatgttgtgtggttttctttgtggtattgagatcgatcagtggatctgagcatggtcagcctgattcattcatcataaagttcatggaatggttttagctatg

SEQ ID NO: 707038 - DNA, 764 bp, Homo sapiens
ttgccacctcctccgcaactgatactaccaacccaccttacttgctttcatgaccttttgtatagtatttatcactttctaacatggccaggcatggtggctcacgcttgtaatcccagcactttgggaggcgaggtggatggctcacctgaggtcaggagttcaagaccagcctgggcaatatggtgaaaccctgtctctactaaaaatacaaaaattaaccaggtgtggtggcgcacacctgtaatcccagccactcgagaggctgaggcacaagaattgcttgaacccgggaggtggaggttgcagtgagccaagatcgtgccattgcactccagcctgggtgacagagcaagactccgtctcaaaataaataaataaataaaaatgtttgtggcaccccatcttcacactctgtctcttgctgccatgtaagacatccttgctttccttttgccttctgccatgactgtaagtttcctgaggcctccccagccatgcgtaactgtgaatcaaaaaattatatagtctcaggtagytctttatagcagtgtgaaaacagactaatacactcattgtttatgatgatctaattccataaaaaacaataaggtccagaagggtgagggtcttgattgtgtttcactaatatattctaagatcccaaagttgtgcctgacatgtagtaaggatgcagtacatatattttgaataattaataaatgaaatatattcagacagaggaatattatttacaaaaagtt

SEQ ID NO: 707039 - DNA, 1150 bp, Homo sapiens
tgtctataggaaagcaattgattttccacatatcggtttagtaagcttccactttgctaagctctgattatttcagctgtgaatataattctctgctttctttccaatataggctcattgtggctttctgtgcaattgcattgattagattgttcaatgttaaatgtaaatggtgattgagagaaaactttctggttcttgattaatttgaagcatgtttgactcttgattacaggcacatagatgcacacacagacacactcacacacacacacacacacacacacagagagagagagagagagagagagagagagagaaataagtatcatgataaggaggtatccatccattcctattttactgaatattttgatcagtaggaatatttatcaaaagcatttttggaatttacagagatgctaatttttttttctcttgaccaatttacatggtaacttttataaatgattttctcagtttgaacaatcttggcattcttaaaataaaactcttaattatatgcattatctctttattgtatgaataatacatgaatatttgcttttttatttttggctactaaaatatttgccaatattaaatttttctcttggataaatattcaggaacaaaactataaggcagttatttctgtttgttgtcatgatcgagttttgggatcagagctatgtaagtcttaaaaaaatgggaaagtttcagattttttctttgtctaaaacccataaatatcacagagattatctatgtcttgaatgtttgttgtaacttttctataaaattaatcaggccttatccactttcagggtgtaaatctttacctgtgttttcaattaaaaaaatagtttttcgggccgggagcggtggctcacgcctgtaatcccagcactttgggaggccgaggcgggtggatcatgaggtcaggagatcgagaccatcctggctaacaaggtgaaaccccgtctctactaaaaatacaaaaaattagccgggcgcggtggcgggcgcctgtagtcccagctactcgggaggctgaggcatgagaatggcrtgaacccgggaagcggagcttgcagtgagccgagattgcgccactgcagtccgcagtccggcctgggcgacagagcga

SEQ ID NO: 707040 - DNA, 2328 bp, Homo sapiens
tcccaggcttaaaatttaattaaaaagaaacataaaaacatgaaggaagtggtttcacgccacaactccttacataacatagaatactgctgaatataagacccatagattaagtacaatggaagatacaaaaataccatagtctgagtggcttaaacaacaaacatctggctgggttcggtggctcacgcctgtaatcccagcaatttgggaggctgaggtgggcagatcacttgattccaggagtttgagactaacctgggcaacatggggagacccctctctacaaaaaatacaaaaataagctgggcgtggtggcacaggcccgtggtcccagctacctgggaggctgaggtgggggaatcacctgagcccaggaggcagaggttgcagttacctgagatcatgccactttgctccagcccaggcaacagagagagaccctgtctcaaacaaacaaacaagaccaaaaaaaaaaaaaaaaaaaaamcccacacatttatttctcatagttctggaggctgaggagtccaggctcaaggagtccgggctcaaggagcaagcagattatgtgtctggtgaggaccccactttctgcttcacagatgttttctcacagtgtcctcatatggtagaagaggaaagaagctctctggggtctcttttataaagacatcccattcatgtgggctccaccctcacgacctaatcacctcccaaaggccccatctcctaataccatcgccctgggggccaggatttcaacatatgagttggggtggggggacacaaacgcagtccatagtattgttctaagccactgttttggggtgacctgtttcatggcaacagataggtggagtacagaagtatgcagaagataatagaagagtatggaagagggtactgctaacacggactgagggagtcgggaaagaagtaaacacttaagctacccctcaacgtgccaacagggcgccactaggcacttgggcaagagagggggttaagaatccaaacagataaaatggcacagctgcaaatgtacataggtaggtatggttaacactcagcctagagtagggataatggcagaagtaaggctgaatagactgttaagggtctctgtaaacagaaccctgaggatgcaggctactgaaggtttttaaataagaaagtaacaggaagaatctcaatggaaggaagattactgattacagtgaatctgcctaatacaaaatttcactccacaagtaaatgttattgtaacaagggctaagatgtattttgaaaaagtagctaacatcgttggagttgttggattaagctcacaatacagagattttctcaaggtgttaatatcgtttttctttttgcttcatccttactaaagcagattctgttaccagtataaacagctgaattctaactttgcaaggaggctcccctacctcatctgtccagtcttccccccatctcaggacattttcataacgaaaaccctccatgcttcactgatagcctgtaagacttttcaactctgtggatcccctaaaattctcagcaagctcaaaccaccattttaagaggcattcatgttctctcaccaacgaaaaatgaaagagcattccctgaaaatggaatgcaatagccccgtcttaatgagtagggatgggttaggaaataagagaaactgaggactgccaaagtgctgccattctgaaactaagttaagtgggccctggccaattcccaaagtgctttccttaataaggcatggaacacttccatactcaaatccacatcagtcaaatcaaacaccagagaacaaaacaaatgaaggaggcttttataatggagtgttctattttgtccacaaactttataatctaatataaattcaatcttgcagaaaaggtattgcaagttaaaaacagggcctgggtgtagtggctcacacctataatcccagcactttgggaggctgaggcaggaggatcatttaaggccaggagttcaagaccagcctgggaaacatagagagacctcatctctataaaaaatagaaaaattgtctgggtgtggtggcatgtgcctgcacttctagctgctcaggaggctgaggcgggaggatcgattgagcccaggagtttgaggctgcagtgagctataactgcaccactgtactccagcctgggtgacagagtgagactctgtctctagcgataaataaataaataataaaaaacagagatggggaggggggagggatagcattaggagagagacctaatgcagatgacgagttaaagggtgcagcacaccaac

SEQ ID NO: 707041 - DNA, 1461 bp, Homo sapiens
  misc_feature 1016, 1017, 1018, 1019, 1020, 1021, 1022, 1023, 1024, 1025,1026, 1027, 1028, 1029, 1030, 1031, 1032, 1033, 1034, 1035,1036, 1037, 1038, 1039, 1040, 1041, 1042, 1043, 1044, 1045,1046, 1047, 1048, 1049, 1050, 1051, 1052, 1053, 1054: n = A,T,C or G
  misc_feature 1055, 1056, 1057, 1058, 1059, 1060, 1061, 1062, 1063, 1064,1065, 1066, 1067, 1068, 1069, 1070, 1071, 1072, 1073, 1074,1075, 1076, 1077, 1078, 1079, 1080, 1081, 1082, 1083, 1084,1085, 1086, 1087, 1088, 1089, 1090, 1091, 1092, 1093: n = A,T,C or G
  misc_feature 1094, 1095, 1096, 1097, 1098, 1099, 1100, 1101, 1102, 1103,1104, 1105, 1106, 1107, 1108, 1109, 1110, 1111, 1112, 1113,1114, 1115: n = A,T,C or G
tcatatatacatctatcctatcactcctgtgcctctagagaaccctgactaatacaagaggaaaagaagtattttgagyaactgattatgcaatttcaaagaaggtgcattgagaagacttccacaaaggacctgtgaaaaaagaccagaaagaaatgagagaacaagccatttgaataactggacaaggcaaggtacaagtgagaaattctcaagaatgtgactggcatgtttaggaaacagtatagaagccatatgattaaagttgccttagccagggggaatggtagaagatgaggtaagaaataccaaggcagggacaaattatgtagagccttgtagactactacaagaattctggactttcctctgaggtgggaagtcattgtagggttataggtaaaacagaacattatgtgactgaagtcgttggctgttgtgttaagaatagactgtgttaaatataacttgagatgctatatcaaattctttcacaaattttacatgcacgtgatataaaacacaagcaaaattttgtaccttttgccatcaattaaaaagaagagagatcaatataagtcacagttgaaatttcaaactttttgagaaactcacaagtattagcagctcaaggaaatagcatattattctgatcatgctgggtttttattagttctaataaattaaagaattgcagagttatttaatatagctgacattctactaatttcaagggaaaaagagtaacaaaagctcataagagaattcattcagagctcaattccacttatcctcccactctacagagaacacaattggcagcatgtgagtgattttttccctgtaatggcaggatttgatattactattttgatggagatttgaactaaataagctcaatcccttgattaaatgagagttattttataaaggaatatgcctgcacacttctggcattttaactttatcttagttcataatacaggaactatatatttattatcatgatgtattannnnnnnnnnnnnnnnnnnnnnnnnnnnnnnnnnnnnnnnnnnnnnnnnnnnnnnnnnnnnnnnnnnnnnnnnnnnnnnnnnnnnnnnnnnnnnnnnnnnaaacaaattaaaaataataacaaaaacaggaagatgaaaatgaaaagcactattcttcttatagaaatgtgactcgaatgatctgccggtagaacacaaattcctgaattggttttatgaaaggagtgatagagttttgaaaagtcacttacagtctttctctaggcccctccaggtcccaaccaaaatcgttcattcacaagggggcagaaaaaagccatagacaagtctgtgaccttctctctgcagagcaaactggccacagttatctgcagcattggcatttttcttcaaagtctctaaatattattgtgactttgtgtaaaataatagagagcaaagcatt

SEQ ID NO: 707042 - DNA, 1579 bp, Homo sapiens
tcaaggaaattttgacggagtaattttcagattttgtattatgtgctcaactaaaacttaatatctagaataaaatggaccttgccatatatcttctaaaaaaatacaatggttcagcagaacattcacctatatatatatatatacacacatatatgtgcgtatgcgtatatgtgtgtatatatatgtgtgtgtgtgtatatatatatgaaatttggattttactgaacttatctcattatttagagggccacatggtgatgaaatttatgaaataggtttttaaagctcccccttttttactttaaaattatttgcatagtaatcctttataatattagtatttactaatatggagtatttgttattttaaggagtttacctttttacagtcatttttggagggtgatgtaaaatgcattaagcacttgtacgatatataatcctaatttcttttttttgtttttttttgagacggagtcttgctctgtcacccaggctggagtgcagtggcgctatcttggctcactgcaagctccgcctcctgggttcatgccattttcctgcctcagcctcccgagtagctgggaccacaggcgcccgccaccacgcctggctaattttttgtagttttagtagagacagggtttcaccatgttagccaggatggtctcgatctcctgaccttgtgatctgcccgcctcagcctcccaaagtgctgggattacaggcgtgagctactgcccccggcctacaatcctaatttctattttaagatacaaatcatagtttcagccctaaagttatttagaatctacctaacacaacatgccaaatacatacagaacagctagaaaacataagtaataaaggcaagatgtgccacagagcacctgtgtagcaaaaaaaggagttgataaatgtagattagccacagaaatcgaaatcattgagctgtaatttttcagtgtaattttttttgtttcttaataggcagttaaacagtatagtgttcatacctctggtatgatgtttaacagttattttctcaaaattcagtagtcttttaaccagacaatgtttaattgtttatctgggaggtacctacaagccaaaaagtaagtttagaatgctgcttcaaagacataggtaaacagccaagaggaatactcttaagtccttataggaaaatatttaattcattttactcatggaagactattttatgtgcctactcagcaattaatagtgcattttaatgtgcttggtgatctrtcacttacccacagatcagaggtagcaagtaactagcaaggaactgccaaagactagaacaatagcagaatcaaggattgacagctgatagcataggggaggcactgttcaaaatagaacttaaatgaataacattctaggtccatttagtaggaggacaagcaaacatctgcagaccttgagagtttaattggtaataatgacaatgctgtgagccatccaagaaatgttaagttaggttatttacactttattttcaaaatgcaggagatatctaatacagtctcataagcatcctttactt

SEQ ID NO: 707043 - DNA, 1195 bp, Homo sapiens
catctatctctctctcttctatggcttggatagactctcttcgcctagttagatcaacccatttatgccaggtgttccattattggaacactaagcttgtgagagttattgatakcctactgctcaaggtcatcgccaaggtctgatttttcataaaaaatttgcaacctctgacataaatgggttaagtacattctcttaccgtgacacaagagttacttgaaactttgctatctgtccactcttacctctgtccaactctttgaatccactgcacaattccaggcagcattcttgttcactcattattctctcaaaacaccatggggtctgtgactttagggccctttctgaactattttttctccctgaaatgcttcagcatccccacctgactgggaaaacgctcaaatatcaccccccgtccagcaaattgcattacaccaaaggcatttcttatagtactcaaaagtcatctttgtacaaatatataatttttaaccattagagcccctaaaagcagaaatactgtttttaccatctttttacctgatgtccctgccatatggtaagctctcaacagatcttttgaatgaataataggggaaaatatatttttcttataatcgtctaataggaggtttagatattttgcatatacaggtatgatctaaatctggcataaaaggcagccgtttgaagacaaaaaggagttctgaaatacggtttgtaaaatatatatatatatatttatactaggacataattcaacactctcatctcttagatgattgaagatcagttgttaagcagaaacgttgaggatttatgcttacttgactggcagctgcggacagctacctaggtaactgaactcaaatcttctagcctttttaatctagggacctaaatgtgtaaatatagtagtcttttggaaatattctcttatgttggaaaaatagcattttttcttattcttttgttgtactttcatatattattttatttatttagagacagggtttccctcttttgcccaggctgcagtgcagtggcaccatcatggctcactacctcatgggctcaagcaatcctcccacctcagcctcccagtagctgggactacaggctcacgccaccacacctggctaatgtttttcatttttaatagagaagaggtcccactttgttgccc

SEQ ID NO: 707044 - DNA, 1195 bp, Homo sapiens
catctatctctctctcttctatggcttggatagactctcttcgcctagttagatcaacccatttatgccaggtgttccattattggaacactaagcttgtgagagttattgatagcctactgctcaaggtcatcgccaaggtctgatttttcataaaaaatttgcaacctctgacataaatgggttaagtacattctcttaccgtgacacaagagttacttgaaactttgctatctgtccactcttacctctgtccaactctttgaatccactgcacaattccaggcagcattcttgttcactcattattctctcaaaacaccatggggtctgtgactttagggccctttctgaactattttttstccctgaaatgcttcagcatccccacctgactgggaaaacgctcaaatatcaccccccgtccagcaaattgcattacaccaaaggcatttcttatagtactcaaaagtcatctttgtacaaatatataatttttaaccattagagcccctaaaagcagaaatactgtttttaccatctttttacctgatgtccctgccatatggtaagctctcaacagatcttttgaatgaataataggggaaaatatatttttcttataatcgtctaataggaggtttagatattttgcatatacaggtatgatctaaatctggcataaaaggcagccgtttgaagacaaaaaggagttctgaaatacggtttgtaaaatatatatatatatatttatactaggacataattcaacactctcatctcttagatgattgaagatcagttgttaagcagaaacgttgaggatttatgcttacttgactggcagctgcggacagctacctaggtaactgaactcaaatcttctagcctttttaatctagggacctaaatgtgtaaatatagtagtcttttggaaatattctcttatgttggaaaaatagcattttttcttattcttttgttgtactttcatatattattttatttatttagagacagggtttccctcttttgcccaggctgcagtgcagtggcaccatcatggctcactacctcatgggctcaagcaatcctcccacctcagcctcccagtagctgggactacaggctcacgccaccacacctggctaatgtttttcatttttaatagagaagaggtcccactttgttgccc

SEQ ID NO: 707045 - DNA, 1195 bp, Homo sapiens
catctatctctctctcttctatggcttggatagactctcttcgcctagttagatcaacccatttatgccaggtgttccattattggaacactaagcttgtgagagttattgatagcctactgctcaaggtcatcgccaaggtctgatttttcataaaaaatttgcaacctctgacataaatgggttaagtacattctcttaccgtgacacaagagttacttgaaactttgctatctgtccactcttacctctgtccaactctttgaatccactgcacaattccaggcagcattcttgttcactcattattctctcaaaacaccatggggtctgtgactttagggccctttctgaactattttttctccctgaaatgcttcagcatccccacctgmctgggaaaacgctcaaatatcaccccccgtccagcaaattgcattacaccaaaggcatttcttatagtactcaaaagtcatctttgtacaaatatataatttttaaccattagagcccctaaaagcagaaatactgtttttaccatctttttacctgatgtccctgccatatggtaagctctcaacagatcttttgaatgaataataggggaaaatatatttttcttataatcgtctaataggaggtttagatattttgcatatacaggtatgatctaaatctggcataaaaggcagccgtttgaagacaaaaaggagttctgaaatacggtttgtaaaatatatatatatatatttatactaggacataattcaacactctcatctcttagatgattgaagatcagttgttaagcagaaacgttgaggatttatgcttacttgactggcagctgcggacagctacctaggtaactgaactcaaatcttctagcctttttaatctagggacctaaatgtgtaaatatagtagtcttttggaaatattctcttatgttggaaaaatagcattttttcttattcttttgttgtactttcatatattattttatttatttagagacagggtttccctcttttgcccaggctgcagtgcagtggcaccatcatggctcactacctcatgggctcaagcaatcctcccacctcagcctcccagtagctgggactacaggctcacgccaccacacctggctaatgtttttcatttttaatagagaagaggtcccactttgttgccc

SEQ ID NO: 707046 - DNA, 1100 bp, Homo sapiens
cccagcctgcttatttatttatatttataggaagagtaaaatattatcattmttttactggttttctaaggaatgccattaatctatattacatcccagacaacttcaacttgctaaactgccttgataatttagtttataactgaataaccgaggttaaatgacatgaaataattttatagatgagaatttaagcaaagcatccaatatcaataggtgtcctcttgtgattccaaaagttctataaattaaatgtcctggggaatttgcctagaaatattttttcttgttcttacatagatcttcacaattttctagttcaaaaatttcttttacctcaaaacccctctatttggcctattatttgctttagttctggtttcacaaaaacagttacttctagttcctcgcccttatttatcacatatctgggatacattcgatagaaaaaaaaattaatgaagaactttaaaatgctcatatatagcccacaatgtacatccaaaagcaactcatgtttaagagcaattttttccttttactctaatctcatgacagattactttcatgtgttttaaatagccacaggattacaaaatatactaatactatcatcataatattggagcctaaaagaaaatgtttgttggatagaaaagatcatttttaaaattctcagtgtaataaattcccccattattttataattgcttttagacaccagtcgtccctgcttgccatcgtacagtagaagtccagtcacttccgtggctcctctcacagctactgtgataaactgaaagtgccctagactagtaacaaaaatgtctggataccagtctcttcaaaattcaggtttttaatggcagactaaatatcactatgtctaaaggcacctcaaactgaaacacagctgagatagaattcatcttcttctctccaaacacactctttcttctgtaaccatttttctggctaacgactattccgtaaccaaaaattttgaatcactgaggcactttcaactcagatctctttcaaaaccaaccatccatcagtctcaaaattctctagatcatcctatctgaagtctctgaaaa

SEQ ID NO: 707047 - DNA, 1100 bp, Homo sapiens
cccagcctgcttatttatttatatttataggaagagtaaaatattatcattcttttaytggttttctaaggaatgccattaatctatattacatcccagacaacttcaacttgctaaactgccttgataatttagtttataactgaataaccgaggttaaatgacatgaaataattttatagatgagaatttaagcaaagcatccaatatcaataggtgtcctcttgtgattccaaaagttctataaattaaatgtcctggggaatttgcctagaaatattttttcttgttcttacatagatcttcacaattttctagttcaaaaatttcttttacctcaaaacccctctatttggcctattatttgctttagttctggtttcacaaaaacagttacttctagttcctcgcccttatttatcacatatctgggatacattcgatagaaaaaaaaattaatgaagaactttaaaatgctcatatatagcccacaatgtacatccaaaagcaactcatgtttaagagcaattttttccttttactctaatctcatgacagattactttcatgtgttttaaatagccacaggattacaaaatatactaatactatcatcataatattggagcctaaaagaaaatgtttgttggatagaaaagatcatttttaaaattctcagtgtaataaattcccccattattttataattgcttttagacaccagtcgtccctgcttgccatcgtacagtagaagtccagtcacttccgtggctcctctcacagctactgtgataaactgaaagtgccctagactagtaacaaaaatgtctggataccagtctcttcaaaattcaggtttttaatggcagactaaatatcactatgtctaaaggcacctcaaactgaaacacagctgagatagaattcatcttcttctctccaaacacactctttcttctgtaaccatttttctggctaacgactattccgtaaccaaaaattttgaatcactgaggcactttcaactcagatctctttcaaaaccaaccatccatcagtctcaaaattctctagatcatcctatctgaagtctctgaaaa

SEQ ID NO: 707048 - DNA, 1100 bp, Homo sapiens
cccagcctgcttatttatttatatttataggaagagtaaaatattatcattcttttactggttttctaaggaatgccattaatctatattacatcccagacaacttcaacttgctaaactgccttgataatttagtttataactgaataaccgaggttaaatgacatgaaataattttatagatgagaatttaagcaaagcatccaatatcaataggtgtcctcttgtgattccaaaagttctataaattaaatgtcctggggaatttgcctagaaatattttttcttgttcttacatagatcttcacaattttctagttcaaaaatttcttttacctcaaaacccctctatttggcctattatttgctttagttctggtttcacaaaaacagttacttctagttcctcgcccttatttatcacatatctgggatacattcgatagaaaaaaaaattaatgaagaactttaaaatgctcatatatagcccacaatgtacatccaaaagcaactcatgtttaagagcaattttttccttttactctaatctcatgacagattactttcatgtgttttaaatagccacaggattacaaaatatactaatactatcatcataatattggagcctaaaagaaaatgtttgttggatagaaaagatcatttttaaaattctcagtgtaataaattcccccattattttataattgcttttagacaccagtcgtccctgcttgccatcgtacagtagaagtccagtcacttccgtggctcctctcacagctactgtgataaactgaaagtgccctagactagtaacaaaaatgtctggataccagtctcttcaaaattcaggtttttaatggcagactaaatatcactatgtctaaaggcacctcaaactgaaacacagctgagatagaattcatcttcttctctccaaacacactctttcttctgtaaccatttttctggctaacgactatyccgtaaccaaaaattttgaatcactgaggcactttcaactcagatctctttcaaaaccaaccatccatcagtctcaaaattctctagatcatcctatctgaagtctctgaaaa

SEQ ID NO: 707049 - DNA, 1100 bp, Homo sapiens
cccagcctgcttatttatttatatttataggaagagtaaaatattatcattcttttactggttttctaaggaatgccattaatctatattacatcccagacaacttcaacttgctaaactgccttgataatttagtttataactgaataaccgaggttaaatgacatgaaataattttatagatgagaatttaagcaaagcatccaatatcaataggtgtcctcttgtgattccaaaagttctataaattaaatgtcctggggaatttgcctagaaatattttttcttgttcttacatagatcttcacaattttctagttcaaaaatttcttttacctcaaaacccctctatttggcctattatttgctttagttctggtttcacaaaaacagttacttctagttcctcgcccttatttatcacatatctgggatacattcgatagaaaaaaaaattaatgaagaactttaaaatgctcatatatagcccacaatgtacatccaaaagcaactcatgtttaagagcaattttttccttttactctaatctcatgacagattactttcatgtgttttaaatagccacaggattacaaaatatactaatactatcatcataatattggagcctaaaagaaaatgtttgttggatagaaaagatcatttttaaaattctcagtgtaataaattcccccattattttataattgcttttagacaccagtcgtccctgcttgccatcgtacagtagaagtccagtcacttccgtggctcctctcacagctactgtgataaactgaaagtgccctagactagtaacaaaaatgtctggataccagtctcttcaaaattcaggtttttaatggcagactaaatatcactatgtctaaaggcacctcaaactgaaacacagctgagatagaattcatcttcttctctccaaacacactctttcttctgtaaccatttttctggctaacgactattcygtaaccaaaaattttgaatcactgaggcactttcaactcagatctctttcaaaaccaaccatccatcagtctcaaaattctctagatcatcctatctgaagtctctgaaaa

SEQ ID NO: 707050 - DNA, 1100 bp, Homo sapiens
cccagcctgcttatttatttatatttataggaagagtaaaatattatcattcttttactggttttctaaggaatgccattaatctatattacatcccagacaacttcaacttgctaaactgccttgataatttagtttataactgaataaccgaggttaaatgacatgaaataattttatagatgagaatttaagcaaagcatccaatatcaataggtgtcctcttgtgattccaaaagttctataaattaaatgtcctggggaatttgcctagaaatattttttcttgttcttacatagatcttcacaattttctagttcaaaaatttcttttacctcaaaacccctctatttggcctattatttgctttagttctggtttcacaaaaacagttacttctagttcctcgcccttatttatcacatatctgggatacattcgatagaaaaaaaaattaatgaagaactttaaaatgctcatatatagcccacaatgtacatccaaaagcaactcatgtttaagagcaattttttccttttactctaatctcatgacagattactttcatgtgttttaaatagccacaggattacaaaatatactaatactatcatcataatattggagcctaaaagaaaatgtttgttggatagaaaagatcatttttaaaattctcagtgtaataaattcccccattattttataattgcttttagacaccagtcgtccctgcttgccatcgtacagtagaagtccagtcacttccgtggctcctctcacagctactgtgataaactgaaagtgccctagactagtaacaaaaatgtctggataccagtctcttcaaaattcaggtttttaatggcagactaaatatcactatgtctaaaggcacctcaaactgaaacacagctgagatagaattcatcttcttctctccaaacacactctttcttctgtaaccatttttctggctaacgactattccgtaaccaaaaattttgaatcactgaggcactttcaactcagatctctttcaaaaycaaccatccatcagtctcaaaattctctagatcatcctatctgaagtctctgaaaa

SEQ ID NO: 707051 - DNA, 1046 bp, Homo sapiens
tggtcaccctcggtcagactcaaaggtaaatgtctattgagggagctcctttcccaaatccctgcctatagggagtgtatatatttgagtgcctatgttggaacacagataataagaaaatgaataaaatgaataagtaaaatatatagcctgttagatagtaataatggccaaagagaaaaacaaagctggagaaggayacagattagctatgtggtagttttagatagtggatcaaggggacacctgacttcactgaggaaggtaaggactcaaaggtgaggaagcagactgacagagtttcttggagaagaatgtttaaggcaaagagaatagtggtgaaaagggcctaggctgaagcatgcctaggtgtattcaagaaacagtgagaagcaccatgcagctgtagtagggtaagcaagggaaaactagtaggtcataagatccaaatccacataggtgaaattcacttctcactttgcccaaatttccaactaatgtgtattgttctgatgtagttatcaatggtgctccttttttattctactcttaggccattgtagggcataacttttctgctgagcatgatggaaagtcattgggggttgtggaattgggggggttctaaggagataaatgacacaatctgattaacattttaattagaccaatgtggctgctgtattgagaagaagatcaagggcaacttctagtttttagggaaataggcagtaagattatcagttcagtgtgtggataggtgacaagatgttggagattgagaagaaaggagagagatggctagaaattgagatatggtaggtctgcaaacattggtaatgacaagtttgaggctatggccatgtgagtgagtggttgaagtggagtagaggagaaggccattggtggagaaggtggtcaaggcactgagagccagagtgttggaaacacatctatagccacacaaataaaattagaatcacatttgaagatctgtatagtaaaagttatggccatcaataataagcactccacatggaatgtaa

SEQ ID NO: 707052 - DNA, 307 bp, Homo sapiens
  misc_feature 301: n = A,T,C or G
tttgtgctttccccaaaatatccttaaacttcagtgtttaatcacaagtttcaacaggcaaagattttaaaaactatgaggtactgaaataaaaccagaaattctgcagtattgatgagttatgatgaatgtaagtttggctggtatataagaatttatwaaattttatgttttgacagttcaatctgaaggtaacacacattttcagatgttgttttcagaaaaaaataaatagaagagactcctgaatgtttatttgatacatttatttggaatctttcataattcaaatgttaagtgnttagaa

SEQ ID NO: 707053 - DNA, 1274 bp, Homo sapiens
gggaagagcgatgatggggaaaggttgttcaacgggtacaaagttgccatgtaactataagggataaattgtggagatgttttgctcaatttggtgactattgttaatagataaaaattgcatactataaaatagctattaagatattctttgaaaattctcaccacaaaaaaaatggtgaatgcatgaagttatggatatactaactacactgatttgatcattatgtaacatagatatgtatcaaaatatcacactgaaccccataaatatgtatgattaaaatgtgtcaaataaataaataaagttaaccagaagaagccatcatacaactagggccattcatgttcccccattgggtcagtggaagtagcagcttttggcagacagagggacattcctgagaccttttcatagaattgagaaatctcatccagagtttttctcactcctggatgagtcattttcatttcactaaagagaattcctgagccacccctatcttacacttgaggcttctgcttggctcctcaacttgattgggatttctgataatgagagtatttcaaagccatgagccatgcattcaaaatccactaaggcccaataagaagccaataattgtctctcaaagggtgtatagcttttaggtgattccgggagctcatgggtctaaaagtccagtgagaattaccrgcctatggtggtgcccttctgccacagattctagtcggcaaacagagattgctaaaacctgtaactcaaagggcaatttggatatgtggggcccgggggagggcagcctgaatgtctcattggaggacttccagaacatcctatgggtcatggcctcactcaaagatagcagcctgtctggtaattcaatagaaaggtactatcaagattctcacataccttcaataaactggaagaatgccagtagccacataggtcctccaatcactaggctttttttaaaatctgttggggcagacaaggccaaaacttggcaatcatctctggaatgagacattcttcccctttccagattaggcccagcaatttcacttgggtactaagtccttctacattgtctgtgttaatggcctagctctgttactgcacatgggtcaacaggatatccactttttaccaggcagttcccttgtctgggctaaccaagagatcaacagagtgaaaggccagtgctccactgggaagcaggacttttactagggcatggcatacccaccgatagcaggtagacaaggagg

SEQ ID NO: 707054 - DNA, 965 bp, Homo sapiens
tgaccaggcagcttcagacagctgctgggcctattcctaaaaggttcttttttttttttttttttgagacataatctcactctgtcacccaggttggagtgcagtggcgtgatcttggctcactgcaatctccgcttcataggctcaagtgattctcatgcctcagcctcccaagtagctgccaccaggcccggctaacttttgtatttttagtagagacggggtttcaccatgtcggccaggctagtctcgaactcctgacctcaagtgatccgcccgcctctgcctcccaaagtgctgggattacacatgtgagccactgcgcccggcccctattcctcccaaaggattctaaagaagttgtattgcccacaaagccttctgtgaagcataatcatgacatcaggaagttccccttttcctctccaagacctgttctgcagaccacatcaaccccctcacgggtgttctgtgcagacacaggactggtcacaagaccaaggtctagccctccatccctggggctgctaggcctgtttggctcccactccgtgagtgaggccaaggtcttgcattcagttcctgggtggtctgtttgttttgcctggattcatacctagaaactgaatttctaacttcagttcccagctagagcccttgaaaagtcatgtcagtggtcaggacaggaaataggtagggatgggtcaagggccacgtgccccactgcaagaaaacactcccagcatatctgggcctgaygggctgaggggagcatctctaaaggaaagaagaaccttggcatcttccaagactgggactctaagaatccataaaacatcccctctcaggaatgccctggtgaaaagcgagctgtcagatggggagcagagggcaccaagggctcacatttcaggagtagagtactcaggagctctcatcctcatgccttccctcaggcgactgca

SEQ ID NO: 707055 - DNA, 1975 bp, Homo sapiens
taaagcattaccctcactgagtcaagtataaacactgaacaaatatatgttcatttttttcaaaaaataaacatatgaggtacaacattcatgagtctttactctcatctctagtgacaaagatttgagtgagagaaagataataattatttaaaaactaataatgaacgtaagcaagttaacctaatatcacaatcaaaaccagaacttttcaggactggtagaaaaggattaagggaaagtatattccaggcaatgagggcttggttgactggacttgtgtcagttttaaagttaaagctcttggatttctagaggaaaagaactgtgagcttcaagtaggtatgtctgaatcgaattctcattttgtatggataagccttgggatctagaagaggtttccaccccgccatggttatacattgtacaatatggtgagaggtaggagggaatttctgcctgaattcagcaggagatcacctttatcaacttgggccctttcagcaacaacaccatgggtagaaatatgatgcagcgatgagactctgggctagccagaggttggtgctgtgactaatgctaggcatcagttagctttcattgggaacagtgattaataaggaagtgagcatgatgttccccttttctcttagcacatcctcttccagtactgccctcagacccaggcaagaaggatccctgtcgcagctctgttctggtcgcagctcttcccacaatgtgaagagtttatggggccaagtgagcatgcctacygacagcctgtgtcactccattcctatatcatgatccaggtccctgggatctcagaattccctataaggctgatttaaatctgcttctaggttggctcttccctaggtctggcctcctgagatcagactgcttgtcagtattcacacctttgggtctgtccaggcagtggccaaaggagactatctgtgaggggcatggggagagcttagatgtgtgggctgggagacaccacacatggtgcatggccccttgcagtgtggacagggtaaggggcggagaggggaggtgggtgatttagtttttctgcacggccaggtgctgccacaatctgctctggaatctgagtagtctcagagctctaaattgatcctgacctctcaggtcatcatgaaagtatatttgtccatagggggctaaaaggtatttaatggcttgtttgcttgatgtagaacttgtcagtagttagacgtatggtttgtgggcctccactggtactcttgtcttggctctgaaaatgtcagggcaagtctgttttcttctctccacctattcaaatcccaccttctctcttcctgttcaggtcctgcttccttctcagaggcttacagctgcactgtccaatatggtaactgtgagccacatgtggcttttgagcacttgaaatgtggctactgtgtcagaggaactgaagcatattcagtttatttgattttatttaaattgatttaagtgtaaaaactgaagcagtgtaatatttttaaaaaatactgattacatattgaaatcacaatagtttggatatattgggttaaataaaattaattttacttttaaaaaaacgtggttactagaaagttttaaatggtatttgtggcttatattatatctctattggacagtggtggctttagaaagcaagctcacctgtcacattacctctgcacataaattttgatactaggatatatgtaatttgacatttcttgtttgtttccttggtgttagaaacctgttcctagaaagacaggacttcattgatgttcctccaagtgctcagtagagttgaactgtaccatttaacagtgctgattaaactgttacaaagttattgaatgttcagaacaaaacaggaatttttcagtcttttgtattctaaatcagacatactacgactatgggttgagacagtaacttgtttcca

SEQ ID NO: 707056 - DNA, 641 bp, Homo sapiens
ataaaaatgtattttatattccagtcaaataatatgatttatatttgaatctaggtttataagtggaattayataatttaaattttaagaaacattcataatatgatggttgcatcctttttccccactcaattcacatgagttttaatttctttacatcctcaacagattcggcattttaaaaatttatggtggccattgtaatgggtatgaggtggttttgttttggattgtaattttgttttgtatttctctgcaattggtactttttttgcattattttaagtgcttttttctacttatatatttttgattaaacatcagttcaattctttgtgcatttctaaatcaatttattcattgttagtttttcagttttagttgtttataattctgaatattaactcatcacatgtaatttgcgaatattttcccccatttcttcggtggcattgtcattctactaaatattttctttggtgtgcagaaaatttgaagtttagcacagttaaattttgggggtttttatgtttttcataagtatgatgtcatatctacaaaaaagtgccaaaaccagtgttctgtattttccctatttttttcttctaagagttgtattagttatatgttttttagtttca

SEQ ID NO: 707057 - DNA, 906 bp, Homo sapiens
cgttaaaaacatgacaattgtgtacaggctgttccaattaatataagacatatttctaaacttttctaaaaagtaataatacaagtctgattttcctcatctctatatttaattctaaaccttctctggattggagttagttacccactagaaggaagtttataatctcagataaactgaaggtaccattctaggtgaactttagttatcttaccatcccatattgatttgaaattgctgtccgagcattttttaattaaaatatggttgcttattgatcacccatttaaggcttgaatgctgcatctggatggcacacattctggagaattcttcctatgacacagatggacaggcttggccctcctgtgtagtcatcataacaataggagactccaaacccttcttttcaggtagtattgrttttttaatccttagaccagtgctgtccaatatgtacttttaagttatgggttatattaaaaagtaagaattggccaggtgcgtgtctcacacctggaggccgaagcaggaagatcacttgaggccaggagttcaagaccagcttgggcaacatagtgagatcccacctctacaaaaaatgcaaaaattagctgggcatggtggtacgcacgtgtagtcccagctgctccaaaggctgaggtaggatgaggcaggaggatgcttgagctcaggagttcaggtttccatgagccatgattattccactgcactccagtatggagtgagactgtgccccttaaaaaaaaagaaaaagtaaaaagtaattatttttagtagtagattttatttaacctaatatatcaaaattaccataatttcaacatgtaatcaatataaaaattattaatgagattttaaacattttcattttgcacaaactat

SEQ ID NO: 707058 - DNA, 633 bp, Homo sapiens
tttttgtgtatgttccaggtgtactggtaaaaaatacatatatcttccaacttttggatgcaaggttttataatatattatagtattattagttctagtagtagtattgaaatcacccatgtccttattgatttacaatctttcgatcttcaataattgagaaaagtctgatatagtttggagacttgtccccgcccaaatctttttttttttttttttgagccagagtctcaccctgtcgctcaggctggagtgcagtgcagtggcccaatctcagcttactgcaacctctgcctccttggttcaagcgattcttctgcctcagcctcctgagtagctgggactacagaggygtgtcacaactcccagctaatatttgtacttttagtagagacggggtttcaccatgttggccaggctggtctcgaacacctgacctgatgatccacccgaatcagacccccaaagtgctaggattataggcgtcagccaccgcgcccgccccccacccccccacccaaatcttatgttgattttcatccccagtgttggaagtggggcctggtgggaggtatttggatcatggggatggatccctcatgaatggcttgggccatccccttggtgatcaat

SEQ ID NO: 707059 - DNA, 633 bp, Homo sapiens
tttttgtgtatgttccaggtgtactggtaaaaaatacatatatcttccaacttttggatgcaaggttttataatatattatagtattattagttctagtagtagtattgaaatcacccatgtccttattgatttacaatctttcgatcttcaataattgagaaaagtctgatatagtttggagacttgtccccgcccaaatctttttttttttttttttgagccagagtctcaccctgtcgctcaggctggagtgcagtgcagtggcccaatctcagcttactgcaacctctgcctccttggttcaagcgattcttctgcctcagcctcctgagtagctgggactacagaggcgtgtcacaactcccagctartatttgtacttttagtagagacggggtttcaccatgttggccaggctggtctcgaacacctgacctgatgatccacccgaatcagacccccaaagtgctaggattataggcgtcagccaccgcgcccgccccccacccccccacccaaatcttatgttgattttcatccccagtgttggaagtggggcctggtgggaggtatttggatcatggggatggatccctcatgaatggcttgggccatccccttggtgatcaat

SEQ ID NO: 707060 - DNA, 633 bp, Homo sapiens
tttttgtgtatgttccaggtgtactggtaaaaaatacatatatcttccaacttttggatgcaaggttttataatatattatagtattattagttctagtagtagtattgaaatcacccatgtccttattgatttacaatctttcgatcttcaataattgagaaaagtctgatatagtttggagacttgtccccgcccaaatctttttttttttttttttgagccagagtctcaccctgtcgctcaggctggagtgcagtgcagtggcccaatctcagcttactgcaacctctgcctccttggttcaagcgattcttctgcctcagcctcctgagtagctgggactacagaggcgtgtcacaactcccagctaatatttgtacttttagtagagacggggtttcaccatgttggccaggctggtctcgaacacctgacctgatgatccacccgaatcagacccccaaagtgctaggattataggcgtcagccaccgcgcccgycccccacccccccacccaaatcttatgttgattttcatccccagtgttggaagtggggcctggtgggaggtatttggatcatggggatggatccctcatgaatggcttgggccatccccttggtgatcaat

SEQ ID NO: 707061 - DNA, 1939 bp, Homo sapiens
tttctgactcactggaccaactgcttttttttttttttttttaaactttctgggtcttggttcctagagttgtgaaatacggatgaccactcatcactgtctcctcatagtgtgtgaaccgaaagaagagaaaacctgggaaagggcccgagggctgggcaaggtcgctcatgcctgtaatcccagcactttgggaggccgaggtgggtgaatcacctgaggtcaggagtttgagaccagcctggccaacatggtgaaactttgtctctattaaaaatacaaaagttagccaggtgtggtggtgtgcacctgtagtcccagctactcgggaggctgaggcaggagaatcgcttgaacccaggaggcacaggttgcagtgagctgagatctcactgctgtacctgggcaacaagagtgaaactccatctcaaaaaaaaagaaagaaaaaaaaaaacctgggaaagggatgttttaactccttaaaagaaagaagtatgtactgtagtgtcttatggtattacagagggggggcccaatcaagctaaggataaccaaaaggccctgtggggccatctttggaaaagaagagtgaattgaccagaggggagaaaaagggtgttagtcaggtctttagcagggaagagctggtcaagacgatggctataatctaggtctggcccagcttttccgggctcaggggctaaagcaggtttttgggggcagtatcaagtttcatacctcagtagccaaacaggatccgtaatgttttctagtttctgcactgcttcatctcgaactggtgcacacagcaaagccatcatgttgagaacgtacttagagagatagaggactttcagggccccatgttctgcctcctgcttgagcaagtccatgtccagagcttcttcaatctcaattctcaggcggttctggcgtggtaatagcagtgatagcaagatctgcccaggaaagaaagtcaaaggagttgatctgtttagatccccaaactttatccaatgggcaatccctttagctaaagacataccagcctatgttttttaaggatcaagaagttgggtccctaaatttcccatggaatattatttatctttgtttagaggccrgtgacaattcaaggatcaaggggatcaattacaggaatagtatatcattttctaggcagaatgagatatagagatgaataaaatcaaggagtgtggtaaaaagacatacggggtacaacaaatataaaatacccaccatcacatggtgatgacgtctcttaactttaaaagggaggcattttttagattattttacttcaaagggcaaggatgaaataggcataggagctgttgcaagtcactgaaatagcctattaacccccaaaataagttcatggtaaacagggactcttattcatcccctgcctctgtaacacacaggacatggtgggggcctagggtataggattcaatgaatatttaattgaatagaatatggtgttgtcatagcaagatctcaactgtttaccttcatgttaaacaaataaaatcaaagttgctccatactatctactttaattgccaaactctgccagttaccaatttggagcctctcagctccaaatctacccttcagtgcctactctgcaaaaacggagctgggcccttgaattatttttcctttgctagctgacacaatgttagatttttgtcaaaagagggtggtaaaaagaaactgcaagagaaaagggccttccttcttggctctggtatgctcctctcagcaagctcctgcattgtggaagcttctttgttcaaattactgcatggtttctgcctcttgattggctctgactggtaaaaagttgagtgaggtttgatgaccagcaagtttcaagtactttagatgccttaaacacatgcaaacttgagga

SEQ ID NO: 707062 - DNA, 660 bp, Homo sapiens
attttatggctgcatagtattccatggtgtatatgtgccacattttcttaatccagtctatcattgttggacatttgggttggttccaagtctttgctattgtgaataatgccrcaataaacatacgtgtgcatgtgtctttatagcagcatgatttatagtcctttcagtatatacccagtaatgggatggctgggtcaaatggtatttccagttctagatccctgaggaatcaccacactgacttccacaatggttgaactagtctacagtcccaccaacagtgtaaaagtgttcctatttctccacatcctctccagcacctgttgtttcctgaccttttaatgactgccattctaactggtgtgagatggtatgtctttgtggttttgatttgcatttctctgatggccagtgatgatgagcattttttcatgtgttttttggctgcataaatgtcttcttttgagaagtgtctgttcatgtcctttgcccactttttgatggggttgtttatttttttcttgtaaatctgtttgagttcattgtagatgctggatattagccctttgtcagatgagactttttctaaatcaaattgcagagtgatcacacaacccctaaggaagaaattccagttccaacaaaacttaatacaga

SEQ ID NO: 707063 - DNA, 660 bp, Homo sapiens
attttatggctgcatagtattccatggtgtatatgtgccacattttcttaatccagtctatcattgttggacatttgggttggttccaagtctttgctattgtgaataatgccgcaataaacatacgtgtgcatgtgtctttatagcagcatgatttatagtcctttcagtatatacccagtaatgggatggctgggtcaaatggtatttccagttctagatccctgaggaatcaccacactgacttccacaatggytgaactagtctacagtcccaccaacagtgtaaaagtgttcctatttctccacatcctctccagcacctgttgtttcctgaccttttaatgactgccattctaactggtgtgagatggtatgtctttgtggttttgatttgcatttctctgatggccagtgatgatgagcattttttcatgtgttttttggctgcataaatgtcttcttttgagaagtgtctgttcatgtcctttgcccactttttgatggggttgtttatttttttcttgtaaatctgtttgagttcattgtagatgctggatattagccctttgtcagatgagactttttctaaatcaaattgcagagtgatcacacaacccctaaggaagaaattccagttccaacaaaacttaatacaga

SEQ ID NO: 707064 - DNA, 838 bp, Homo sapiens
aagtgcatataatcaaaacaatatagctattgccatgaagggattgtggggaattttacttttcttctggaaatactatcattatcgtactttttaacaacaaacatttactacttttgtaattggaaagcaaaagttagtactactctgcaaataggaatatttgacataaatatgcaaaaattggtaaaacctaagttggtaaaatattaagaccctccccaagaaacaccccagcattataaaggaatacacccatacttgcatttttcygtgagctcaactagttagcataccaaattaattattacgagtaacctaactatacttgccatagggtaagctattggtcatggggggtttaaagggaaaaaaatatgtaacatctactgttaatgcagcaaagatgttctcttagattggaaaagccagtatacacaatattgtcaaaagaccttccccacagcacacaaactcaaacggcattaatacgtgagtcacttcctgaccatgtgggtttgtggtacggctgaaccgtgcctataaaaaaaaagtaaggtacacctttttgccacagatctggcagcaagatgtgtccttctgggctcagtgagctctccacttatgaatcttttcctctgtggtgccctataatattcctaagaggagaaagaaaagacagccttaatttgttgctgtgccctgggaaagatgagcagagcaaatttcctctgagtgcctttttctctttatctaactagaaccctctagctagaatttctgtctgttctgtcacttcctatactttccacatctcagctaatctcacttgagaaag

SEQ ID NO: 707065 - DNA, 887 bp, Homo sapiens
tgcatctaggcaaaaaggtaaaggggtaggggagaaggcaagtaagaatgatcagcttgcattattcagggctgttcttcatatttgcttctacaattcttaagagttattacccttataactcttcagttatttgagcaagacaatgaatttgtctgcacaacttcatgcaagatgacattttaaagatcagaatttgggccgggcgcggtggctcacgcctgtaataccagcacttttgggaggctgtggcgggtggatcacctgaggtcaggagtttgagaccagcctgaccaacatggcgaaatcccgtctctaaaaatacaaaaattagccgggcgtggtggcgcatgcctgtaatcccaactacttgggaggctgaggcaagagaatggaatgaacccaggaggcaaaggttgcagtgagccaagatcgagccactgcactccagcctgggccacagaacgagactccatctcaaaaaaaaaaaaaaaaattaaaaaaaaaataagttaaagaaggaaagtagtaaacttacagcatttcccaggagagctaaacccagaagtcaaaacaggaaattacaagtcaaatgaacacatgcagaagtcataggtactgggtgactgtactagccaagttgccctgacaggcactggcaaacatccattaactaacagcgccagacctctcaytgtttcttactccaactttctgctatactaccaaaagcttaatttttgcccagaaacccttggacacttaatcaaataacattagtataaaacatgccatgtcatgaagcttgcttcatgatgactcagcagcttctgcaaaacatccagttgacagcctaggataataaacagcaagtgggtagaccctat

SEQ ID NO: 707066 - DNA, 1114 bp, Homo sapiens
agagagaaagcaagaagcaagaaaaaaagaaaatgagaagactacttaagctctgctctagagaactgcaagacagacactatagcctgtcctgatccacttacctgggcacactggccccttacattagatactcaaaatgtcagtgcctagtggctaccatttactgaaaattctaaaacactatgcatttgaactttctgcactgatggaagtattttattctgtgctgtccggtctggtaaccattagccacatgtgactgctgaacactcagcaattactgactagcatgattgaactaaatttttaatttcatttaaatcagtctaggtttaaatagccacatgtggctagtggctactggattagtcagcacaggtctagaatacaggaatccgataaatgtcatggactttttttgaaatttcaccaagctattcacttatgtttaatagattttatgtgcatgaattcactaagatttcatagcagacacagctcctgttgcctgccccacttcttgcatttcacttttataattatctgactcgttataagttgactgtctctctgctggaccagaagctccataagaagagcactagcgggcctttcttattctcctctccagcccagcctggaatggggccaggcacacactgtggtctttattaagacttgctgacccatcagacacctgagaagcaagtcaaaaaggaagtgtctttcctggaaggattatgcatagaaagatacacccaaatacccaagactcattttaaaaacaattctgaagtgacacagatcaacaatattcttagtaactagtccaatttctctccactatagctctttttaccctacaaaagtcaataatatatctctccacagggtttacatactcgatattrcctttttaccaaaaaagttattccatgattttcttaaatcacttctaaacagatattccttttatacttccctaaaaaacgttatatctcacttgtagcactcagccactaatcaataaattgaacacaggatgcccagacacaaattgttaaaaactgtctatactaactttctgactgcttcacttacaaagcaaagg

SEQ ID NO: 707067 - DNA, 656 bp, Homo sapiens
taggcaatgtccagtccttaaaattgagaaaacctaagtctgaatcctaaatcttaactttttctatatttctagtgataagaattagaacaagttacttaacttttctgcatctgttttcttaccagtgaaatgtggttataatagtaattagttaatattttgtgtaaatatgaaaagacataacaaatattacagttggagaaatgcatagactgtacttggtgctcaattgatgttagtcacctctttagtgcacattgacatggatgacactggcatcgtctagtataagaaagtgggtcgtggtcagattgttaaatagaaccagctctcccattatgaatttgagacttattaaactcccagatatgtgtgttgttatatggaaaaagctgtctaagttttttcttaatatttatgactggactattaaaaagaacaaaggatagctatgtaagtactgataaaagcatggatgtcaattgacaaaagctagtctgaatattagagttattcagacaatacttagtgaatgtctaaayattttaggcacagttctaagttctggaagggtggagtattattgaatatgtattctcattgatggtagttatgatcttatttgcaaaagatacaaagtagatttcatctct

SEQ ID NO: 707068 - DNA, 1343 bp, Homo sapiens
ttgtcaaatgggaacaagaactatgccttcctcacgttcttgtaattgaataaaataacgcaatcagtacatagcctgatactcttagattccttcctctgttcctaaaacacctttgaccttggaaagaactacgctgatgggctcagcaactagagctgaacaagaaggctgccacaacgtggtaaacaggtccgcataggcacatgctcgggatggcccrccccatccttagccctcgcgatggcccgtcttcttgttagtgcatgctcactctgctgccacctcaattatcacctggactgtttaccaccagtcccacccgaaggagaagagactcctgttctcaatgatcatccctggctctcatttccattatagccaaagagaataacacattctccttgaaggattagagaacattcttcacacaatagaaatcctgaacgatggagacagtggttttgagggcgttagaaacagcaatgcttctgaagccaaggagagattgcaaagagcacaaaaaatacagaaaatacagaaatagaagcaagcaaagatgattgttttctttgaactgataccaaatcatctcagtaagagaaactaatatgggtatactgtttcatggaggtctccaatcctattgcagttagcaaatccgagaaaccaaccgagaagggaaacttctcctgaactctcagactactggaaattaacaaacgagttgacatttagagagacaaagaagtttctcaggactgtattctgtgtggatcaaatttccttcaggattcacagcagtatgcggcattggcaaatcctcacatgtaaaagcaaggatcctggagttctccttagatcattctaaaaaaggaagctttcaccaacccagcagtgttgaaggaaaactctcccattttgatcctatcatcatcacatcaccagttccttaagaaagaatcggccgggcacggtggctcacgcctgtaatcccagcactttgggaggccgagacaggcagatcacgaggtcaggagatcgagaccatcctggctaacagtgaaaccttgtatctactaaaaatacaataaattagccgggcatggtggcgggcacctgtagtcccagctacttgggaggttgaggcaggagagtggcgtgaaacgggtgggggggaggtgggcagagcttgcagtgagctgagatcgcgccactgcactccagcctgggcaatagtgtgagactccgtctcaaaaaaaaaaaaaaaattgcccatctttgtgctatttttttgagaactttaaaaaagatattgagacaaatgttacaatcaaacacaa

SEQ ID NO: 707069 - DNA, 647 bp, Homo sapiens
tctaaaggagtgagacagatttttttcccccattaatatacaaggacatatatatatccaaataactgcgatctctcagagcaatccctttttaatcaaaacatttatagagtggtttggaaaacagtgtgtcagccctgtaagaaaatccattttgttatttccagctgagcctccttcccttccttcagagaggggtcctttatgctggtgttggcctggagcttgagaggcagagaccctcgaaagaggggcttcagggccaggctaatgctggaagataaggggaagcattctgtgtctcgggaaacagacggactaagtttatttgtgggctgcccacctgctgtacgtgggcataactggctgagcaccataaataagtatcgagtcaccaagagtcaaagcagcctgtttcagcaaacatttaaagtatcaatatttgtaatgagggcaaaataaagcactggagtccacatctccgagcagattctctctgcactgaatgtaatatttgggctccaattcagcatttcccaaagtgtgctccacagaacactagcttaatggrttagtaacagtgtcccgtgaaaagggggttctttggtcaaataagtttgggagatgctgggttaagcagttaaaca

SEQ ID NO: 707070 - DNA, 649 bp, Homo sapiens
tccaagagataatgtctaaccagctgtcttggcacccctttgccaagtcaagttgacacataaaattaactatcacaaaggttttctaagaccctgctaaagcgtcaaagaacacaagtttacagttggtcattgggttgagtctcacctctaatatatagttattgtatgaccacagtttacaaggactgaaactctctaaacctcaatttcctcatatgagaaatggagataatattagctacttcaatagattgttgtgttaaataaaataatatatacaaagcccctggcatgtaacaagtgcttagtaaatgaaaactcttgttacatctctaaagcacaggatgagtatataataaacatgtaatgaatacrgtagtattttaaaatctacaagaaaaagatgtttgaaaaaaatagatttgtggggtcctggcatccaggcctaggctcttggacagcatttctacacttgccgtgggtcagaggggaacccactgtcctgaaaggtaagtcccaggcctggcagcattcaccacaagctgatggaagagcccttgggctttaagtgaacatagacggtggcctggtagaacccttgtgaaccagtagtgctaattgccacaaagagaggctcctctgcctg

SEQ ID NO: 707071 - DNA, 666 bp, Homo sapiens
aggtttgtaaataggccaatccacactctgtatctagctaatctagtggggacatgaagaacttttgtgtccagctcagggattgtaaacacaccaatcagcaccctgtcaaaacagaccaatcagctctctgtaaaatggaccaatcggctctctgtaaaatggacccatcagcaggatgtgggtggggccagataagagaagtagccagcagtggcaacccactgaggtcaccctccaggctgtggaacctttgttctttcactctttgcaataaatcttgctgctgctcactctttgggtccacactgcctttatgagctgtaacactcactgggaatgtctgcagcttcactcctgaagccagcgagaccacgaacccaccaggaggaacaaacaactccagacgcgcagccttaagagctgtaacactcaccgcgaaggtctgcagcttcactcctgagccagccagaccacgaacccaccagaaggaagaaactccaaacacatccgaacatcagaaggagcaaactcstgacacgccacctttaagaaccgtgacactcaacgctagggtccgcggcttcattcttgaagtcagtgagaccaagaacccaccaattccggacacggtaagactggggcaagaggtggaagagatttgca

SEQ ID NO: 707072 - DNA, 1086 bp, Homo sapiens
tagataaagtccaatagcttttcaaaattcaaatgcaatttacatgcttattagcagtgactgagaattttacatcctgcraaaaattcagtaacataaagccttttaacttgtgctgccctgtagaatgtattgttgcatgccatttatttcactatgagtaagtttaagtaccttttcacatatcaattgccattttcatttcttattttgtgaaagctttttttttaaattattttttcctaccaggtttctcttttggttcttactgacttttaagacaatctacctatggctctgttaggtgcttctgtttttaaagaaagaccatgcagccatttcttccccctaatgtcctacttcctctctggctcagcagctcggcaccattagggactgaaccgctgtctactaaacaagtttaagaaagaaaacaagtttgagaaaattcttaatacatataaaggtcagattagttgtcctgcctgagatggaaacaacccttttcccctgtcagccacttaaacattcctacaagtttaaccggtgtaatcctgggacatcctggtctatccactgttactgtttgttatttttcctcttccctgcaggcttccctctgggctccacggtgcagtctgaaactaagggcatctggatgtggtgtgtgccccacctctctaagccaaaccacaccctggtccttctggacaccgagggcctgggcgatgtagaaaaggtaaggcagagaaacttcaccgctcatggttgacctctcatcttttaattttttcagctcccttcaacttctgtacatatctctgtaaactcaaatctaattatgaataatgaggctaaattctgtttcctcagacttccttattaatttcaagtattgaggcatatttaagagtagatcttcttatttttaacactggagtgaatgatataatttaataaatatgtattgaagagatgaattccagggctctgtactgagtactacagataaaacagtaaacaaggtaaaggccaagagcctagttgtgaagacaagaaatatggggtatgataagtacagggttt

SEQ ID NO: 707073 - DNA, 820 bp, Homo sapiens
catcttctctgaaaatgttaataataactgagacacatctctgtgtctatatctatacttttcataagtgaggaaagaatatgtgaaaatttggccaaaacttaaagtttttgaatgcaggaaaaggtttgttattcacagtggaacaggggaaatgtaagaagatgatacggtttggttgtttccctacccaaatctcatcctgaattgtagctcccgtaattctcacgtgttgtggcagagacctggtgggagataattgaatcgtcggggcagtttcccccatactgttctcgtcataatgaataagtctcatgaaatctgatggttttatgaggttctcattcccttttgcctgccaccatgtaagacacttggttctcattccctcttgcctgcctccatgtaagatgtgcctttcatcttccaccatgattatgagacctccctagccacttggaactgtgagtccattaaacctctttttctttataaattacccagtcttgggtgtgtctttattagcagcatgagaacagattaatacagaagtcttctgcatattgaagagaaaaagcctattgtcttctcaatgtccagatcaattgcatttattccaagtctggggtgtctcatggttcattcaaggaacactgacagtgagtcatgtgacaggccttgggaaaaaaacataattgtgttcataaatattattaagaaaagcagaggatctcaaaagtcagatttggatgaacattagttgatgcattgaarcatggattatgtcaaatatcccatggattctaagctgccttaattg

SEQ ID NO: 707074 - DNA, 1093 bp, Homo sapiens
aaacaatcctactgactatatcatcaaatcggatggcctgaggattcttcaggtagattcaggctgccttcttgttgcagtcagtcatgcttattttacattcatatcatacagtgctgccatgattggagtcctcagcaatcagttattccagtcctctttgtttatactgaaacaagtcactataaaatctcctgttcacatggataaggtacastatccagagaaagccaatcttctctagccttattgattttgtctcttagacttctccctgctggacagaaaatgtaaaataggaacgttcaaaataaataagccagggatactaagttcaattaaatagaacaaaatgctttatattttacaaacattaacttgagaagagaaatctaagttattatggtctccaaatggtaatagcccaaatttctactagcaataagatagataattatggtactatgtattcatacagcaaaataatatacagcaacaaaaagtaatgaattatagttacaggcagcaacatgggtgaatgccatgttaattcccatttgtgatagaaatcaaaataatagttacctcttgaagggaatgaccaggaaagtcataggggaggttcctgggtgccataacatttgatatctttatttaggtggtagttacagagctgtgttcactttgcaaaaattaattgaattctatagttatcatttgtgcagaattatgtatgtatattatacttcaattgtaaaagcttaccccaaaaatatctgaattattagaaattagacataaaacttacttcctctaggtcatggtctcccattatataaaacaagaaattaaactcaacattcttaaaactggaagtgatctaaggaagagtatctagttcaaacatgaaatgttttacagaaagagagaccgtggccaaagaagtaaagtgataggctataaattatgaagtttataattggtagagccaagattagtccttagatcttttagctatgttaacaaagatattctaaataaacctcttaatactattctaaaataatttgctctgaagtatacttttgtacta

SEQ ID NO: 707075 - DNA, 1093 bp, Homo sapiens
aaacaatcctactgactatatcatcaaatcggatggcctgaggattcttcaggtagattcaggctgccttcttgttgcagtcagtcatgcttattttacattcatatcatacagtgctgccatgattggagtcctcagcaatcagttattccagtcctctttgtttatactgaaacaagtcactataaaatctcctgttcacatggataaggtacagtatccagagaaagccaatctkctctagccttattgattttgtctcttagacttctccctgctggacagaaaatgtaaaataggaacgttcaaaataaataagccagggatactaagttcaattaaatagaacaaaatgctttatattttacaaacattaacttgagaagagaaatctaagttattatggtctccaaatggtaatagcccaaatttctactagcaataagatagataattatggtactatgtattcatacagcaaaataatatacagcaacaaaaagtaatgaattatagttacaggcagcaacatgggtgaatgccatgttaattcccatttgtgatagaaatcaaaataatagttacctcttgaagggaatgaccaggaaagtcataggggaggttcctgggtgccataacatttgatatctttatttaggtggtagttacagagctgtgttcactttgcaaaaattaattgaattctatagttatcatttgtgcagaattatgtatgtatattatacttcaattgtaaaagcttaccccaaaaatatctgaattattagaaattagacataaaacttacttcctctaggtcatggtctcccattatataaaacaagaaattaaactcaacattcttaaaactggaagtgatctaaggaagagtatctagttcaaacatgaaatgttttacagaaagagagaccgtggccaaagaagtaaagtgataggctataaattatgaagtttataattggtagagccaagattagtccttagatcttttagctatgttaacaaagatattctaaataaacctcttaatactattctaaaataatttgctctgaagtatacttttgtacta

SEQ ID NO: 707076 - DNA, 1093 bp, Homo sapiens
aaacaatcctactgactatatcatcaaatcggatggcctgaggattcttcaggtagattcaggctgccttcttgttgcagtcagtcatgcttattttacattcatatcatacagtgctgccatgattggagtcctcagcaatcagttattccagtcctctttgtttatactgaaacaagtcactataaaatctcctgttcacatggataaggtacagtatccagagaaagccaatcttctctagccttattgattttgtctcttagacttctccctgctggacagaaaatgtaaaataggaacgttcaaaataaataagccagggatactaagttcaattaaatagaacaaaatgctttatattttacaaacattaacttgagaagagaaatctaagttattatggtctccaaatggtaatagcccaaatttctactagcaataagatagataattatggtactatgtattcatacagcaaaataatatacagcaacaaaaagtaatgaattatagttacaggcagcaacatgggtgaatgccatgttaattcccatttgtgatagaaatcaaaataatagttacctcttgaagggaatgaccaggaaagtcataggggaggttcctgggtgccataacatttgatatctttatttaggtggtagttacagagctgtgttcactttgcaaaaattaattgaattctrtagttatcatttgtgcagaattatgtatgtatattatacttcaattgtaaaagcttaccccaaaaatatctgaattattagaaattagacataaaacttacttcctctaggtcatggtctcccattatataaaacaagaaattaaactcaacattcttaaaactggaagtgatctaaggaagagtatctagttcaaacatgaaatgttttacagaaagagagaccgtggccaaagaagtaaagtgataggctataaattatgaagtttataattggtagagccaagattagtccttagatcttttagctatgttaacaaagatattctaaataaacctcttaatactattctaaaataatttgctctgaagtatacttttgtacta

SEQ ID NO: 707077 - DNA, 1723 bp, Homo sapiens
tacgtggttaatttttgtatttttagcagagacggggtttcaccatgttggccaggctggtctcaaactcctggcctcaagtgatccacctgccttggcctcccacagtgctgggattacaggtgtgagccaccgtccccagactaaatagtatctcactgcatgggtataatatcatttatacgggtagatacatttaagagtttccaaagatcaaagatttggagtaaaatagggcaaatacataaaataattcgaagagtaattttccacaactgattttttcccagcagctaattcattttatgtctcattttatagtcacaaacccagaacctattaaaaattaaaataaaaaatataaaattgaattctagaaatacaatgattttaaaaaagatttccaaaggctttttctttttttcttttttcttgagacagggtctcactctgtcgcccaggctggagtgcagtgacacaatctcggctcacggcaagctccgcactgccccctcaggttcacgccattcttctgcctcagcctcccgagtagctgggactacaggcacgcgccaccacgcccagctaatttttatatttttagtagagacggggtttcaccatgttggccaggatggtctcggtctcttgacctagtgatccgcctgccttggtctcccaaagtgctgggattacaggcatgagccaccacgcctggccttccaaaagttttttyttaagaaaagaaagtaatgtggaagaaaaaaaaagttcttgaagatttttacatacaaagatatttttggttgattaataactaactcagattttgggagacttgatttaaaaatgtcaaaagaaaaaaacagtagtaacaaaataataaaggtggctgggcgcaatggttcacacctgcaatcccagcattttgggaggctgatgtgggaggaatgcttgtgcccaaaagtttgagaccagcctgagcaagatagtgagactctgtctctacaaaaaattaaaaattagctgggcatggtagcacgtgcctgtagtcttagctactcaggaaactgaggcaggaggatcccttgagcccaggagttcgaggctacagtgaaccatgatcgcaccactacacttgcctgggtaacagagtgaaaacctgtctcaaaaaaagaaaaaagaaaataataaagttaaaaaaatgtcaccaatgattcttaagcaaatcattattagcattttggtatatgactttccaatctttttttgttatactttctcaatatttgatcacaaaaattttcagttgtaagactgaaatgaatatttatatacccataaccaagcttgccattaactttttattacatgtgctttatcacttatttattcatccttccaaacttttacaacagagttgaaattgtactaatataaaattttatgtccttattagaataagtgcatataaataggctcaaactactacattagtctgttaaaataaaagcaatcaacccatttatactgctagcaaagacattcaacaaatcacaggaagtagtagttttttgtttgttttttaagttcaaattcaggtttgggtatagagaataataactcaataagcaaggtcaagtggtagagagatatcggataagttttttttagcattcattattcctcttgtcaatattacgttaaatttcaaagaggatct

SEQ ID NO: 707078 - DNA, 576 bp, Homo sapiens
tgaagtatgaattgcttaatgtgacctgcttctctgaatttatttacagaaaatgaaagtgatgatgaggaagaggaagaaaaagggccagtgtctcccaggtaatgttgtggaattgttggctgttaattcagtagtgacatctggagattgtagatttagggaaaatgaggaagtgatgaatagaactatttcttccattcacccagctacaaattgtgctgatttacaatgttgtatgttatttgtggcacttgtattggttttaatttcatagtcctctcaagataggaacttgccatcagatgagccaggtgaactagccaaacagggttttcttgttgatcttttcaaaaaaccagccctggattcattgattttttgaagggttttttgygtctctatctcctttagttctgctctgatcttagttacttcttgtcttctgctagcttttgaatttgtttgctttgcttctctagttattttaattgtgatgttagggtgtcaattttagatcttttctgctttctcttgtgggcatttagtgctataattttccctctacacattgct

SEQ ID NO: 707079 - DNA, 576 bp, Homo sapiens
tgaagtatgaattgcttaatgtgacctgcttctctgaatttatttacagaaaatgaaagtgatgatgaggaagaggaagaaaaagggccagtgtctcccaggtaatgttgtggaattgttggctgttaattcagtagtgacatctggagattgtagatttagggaaaatgaggaagtgatgaatagaactatttcttccattcacccagctacaaattgtgctgatttacaatgttgtatgttatttgtggcacttgtattggttttaatttcatagtcctctcaagataggaacttgccatcagatgagccaggtgaactagccaaacagggttttcttgttgatcttttcaaaaaaccagccctggattcattgattttttgaagggttttttgcgtctctatctcctttagttctgctctgatcttagttacttcttgtcttctgctagcttttgaatttgtttgctttgcttctctmgttattttaattgtgatgttagggtgtcaattttagatcttttctgctttctcttgtgggcatttagtgctataattttccctctacacattgct

SEQ ID NO: 707080 - DNA, 847 bp, Homo sapiens
tcaatagtgtcgagtttgaaaaacaattttccttcctcacctttcttaagtccataacaaattagccttaaaaacaccatacaatatagccatttcattactgtcctgctcacttagtcttctcacatgtccatccttgcaaagttgaatggagggcacatgaccctagttctcctgatttctgtggggagaggggaggaaaaaatgagaactgactctgcaggatgaccttagagttggrtctaaactcacaaactaagtgattaagttttcaaaaggaattcagagtcagtaaaacaacaggctttattttttctccctactgtatttttcacgtttgagcaggcaattttggtgaatagaaactaagacttacaggggaagctaatgagtttattcaggaagcacaatgtgaaattagtgacacagttttgaaaaattaactctctcagacaaagcttgtaaaaattgattaacaagctagtagtggctattgacaggacatgctttcacatcttttagaaaacaactttcaattattatgaaagtatatacgtatttggaattaacacacatttatgtacttaagtgttcttttttctcctaatgttccattttcagtttctgcaaatttgttcgcaattatatgatctggaaaataggactatgcagaagcaaacctgggctggtgataaagtgatctgtgtcacctggctctattagtcttttcttttcttccctttttgttattatttattggcatttcgcctgcagcaaaacataagttttaaatgtggactttatggtgtgtgtgagtcagtgtagagagggtaaagtatttcaagag

SEQ ID NO: 707081 - DNA, 847 bp, Homo sapiens
tcaatagtgtcgagtttgaaaaacaattttccttcctcacctttcttaagtccataacaaattagccttaaaaacaccatacaatatagccatttcattactgtcctgctcacttagtcttctcacatgtccatccttgcaaagttgaatggagggcacatgaccctagttctcctgatttctgtggggagaggggaggaaaaaatgagaactgactctgcaggatgaccttagagttggatctaaactcacaaactaagtgattaagttttcaaaargaattcagagtcagtaaaacaacaggctttattttttctccctactgtatttttcacgtttgagcaggcaattttggtgaatagaaactaagacttacaggggaagctaatgagtttattcaggaagcacaatgtgaaattagtgacacagttttgaaaaattaactctctcagacaaagcttgtaaaaattgattaacaagctagtagtggctattgacaggacatgctttcacatcttttagaaaacaactttcaattattatgaaagtatatacgtatttggaattaacacacatttatgtacttaagtgttcttttttctcctaatgttccattttcagtttctgcaaatttgttcgcaattatatgatctggaaaataggactatgcagaagcaaacctgggctggtgataaagtgatctgtgtcacctggctctattagtcttttcttttcttccctttttgttattatttattggcatttcgcctgcagcaaaacataagttttaaatgtggactttatggtgtgtgtgagtcagtgtagagagggtaaagtatttcaagag

SEQ ID NO: 707082 - DNA, 847 bp, Homo sapiens
tcaatagtgtcgagtttgaaaaacaattttccttcctcacctttcttaagtccataacaaattagccttaaaaacaccatacaatatagccatttcattactgtcctgctcacttagtcttctcacatgtccatccttgcaaagttgaatggagggcacatgaccctagttctcctgatttctgtggggagaggggaggaaaaaatgagaactgactctgcaggatgaccttagagttggatctaaactcacaaactaagtgattaagttttcaaaaggaattcagagtcagtaaaacaacaggctttattttttctccctactgtatttttcacgtttgagcaggcaattttggtgaatagaaactaagacttacaggggaagctaatgagtttattcaggaagsacaatgtgaaattagtgacacagttttgaaaaattaactctctcagacaaagcttgtaaaaattgattaacaagctagtagtggctattgacaggacatgctttcacatcttttagaaaacaactttcaattattatgaaagtatatacgtatttggaattaacacacatttatgtacttaagtgttcttttttctcctaatgttccattttcagtttctgcaaatttgttcgcaattatatgatctggaaaataggactatgcagaagcaaacctgggctggtgataaagtgatctgtgtcacctggctctattagtcttttcttttcttccctttttgttattatttattggcatttcgcctgcagcaaaacataagttttaaatgtggactttatggtgtgtgtgagtcagtgtagagagggtaaagtatttcaagag

SEQ ID NO: 707083 - DNA, 847 bp, Homo sapiens
tcaatagtgtcgagtttgaaaaacaattttccttcctcacctttcttaagtccataacaaattagccttaaaaacaccatacaatatagccatttcattactgtcctgctcacttagtcttctcacatgtccatccttgcaaagttgaatggagggcacatgaccctagttctcctgatttctgtggggagaggggaggaaaaaatgagaactgactctgcaggatgaccttagagttggatctaaactcacaaactaagtgattaagttttcaaaaggaattcagagtcagtaaaacaacaggctttattttttctccctactgtatttttcacgtttgagcaggcaattttggtgaatagaaactaagacttacaggggaagctaatgagtttattcaggaagcacaatgtgaaattagtgacacagttttgaaaaattaactctctcagacaaagcttgtaaaaattgattaacaagctagtagtggctattgacaggacatgctttcacatcttttagaaaacaactttcaattattatgaaagtatatacgtatttggaattaacacacatttatgtacttaagtgttcttttttctcctaatgttccattttcagtttctgcaaatttgttcgcaattatatgatctggaaaataggactatgcagaagcaaacctgggctggtgataaagtgatctgtgtcacctggctctattagtcttttcttttcttccctttttgttattatttattggcatttcgcctgcagcaaaacataagttttaaatgtkgactttatggtgtgtgtgagtcagtgtagagagggtaaagtatttcaagag

SEQ ID NO: 707084 - DNA, 1411 bp, Homo sapiens
aacgtgatcagcatggttgtgaccaacatgatcttccttgcactcccagtcctgtttatttttgtctcatatgtcttcatcattgccaccatcctgagaatcccctcagctgaggggaggaaaaaggccttctccacctgctctgcccacctcactgtcgtgatcgtcttctaygggatgatcctcttcatgtatgggaagcccaagtctaaggacccaatgggagcagacaaacaggaccttgcagacaaactcatctccattttctatggagtggtgacccccattctcaaccccatcatctacagcccgaggaacaaagatttgaaagctgctatgaggaacctggtggctcaaaaacacctaacagagtgactatcacagatccccagactgcgagaatgcataacctccaaattcctcattgttcttttggggaaatggtaaccagggaggaccttagactgtcaatagaaagaaccataaaatttctgaggctgctggttagtttgctggctttacacagaatcgtgctgtgtcatatcatagctatattttactgactaaatcttaaattctttgatacagaatttgatgaatatccataagagttatagaggtggtcaaaagagacaaacaaacaaaaattttagtggtactgggatcttggaggatacaggatatggttgggctctgtgtccctgcccaaatctcctgtcgaattgtaatccccagtgttggaggaggggcctggtaagaggtgattggatcatgggggcagatttcccccttgctgttctcatgatagtgagtcagttcccatgagatctagatgtttaaaagtgtgtagcacctcctgtttcaccctcttcctcctactccagccatgtaggacatgattgcttcccctttgccttccgccatgattgtaagtttcctgaggcctccccagccatgcttcctgtacagcatgtggaacagcgagccaattaaacctcttttctttgtaaattacccagtttcaggtatttctttatatcattgcaagaatggactaatacaatgttgttttgtcctgtgtaaaactgctacttactctactctgattttgtgttaccccagagacctttgctgtttctcatgtagggataaattggaaaatgtcatctgccccaacatataatggtgagcattagcactatggcaggaattcttctcacatcttagcactagaaatagtgagacctgagcagctgctttgttttgacctcatgggcactaagaatcttgtcattcacaacattcatctatttattgtcaccacaggagaattcagaggcaaacttgccaccccactgaagcagtaactaagtactgtatgactgggtgccagtagcttccaaacttttgt

SEQ ID NO: 707085 - DNA, 618 bp, Homo sapiens
tgtctggaattggttccttccggtgggttcttggtctcgctgacttcaagagtgaagccacagaccttcgcgtgagtgttacagctcttaaaggtggcatccagagttgtttgttcctcccagtgggttcgtggtctcgctgacttcaggagtgaagccgcagaccttcgcagtgagtgttacagctcatgaaggtagtgccgacccaaagagtgagcagcaacaagatttattgtgaagagtgaaagaacaaarcttccacagcatggaaagggactggagcaggttgccactgctggctcgggtggccagcttttattcccttatttggccccgcccacatctgctgattggtccgttttacagagtgctgattggtctatttttacagagtgctgattgctacctttacaaacctttagctagccagaaaagttctccaagtccccacctgacccagaggcccagccggcttcacctctcaatatggtgtttgtgtttgttgctataaaaattagtcatttctctcatgtcaagaacataatcccttttaggtaattgtttctagcaggaaataattccagtttcatctacaataccttttctaggaatatcaaa

SEQ ID NO: 707086 - DNA, 1165 bp, Homo sapiens
gtagtgagtccgattaagctactttctggagtgtggttttcgtctccctctgtctccgatttataaatcaggacacaattatgactcttcagtgcttctttctcttgactgcaaagaaaggaaacacaaaaagttctcatcacgtattcatgcatttgacttcttgagaaaatgaccagtgagaatttggaagtcccttctgtttaaactggagagaggatccaaaatcaggaaaagaaatactaacattcatattgagtttccaacattggaactttaaaaggaaaaaaawttttttcactttaaaactacaaaagcaaacagtaagaagcaatgtcaagattcactggtgatgaaatatgctccttattgcacaaaacaagccgtagatcaagtggccagcttggatgtaaattataaagtatctttgggtttaattggaaccgcaggttttgcagccccgtgggaagggcttatcacagaaggggtctctctgcttcccctggcctccctctgcagagggatcgctcccgaatgagtccttttccagaactcttctctacctatgccttaaaatgtgtggtgtttatttgtgaaaagaaatttatttccttacagtcttctcacgtggacagcactcccagatacctttccttgcatctgcattaacagctatgtaccgagaagttcagagtcttttcactctccttaaaatactttcctcgcaaatgaagtaatgcagcatacataattcgctttgatactagagacatatacgcatgtctatatgtacacatcacttgattgcatagagaggcagggagagggagagacatttgaatttgtgctagttccgcatggctgacaactgaggccccctggtggagattttccgaaaagcgcctcttcgagcattttctccgcttaaaaaccgtattgtgattctcatcagaaaacttaatattttgttttgtcagttcctatagtaaaatgatactcttgagttccaaagtgtttaaaattcactgctctaacaaattatacttatccacataaagagcttacattcaaacaaataaaaatgcaaatattaatactatcaaccagagctctacagatatattacagatcattcttagcattctttcaaattgccctgaaaaaa

SEQ ID NO: 707087 - DNA, 644 bp, Homo sapiens
cagttcttaaagatgtttgcaaagtctccaaccatttctagctctagggaaaggtcaaaggcacaggcatccaggaaacaggaataaatttttcataaattctccttaagcaacactaggacttcatccgtagttttctgcacagaccaagaaaggggaatttcaacccacctgcccractctcacagtagtgcatccctagattcactgaagtggcataaaactttgattgcccagaggctggactttgcagtcttgaaaaccctgcaatttttcagggcctggccaattgtcacctcttatttggagcctgtgttagcccctctatgccccattctaacaccagcctctgctgctcttctgcttcttttaaaaaaaaaaccttatttttaattcagatcgatgcattccatgtgaaataaaaatacatatttttccattttatgtagtattaatgaattacagcaaaatcttttttaaaacacaaaacgcttgttatttttcagattggagagctttgttcttcagcaaaagtaatgaagtggaactataaatttgtggagataaattatctgacaaaagtattatacaaagactaagctggtttgaggttaccaattttgttagtataattaaattgtgta

SEQ ID NO: 707088 - DNA, 644 bp, Homo sapiens
cagttcttaaagatgtttgcaaagtctccaaccatttctagctctagggaaaggtcaaaggcacaggcatccaggaaacaggaataaatttttcataaattctccttaagcaacactaggacttcatccgtagttttctgcacagaccaagaaaggggaatttcaacccacctgcccgactctcacagtagtgcatccctagattcactgaagtggcataaaactttgattgcccagaggctggactttgcagtcttgamaaccctgcaatttttcagggcctggccaattgtcacctcttatttggagcctgtgttagcccctctatgccccattctaacaccagcctctgctgctcttctgcttcttttaaaaaaaaaaccttatttttaattcagatcgatgcattccatgtgaaataaaaatacatatttttccattttatgtagtattaatgaattacagcaaaatcttttttaaaacacaaaacgcttgttatttttcagattggagagctttgttcttcagcaaaagtaatgaagtggaactataaatttgtggagataaattatctgacaaaagtattatacaaagactaagctggtttgaggttaccaattttgttagtataattaaattgtgta

SEQ ID NO: 707089 - DNA, 667 bp, Homo sapiens
gcattagccaaaccctgtctctacaaaaaataaaaaaattagctgggtgtgatggtgaatgcctgtagtcccagctactcaggaggctgagatgggaggattgcttgagcctgggaggtcaagtatgcagtgagctatgattgcaccactacactcagcctgggcaacagagtgagaccctgtctcaaaaaaacaaaaccaaaccctgatgctcaatctctttttgctatgaacttcttctacctctttcttgaattttccacttatcttctgttgcgtgacacagatattcttccttcattactttcctgaagcaaaacttccccttaatatcctcaaccccaatacccatcaacaccctcctagtgtcctygaacacccatcccatctcaccaccagcagaaagccttacaatcaggaagttttattttctgcttaacttaaatgtcatctattataaattgaattgtaaataacttgagggaagccatctatttatccatctttgtatccctccaaaagcacataggctactaaacatttgtagaacaaatgagtttcctctgaaagaacaacagtagcattttataatgacatcatacatttgtttatatagagccattttcaaagcatatgagccttgcagctgcaaatgggatctgcagaa

SEQ ID NO: 707090 - DNA, 667 bp, Homo sapiens
gcattagccaaaccctgtctctacaaaaaataaaaaaattagctgggtgtgatggtgaatgcctgtagtcccagctactcaggaggctgagatgggaggattgcttgagcctgggaggtcaagtatgcagtgagctatgattgcaccactacactcagcctgggcaacagagtgagaccctgtctcaaaaaaacaaaaccaaaccctgatgctcaatctctttttgctatgaacttcttctacctctttcttgaattttccacttatcttctgttgcgtgacacagatattcttccttcattactttcctgaagcaaaacttccccttaatatcctcaaccccaatacccatcaacaccctcctagtgtccttgaacacccatcccatctcaccaccagcagaaagccttacaatcaggaagttttattttctgcttaacttaaatgtcatctattataaattgaattgtaaataacttgagggaagccatctatttatccatctttgtatccctccaaaagcacrtaggctactaaacatttgtagaacaaatgagtttcctctgaaagaacaacagtagcattttataatgacatcatacatttgtttatatagagccattttcaaagcatatgagccttgcagctgcaaatgggatctgcagaa

SEQ ID NO: 707091 - DNA, 990 bp, Homo sapiens
cagctctgcagtcaggctccccaaaagatagcagaagggctgctcaactctttcctgaaaaatatagggctattccagttgtctctttctacttcagtgaattttggtagtttgtatgtttcaaggaaatcatcaatttcttttaattcgtcaacgttattatcagagatttgcttatagtattcctttattatccttttagcatctgtgggatccattgggatagctcttcttgtactttgtgcttggactggctggaaaattatcaattttaaagtttctacttttattgattttactctgttttcaatatcattgatttctgtctcaattatatctttccttctgcttactctaggattacttcttatctttttagtttcttaagagggaaggtttggttattgacttaagaccttcttttctaatatgtgtaattaatgctgtaagttttcctcttagcactgcattaggtgtatcttacaaattttgatatgttgtatttacattttcatttagttaaaaatatgtgtaaatccccttaagacatctgccttgacccgtgaattgcttagatacgtgttttacaatttctgattacttgggggatttcacaggtaccttccttttgttgatttctaggttatttatggtcagagaacatactttgtaagaagtaatagcgtcttattttcctattttgaatctgcattactttctattttttacatgctagtaggagttaaatattgattcttaagagcaaatgcttttcataatttggagaaaacaaaccatgggactgataattttaacttagtgcaaagttgcactctacttcctgttacgatratggttaaaagttcacctgtgttgataaaagacctgaatgtaagagctcaatctgtaaaactcttaaaggaaacatagtgaagaagcttcaagacattgaatttggcagtgatttcttggatattatactaaaaacac

SEQ ID NO: 707092 - DNA, 592 bp, Homo sapiens
ctgatgtctcccagagtccatttggagggctgtagcagcacagcgctggctggacccagcccaaaagtgctgaagggtcctcagtactctagcccacagggagtactaatccctggagtaaggacagtgcagcacaccaaagacagcctcttgtacaaagaaaactaaagcgcgtaatttctaaaacctgagagactcctgtctcaggctgtgagaagtgaccctgcccccagctgaaataaactgtgtgctcggcctagcacacagagagtatgatctcttccccccgtaagagttatcactgtgttcaggctctcacatgtagagagggaccctttgtctcaytccagacgcttctgtaggcccagccactgttgctgctcctggaggctggggcaggcgaactggagggttagctttccagggctgtgagtggtgacggcaccctcactggcagtgggatcttcagtttgtgtgtgaagggctgggtgcctccccctaacccttatgcagtgctgtggtgctcctgtcacagagagtggaagaacctgagagttgtgtgtctgggactctggctggtgaccgtgcactg

SEQ ID NO: 707093 - DNA, 651 bp, Homo sapiens
tttcattttgatttacttatagcaatgaccacttaatcaaagaacacactgaaccagattcatctaaattgaattcatataaattgaataaaatacatggtatgcctaaatttacacctaaaatcaagagatgagtattacaaatcatgaaaaaattatgcctcagtactaatctctattattgtcttgggtgtttgagattgataacttccaccttagatctatcccttttccatatgtttttgtctactcatttactatacatgtatgtaaatttacgagataaagtgacaaagactgctaacatgaaaaagagagtctaatatataaattattttgtatgcttccctccttcaatcctaacatcatgctccatctctctgcamagaaaggctttttctaaaccaacataccatgagatcatggacaggaagtatctaaccccatctaggcaacagagaaaatgaacacgtcaaaatctgtttccaaatgagtacctgaaagaccaacctcttcacactagacaagacagcactttaaacaactctgaaatttgatatttttataggcaacttattcaccaaaattagctatacgatgacgtattttaatagatttcactaagtgaaataacaggcttgacaatgaaaa

SEQ ID NO: 707094 - DNA, 643 bp, Homo sapiens
ttatatacgcccagtttggaccctgacctagtttctctgctgtgtagccaactccttgccattcttatttaggcaatgcatgcttagggaatgaaatattaatttgacaaaatagtgagttaaatcagtggtggaaactgtaattatataattcactgaaagccaaaataaataaagattccttcttgtatgagttatctgtacatctaataatgtttttgcccacaccctttcttttggaagtgaattmagcatggataactgtgagttcattatctaaccatcaggagccctgggaattcaactgatgaccatcagctgaatgccatttctcatccattttgtttctagagccctctttgggacagatgcagaagcccccattaagcagtgcccagtttgccgggtttatatcgaacgcaatgaaggctgcgctcagatgatgtgcaaaaactgcaagcatacattttgctggtactgcctccagaacttggatgtaagttccacctaggtttgttgtatggtgtttcctatactgtatctgcaccacagctgatatcctacagattttcctttaaaatattggggcaatttttgtcctgcaaaaggaatttatttttcttaatgagacttactaagcctg

SEQ ID NO: 707095 - DNA, 1234 bp, Homo sapiens
tatgtggaattaaatgaagcaagtcttatgttaagtaagtgggtagtgctctgacttctattgaagtaatttgatctattagttcataaaaaaataaaatgctgatcctgattctgcaggttgggggtygtctgcacagtaaaagcattctttgggtgtaacagattggagatttgtttgcacttttggacaaaggaattttcacagcgtctttcctcttttgcattcatttctctggctaaggacccaaggttaacattttatgacttatttttcccataaaggctgtttggttctatgatctccaagagcctttcactctacttgtgtgtagggttacatcccataatatatgctacatcttcacgttcctgagaacgaagggcgctagtgtagccctaatctgtggacgacattcgcacagacacagctctgagggtgtgtgcatatcaggcaggttaacgcttgaggagggctccctggtcctacccctactgtggggcatagactatttttagatgcaaaaggttggaaaagcagttgctcattcctgttaaagtattacatcaattttctttttaaaggaacagctaaactatattctctaatgtgtacacaatcatagaggaatttcgaatgtgagaaagttgatcatgtctgctttttaaaaaattttccattatctaggttaggttatatagatttcccccttaagacttctgctttttaaatcagcaattttaaacttcatccactgaattttttgctagagttggtggtccctggtgccatcccacatagtgttgaagagggttggggagagaggtggtgtttgatgagctgggctttatggtctataaaggggaccccatctgaatatcatgcttcccagatttgtgggaaggaacctgcaggcacaatctttttgaagcaactttgtgtgctatgacgtgccgggcagatagaagcaatgatcactattagatgtggcgctaagagaaacgctctttatcctgatggtaaaagatggcaggcatttccacggcgcaaatgaggattgtaacaagttgctgctctatacctgctcacaaaacctgttactctatacttgaccaataaatcaaacatttactgattccttattatatactaagcattgtgccaggtttttgtggaggctgaaaaaatacgagatatgctctctgcactttaggtgcttataattgagcttcag

SEQ ID NO: 707096 - DNA, 1234 bp, Homo sapiens
tatgtggaattaaatgaagcaagtcttatgttaagtaagtgggtagtgctctgacttctattgaagtaatttgatctattagttcataaaaaaataaaatgctgatcctgattctgcaggttgggggtcgtctgcacagtaaaagcattctttgggtgtaacagattggagatttgtttgcacttttggacaaaggaattttcacagcgtctttcctcttttgcattcatttctctggctaaggacccaaggttaacattttatgacttatttttcccataaaggctgtttggttctatgatctccaagagcctttcactctacttgtgtgtagggttacatcccataatatatgctacatcttcacgttcctgagaacgaagggcgctagtgtagccctaatctgtggacgacattcgcacagacacagctctgagggtgtgtgcatatcaggcaggttaacgcttgaggagggctccctggtcctacccctactgtggggcatagactatttttagatgcaaaaggttggaaaagcagttgctcattcctgttaaagtattacatcaattttctttttaaaggaacagctaaactatattctctaatgtgtacacaatcatagaggaatttcgaatgtgagaaagttgatcatgtctgctttttaaaaaattttccattatctaggttaggttatatagatttcccccttaagacttctgctttttaaatcagcaattttaaacttcatccactgaattttttgctagagttggtggtccctggtgccatcccacatagtgttgaagagggttggggagagaggtggtgtttgatgagctgggctttatggtctataaaggggaccccatctgaatatcatgcttcccagatttgtgggaaggaacctgcaggcacaatctttttgaagcaactttgtgtgctatgacgtgccgggcagatagaagcaatgatcactattagatgtggcgctaagagaaacgctctttatcctgatggtaaaagatggcaggcatttccacggcgcaaatgaggattgtaacaagttgctgctctatacctgctcacaaaacctgttactctatacttgaccaataaatcaaacatttactgattccttattatatactaagcattgtgccaggtttttgtggaggctgaaaaaatacgagatatgctytctgcactttaggtgcttataattgagcttcag

SEQ ID NO: 707097 - DNA, 594 bp, Homo sapiens
tgacaaggtgaagctcttttgtaaagctgtgtttttgtgtgtgtgtgttaatgcaccagaccattcctggcctactgtgcaaggccctgtggtgcaggtggggaggmgggtagagatagagagcgaggtacagctgagtgcagatccccagctctgagcatcactgggtgtgtgacttactcaattcatcatttagctattgagagctgatgttaggcatattctttcttttcttatgaagccttggtttattgtgggcctcagaatagaagcttcttggcctgaaaatgaagttctttggaagtgccatctgacacttctcctggtgggcagagttgctgaaactggaagcagggggtttgaggggtgctgtaactgatgtggggagaccgactggggacaaagaatgaggatagtaacaggagatgactcctcctccccaggaggccagatgcatccagaggcctcacatggctggatgtaggttacaaggtcgctctcacagtcaaggtgtgagcaaggccttggtcttcccatcagccatgctgccttataagccactcagtcaactccccatccacctccaaactgctg

SEQ ID NO: 707098 - DNA, 594 bp, Homo sapiens
tgacaaggtgaagctcttttgtaaagctgtgtttttgtgtgtgtgtgttaatgcaccagaccattcctggcctactgtgcaaggccctgtggtgcaggtggggaggcgggtagagatagagagcgaggtacagctgagtgcagatccccagctctgagcatcactgggtgtgtgacttactcaattcatcatttagctattgagagctgatgttaggcatattctttcttttcttatgaagccttggtttattgtgggcctcagaatagaagcttcttggcctgaaaatgaagttctttggaagtgccatctgacacttctcctggtgggcagagttgctgaaacyggaagcagggggtttgaggggtgctgtaactgatgtggggagaccgactggggacaaagaatgaggatagtaacaggagatgactcctcctccccaggaggccagatgcatccagaggcctcacatggctggatgtaggttacaaggtcgctctcacagtcaaggtgtgagcaaggccttggtcttcccatcagccatgctgccttataagccactcagtcaactccccatccacctccaaactgctg

SEQ ID NO: 707099 - DNA, 594 bp, Homo sapiens
tgacaaggtgaagctcttttgtaaagctgtgtttttgtgtgtgtgtgttaatgcaccagaccattcctggcctactgtgcaaggccctgtggtgcaggtggggaggcgggtagagatagagagcgaggtacagctgagtgcagatccccagctctgagcatcactgggtgtgtgacttactcaattcatcatttagctattgagagctgatgttaggcatattctttcttttcttatgaagccttggtttattgtgggcctcagaatagaagcttcttggcctgaaaatgaagttctttggaagtgccatctgacacttctcctggtgggcagagttgctgaaactggaagcagggggtttgaggggtgctgtaactgaygtggggagaccgactggggacaaagaatgaggatagtaacaggagatgactcctcctccccaggaggccagatgcatccagaggcctcacatggctggatgtaggttacaaggtcgctctcacagtcaaggtgtgagcaaggccttggtcttcccatcagccatgctgccttataagccactcagtcaactccccatccacctccaaactgctg

SEQ ID NO: 707100 - DNA, 594 bp, Homo sapiens
tgacaaggtgaagctcttttgtaaagctgtgtttttgtgtgtgtgtgttaatgcaccagaccattcctggcctactgtgcaaggccctgtggtgcaggtggggaggcgggtagagatagagagcgaggtacagctgagtgcagatccccagctctgagcatcactgggtgtgtgacttactcaattcatcatttagctattgagagctgatgttaggcatattctttcttttcttatgaagccttggtttattgtgggcctcagaatagaagcttcttggcctgaaaatgaagttctttggaagtgccatctgacacttctcctggtgggcagagttgctgaaactggaagcagggggtttgaggggtgctgtaactgatgtggggagaccgactggggacaaagaatgaggatagtaacaggagatgactcctcctccccaggaggccagatgcatccagaggcctcacrtggctggatgtaggttacaaggtcgctctcacagtcaaggtgtgagcaaggccttggtcttcccatcagccatgctgccttataagccactcagtcaactccccatccacctccaaactgctg

SEQ ID NO: 707101 - DNA, 632 bp, Homo sapiens
tttcagccttcttctgcagacaggtgggtctcttggcagacagatgagtctctttaactctgtttaatacctgaggatgcctggttctcactgtgttttcctaacgtgctttatcttgttcagtcttcagaataatgccgatgccagccagcgctagraatggaggcccgcagaggcttatggaactggcccatggtcactcagccaggacatgggagcccaagactgcagacctgaggctcctaagcaccccaatctctcatctcaacttcaggatagcctcgtgagttctgctcacgccattcccaggatcccccatcctcaaagcttcctctgtcttagtcctgcccatccttcaaagcccaacttgaaccccgtctccatgaggtcttttgttttaggctgaaatcaatttgcttatttggcacctctccctcccccccacccccgagatttgttaaggtattattgaaaaataataattatatatacttgcagtgtacagacatgatgctttgataggtgcatacgttgtgaaatgattaaatcaagctaattagcatattcatcacctcacatacttaccattttctaaattgtgagaacacttactaacttacccatacttcttg

SEQ ID NO: 707102 - DNA, 632 bp, Homo sapiens
tttcagccttcttctgcagacaggtgggtctcttggcagacagatgagtctctttaactctgtttaatacctgaggatgcctggttctcactgtgttttcctaacgtgctttatcttgttcagtcttcagaataatgccgatgccagccagcgctaggaatggaggcccgcagaggcttatggaactggcccatggtcactcagccaggacatgggagcccaagactgcagacctgaggctcctaagcaycccaatctctcatctcaacttcaggatagcctcgtgagttctgctcacgccattcccaggatcccccatcctcaaagcttcctctgtcttagtcctgcccatccttcaaagcccaacttgaaccccgtctccatgaggtcttttgttttaggctgaaatcaatttgcttatttggcacctctccctcccccccacccccgagatttgttaaggtattattgaaaaataataattatatatacttgcagtgtacagacatgatgctttgataggtgcatacgttgtgaaatgattaaatcaagctaattagcatattcatcacctcacatacttaccattttctaaattgtgagaacacttactaacttacccatacttcttg

SEQ ID NO: 707103 - DNA, 625 bp, Homo sapiens
atatcaagaagcctctgttagcctggtctggttcctgctctcccttcagggaggccgcctgtctactcaccactgtgcctttctggaaagcaggagttcaagccttagcaagcccagaggcccccagcagatgatgaggacattgtcggctcaacatctcaggccactcattaccttcgctcatgatcccagcagccatttttcttttttttttttttttttttttttttgagacggagtctcgctctgtcgcccaggccggactgcggactgcagtggcgcaatctcggctcactgcaagctccgcttcccgggttcacgccattctcctgcctcagcctcccgagtagctgggactacaggcgcccgccaccgcgcccggctaattttttgtatttttagtagagacagggtttcaccttgttagccaggatggtctcgatctcctgacctcatgatccacctgcctcggcctcccagagtgctgggattacaggcgtgagccaccrcgcccggccagccatttttcttaacaccttctgccactttctctcggtgctaatggatggaattcctgcacaagttttaactgaacaagaaatcccagcaaaaggcattttctttc

SEQ ID NO: 707104 - DNA, 955 bp, Homo sapiens
gagggagttgttaaataatttttatgtatttttaaatgcaaggcagtaatgtatatatttattttattttttatttttaccatatatttcttaagtgtaaggtgcatcttatggattatcttataacccggatctcaaatatgattctggtgatttacaaaagcaggtccaggaagcctgcatcccacttctacttttcagtgccacacctgaggtctcactctggccccaaggtttctcaggtgccactgcctggattgtctgaaagaacccagtgcacagatatctcagaagtggaaagaagataacctcctttgggccaagctaaacactgtgggcactggaaatcaatgtctaaaaccttctccctttcattccttaggtgtttgtttattatataacaaaactgttgcctgcagaagaggtctatttaatgatactccttgtaatatacatgaacttttccaaattacctttaacatacattaactttttactcttctgttattcagctctgttttccagaaacatgttatcacataaggtatcttayaaactcttctgacgggttctgcttagtgggggttagacacacaggaaaagatcagtatattcacattcacatattcttcagatgcctatgttacaatatccattatgagtaacacataaatgaatggcaagttttaatgcaaaagggtaaatgtgcaacataggtgtctgtaagacctaatataatgatattcagcagttgaatattatgacagaaaaaacagttttgtagagagaaagtaatgctctatctcaaggaattttaacttcctggaatttcagaataaaggtggggtgaagataaaagaagaaatgggaatgatgttattgtgagtggaaactacacatttccatttctttttaaagaaaacggttttgttcctaatttttggttcccataaag

SEQ ID NO: 707105 - DNA, 587 bp, Homo sapiens
tgacatgattgtatatctagaaaaccccattgtctcagcccaaaatctccttaagctgataagcaacttcagcaaagtctcaggatacaaaaatcaatgtgcaaaaatcacaagcattcttatacaccaataacagacagagagccaaatcatgagtgaactcccattcacaattgcttcaaagagaataaaatacctaggaatccaacttacaagggaagtgaaggacctcttcaaggagaactgagaagccttttataagccaatgtgttataccaggttgtcagctgacttgaaggtggactttttgtatacaaatgactcttaagctttcctagtctgtactttgctaagtctcyggaactgaaccattgcctcccaaaaagggcaggatccaagcaagtctgaagccctcctcagctcagggccttggcagaacagccaaagggaagtgggaagtggttgatgtgttttctgaggtccaaatatctaacaagaggacttacccttgttcctgattcccagttcgttcaaggcaaaaaggaataaaaaaaaagaaaattgtgaagtgtgtcctgggtaggatt

SEQ ID NO: 707106 - DNA, 537 bp, Homo sapiens
catacaagtgcatgtgtcttttttgtagaatgattaagttttctatgagtatattcccagtaatgggattgctgggtcaaatagtaattccgtttttagttctttgagaaatctccaaatagcttgccacagtggctgaactaatttacattcccaccaacgatgtataaacattcccctttcttggcagccttgacagcatttgttatcttttgttcttttaatratagacattctgactcgtgtgtaatggtatctcattgcggttttgatttgcatttctctgctgattagtgatgttgagcttttttttatatgtttattggctacttgtatgtcttctttgagaagtatatgtgacacatttttagatagtaattttaatgttcattgtttagaattttaagattttataactgattacctaggtcatgtttataagataaaaataatcaagtaataaagtattttaaataacatctgaaataaaacaaaatattaaatatgaatatgctttatataaaacaatactcatcc

SEQ ID NO: 707107 - DNA, 648 bp, Homo sapiens
  misc_feature 157, 158: n = A,T,C or G
ggtgaaatggtgtgtcccccaggaagacagatgttcatgtgtaggcccagtgaattataagcgttaaaagatatggcatgtgcctatgtgtgtacacatttagataaagcagtggaaggaggttggtaaaagtatgaaaagaaatcttcccttatgnntgtttctgtcttggagttttttgactttccaatgtccacattgtttggcttacaaatatgactgacccatgtacagagaataatggtggtacctccccaacatacacacacacacgcactatcctgtacttaaaattacttcctctgctatgtctaatcttatacagtgaacaaaactttgttgaaataggtgtagtgttgaaactgcatgacagctgacagtcaaaacagtgatactgagagaagttcatgtttctgccttaccacggcatcrtcattatgtgaaattattcagtttactctggtacatcactgttagaatggtcaatgaattctaatttgtaaaggtaacattaaaaaatgactatgaggcagttttaacaaagctgagtactagagaaataattgtgatactattcagcaaatggccttactgttttaaaataaagagctctatttttaaactgtcagagcttggtaacgtgtttca

SEQ ID NO: 707108 - DNA, 941 bp, Homo sapiens
actaaatgtataaggacatatggtcagctaatccattgatttttttttttaatttagagaaactgcagtgactctcatactgtactgtgtagggaacagtctatttctaagcagtttggatatttacaggaagtgtgatctataacgttccccagcccactacagcgtttggaagcctctgaatcagcaagttatttctttggtctaccctgggcttcttttttttgaaattcatgcccagtgagaaaaaaatcctatggtggtgtgctatgaatttaattgtaactaattttgattttaataactgtgaatactaggtcaactataatagctataactgtgatacaaaaatagtgtagagttaaaaagccaataaggaaaggggtatatgtataagaaaccaggcaggtagaaagcattgaagaagaatatcaacagacatttgctgaggaacattgctccatgaaagaaactacaccaggccctgcgcggtggctcatgcctgtaatctcagcactttgggatcctgaagtatgtggatcacttgagcccatgggtttgagaccagcctggataatagagcaagaccttgtttctacagaaaaatacaaaaaattagctggacgtggtggtgcacacatgtagtcccagatactcgagaagctgaagtgggaggatcacctgggcctgggaggttgaggctgcagtgaggcattactgtccactgcactccagcctgggtgagagttagaccctgtttcaaacaaamaaaaaaaagctacatcagggctggcagggtggcttatgcctgtaatcccagggctttgggagcaaggcaggagactcgcttgagcctaggagtttcagactagcctgggcaatatgacaagaccatgtctctacaaaaaatttaaaaaattagctgggcatggtggtgtgca

SEQ ID NO: 707109 - DNA, 1326 bp, Homo sapiens
caaaagctgtgaagtggaagcatgcctggttagggttggcaggtaacatacaaggtgcccaattaacttggaaacagcaataagttaagaggctgctggaacaatccagtcaagagatggtgggggcttggctcagagtagtagccatagagttggtgaaaagtgagcagattctgaatatattttgaaggcagagcccacaggatttgctaagaaattggacatggaatgtaaaagaaatcttaaaaatgagtgcaaggattaggcctaagcaactggaaatagaaagttattcattttatcaagacagtaaagactggctataggaggagtaaattttagggtgttatcaagagcttggttctgatcatagaaatgttgggttggtggctggatacttgggtctggaactcaagggagagaagtgttggctggtgacataaatatgggagtcattgtggttctaattatcagaaccattcctgtcttctgaaacagttacctactaccagaattatgctacataaagccaccccaaaacttagtggcttaaaacaaccaccatatgtttagcttacgattttggggatcagcaatttaggctgagtttaattagctggggagttctggtcttgagtcatttggggtaggctttctcatgcctctgctgtcagctgtcagcgcagctggctgttctaggatgaccttagctggaatgattcatccctgcttcacccagtctctcatttccagcagctagtccaggattgtgttcccagtggaggcagtgtttggagagagaggagtgctcaaggccccttgaagcctaggcctggaactgtcacatcaacacttctgtcacattctcacggtcaaagcaagtcacagggctggtggtgaaggacggggaagtagatttcccccttggtgggagcagctgcaaagccgcattgcaaaaggcagaaatacaaggagattgtttagccatcagtgcaaccagtttatcacatgtcccaaatctgaaacattttcttttctttttttttttttgagacggaatctcgctctgtcgcccaggctggagtgcagtggtgcgatctcggctcacagcaagctccgcttcctgggttcacgccattctcctgcctcagcctcccaagtagctgggactacaggcgcctgccaccacgcccggctaattttttgtatttttagtagagacagggtttcaccttgttggccaggatggtcttaatctcctaacctcgtgatccacccgcctcggcctcccaaagtgctgggrttacaggcgtgagccactgcgcc

SEQ ID NO: 707110 - DNA, 1375 bp, Homo sapiens
tcacagcaagtggttgggcttttattagaacccagatttcaaaataccaccactgcatagtactaattccacatgccttcttccaaaatggaaagaatgccttttttcttgtaagtctgccaaattgatgcagacgcttatcttttatttgttttagccgagctaaaatagaatgaaaaaaaaaaaaagaagaaaaaggatttaggaaggaacatgtctaaagtacacatcggatgctgagacatctggtatgcaaagtgagaaaaaggtatcacagtgtaagttcctgcgtgtgagtccaaaatccaactgcaccagtgtgtggattgggcagacctggtttcagcagcaagcatgaagacaagttttagctggcagaaattcaagacaagtctcctgtctgatattacccaaaagaagcaaatgtcagtttaggctgcattaaaatattattgcgttggctgggcgcagtggctcacacctgtaatcccagcactttgggaggctgagggcaaggaacatgaggtcaggatatcaagaccatcctggctaacatggtaaaaccccgtctcyactaaaaatacaaaaaattagccgggcgtggtggcaggcgcctgtagtcccagctactcaggaggctgaggcaggagaatggcgtgaacctgggagggggagcttgcagtgagcccagatcacgccactgcactccagcctgggcgacacagcgagattccgtctcaaaaaaaaaaaaaacaaaacaaaattattgcattaacatacaatgtggaaaacgaggccaagccatacctggggaactgcagggccttcacgcactgtggttaagagggacggaagtcaagggtgctgagcactggacaggcgcattagattcctttccactctggcgctttatatgttgctttagcaagagggcagtaaccacaagccagctgcctgagctgttttcctttatctcatgagctcatttccttcccatgcttcctgctacaatagtggttcctcaatccccagcagggagctgaaatcccagaagggtttttaaaatgctggatattctggctgggcacggtggctcatgcctgtaatcccagcactttgggaggctgaggcgggcagatcacttgaggccaggagttcaagaccagcctgggcaacacggcgaaaccgtgtctactaaaaatacaaaaattagccaggcgtggtggtgggcacctgtaatcccagctactcaggagactgaggcgggagaatcgctcaaacccaggaggcagaggttgtagtgagccaagattgcaccactgcactccagcctgggtgacagagtgagactctccctcaaaaaacaaacaaaaaa

SEQ ID NO: 707111 - DNA, 1152 bp, Homo sapiens
tgattctatcttacatttaagaaagctccctcttacttcatgggagtgtaagcctttgagtctacaataatcagtttgcatacaacctcttcagaaatctgttctgagccgggcgcagtggctcatgcttgtaatcccatcactttgggaggccaaggtgggcagatcacgaggtcaagagattgagaccatcctggccaacatgttgaaacctcatctctactaaaaatacaaaaattaaccgggcatggtggcatgtgcctgtagtcccagctacttgggaggctgaggcaggataagtgcttgaacygaagaggcagaggttgcagtgagccgagatcatgccactccagcctggcaacagagtgagacttcatctcaaaaaaaaaaaaaaaaaaaaaaaaaaaaaaagctcttttgacttgtccaactaaagcccccactaaaagggagagaacagctgcagctttcacctaaactcccctcagtcttcacttctgtgtgtcacctgcttctggcttatgcagtgactggaatttttggttatatttgttttggaaagtaaaatgtaaattcagccagactcttgataattccagtagttattcaacagtgatcagtgcgttttgactacagattcactggtctcaagagtcagttgcccttcctctgtgccacaattaagtccttgtctatgtctgtcacaagtggggtggaggatggggtagaaggggagggatattgttataattgcctcccttgccaccatcagcacttctcacctgtccttgtgaaccaccagtttacacttatagaatctagttttgcatcagcaattgaggtcacttcgccttggagccactgcatcaatctgaaagtctccatgagccacaagacagttgtgatggtctggatggcagcctgcaaatgagcagttacactctctagaattcctagactattagggctgaagggaccttggatattaacaggttcaagtccatttcacccagatgatgaaactgatgcccagacacctacagaatcttgttttagatcacttgttgacttctagttctattttttgacacctagtgtccagtgtgctttacacttcaggccactgtggtctcaaatagagctaggaaccag

SEQ ID NO: 707112 - DNA, 1152 bp, Homo sapiens
tgattctatcttacatttaagaaagctccctcttacttcatgggagtgtaagcctttgagtctacaataatcagtttgcatacaacctcttcagaaatctgttctgagccgggcgcagtggctcatgcttgtaatcccatcactttgggaggccaaggtgggcagatcacgaggtcaagagattgagaccatcctggccaacatgttgaaacctcatctctactaaaaatacaaaaattaaccgggcatggtggcatgtgcctgtagtcccagctacttgggaggctgaggcaggataagtgcttgaactgaagaggcagaggttgcagtgagccgagatcatgccactccagcctggcawcagagtgagacttcatctcaaaaaaaaaaaaaaaaaaaaaaaaaaaaaaagctcttttgacttgtccaactaaagcccccactaaaagggagagaacagctgcagctttcacctaaactcccctcagtcttcacttctgtgtgtcacctgcttctggcttatgcagtgactggaatttttggttatatttgttttggaaagtaaaatgtaaattcagccagactcttgataattccagtagttattcaacagtgatcagtgcgttttgactacagattcactggtctcaagagtcagttgcccttcctctgtgccacaattaagtccttgtctatgtctgtcacaagtggggtggaggatggggtagaaggggagggatattgttataattgcctcccttgccaccatcagcacttctcacctgtccttgtgaaccaccagtttacacttatagaatctagttttgcatcagcaattgaggtcacttcgccttggagccactgcatcaatctgaaagtctccatgagccacaagacagttgtgatggtctggatggcagcctgcaaatgagcagttacactctctagaattcctagactattagggctgaagggaccttggatattaacaggttcaagtccatttcacccagatgatgaaactgatgcccagacacctacagaatcttgttttagatcacttgttgacttctagttctattttttgacacctagtgtccagtgtgctttacacttcaggccactgtggtctcaaatagagctaggaaccag

SEQ ID NO: 707113 - DNA, 1152 bp, Homo sapiens
tgattctatcttacatttaagaaagctccctcttacttcatgggagtgtaagcctttgagtctacaataatcagtttgcatacaacctcttcagaaatctgttctgagccgggcgcagtggctcatgcttgtaatcccatcactttgggaggccaaggtgggcagatcacgaggtcaagagattgagaccatcctggccaacatgttgaaacctcatctctactaaaaatacaaaaattaaccgggcatggtggcatgtgcctgtagtcccagctacttgggaggctgaggcaggataagtgcttgaactgaagaggcagaggttgcagtgagccgagatcatgccactccagcctggcaacagagtgagacttcatctcaaaaaaaaaaaaaaaaaaaaaaaaaaaaaaagctcttttgacttgtccaactaaagcccccactaaaagggagagaacagctgcagctttcacctaaactcccctcagtcttcacttctgtgtgtcacctgcttctggcttatgcagtgactggaatttttggttatatttgttttggaaagtaaaatgtaaattcagccagactcttgataattccagtagttattcaacagtgatcagtgcgttttgactacagattcactggtctcaagagtcagttgcccttcctctgtgccacaattaagtccttgtctatgtctgtcacaagtggggtggaggatggggtagaaggggagggatattgttataattgcctcccttgccaccatcagcacttctcacctgtccttgtgaaccaccagtttacrcttatagaatctagttttgcatcagcaattgaggtcacttcgccttggagccactgcatcaatctgaaagtctccatgagccacaagacagttgtgatggtctggatggcagcctgcaaatgagcagttacactctctagaattcctagactattagggctgaagggaccttggatattaacaggttcaagtccatttcacccagatgatgaaactgatgcccagacacctacagaatcttgttttagatcacttgttgacttctagttctattttttgacacctagtgtccagtgtgctttacacttcaggccactgtggtctcaaatagagctaggaaccag

SEQ ID NO: 707114 - DNA, 1152 bp, Homo sapiens
tgattctatcttacatttaagaaagctccctcttacttcatgggagtgtaagcctttgagtctacaataatcagtttgcatacaacctcttcagaaatctgttctgagccgggcgcagtggctcatgcttgtaatcccatcactttgggaggccaaggtgggcagatcacgaggtcaagagattgagaccatcctggccaacatgttgaaacctcatctctactaaaaatacaaaaattaaccgggcatggtggcatgtgcctgtagtcccagctacttgggaggctgaggcaggataagtgcttgaactgaagaggcagaggttgcagtgagccgagatcatgccactccagcctggcaacagagtgagacttcatctcaaaaaaaaaaaaaaaaaaaaaaaaaaaaaaagctcttttgacttgtccaactaaagcccccactaaaagggagagaacagctgcagctttcacctaaactcccctcagtcttcacttctgtgtgtcacctgcttctggcttatgcagtgactggaatttttggttatatttgttttggaaagtaaaatgtaaattcagccagactcttgataattccagtagttattcaacagtgatcagtgcgttttgactacagattcactggtctcaagagtcagttgcccttcctctgtgccacaattaagtccttgtctatgtctgtcacaagtggggtggaggatggggtagaaggggagggatattgttataattgcctcccttgccaccatcagcacttctcacctgtccttgtgaaccaccagtttacacttatagaatctagttttgcatcagcaattgaggtcacttcgccttggagccactgcatcaatctgaaagtctccatgagccacaagacagttgtgatggtctggatggcagcctgcaaatgagcagttacactctctagaattcctagactattagggctgaagggaccttggatattaacaggttcaagtccatttcacccagatgatgaaactgatgcccagacacctacagaatcttgttttagatcacttgttgacttytagttctattttttgacacctagtgtccagtgtgctttacacttcaggccactgtggtctcaaatagagctaggaaccag

SEQ ID NO: 707115 - DNA, 1152 bp, Homo sapiens
tgattctatcttacatttaagaaagctccctcttacttcatgggagtgtaagcctttgagtctacaataatcagtttgcatacaacctcttcagaaatctgttctgagccgggcgcagtggctcatgcttgtaatcccatcactttgggaggccaaggtgggcagatcacgaggtcaagagattgagaccatcctggccaacatgttgaaacctcatctctactaaaaatacaaaaattaaccgggcatggtggcatgtgcctgtagtcccagctacttgggaggctgaggcaggataagtgcttgaactgaagaggcagaggttgcagtgagccgagatcatgccactccagcctggcaacagagtgagacttcatctcaaaaaaaaaaaaaaaaaaaaaaaaaaaaaaagctcttttgacttgtccaactaaagcccccactaaaagggagagaacagctgcagctttcacctaaactcccctcagtcttcacttctgtgtgtcacctgcttctggcttatgcagtgactggaatttttggttatatttgttttggaaagtaaaatgtaaattcagccagactcttgataattccagtagttattcaacagtgatcagtgcgttttgactacagattcactggtctcaagagtcagttgcccttcctctgtgccacaattaagtccttgtctatgtctgtcacaagtggggtggaggatggggtagaaggggagggatattgttataattgcctcccttgccaccatcagcacttctcacctgtccttgtgaaccaccagtttacacttatagaatctagttttgcatcagcaattgaggtcacttcgccttggagccactgcatcaatctgaaagtctccatgagccacaagacagttgtgatggtctggatggcagcctgcaaatgagcagttacactctctagaattcctagactattagggctgaagggaccttggatattaacaggttcaagtccatttcacccagatgatgaaactgatgcccagacacctacagaatcttgttttagatcacttgttgacttctagttctattttttgacacctagtgtccagtgtgctttacacttcaggccrctgtggtctcaaatagagctaggaaccag

SEQ ID NO: 707116 - DNA, 1085 bp, Homo sapiens
gttaagtagttgcactggtgacttttctatcacgtgatagtgtcacactcaagggatagttttaatatgctaagactttccttcccctttttatttaacatgtctattgtcttcatgccctgagccatgtcactagtagtgtgactttgagtgtaataatactgtgattttgagcaaaatataacaagaattgatmataaaattaatagtgtaactctgattgttttgcagtaaattccaggtatgtccccaacaggaaaatatataactctcttacctttgatgatttttcttacgatttcaggcattgaagaggttatagaagattaagtaagtttactgttaaataatgaaatgttctcaaaagtatagccttgtacataaaagtattattgttgattttttttcaagcagttgattaaagctggtgtaattcctttaagtctatagttgttgtgaagagtgaattcaagttttgaggttttaaattttaagttatatactctggcttatatatctgagagactaacaggacttactaggtgtcataagaactatgatagtatctttggggttctaatccaactgtaggtcaaagtcttaagcggctgaaagggatgcacacacaaattgtgctgcatcttcatttcacctttagccttgtcccaggtacagggaggtatttaatcatgttttctgtttgctctgaccctatctgctatggcttaggtcactcttgcagagtctccttcctccacactcacaatcctaatgatcattttgtaaaatcgctagctatcgttattcgcgagcttcaacccatcctgtaaagacatgacatcactaaaatcagtgttgtcctttcgatcggtttataatatgaaagaatcattaaaacttgatcagaagctttaggttaagttggggcaaaatccggaattgctcattgtgcgtttaacaaaatatggttaaacacaaataacatgtaatatgctaacacttcaagtgtataatacttactatgtaccagacacactatactctctctctctctgtgtgtgtgtatgtatatgtatatatatata

SEQ ID NO: 707117 - DNA, 268 bp, Homo sapiens
tcacatggcaaaagacagatagtagagtcagtggtatttcctgcaagccaggaccattgtatatggtatcctggctgtctatgctgaagtcaggtttatgttctcatgcacataatgtgagccatggagtgctggggccatttgtcggagacaaccttctacaatgtcacattaccaggttgtyaatagtgtacactcacctgaggtaggctgccacattaaaatgggacacaatgacaggggagaatctagatgtaaaattgaaaga

SEQ ID NO: 707118 - DNA, 628 bp, Homo sapiens
taagagtcagagatggggtatgatttggagttctcccatgaggagcattgctgatttgctgtgggtctcaggattcttcctgcaaatgtagattgtgtacacatcagagtatattacctttgactgagcaggtaatataggggcggcagttttctcggtgttttatatacaccctcatttaattcttatcaaacttctacctcagatgtgtagagtgaaactttctctctctctccttggacacctaatggcaggctgtaaaataatttctgtaggtagaaattgttgctcttcctctatctctcacaagcttctccctatgtgagcaggagtgattcatctgattkgttagatggcaagaatctgactctaaccccttggtgcgagtttccccagtgcgaggggaaaatgaataaatgttgaagctcacttgtgctctttacctggagctctcactacactgtaaggcaagctaggattatgcaagcaactagattgcagacccaattatccccacatgtaggggccaaggtttagacttgtaggaaaacagtaaaaagtctgtggcattctctaatatatctattgtgtaattaaagctaatatttggttctctgaccttagtgca

SEQ ID NO: 707119 - DNA, 999 bp, Homo sapiens
ttccttcctgaagtcacctacatcgtaagattttgggtggcaactttaactcaagaagattttgagcccatatctacaaatcttcctattatattaatgttaaacttctaagcagcaaaacaattgattctttcacatggccatattaaaaatacagaaaaagtatggccttttatcctcaacctacacggaatgcatcagtcctttattataaagaacgcagtgatactatggtcttacaaaataaaggtaaccatgtaataaatcttgaatacatgactgaatatggaccacaacgagagagatgaatctttaaggtaacttatttttgaaaaactatcaattgctgaagtagtcttcattttaataaagttacagaattatacttaacataaaaaatgcacatagcatattctgccaattacttaatctcattttaaaaaatagttctgtgtatttgacacctgtcaaaaacttagttgacagacttctttattcaatatattacatcttctaggaatctaatcaatgtgtccaatttactattcataatttgcattgcatacttatggctttattccatatttatcttccattttctcatcaccaactttcagtgttcaatagaagtataaatgggaatcatgttattactccaactatacatttgtgtatacaacaatgaatttattaattcacactaaattggaaataaaaaactaagaaaattgtgttaaatttgaaacaatcaaattgaaaagaaagatgtatktagttttactgtaaatattgtgctaataattgtgcaaatttgccacaaaatctgccctaaataagaaaaagagcctttataataataagagctgacaaatacggtttcttatcagaggcagctacataaactgtgggctcctatgcaaaatgaatatgcctagcttcttattcaaaaagcagcaaggaagtattattaaaggtatgtattaaacttattttctgggg

SEQ ID NO: 707120 - DNA, 493 bp, Homo sapiens
tcttgaatgaatgaatgaatgaagaaagagcctccagcaccgtaaaatgattaggtacctggactgtgcagtcagcagatctgggtttgaattaggattccactgcctactaggttttcaaatctggacaaatctcctaagcaawtttagcctcaattttcacatctgaaaatgggaattatatatttgagggttactataaagattaactaaaatgatgtaggtaaagtcattaacctaaatacttaataaatattagggtttttttttctttcaaaacagaatgttaggttgacccaatgtttaaggccaataatgtacttctgaaatctgtagctttcccgtttctcctccctgcacagtttaccactaggcatcatcatctaatacagatatatggctttcttccctggcactgtggcccatagcactggtttaaagaaggtggcactgcctcagtgcacccccttccccccacttattcctaggtcct

SEQ ID NO: 707121 - DNA, 1496 bp, Homo sapiens
cagctacccttgctggcacgtgtcagtgtgcagtggaaacccagaactaagcccacagtacaactggtctcttccttttgcagggtcatccaggagaagagagactcaacacaggactgggctgtctgtacacagcagtagaccaagggttggcctgagtggattctgccagtttagctcaatccagagtcaggccctggagcgctaaccgagcgtgacctgccagcccgtgagtcagtgagtgtctggyggagtgacaagccccatgtggcatttttgctgagctgacagccagcgtatgcaacctagtccagtccaccctgccccaggggaggggttgtgtgtgacactctgacctcaatttaaagataggacaaatgacacagcccctgagttggccctggctaaatattatacatcacacgtagtgacagctgctcctcctagaaaccaatttacagccaatttagtcatttggctgtaagaatgctcaaccacatgagaggatagaaaggcatctcttctaatgttttcttctgtgtgcgtctgtcatcactgcaaatattgtttagtctacttctcaagagaataggaaaatacacctgtatcttaaatcccagaaaatatgaactctaatgtaagaaacaaaaaccccaaacaaacacaaacacacacttaaatacataattctgatttggaaggcttcaagttcaagacagagctaactgtttgacaaagaattcaatttctaatccactctttccaaataggcttagttcccaaatgagacaaaatatgaatagttaagatgcctaatgcacattcaattccagttttcgtttctcctctgtatcttggccatcacctttctgggtgtgcaaagaaaccatacaccttggtttgtcgtgttagtcataggcacattttgtgttagagttcctgcatgacagtccttccgtcttgctgggtactctgatatttaaaaatgttctatgcaccttggggagaaagaaatggccctttttggagcctcacctgtgaattgcattgttctgctgcccctcaggccctctctgcatcctggtcacctcataagtgaggatgagttttcttagtcaatgcagatcatattttaaatcatttccatgcccagtaggttgtagatttctgacaaaaaagggttaggaagcaaagtgcactaaagtgttatttcctaatttagcacaatcattcctacagggttgactcatcctccgactctagagctaagagtgacaggtgtgctccttcgctgcacagtcatgtgataaattcattcatttccccacagtgaaaatccaaaacatgctctccactcccatttttcaccagtaacagttgcccacaagtatttaggccatccaaaaatctggtttggcaaccagagcagagaacagggctccaggcaggttgtttagtaagggctccaggtgctcacattcatgcctgaagacatc

SEQ ID NO: 707122 - DNA, 1496 bp, Homo sapiens
cagctacccttgctggcacgtgtcagtgtgcagtggaaacccagaactaagcccacagtacaactggtctcttccttttgcagggtcatccaggagaagagagactcaacacaggactgggctgtctgtacacagcagtagaccaagggttggcctgagtggattctgccagtttagctcaatccagagtcaggccctggagcgctaaccgagcgtgacctgccagcccgtgagtcagtgagtgtctggcggagtgacaagccccatgtggcatttttgctgagctgacagccagcgtatgcaacctagtccagtccaccctgccccaggggaggggttgtgtgtgacactctgacctcaatttaaagataggacaaatgacacagcccctgagttggccctggctaaatattatacatcacacgtagtgacagctgctcctcctagaaaccaatttacagccaatttagtcatttggctgtaagaatgctcaaccacatgagaggatagaaaggcatctcttctaatgttttcttctgtgtgcgtctgtcatcactgcaaatattgtttagtctacttctcaagagaataggaaaatacacctgtatcttaaatcccagaaaatatgaactctaatgtaagaaacaaaaaccccaaacaaacacaaacacacacttaaatacataattctgatttggaaggcttcaagttcaagacagagctaactgtttgacaaagaattcaatttctaatccactctttccaaataggcttagttcccaaatgagacaaaatatgaatagttaagatgcctaatgcacattcaattccagttttcgtttctcctctgtatcttggccatcacctttctgggtgtgcaaagaaaccatacaccttggtttgtcgtgttagtcataggcacattttgtgttagagttcctgcatgacagtccttccgtcttgctgggtactctgatatttaaaaatgttctatgcaccttggggagaaagaaatggccctttttggagcctcacctgtgaattgcattgttctgctgcccctcaggccctctctgcatcctggtcacctcataagtgaggatgagttttcttagtcaatgcagatcatattttaaatcatttccatgcccagtaggttgtagatttctgacaaaaaagggttaggaagcaaagtgcactaaagtgttatttcctaatttagcacaatcattcctacagggttgactcatcctccgactctagagctaagagtgacaggtgtgctccttcgctgcacagtcatgtgataaattcattcatttccccacagtgaaaatccaaaacatgctctccactcccatttttcaccagtaacagttgcycacaagtatttaggccatccaaaaatctggtttggcaaccagagcagagaacagggctccaggcaggttgtttagtaagggctccaggtgctcacattcatgcctgaagacatc

SEQ ID NO: 707123 - DNA, 628 bp, Homo sapiens
tcaccatatcacataatataaactcaatactaaaaaaacacccaagttacatatacccaagccaaggtctaattataggtgcagtcaaatacaaattactgttagtgttacttaccttgaagaatattcaaaagtggtaaagaaaaagtaaatgtttaaactaattacagattacaaggtatctgggccccaaaagtctctattaagtgcatcccaccataggagtgacaaaaatctgactaaaatttctgctgaaatgattttgagaaactgaggaactgaaaactattgtaagattggattttaccagtktgattaactttgctgtagttttatgacaacctttattaggtaaaaagtttatgataatatgatcaattgaaacactaaaaattgtattttttcctaaaaggtagagttccatttcatgtccaattttcccaattcagaataacaattttttttttttttttttgagacagagttttgctcttgtcacccaggctggagtgcagtggcgcaatctcggctcgctgcaaccttagcctcccagattcaagcaattctcctgcctcaacctcccgagtagctgggattacaggtgcctgccaccacaccgagctaattt

SEQ ID NO: 707124 - DNA, 576 bp, Homo sapiens
tacaaagtagatattgttattgtccagtttttttacaggtgatgaaactcaaagtaattatgtaatttgtgaaaatttacacagctctaattatagagaatcacgtgggtagtaaacttccagaagaagggacttttgcaatacaaagcagaaaataggtgatcaatacatatttgtatcttgcttaaatgtaaacatgaatgaatgagtaaatgacaggagactgcctctgtccctatactgttttcagtgagtcacaccatttttctcctaaatgagtctagaaaatttcttcagaaataaagtgacttaacctgtctttttttccataaatcatayggtgaaaatcctgaggagagaaataaagaccaaacacttacaaagtataattttctcttgggctttgttaactgagtaatttgtagagtttttggctttaaaaaaaaaaagtctgctttgcaccatagtgttcattatcaataacatcttttggttctgtttatatcttaattttttttgtaaccatttaagaatttagtattctgaaatgaggtgatggaattacagtagtccaaa

SEQ ID NO: 707125 - DNA, 1350 bp, Homo sapiens
caggtgaccaggagagctgtcaatccaaacctaacctttacctgggccacacctcttcccacacatgcagtaggccgggtgggaagtctgcagctcccagtatccgcttccaccctcccctgtgacatctccaactgaaatgcacagcaaccccaaacggaactcagcgccttagcccgaatcctcttctgagcccggccttcacgttagcgactcagcgccttagcccgaatcctcttctgggcccggccttcacgttagcgactcagcgccttagcccgaatcctcttctgrgcccggccttcacgttagcgactcagcgccttagcccgaatcctcttctgggcccggccttcacgttagcgactcagcgccttagcccgaatcctcttctgggcccggccttcacgttagcgactcagcgccttagcccgaatcctcttctgggcccggccttcacgttagcgactcagcgccttagcccgaatcctcttctgggcccggccttcacgttagcgactcagcgccttagcccgaatcctcttctgggcccggccttcacgttagcgactcagcgccttagcccgaatcctcttctgggcccggccttcacgttagcgactcagcgccttagcccgaatcctcttctgggcccggccttcacgttagcgactcagcgccttagcccgaatcctcttctgggcccggccttcacgttagcgactcagcgccttagcccgaatcctcttctgggcccggccttcacgttagcgactcagcgccttagcccgaatcctcttctgaggccagccttcacgttagtgactcagcgccttagcccgaatcctcttctgagcccggccttcatgttagcgactcagcgccttagcccgaatcctcttctgaggccggccttcatgttagcgactcagcgccttagcccgaatcctcttctgagcccggccttcatgttagtgactcagcgccttagcccgaatcctcttctgagcccggccttcatgttagtggcacccatatcctctcaaacaacttgactcaaaatcacatttttaaaaaaactgtcaccagaatagaaactgaaaattacaaacattgcagttaaccgatttatttaaaaacagttcaaacaacaaatatgctgagaatgagtctctagagaagaaaatttttctcttgatgtactgttttcactatcatcttacagaaaatgtacaacatattagaacaatctgagtaaaggactggagatggaattcaccaccaccttgccctctaaactaatagcacccatgaaccagcaccacaatggttcaacttgagctacaagaa

SEQ ID NO: 707126 - DNA, 1350 bp, Homo sapiens
caggtgaccaggagagctgtcaatccaaacctaacctttacctgggccacacctcttcccacacatgcagtaggccgggtgggaagtctgcagctcccagtatccgcttccaccctcccctgtgacatctccaactgaaatgcacagcaaccccaaacggaactcagcgccttagcccgaatcctcttctgagcccggccttcacgttagcgactcagcgccttagcccgaatcctcttctgggcccggccttcacgttagcgactcagcgccttagcccgaatcctcttctgggsccggccttcacgttagcgactcagcgccttagcccgaatcctcttctgggcccggccttcacgttagcgactcagcgccttagcccgaatcctcttctgggcccggccttcacgttagcgactcagcgccttagcccgaatcctcttctgggcccggccttcacgttagcgactcagcgccttagcccgaatcctcttctgggcccggccttcacgttagcgactcagcgccttagcccgaatcctcttctgggcccggccttcacgttagcgactcagcgccttagcccgaatcctcttctgggcccggccttcacgttagcgactcagcgccttagcccgaatcctcttctgggcccggccttcacgttagcgactcagcgccttagcccgaatcctcttctgggcccggccttcacgttagcgactcagcgccttagcccgaatcctcttctgggcccggccttcacgttagcgactcagcgccttagcccgaatcctcttctgaggccagccttcacgttagtgactcagcgccttagcccgaatcctcttctgagcccggccttcatgttagcgactcagcgccttagcccgaatcctcttctgaggccggccttcatgttagcgactcagcgccttagcccgaatcctcttctgagcccggccttcatgttagtgactcagcgccttagcccgaatcctcttctgagcccggccttcatgttagtggcacccatatcctctcaaacaacttgactcaaaatcacatttttaaaaaaactgtcaccagaatagaaactgaaaattacaaacattgcagttaaccgatttatttaaaaacagttcaaacaacaaatatgctgagaatgagtctctagagaagaaaatttttctcttgatgtactgttttcactatcatcttacagaaaatgtacaacatattagaacaatctgagtaaaggactggagatggaattcaccaccaccttgccctctaaactaatagcacccatgaaccagcaccacaatggttcaacttgagctacaagaa

SEQ ID NO: 707127 - DNA, 2128 bp, Homo sapiens
tgtaaaatgtgttcgaagggaggtgggagaaggttaagaaaccaggatggcctgcgcgtgaagggcgttgggctcccacctcctcagcatattctcgcctgtgagtgcaccggcctgcgccgctgaggtcttctcatttccaaaccctcatcaaggtccacgtgaagcttcatgtgtttccttgtcctgtggaggccccttttggaaatgagggtaaaggggctctttgtgctgcgtggggaggggtggacagcagcacggaggggagcagcctgcacagcacgccctcgggagggaacagtgcagcccttaccggtggagatgatggacgtggctgatgagctctcacagctctaggcttccttggagatgagttccaaaccctccctgtcctaagccactcttttctccacccccagcaccccaaagtgagtaaaggcccctggctttgtgcagctcagggccacttcttcttccttttacttctttctcctgcatttcccgctagactgagccttcagagaccaggcaccaggtcctcttcgttccctgtatctagtagggcttagaaagtcgggaaacgttagtgactgatgggaatgagtgactgatggaaatttccaagtagtgacctgctggtggaacctagcacaagcttggctgctcaccgcttgcaaagcctgtaacaaatgaagggaaagtgactttatttccaaagctagcagtggggaagtggctgacttgcgcttccaactttaggctgggaagaggggcttaaaaagaggcactcagaatgggaggcacatgggaggggtgcttctacaaggtctgagggtctcgttccagtggctgtcgcaagccacagcccacctggagcgggaggtgtcatcatcttgatggctggttgtagactcaccgccttcaggtgatctctggcattttgcagctggttctctatgcttggtctatctcaagatgagcccctagaacttgtaagtaagctcataattaaataccagcacacagttagataaatgtgcatggggctagggggcgcgtggtgagaaagggagaccatggtgttgcaaagaaagtacatttcaaggctatattttaagactaaggagaacaaaagttttttgcagtaagctttctgcatcgtgagactaggggaagaagagaaaaaggaaaaaaaaagttttaaaactcattttcaggctacactgtttgattacgtggggactgcccagtcctacagacgtaaagccttaagccagctcctctgagatgaaagggatattctgggcacaaaatcagtcaagaaagraagtgctgatgggattctggcttgctccagagagggtgtctgtcctgcttcgtggtgaggatttggcacctcatcaaaagaagatgaattttcgctcctcagagacaaatgagaggtcacaatggataccactgatagttgggaaggttttctgatgacgacggctcctgcagatcctggctttagagactcgggaccagacccctcgctgtcccagcctccacttccaggagcctctgggattcccaggatctcacgccttcctctgactacagataaaatcggttggaaattgcttcagctattatttttaccaagatactataccataaaattcaccttttaaagtatacaattcagtggcttttagtatattcacagttgtacagtcatcaccactaactccagaacatttgtaccactccagaaagaaccctcacgcccattagcagtcgtgtcctatccttccctctctctggcccctggcagccactcatctgtctatggacttccgtattatggacatttcatataaatggaaccacatgatttgtggttctttcactcacgtagttctcaaggttcgttcgtgttgtagtagctatcagtacttcctttctgtttattgcggagtcattgtccactgtataggtatgccgcattttgttgacccatctatcggtttatagacatgtgggttgtttccactttttggctattataaatgatgctgctcagaacatttgtatataggtttttgtgcaaacatgttttttattctcttgggtatattcctagggg

SEQ ID NO: 707128 - DNA, 589 bp, Homo sapiens
ggggctcctcacggcgtctgccccagacaggaggggcagctctagctggggccccagcactcaaaagacatccactagccacatttattagctacggagtaacatttatagaaaaaggtacttcatctagtaaaaagatgagaatttcacaaaagcacacagggcatgtggctgtaagaaggaaggtgattcccccccagccacgtattattcttcacctggtgataaagtactgggcgaaactaaggcctgatcgcctagttttgttttttaaaaaagttttcctggcacacaggcaggcctgtgcctgtctaaaactgctgttgtgttccaagggcagagtacagctgcaagaggcctgaacctgtaaagcagagaacgtttaccatctggmtctttactgaacactgccaaaccctggtattaaaaccaattatgttcttagaaaactcaactttaatcaaaacaaagttaatcaaaaattaacttcttagagcggtgtgccattaatgcattttatattcctggaaaacccaaaatattccatcacaatgacagttaaatgagaaaagttaaataagtcattctc

SEQ ID NO: 707129 - DNA, 622 bp, Homo sapiens
gccatttgagttattagaaaaaaagaaatgaatagaaacacccaagggattctgagtaaacwgtaataacctctaatggagaaactagggaagacttcatgaaagagaaggtatttggctggatattgaaagaaggtatttggctggatatggaagggagattatctcagcaaattccccaaatgtgtgatatttgtccatatctggcatgtgcaggatcaaatttgtataagaatcctggacaaaatagtagcatgctactccatgctgatagccagtagctctgtgtccagtcatatagcaaggactaatgaatatttggttgaataaaaatatttcttttatattgtacacagcagaagcaagctgggattagagaaattctgtataatgctgctatttttcatttatcttcttattccctacaatgccttacacatggtaggtgctgaaatatttgttaaacttatgactcctgggtgggaagagtgttgataatgaagcctatgttggaagtaaacatgcaagagttttcccacggctgagtgtcaggttatatgctaagtttcaaaatgtgtttgtcattgtggtgctggcagaagatatcagtcaatacaataaa

SEQ ID NO: 707130 - DNA, 880 bp, Homo sapiens
ggcagatgtggcagtggtggggccgccaacgccggtgaggctgcctcttctttcaagggtggttcttcgtccttcctgagccactcaagctttgcctctgagtcccgcagctgcagcctggacccggtgttccacgtattaaatgtcccccactgaaggctgtgcatcatcatcaggagatataaacgccatcactcactggattcttcctggcagtgctcagctccccgtgcagcgcctgctgccatccatccagtgcataccttcgccactccagggatgcttgcagtgcggcctccccttggaggctgtcctctgtgcccctcctcactctactctttaattagaatccaatattttggccaggctcgatggctcaggtccttcttatagactcactgaatattgaaatcggtaggacayacctttttgcttatttattgttctcattgagtgcttatctctggtctttcctgtccttttggagtcaccaaaatttgataacagaaactttgacttccatttctgatcccatgtgatcttcccagtaagtctaaccctaggatgtgatttgtatatctgttaccctctcacccacatactccctactaagataacctgaagcataactgagttgtccattctatgacttagcaaaatatattgttttattcctctaaataaatttctcaaggagttaattataatgcaaagccagttactcattctggcaatgtgcaaattcagaaatatacagaaaatgtacaacaacccagattaatcttaatatacacattatgtcattaaaatcaaggtagatatgaatttctataatctttatatgtaaagcttaatatctttaagaaatatttaggtaatg

SEQ ID NO: 707131 - DNA, 673 bp, Homo sapiens
tgggaagaagactctttctaaggctgctcagctttagagtacatttcttgatggtgtgagcttggtgtcctgtctcagagtcactagtttcccagcccgaaacagttgtgtctcaatgccctccatcctgccttttccacccggccaattacacaccattctaggtctgttttgtagcactccacttccaaataccaaattgtctatcagtttggattcttagtcrtaagcaacagagatggattctggttttcagcataagataaattgtattagaagaatattgtgctgcttgcagaatggccaaaaggactagagaatcagcatcagtctgagccacacggctgggaataaatcctggaaccatactgcataactggtcgggtgaggagattgtagccactgttgccaagcactgacacactgctttgtaacactatctgctgctttgggaatttgatcttgacacatgtgctactgcatctggagaggatacactaaggtccttccttgatttgttgttgctaaccagttaccaattttaaagtatgtgcaagttcagcttaagttgtttggcattttcagcttttatagagggagactggctcagtgggaagactcaaggaattccccagacataagaaggagctgaattctaagtaacccaaaagaa

SEQ ID NO: 707132 - DNA, 1599 bp, Homo sapiens
tccaagtagatcatttcctccctagtccctctgagcccaagaaggcatattttgtaagtagccttaatctgcttcattagaatattttttttaactttacaagaatgataccgccaatattaccatattacttatggtgatatgcatggcagtataatcatacattcatattatgtggcagtaagagtagtgattttagttgtgatagtaagagtaagaaaaccatagttttagagcttggagacattaaaattaatctcattttcagatacagaaacctagatccagggaagagaagtgctttgcctaaggttaatactggtgactaatgcctaactccagtgagtctgactcataacctaatatgctcccctattgcaccctttgagcattaaagtagcatgatactgacagaaagcaaggctctgcttttggtgccagaaacagacagtgatgctgctcaaggttattatatagcacactacaaaagagcagatgtgtggttaatacactctggatacatttcagttggacaagtctccattttctccctgtctgtttctacttgtccttatgccctggagtactagcagaatatttctccctaggagaccagctgtgtcttttctcaggggaaaagtgtccctaccttcacaatattctctagcttccagcaccaagtagactcttcctaagaagcagggtagtagctctatctgctaaaaatggtaactgctttggtttagggactgcgacttctcctcagatctggccgtatggaaaactgtaacactgatgaagtttattctctcatcccttctctagagcactggtttctaaccagggggactttgctctcccaccctgacaacccaagggaagtctggcaacgtctggaaatattttctgctgtcccaactgagggagcggttttggtatctcacgggtaaaggtcaagaatgcttgtgaaatatcctacagtgcacaggtcagccccccaaacaaaaatgcaatcagtcaaaatggcaacatgctaagattgaagaacttggccacagagtattctccccacctcagaacctcagaccttgcctaccattgccaacctaaagctgcttgcctaccattatttggggacttggctttcagctaccacaataagaagttaaatcatcttctctacagtctctcctattagtagaggaattctaaagcccataggagaaacaggtctcgactatacataaagttttcttgcatcataaaattcaaattatatgaacatttacaaaatggggattttttcttcttacttcaytgagttgatataaaaataataaaataagagagtaaaacaggagttacaaagggcagagagcagggtgggagtggggagatgtaagtcaaagggcattaagttgcagttatgtagcatgaataagtctagagatgtaatggatagcataagaactataatcaataatattgtattgtataatgaaaatttgccaggagagtaattttatcactaaaaaagagctatgtgatggacatattaatttgcttgataaaagtaatcattttactacatatacatat

SEQ ID NO: 707133 - DNA, 906 bp, Homo sapiens
cctttcagtattttgagcctctaactttgtaatacagttttcaaaatacagcattttgctttcagacagaagtttcataggagataaaaattcctaaatagattacctgatcaacaatttctcagcttgagtaaaatgtgtagtgggtttgagtttgtcagtgggtaaaatatatatctattaaataatttctttactcatctattaagaggtttctggctttacctgctgtgtattaacaaatattttatttttatttagatatttggggtattttttttaaggtttcagtcacttttcctgtacctgaagtggagaatgggatttgccagtgataaatggggaagttgactagctaactaataaagatttgtcttaatcaagtatgatttgtcagaacaggagtgcactggggtcagggcacgcacaatgaattatacagcattcacaggagggaaggacccggcaagagacctcataaatatgctgccattacccactgctaattcgtattcaaagagtgctctgcacagccrgtttctaggttgctgagctgttcaccagtttcctgagctttctgtttatgtgaaaaaagaagtttttattttgttttggtatcatctggattctcaaggtgtatcagtcttaaaaactgaattggtaccaataatttgaagtgtggcttatcatattacatcacaaataatatcaatctagtgcctactatgggctcatgcatcatgctggacacagtgtggaggaatcagatatataaggcacagtttctgctagaagagttttctgatgctttcttatgattctcttcaagtattgtctctgtaaattcaagtatggctacaagaggaaaacccatctgcctttttgttaaatatagtcatgcattcc

SEQ ID NO: 707134 - DNA, 604 bp, Homo sapiens
ttttacaccaagcatagaggcaatgaacgcctgtgaatgaatttaaactctctcctgagtcacatggactgcttttcaagtccacatggccttcaccattcagtcacaggactgtggaaggttcaaattggccaggatctcagagatcatctcatctgacccatgccatcaggagtaaaagggtcccaagagaggcctttatggggcctgagcctcttggtacctgccatataatgcatttcgttcttgtggggacaggagagcattaatgaattctgaacctatccctacccaaagtccctgagccctttccataaggcactgaggaacaatgaataatgcacacaaattcactgcccagagttcttttgacatggatattcccctaatcgatgaaggtaaggtcttgtgtcttttttttttttttttttgaaacrgagtcccactctgtcaccaggctggagtgcagtgatgcgatctcagctcactgcaacctccgcctcccgggttcaagcgattctcctgcctcacctcccaagtagctgggactacaggcatatgccaccacagccagctaatttttgtatctttagtagagacgggg

SEQ ID NO: 707135 - DNA, 1022 bp, Homo sapiens
caacaagggtgggatctagctgaggggtcagggttttctggagcctaaagcgcccctggtaacactgagtaggaagtccctgttgaatctgcagaaccttgacttgatggctggaggttatgtggtgatagtaataatagtgacgtgaccaagaacagccgacacttgctgagcgcttacactgcagaactcttctaagtgctttatacacattcacaatgcactccctccgacaacccaacacagtcagtagttgtagcctcattttgcagtgaggaaacagagcatatagagtttgaatatttactctaagctgcctacctagtaagtggcagttaggatttatgcccagggtactgggctcagtgttcgtgctcttagccacgccacttaatttactcggtggaagattggtcatttagggagctttaggccccagcacctcatttgttgaggatttactacaggctaggccctgaggcctggtattattagagatgaggaaaccggctcaaaaggggttcaggcattgccaaggggcagagctgggttgagaacccaggtggcttccggctttcggaccacactctgtccacggcacctactgactccctgcagccacacaggcactgcctgtgcagtgggaaacacatgctccagtgttagacagtaaatgttggcttggggcatcccccctctaccgcttccatcacttcttcaagctcagctcccgcctcatcccctagggcagggcctgagctgtgggagctggtggggagatgaggcagctcctaccaaggacacagagcctcatggggcagcctgggattcactgcctgcctggtactcaagaccccacacccacytaggtgtgcacacatctggaggatctttccaattccctcacttccaagactcctgccaattggttctgaggctaaaggccagaggagcagacatggccttgaggccctacaggtctcaataaagaactcacgccttaggaaatggggagcccctga

SEQ ID NO: 707136 - DNA, 2230 bp, Homo sapiens
  misc_feature 480, 481, 482, 483, 484, 485, 486, 487, 488, 489, 490, 491,492, 493, 494, 495, 496, 497, 498, 499, 500, 501, 502, 503,504, 505, 506, 507, 508, 509, 510, 511, 512, 513, 514, 515,516, 517, 518, 519, 520, 521, 522, 523, 524, 525, 526: n = A,T,C or G
  misc_feature 527, 528, 529, 530, 531, 532, 533, 534, 535, 536, 537, 538,539, 540, 541, 542, 543, 544, 545, 546, 547, 548, 549, 550,551, 552, 553, 554, 555, 556, 557, 558, 559, 560, 561, 562,563, 564, 565, 566, 567, 568, 569, 570, 571, 572, 573: n = A,T,C or G
  misc_feature 574, 575, 576, 577, 578, 579: n = A,T,C or G
ccattttcttgaagtcataagcaagattttctagggaagggagacggggagacaggaaggttgtctagtggcctcaagagtgagcctcatgggaggattattggccctcatgggggaagggagggggtggaggccatgcacctgccagggcaccctcagcctctgtggcagcactgggctgcccagggaggagcagggaagtcagactgggtgggattggggttttgctggcagatgtgtaacaatggatgccaggaaacgagaggaggaggaggaccaagtcgggctaggtgagaaatgaaggaaaggccacgaggaagcaggctggcctctccatcagcctccctgtgagccacacgagggatgagtgctggtctctaatcgtggagaccaattcttaaggctcaggttcccagggccaaccccaaccagttgttttccaggtgggaccaatctattacagaacagcaggttgggggnnnnnnnnnnnnnnnnnnnnnnnnnnnnnnnnnnnnnnnnnnnnnnnnnnnnnnnnnnnnnnnnnnnnnnnnnnnnnnnnnnnnnnnnnnnnnnnnnnnnattcacatcaggctcttagcatgaggtcttgcacatcatgaataataagtgtagctatgattatcattattattattatttcactacaatgtttgtttgctgttctatcctagtacctagagcagtcccaggatatccaggaccctctgtacatatttactgaatggaaatcacgccgcttaatggtcatatgctacactgtgttcctcagcttctggtattcagtgatagatgcagaacacaattcccttgcagctgtgtacccccctatggtatcttgcagataggttatgagttctctttttttttttttttyttgagacagggtcttgctctgttgcccaggctggagtgcagtggtgcagcctcagctcactgcaacatctgcctcctgggcttaagccatcctcccctactcagcctccccctgagtagctgagaccacaggcacatgccaccaaaccctgctaatttttttaattttttgtagagacagggttttgccatgttgctcaggctggtctcaaactcctgggctcaagtgatcctccctccttggcctcacaaaatgccgggattacaggcatgagccacctcgcctggcttatcagttcttttctaacagtaaagacagaattggcttaagaaatacatagtcctgctgtgaagtttcttgtttgaatcacctttctgaattgttgtatgaaaaaaggtaaatagtatatgaggaaaataaataagttatgaatattaaatcaacatgaacaaatagtaagttgtacttgttaaaattgtcataaacttctgacccctatcaaattaaatttaaataattaagtcaaatatgaatagacagggatcatatgggagagtgtagtctggatcccaaatttgtacaataaaagagaaccgctagaaaatcattttgagcaagggactgataggtgttacctgagaaataaaagccctagcccctgccttccgactgcttacattctggttgaagacatagaatgcacaaccttaaagagaatgtgccatcttagaatgcacaacccatgttggaagccggagcgctcaggcagtcaggatgggcaggagctggaatcaaggatggcaggactctgggtaaagcagagagatgtagagagggcccccaggaccggagccagcacaagccaagtgtgagatccggaaagcaaagagttccagagaagattgacctgagagatctgaaggtctgtttgggagacattttctagaaccttctcttgaaagcaacggggaggctttgaaggccactgagaaggggagggatatgtgaatttgtcctgaattctcagacatttggtttcactcttttttttttaatggagtcttgctctgtcatccaggctggaatgcagtggcatgatcttggttcactgcaccctccacctcccaggttcaggcgattcttctgtctcagcctcccaattagctgggattacaggcacccaccattccacccagctagtttttgtatttttagtagagacagggtttcatcatgttggccaggctggtctcgaactcctgtcctcaagtgatctgcccacctcagcctcccaaagtgctgggactacaggcgtgagccaccatgcccggcctg

SEQ ID NO: 707137 - DNA, 686 bp, Homo sapiens
ttggaagagttttgctgtgactaagaggatatagacagtagctgtaagttaggaaggggagttatagaatcaagtgaggtattttttaaaatggggagacttgagtatgatctgccgatggcaagagctgagcatgagagatcagagatgcaggtgagataagggaggaagttaggagaggctggtggacttttctacctctgaacttctctaatccacatcatctggcctaacctagacatgtaatccccttctctcctcccagattcaactacagccccatatccttggcagggacasctagaggggggtggtgatggggtcactgcttgtaattttggtcccaggcaagggactgctggcttctctgttctgtaggatgacactcttccctttctgagtctgatactcatcatggagtttttgtggttttagttaccaaaactcctctgtgattttgtcgatttctaggccctcaatcaatgtttgctgaacactgaatgaatggatggatcccaaggacagggttatcgtggagctcccaagcatttatcttgaatctggaaaatgcaagaaagattggcccatctgtttctgtattatatcaggatagcaataagccacagaacttaactgtagccaactcaatcatgtgtgacaacccagcagcaatgcagaatgcattg

SEQ ID NO: 707138 - DNA, 1229 bp, Homo sapiens
gcatcttcacataagcaagatggcctcagtacagtctaacatcttagacagtggatggctttccccaaagcgtgtgtactcaggtgcgtgcgcgcrcgcgcacacacacacacacacacacacacacacacacacactcccagaaactgccaggacttaaggcctaggctcagaattggcacagtgtcacatccaccacatcctattggtaaaaggagattacagggccagcccagaatcaaggtcatgggtgtacacgaggcatgaaaatcaggtagttcattgcaggccactaaagtaaccacagctaggtcttcggtataattagttttttccttcttccacaacagtttagatttgccttttccctttcatgcttatcctttattgcacatggatctttattggaagtgacttcaaatcaaaccattttatttcttctgctttttaaaaaaattagtcaagagagtaaaaaggaagtctgggaggtacgtgggcatccctctctgtgtctctggatttctgggtctcgggcccctcttcccacttttgtggctgatatgtccattgatgagcatctctccctgtctctaggaccatctttatctgttcccatctctgagcctctcatccttgtctctccgagactgttgctttgattctctctttgactctatatctttctgtctgtctctttctgttctgtgcacatttttctttgtctttatttctgctagtctctctgtttctgtatctgtctctgtctctctctccctatgactcttctgttttttctctcaatctcccaccatcactgttttagccagagatatagtccttttattggtgtaaaatgtggccttcttactagtattgtcagagaacttcatgctttgtctctggccaatactccagggccttcctgagtaagagaggctcagcctccaagagaccttgtcttgtgccaagagagtacctagggattcctttccttcctctcttctcagcatctgggccctggggtctgagaactgcctgggccccatagccttgccaagactgggaagtgcatgcctcaggctccagcggcctcccttgggaagcaggggggctggagaggaggtggtgagtggggcagggcaaggatagaatgagggaagtagagacagaactccatgtcccagcatttgaggagctgtaaaaggaagaggaatgttttggttacaggg

SEQ ID NO: 707139 - DNA, 1229 bp, Homo sapiens
gcatcttcacataagcaagatggcctcagtacagtctaacatcttagacagtggatggctttccccaaagcgtgtgtactcaggtgcgtgcgcgcgcgcrcacacacacacacacacacacacacacacacacacactcccagaaactgccaggacttaaggcctaggctcagaattggcacagtgtcacatccaccacatcctattggtaaaaggagattacagggccagcccagaatcaaggtcatgggtgtacacgaggcatgaaaatcaggtagttcattgcaggccactaaagtaaccacagctaggtcttcggtataattagttttttccttcttccacaacagtttagatttgccttttccctttcatgcttatcctttattgcacatggatctttattggaagtgacttcaaatcaaaccattttatttcttctgctttttaaaaaaattagtcaagagagtaaaaaggaagtctgggaggtacgtgggcatccctctctgtgtctctggatttctgggtctcgggcccctcttcccacttttgtggctgatatgtccattgatgagcatctctccctgtctctaggaccatctttatctgttcccatctctgagcctctcatccttgtctctccgagactgttgctttgattctctctttgactctatatctttctgtctgtctctttctgttctgtgcacatttttctttgtctttatttctgctagtctctctgtttctgtatctgtctctgtctctctctccctatgactcttctgttttttctctcaatctcccaccatcactgttttagccagagatatagtccttttattggtgtaaaatgtggccttcttactagtattgtcagagaacttcatgctttgtctctggccaatactccagggccttcctgagtaagagaggctcagcctccaagagaccttgtcttgtgccaagagagtacctagggattcctttccttcctctcttctcagcatctgggccctggggtctgagaactgcctgggccccatagccttgccaagactgggaagtgcatgcctcaggctccagcggcctcccttgggaagcaggggggctggagaggaggtggtgagtggggcagggcaaggatagaatgagggaagtagagacagaactccatgtcccagcatttgaggagctgtaaaaggaagaggaatgttttggttacaggg

SEQ ID NO: 707140 - DNA, 646 bp, Homo sapiens
ataatgtcatatgaaaaatttggatcatgtcttattaaaagttagtaacttcaggccaggtgtggtggctcatacctgtaatcccaacactttgggaggtcaaggcgggcggatgacgaggtcaggagatcgagaccatcctggctaacatggtgaaaccccgtctctactaaaaatacaaaaaattagccaggcgtcgtggcgtgtgcctgtagtcccagctactcgggaggttgaggcaggagaatggcgtaaacccagaaggcggagcttgcagtgarccgagatcgtgccactgcatgccagcctgggcgacaaagcgagactccatctcaaaaaacaaacaaacaaaaattagctgagtgtggtggtgggtgcctgtaatcccagctacttgggaggctgaggcaggagaatcgcttgaacccgggaggcaaaggttccagtgagccgagactgtaccactgcactgcagcctaggtgacaagagtgtgactctggctcaaaaaagaaaaaatttagtaactttatggtggttgcagctatatatcatggaccttgtcctgaaacttactatggcagtgtatcttacttattgaacacttattgaacaaagtaacacttccttttatttgtcaaatttagg

SEQ ID NO: 707141 - DNA, 566 bp, Homo sapiens
aacccagtatgtgcttcattaaagtatatcaaaattagttcacatggaaagcagaggctatagcaaactgactactgagtaggaatctgacacatgacccacgtctactttatcattgtcattctcagttagatgttatttgctcccaagctttataatgaggaaatatagctatgcatttaaccacttaagtgaatgctccaaagacacacagctacttagtggcaggttggcaagcctgaactgacattaaaacctatgatttagaaatctacccagggycgggtgcagtggctcacgcctgtaatcccagcactttgggaggccgaggtgtgtggatcacctgaggtcaggagtttgagaccagcctacccaacatggcaaaaccccgtctcgtctctactaaaaatacagaaattagcagggcgtggtggcatgtgcctgtagtccagctacttgggagtctgagacaggagaattgagaattgctttaacccgagaggcagaggttgcagtgagctgagatagtgcttactgcactccagcctgggtgacagagggagacg

SEQ ID NO: 707142 - DNA, 595 bp, Homo sapiens
accagtctggccaaaatggcgaaattctatctctactaaaaatacataaattagccaggtgtggtagcgcatgcctgtaagcccagctactggggaggctaaagcacgagaatcacttgaacgcaggaggtggaggttgcaatgagcagacatggcaccactgcactccagctggggcgactgagcaaggctctgtttaaataaataaataaagctgtttaatgatattggttttgctttttatttaaaaatatttactttttycctagtgtttggcaagttgacctgtaccaggtccttgacagggcagaaaaaccacaaactctaagaatggcctgaggaatctgtgttcaagagaaatcatgctgagaagtcccaaatattaaggttattttaaaaagggtggcttgataaaaacaaggatagggagctcctccagccctcctactacacagtaagaagtccttgagggatgctgacgtaccataaggtgtatagaaccaacgctaagaccttgtctaactgcctcttaaccaataacccctgtaccaccaaaaccatgctgtgcattttacagaaacaatagagtataaat

SEQ ID NO: 707143 - DNA, 1210 bp, Homo sapiens
ctgcctgtaccccctgctggstctctccccaccacagccaggggatccttttcaaatttcggtcagatcatgacgcttccctgcccaaactttcctatggcttcccatctttctcagagtaaaagccacagtcctcacagggcctcacagtccataccccacctgcccagccccaactctgaaatctcgttgacctcatccactgctctctctctcactcactctgcttcagccatgctggtctctgtggtttattcgttcagtttggtcagtaagtatttgagtgcctattctgtgctaggcaccactctcaggactagaaatataatggtgaagatataaccaaaaacatacacctatgccgtattgtaattagtctacttaaaccactgtctcccacatgacactattacgtctgttttcgtctatgtatctttgtgcctagcactatgcttggcaagtaagtgtttgagcggagaatgaaaagatggagatggatggatggatagatagatagacagatagatagatagagacagacagacagacagacttcacctttgctggaactgaggcatgtgctgtgagattctcccaggtagtatataacagcctctaacagctgcatggaaaatctggtagcagaggcccaggatttctggcttcgatcatcatttttagggagactataaaaatgaacagaagactttcttacttgaaaaacatagattccaagtctgaaacaatttaatcttcctacatgagtcaacccttggaaagaaacagactcaggtggtaaaccgcaggccatttacataccccatggtttgacttttactttaaggagaggaaagatgggttgatgagctcataaataaaagtaacatattacccataatattagaggagaatgtactagggttctttaaggctctgtttaagctagtaaattttctgcctaaagtgtgtggtataaaatcctcagatgtgaatacacagtttttccacttccacccatgtcgatttcagagatttcaaattaacagagtgtgttcctcgatcaagttcatctaaaatgcaggttgtaacttttgctgctaagagaaatgctaatatttaatgtaaatgagaaaagcagttcatccagaagatatcaaaaagatctttagtacattccttcacaaagatgattcctttccttttcggaaaa

SEQ ID NO: 707144 - DNA, 1210 bp, Homo sapiens
ctgcctgtaccccctgctgggtctctccccaccacagccaggggatccttttcaaatttcggtcagatcatgacgcttccctgcccaaactttcctatggcttcccatctttctcagagtaaaagccacagtcctcacagggcctcacagtccataccccacctgcccagccccaactctgaaatctcgttgacctcatccactgctctctctctcactcactctgcttcagccatgctggtctctgtggtttattcgttcagtttggtcagtaagtatttgagtgcctattctgtgctaggcaccactctcaggactagaaatataatggtgaagatataaccaaaaacatacacctatgccrtattgtaattagtctacttaaaccactgtctcccacatgacactattacgtctgttttcgtctatgtatctttgtgcctagcactatgcttggcaagtaagtgtttgagcggagaatgaaaagatggagatggatggatggatagatagatagacagatagatagatagagacagacagacagacagacttcacctttgctggaactgaggcatgtgctgtgagattctcccaggtagtatataacagcctctaacagctgcatggaaaatctggtagcagaggcccaggatttctggcttcgatcatcatttttagggagactataaaaatgaacagaagactttcttacttgaaaaacatagattccaagtctgaaacaatttaatcttcctacatgagtcaacccttggaaagaaacagactcaggtggtaaaccgcaggccatttacataccccatggtttgacttttactttaaggagaggaaagatgggttgatgagctcataaataaaagtaacatattacccataatattagaggagaatgtactagggttctttaaggctctgtttaagctagtaaattttctgcctaaagtgtgtggtataaaatcctcagatgtgaatacacagtttttccacttccacccatgtcgatttcagagatttcaaattaacagagtgtgttcctcgatcaagttcatctaaaatgcaggttgtaacttttgctgctaagagaaatgctaatatttaatgtaaatgagaaaagcagttcatccagaagatatcaaaaagatctttagtacattccttcacaaagatgattcctttccttttcggaaaa

SEQ ID NO: 707145 - DNA, 947 bp, Homo sapiens
tgcttctcttaatagaatactcaggccgcacctgccctcccgaaggctcttctgacagttcagctgggacttctgcctctgctgacatcctgctgctctctttttgagttctccggctgagacacacattgccctggaaaatgcttatctttgtttaaggtctaacttacgcctcaataagattataaattcatctagagcaagaatcaggtctaatcagcattatctttgcacctgcccttcagcaaacatcaaacaccaaaccgaacttagttctgcccacagcaggtggtcagttatcatttgaccagattgttactagcaaggaaaatatctgttttaagctctctgggattttttttttcttctgagttttcattcgttactatcacctcttttcccctcaacacttgtgcaaattccttcttttccctccatgctacctaaagcaggagctctttagcttttaggggcagctgaggtagagcagaaaaaacgctgaatttggaaccagaagtcatgggtttgggatctggaactctgtgacttgggaaggccttgttgttctatctatagagatgagttaacagttttccctccatggtgctgctgtgaggatgaagtgtggaataagatgtcaaagtgagttgtactctgtcatgatatgtagggaggcactagggtggttagggatgtggccttgggcaccagcttgcctgggtttggatccaactcagcattattgctgtggctgtgccacagacactctgggtctcagattcctgatccattcaatggggatgttaacaatactcacctcacaggcttgttctgagatttcaacagttaacatgtgtgtagacttayagtaagcaccatgtgaaatgacgatgatgatgcaattataaagggttattattacaggctgcagataaattccaattgta

SEQ ID NO: 707146 - DNA, 1564 bp, Homo sapiens
agaagtttacattaaagtttatacagattcattttctaacattctcctacaaatcttctactatctcataaaatcgcagagatctggaaattttctattgtatttaagayatttatacctcttaatacaaaaccaagtgaatggtaatcactgcaggctatttaccaacttgaaaaaataaaatagttcactaatactccaattaaaagcagaacggttgaacacagtttatcataggtactcagattcaggaactggtaatagtcttaccttatcttgctcaataattgcctaataataaatctagccaaagaattctgaatcacacattttattcctttcaccatcttgagaaaaaaggtaccattatagagtattctagatatttctcattagagagaaagtcccatttggtaggctatgaagaattctacattttccaaaaaaaaagactaaaatattaaataaaaattaatagtcaatgtttattgagtggttattatgtctctcactgtgctaagtgcttaatatgcataatttcatttaatgtcacccaagattattccacttttagacgagtaagctaagactcacagactttaaaaaacgtgcctacaatccccaagccagcaagtggcagagaaaagatcttaaaacctagtttttatctgcagcatagtttgttcttgtcccttagaattgcaggaaaaaaaatgtaatattttcctacttgtagataatgcaaagctttatagcattaactctgatccatacttcctatttccctcctctactaagctagaaaccaaagcgagagaaaatgcaaagaaaaataagctctgttaaaatgcctttgagctcttcatatcgccttcaaatattgactcaaatgtcattttctcagtgaggtaggcctcattctgaccactttatttaaaatttcacctatcccactcttcataccccaagctctctcactctgtcctatttttaacgtaatttgcttattgattatgttaattctttattgcctccctctccacccctaaccatgagtgctagaattgaagccctatgagggtagggatttttatccaaaacacctagaagaaatgcctgtcatatattaggtgcataacaaatatgcattgagtagataaaatgtagttttcatcactttatacacacacacacacatacacacacacaattctgaggcctcttaattctagtagtaacaggagagagtaacaatgtgaaaacgaaagattaagggggaaatgaaaatgcattattctcattttttaaggtaatatttaccttaaataataaggcaaatttaaggtaatattaagtaaatatacttcctcatttggaatttattttaagctagatctatgcatggagtagttttacacgtatgataatatataaaagcatttatttccttgaaagcttttgggtagacctactatgaaatgactgttggattcaccaacttcaatggtagataaaagtatcttatatttatacatattctgtaatagtattatttattcaattg

SEQ ID NO: 707147 - DNA, 1564 bp, Homo sapiens
agaagtttacattaaagtttatacagattcattttctaacattctcctacaaatcttctactatctcataaaatcgcagagatctggaaattttctattgtatttaagatatttatacctcttaatacaaaaccaagtgaatggtaatcactgcaggctatttaccaacttgaaaaaataaaatagttcactaatactccaattaaaagcagaacggttgaacacagtttatcataggtactcagattcaggaactggtaatagtcttaccttatcttgctcaataattgcctaataataaatctagccaaagaattctgaatcacacattttattcctttcaccatcttgagaaaaaaggtaccattatagagtattctagatatttctcattagagagaaagtcccatttggtaggctatgaagaattctacattttccaaaaaaaaagactaaaatattaaataaaaattaatagtcaatgtttattgagtggttattatgtctctcactgtgctaagtgcttaatatgcataatttcatttaatgtcacccaagattattccacttttagacgagtaagctaagactcacagactttaaaaaacgtgcctacaatccccaagccagcaagtggcagagaaaagatcttaaaacctagtttttatctgcagcatagtttgttcttgtcccttagaattgcaggaaaaaaaatgtaatattttcctacttgtagataatgcaaagctttatagcattaactctgatccatacttcctatttccctcctctactaagctagaaaccaaagcgagagaaaatgcaaagaaaaataagctctgttaaaatgcctttgagctcttcatatcgccttcaaatattgactcaaatgtcattttctcagtgaggtaggcctcattctgaccactttatttaaaatttcacctatcccactcttcataccccaagctctctcactctgtcctatttttaacgtaatttgcttattgattatgttaattctttattgcctccctctccacccctaaccatgagtgctagaattgaagccctatgagggtagggatttttatccaaaacacctagaagaaatgcctgtcatatattaggtgcataacaaatatgcattsagtagataaaatgtagttttcatcactttatacacacacacacacatacacacacacaattctgaggcctcttaattctagtagtaacaggagagagtaacaatgtgaaaacgaaagattaagggggaaatgaaaatgcattattctcattttttaaggtaatatttaccttaaataataaggcaaatttaaggtaatattaagtaaatatacttcctcatttggaatttattttaagctagatctatgcatggagtagttttacacgtatgataatatataaaagcatttatttccttgaaagcttttgggtagacctactatgaaatgactgttggattcaccaacttcaatggtagataaaagtatcttatatttatacatattctgtaatagtattatttattcaattg

SEQ ID NO: 707148 - DNA, 988 bp, Homo sapiens
atgttaaggaatagaaatacagaaacagttaagtgtcctgcccactcacacattgctataaacaaaattaagaacaagtattaaaattaatcccagctacttggaaggctgaggcaggaggatcacttgagcccagaagtttgagaacatagcgagactctgtctcacaaagaaaacaaaataaaaacccaaacattaaagttattttattttaactcatttatttgtaamctgcggtgcccacccagactagaatttgcagggcaatacatatcatacatttaatatctcagtaatcataactattaaaatgatcataataacactttgtacttacctagtaactttcatccagggttttaaagccctttctaaacattaattaattctcctaacacttctgccagatagatacgtatgattatcttcattcccctagtgaggaaacagagacatttgtgttgtgactacccccaggctgttctgtaaggctgtggcagttgtgagggtgagatcttagtgaacaaaatttccattctgtgcattattctttcattactttacattcattctaagcatgctgagttcctagacaagtgtcttaaaattgtcaatgagctgtgaaataattttaagaatatatgaaaatcccaaatgaaactaataaaaataggaccacaggactaggatagaatgtgaacatttccctgacattcatttctaaagctttgttcatgaaatgtcacaacaaacaagactaaagtctataatcaatttgtacttgccatgccccttctctaagtttttataattatgccacctcactgtttttactttcagtaattgttcaacttctttgtggagtttcacatagaaaagtttaactctctggctgattcaattttttttttaaagtgggatattgcagatgaaaattgaaaatatctgcattcattcttcttgtacatatgatgctgaaaactttaaa

SEQ ID NO: 707149 - DNA, 988 bp, Homo sapiens
atgttaaggaatagaaatacagaaacagttaagtgtcctgcccactcacacattgctataaacaaaattaagaacaagtattaaaattaatcccagctacttggaaggctgaggcaggaggatcacttgagcccagaagtttgagaacatagcgagactctgtctcacaaagaaaacaaaataaaaacccaaacattaaagttattttattttaactcatttatttgtaaactgcggtgcccacccagactagaatttgcagggcaatacatatcatacatttaatatctcagtaatcataactattaaaatgatcataataacactttgtacttacctagtaactttcatccagggttttaaagccctttctaaacattaattaattctcctaacacttctgccagatagatacgtatgattatcttcattcccctagtgaggaaacagagacatttgtgttgtgactacccccaggctgttctgtaaggctgtggcagttgtgagggtgagatcttagtgaacaaaattyccattctgtgcattattctttcattactttacattcattctaagcatgctgagttcctagacaagtgtcttaaaattgtcaatgagctgtgaaataattttaagaatatatgaaaatcccaaatgaaactaataaaaataggaccacaggactaggatagaatgtgaacatttccctgacattcatttctaaagctttgttcatgaaatgtcacaacaaacaagactaaagtctataatcaatttgtacttgccatgccccttctctaagtttttataattatgccacctcactgtttttactttcagtaattgttcaacttctttgtggagtttcacatagaaaagtttaactctctggctgattcaattttttttttaaagtgggatattgcagatgaaaattgaaaatatctgcattcattcttcttgtacatatgatgctgaaaactttaaa

SEQ ID NO: 707150 - DNA, 619 bp, Homo sapiens
aaatccacctgtgtcactgcacttcactcttagaaaagagcagtttggcaactgtaccaaacatgtcatttagcttctcaattatgttacttgcttggtgtattttcctgaaaatctatgactctctctgtagccaatattattggaagatagctcttggtttggttgttacagctgttttaaggggcaatttgaatcactgtagagtcagcataattgcttgtaagaaatgtacaagcattccagaaaacagaaaaatcctgctacagattatctgaaggttgccatggaccactgcctctgcggggattcgtgtgtatctcctgcagccagatgtctgtgttttcacaatgtcatggaagaggaagtggcgatggctgaatcaggtgggrcgcagccctaagtattcacaatccaccacacattttgatggttcacagggactttgtgaatcaaacgtgatttgaaaaacatttgtaaagctgaattagagccctcaaattttatttttctaggaaaggacaaataattaaacaacatctttggagtttgctgtgacttctgtacatctaacaagctgtactttcacagaagctttctggaggttgcacagttatta

SEQ ID NO: 707151 - DNA, 619 bp, Homo sapiens
aaatccacctgtgtcactgcacttcactcttagaaaagagcagtttggcaactgtaccaaacatgtcatttagcttctcaattatgttacttgcttggtgtattttcctgaaaatctatgactctctctgtagccaatattattggaagatagctcttggtttggttgttacagctgttttaaggggcaatttgaatcactgtagagtcagcataattgcttgtaagaaatgtacaagcattccagaaaacagaaaaatcctgctacagattatctgaaggttgccatggaccactgcctctgcggggattcgtgtgtatctcctgcagccagatgtctgtgttttcacaatgtcatggaagaggaagtggcgatggctgaatcaggtggggmgcagccctaagtattcacaatccaccacacattttgatggttcacagggactttgtgaatcaaacgtgatttgaaaaacatttgtaaagctgaattagagccctcaaattttatttttctaggaaaggacaaataattaaacaacatctttggagtttgctgtgacttctgtacatctaacaagctgtactttcacagaagctttctggaggttgcacagttatta

SEQ ID NO: 707152 - DNA, 620 bp, Homo sapiens
gcaggccctgggcagcctgcccaaagtctccctgtctctggctgccaccactgtttcgcctatgcagctctacccctaagactgaaattttatccattgttgatgcaggctccttctgggggtctgaccagtaacagatcaatgttggaactgcgtatggccattttttgtttttccatgtggatcagataagctgaggtagtcactgcaaagacagaaaaatcaaggagctatgcagagcgaggaagagatgggagaattctgctcatgtttcataccctcrtcttatcctgaggttcagccgctttcctctggatttttgtttaagttagcacaaacatgtttctgacactttcaaccagaaggtcctaattaacaaaggaacatgaggaaggacctacctaaaagacgacacacagcatattttcctttgctgctcatcagtcatacagtcataagactgatgtttcttaccgaactccagagcttattaagtcttggggagaaatctgagtataacacaagaattgagtaagtagttagaaattattccatgagtctttctaacataatgagactagttttctgtatcacttggagaaatacttttgttgccttaa

SEQ ID NO: 707153 - DNA, 589 bp, Homo sapiens
tgaagaaagtgtgtcatgacatatatactaagggaagaaaggaatttagaggaaattatagttcttagtttgcttgtcacctcttctaattaacgaatataaaagaattcatagaagatgtggaatttcaggaaatgtataatttcacacatcactgtatatcattgtgcctggctgccacaggatttgtatgcaaataatatactagcttttcttttttctttttttctttttgagatggagtctcactctgttgcccaggctggagtgcagtggtgcratctcggctcactgcaacctctgcctcccgggttcaagtgatttttctgcctcagcctgccgagtagctgggactgcaggcgcgcaccaccactcctgggtaattttagtatttttagtagagacggggtttcaccatgttggccaggctggtcttgaactcctgacctcgtgatctgcctgcctcggcctccccaaagtgctaggattacaggcgggagccaccatgcctggccaactagcttttttttaaaaaaaaacatgatggccatccatggttttctctgggtattatgtcaactactttgat

SEQ ID NO: 707154 - DNA, 717 bp, Homo sapiens
cttttttaagttctcttttattttgagacatggcaaaaatcttgtatccctgtgagtccgtggctttatgatcaataagggctactgattgaacctaccctgtaaattcaaatgtgtaaagtcaaacacatttactttctgtgtacatcccttcccgtttcttcttgacttcctttccagatcaaattctctatgatatcttcttaactggacttgggaaagtttcatgatatactcctcactgagctggctcaagggagctgggctactctatttacaactctaagaagcaataaacataaaaagtatgtgaaagttctccccaccctttcattctttggagctgttatgattcaagagggctctaacaattggttttcccatcaggcaggaggccagtggggccagagaagttcagtatggatttacttggaaacaggttttggggaacccctttatcacgcctacttggggggagttggctctcacatttttcatggaaatatataaacttggaactgtccctggttactggagcaaattcacagcttccaaataaataaaaatgtattcaatcttgaktaccaggtggcataccttaagtgtttggaaagttctcaagagttggccatatatattacattttagggttgaggatagaatttagaggcaagtccatctctgagcatgctagggtttagctcttagggcttgggc

SEQ ID NO: 707155 - DNA, 649 bp, Homo sapiens
tgatggcctcagtttgtttgtgttaatctctccctttgctctatcactttgtagttcccctccataaagaggcagagtatatattaacccatctcttgcctttggactttcatgtggcttgctttggcccatgggatggtagtggtcatgatgtaagtagaagctttaaaaawtgctgttgtgtttccactagttcttttggacccctgacattaccatgaaaatgtgccagtccagcctgccagagagatgtgagagacatgtggaagagaactgagtcatcccagccaaggccatcctagaccatccagctcctgtcagcaggacacagccccattaacagagccacccagctgacccataggcttgtcaacagaaataaatgtttgctgttgcaagccaccaaagttttctgattgttacacagcagtaactactccattcaccacatttgcttaaagtgttggtgcctgggggtgacccccaacttctgcaactaaaatggtgaataaattcctgtaacttgagcctcactgattttatagttagtagcctggagagtttgttcgaaatctccatcctaggcagactgccctttaattgttcccaaaatacaatctgcacatccctgactctgcctctgcctctg

SEQ ID NO: 707156 - DNA, 1401 bp, Homo sapiens
gggtgaaattgacctgcagattatctagccctagtatagtgagcaggatggtgatagagaggcaaccaggcatgcgccagacccagccagaacctcaggccccaccagctgtgaaggaccactgaataaagccatacttgtgaggcggtgtacagtaccatgcactgcactgtgcagtgcgagcaatccctttgtataaagtatagtaaccctttgtgatatgtgtggtagttacgttttcccagtttgctttttgtcttacaattttgcttatggtattttcatcatatggtagtgtaaacttttaaaaattactaaattctttatttctcagcttcagagttttatcccaggcttagaaaagccttcttcactttaggactacaagaatattcatatctgttttttttcctagaacatttacaattttgttttttacttttacatttttttccatcttgaaagttcgtgtaaaagaatgaggtagacattcggctttatgtttttccagagctggaccatgtaaagatgtgaactcataatccctaaggagcctttgacacagctggaataagagttagatgtactgagattggggtgcagtctcctctgcacattagagcgctaaattgaagacgttcagatgcgagatggttctgtgactctaagacatacagttcagggctaggaaggttacagagaaagtagaggagttgagacttgaagttgtccttgaatgaccttgacaattttgatggaggaaaggacaaggaagtgttgaggcagaacagcttcagcagaagtgtggatgtaggaataagcagagtgatcagccagtgtgagcttggcattgctgttgtcttttaagaccttggtatgtatcaggctttgctctgattgtattttgtcttcatcatgaccgtatgaggtatggactatatcattttgccattttacagaacaggaaactgccacagggggcagtcaattaaggtgtctgatgtttcagaactaattaggtggtagggctggratttgaaccaagggagaatagttctggagcctgagagaactgtagccttgctaaagtgaatgcacttggcagtgtgatgttgagttggacattacctttaggaaaatgggaggatttgtgttttggtgaagaagtcaggattgaagaggtctggcttcttctagctggtcccttcatcgttattgcctataacctctgtcctggaaaacaattaataaacatactgcagaaattaatgcttttcttatagtggaattgatatttgctttctctgcgaaaatatatttccactgcattctttgttgatttacaatataataaaacgtaacaaacaaacttattatcctaaaatcagaaaagctcatcca

SEQ ID NO: 707157 - DNA, 1280 bp, Homo sapiens
gtgtgtgtgtaagtgtgtgtaagactgaggagagacatgagtcaagactgatgactaatagatccacagagagcaataacaccctattagctaagtgtttccttcctgaactttctaggcaactttgaattcagaggtaactgcagaatgaagattccaagtggagcctgaaatgtgtaataggatcagttgacaggagactgatcaggagataggagcttggagattgggttggctggcagtgaccagaaaagcaaaagccacttgtttccsaactgagaactgctagagacatggaaagttgaggagagtagttaacaaggagggtaagaaacagatacagggccatttgtagctaagttcactctaaagggataaagaaaacatacttgtgacatcttttaggtaacacctatttgtatgcaggccatacaaaccaagatcacgttcatgcagtgtggaaaatcacaagtgaagccatcggtcaactgcatcgctcacttgagtcatgtcctggtgagacggttgtggcagaagatcccgccgggctgaaggtgagccagggaagactcctggtgtagtcctctatgacagtgctccagcagccccatgaaactgctggcagagagactttctgagatacctttcctacagacagatgcttaaatggcttcccttgcagcatcctctccttttatgcttaacagtgcaaacaataacaacaaaaccccttttttaaaaagtcataaagttacttatttctgtagcagtaaaggatccatttgttgagttggtaggtgccacaagaatgtgaaggaattgttgcttgtaatgaactagttggggtgaaaatacatatacaatgtaaataaaacaattagcaaaggctttaaggcagaaataaggggtgccttgtaatatactataaagtacaaaagggattcagaataaaggaaacatcactctaggtcagtgattatttgttgtctgcctactttgtgccttaaaggttgaaagcctttagatagcagagaggaaaggaataaaacgctgcaattagagggagtggtgactagtgggaagataaagagattggtattcagaagtggtgatcagctgtcatcagtacctgagccagcagtagcaggtgatgttactgagtaggagcctggcattgatgaaggattagatctgaataactcaagagatagtatggaatcgctgtagcatttaagcagggatgactgatgaagattagtttttcttaacagagtacaaga

SEQ ID NO: 707158 - DNA, 1670 bp, Homo sapiens
ttttgctctgtgaagtggtaaacaatcaaaacatcatcaacaagtaacaaggtttgctcccttgactcccagctgctcctgtccttttttgtctgttcaggccctggatccaatggaactgaagggtgaaggtcttgtcctttccctggaagaacagctcagtgctttgaccttgtcagaactccgtgactcagagccatcttccactgtttcccttaacggcaccttcttcaagatggagctttttgaaggcatgcgagagagcaccaaggtactttttgtctcctctgtagtagtcgagagacttcgattcctcacacattttcctgtgtgacagcacttcatttgtccaagtgggaacagccatttgccagcagagctagagccgttaaattctagctgatcagattctccctccagtcttaaagcttcatttatttcacagataacactaaagccttactacataggggactttgagagagtaatttgggacaaccccagcattgcactgaagtgggttttctgtcatgggtcactggggagcttgccaggtttgtgctagggacggggcctatgcaagtgagcaatttgtttagagaaagcttaaaaggaaaacaaaggcttgactctagagactgtgtcatacatgcgagcgccaattgctctgactttgaaaggcttccacatgtgagtagtgtttcctacatagccttctgtcttcattagtcattctgctctgttttcgtcagagctttttaaggcagaaacattctgctggaggaaggcttagatatgccgtaacctgaatcctgcctgtctgctggctcggaatgtgcttcatcatcctgcctgtcttgaaagtgaggcttgtttctctcttagcatctcaagctgccgttcttgggctcaacctctcttcaaaggctttttttgaaaaagtgtattaataactagaaaggtcacttccaggggaatggcattattttttaaaaggaatgctgccttttaattaaaatttgaaaacatttacctaggtctttaccactgatagctgagagaaacataagaagagcatcccatgtggccagaacacacatgctagtgccttcagagtgagctattgggctaaaatttaaattcctaatcatttgtgttccttgtttaattaaatgcaggtaatatttattcacaagttttcttaacatatgtccattaatagttcaaaccacatacggttrtttcaagtagggaaggaggcttcttactggaatttgaccccggctcgtgggccataaatccagccctcctgctgcagttttctcaaaacaccatggctagctttttcatgtgggagtcacagcgccttccacaatctcaagttgccaagacaccaggcacatcagtgtctctgttctattgttaactaaataacagatgtacctgcttttctgtctgctaatttgaatggtacagttctgtgactcacttcctgcctaggcaccagaatgtttgttaagattggaaagcagccccatgtggtgaccactgtaatgacatcctagaatgtgggagctcagggcacctcagaatttatctggcctaagtccttcttttcactgatgaggaatctgagtcccaaagtggtccagccatatgaggacagagga

SEQ ID NO: 707159 - DNA, 1428 bp, Homo sapiens
aaaaaaaaaaaaggaactgttaataaatgcagcaacttgcttgatcacaagagaattaagctgagtgaagaaagccaatctcaaaaggttacatactatatgatttcattaatataacattcttgaagaaacagaatagtggagatgaagactatattagtggttgccagtggtgagagatgagggaaaacggtgactggctatcaaagggtaaggatcctcatgatggaactgttctgtatcttgactgaggtggtggtcacatgagtctgattaaattgcatagaactaagcaaacaagtacatgtaaaggtggtgaaatcctaataaagtcaattgttaattttttttccatgaaacctgtacaacaaattttcttattttaatgttaattttctgattgtgatacagatatgcaaaatgttatggggaaaactaaagtatacaggatctctgttatttcttagaactgcatataaatctaaaattgccttaaaattaaaaaaaaaaattttcaaagttgcaaagctctaaattgtgcactaaggaaaagatttgggagaccatagtcaatatgacagagttttctactgtcctggaatgtaaaaattgagcccatatgaaagggcttgtaacaggcctttgggggatttttttttaaccaatacccagcctttctatacccatagccaatattgtatataatatattatgagtttatatttttttctgggttgctaatcagtagcttccatcaaattctcagagggacccatgattccaaaaaaaataaagaacctattggctttgtgctcttgcttgaaacaataagtaatttgataaataaaacaaatgaagttgttttgcaatagtaagcttatgggacttctgattccaaaagatgataccaacagaaaagttgagaattataaatttggggatgataaagtcatgtgagttgtttaagggaagttgagggtgttaaccatacttttttgtatttgtttttttttgaaacaggttctcactatgtcactcaggctggagtgcagtaacgcaatcttggctcactgcaacctctgcttcccgggttcaagcgattcttgtgcctcagcctctcaagtaactgggattacaggcgcatgacaccacacctggctaatttttgacaggcaggcggcaccacgcctggctaagttttgtatttttagtagagacaaggtttcactgtgttggccaggctggtcttgaacttctgacctcaggttatctgcctgcctcrgcctcccaaagtgctgggattataggcgtgaggcaccacacccagcggcacatttcttttttttttttttttaaggagatggagtcttgctctgtcacccaggctggagactggagtgcagtggcatgatctcggctcactacaac

SEQ ID NO: 707160 - DNA, 627 bp, Homo sapiens
ctaggaaatagccaaattatgaacttagtgctatctggcaacagaatccacattattattattattattttttgagaacttaaggacagcaattctcaaggaattagcttaatactgaattatttggccgggtgcagtggctcacatctataatcccatgactttgggaggccggggcgggtagatcatctgaggtcaggagtttgagaccagcctggccaacatagtgaatgaaaccccatctctactaaaaatacaaaaattagcatggcgtggtggcgctggcctgtattcccagctacctgggaggccgagacacgagagccrcttgaacctggaaggtggagtttgcagtaagctgaaatggcaccactgcactccagcctgggcaacaaagtgagactctgtctcaaaaaaaaaattataataatactaataaataataataatagcaaattatttcttgctcatactctgtggaaagaaggctctgtaaccaacttaatatggggaatgctgcatacagcatatccctgtcttgaagacccacaatttcattttcatgtcttagaaggttctgaaaaatcttggagtaaagagatttaactccttcatttaaccaaggtc

SEQ ID NO: 707161 - DNA, 2654 bp, Homo sapiens
  misc_feature 2160, 2161, 2162, 2163, 2164, 2165, 2166, 2167, 2168, 2169,2170, 2171, 2172, 2173, 2174, 2175, 2176, 2177, 2178, 2179,2180, 2181, 2182, 2183, 2184, 2185, 2186, 2187, 2188, 2189,2190, 2191, 2192, 2193, 2194, 2195, 2196, 2197, 2198: n = A,T,C or G
  misc_feature 2199, 2200, 2201, 2202, 2203, 2204, 2205, 2206, 2207, 2208,2209, 2210, 2211, 2212, 2213, 2214, 2215, 2216, 2217, 2218,2219, 2220, 2221, 2222, 2223, 2224, 2225, 2226, 2227, 2228,2229, 2230, 2231, 2232, 2233, 2234, 2235, 2236, 2237: n = A,T,C or G
  misc_feature 2238, 2239, 2240, 2241, 2242, 2243, 2244, 2245, 2246, 2247,2248, 2249, 2250, 2251, 2252, 2253, 2254, 2255, 2256, 2257,2258, 2259: n = A,T,C or G
tcaggataatttcttaccagcttaattaagcaactttcagatgggttaaattgtggcctgagcatgaaaattgcattaagattgggtacctaattaacctctgtgggtttcctctaattctcagctgtggcatgtgcctttctgtgcaagaaaaaaaccatactcctctagagaatggaatctttgcaaatgtggccaaactctgactcaaagctttaggacaggtcactgtgagctcaaaaaataattgcccaacgattaaaatagaaaaaaagttgaagaccccagacatttcaaatgtgctaaaagtccaccagaaaatatggcaggaaaagaggccatatgagacagctgagttatcaaaggaaaaatggtcaaagacaaatttttcccacttctcagggagaaaaaaaatccatccatttgcatttttcagattttttttccttagaagggaaaaatgttgcagcttcttattgttaaacttgtaacacactgggatttaattctgatagtctacttgtcactatttttttcttatttgtatactaaaatatttcccctgctaactctccccaaataaattctatactatacaacatataagtatatatttttaaaacacagtgtgaattaaaatttactttgaggattttatgatgtcttctaggataagtaaaagcatcctttggtttagaaggactgtttcatctactatgtcatctgagatccataaaccagtaacttgacaaagaaatctcttaagaatgtaaggcatttatgaaagcatttttcttgtaaatgaaattatttataaagaggctgctgaaataacagaattacctgcaaattattttattttgttttgcccacattctttttggatgcatttagagggtcctaagtaagcaggacattatcttagttcctttgatgggaaaataaatgttcttaaagctgcttccaattggtctaatctgacatcatctaaatgaaattgaaccaatcagtatcttgtttgacctgcccgcaccagaggccactacattcaatacagctgaatgctgattaaaattctggtctggaaaaactaaacaaaatagtggggttgattaaaaatgcctttatgaaatagcaaggtctttgaaagcctgagagccattaaaataagttgttttaaccatcgcctatagcttttctcagttacagccattttgaaaaattcataaaggcataactctgccttgaaatgatgagtaacatctggccaaataagggattcaattttggtacaataaaatgcataaataataaaattttatcaattatttttgaaatcatgactattaagacaatccaaaactagcattctctttttttgttgttgttgagatggagtcttgctgtattgcccaggctggagtgcagtggcagatctcagatcactgcaacctctgcctctcgggttcaagggattatcgtacctcagcctcccgagtagctgggattatatgcttgcagcaccacacccggctattctttgtattttaagtagagatgggttttcgccatgttggccaggctggtcttgaactcctggcctcaactggtctgcccacctgggcctcccaaagtgctgagactacagatgtaagccagtgtgcccggaccaaaactagcattctcttttccagtaagttttcaggtccacagggattggggatgttaagagtgcaacatattttaaagcacgaagaaaaagaaaaaggccacttgatccataattacttaaaaagtgaagccacttccaggaatctttcaggaatatataatacttagaattcatcaagttacaaatggctagcagtggtatgaaaattatcaagcaacacctgtcttgatagctgtctgtattaatagcttctttattttatttttawcatattgtcttctttattaggagctatcacattttatcacatttcaaaatagcctttgttgagagtagcaacatattatgttttttttttttttttttttttgcagtggaaagagtatgttttggaaccacaccattcctaattccagtgtttccaagcaaattatttaattcatatcaaaagtcttagaacctttatgaaatgatgtccttggtgatcnnnnnnnnnnnnnnnnnnnnnnnnnnnnnnnnnnnnnnnnnnnnnnnnnnnnnnnnnnnnnnnnnnnnnnnnnnnnnnnnnnnnnnnnnnnnnnnnnnnncaaattaaatattctatgcatgcatagaaataatacttgatttcctgttaacaataataacattagtaataataataatagctataatttataagaatttgccaggcactttaattcccataactagcccatgaaataggtattgttatctcacaaatgtggaaacttagatttataagtattaaacagtttaattattcaaaatcaagacagctggttaagcagaaagattgtataaatcaaagcaaggtgtgaatgacaaaaattcacggttttattcactatattatctgcctctactttttgtagaaaggcttataatgtagaatttaatctagctgtatgaaaacaaaattttgttacttttacttgttcaatgtcctgttcttagtgcc

SEQ ID NO: 707162 - DNA, 648 bp, Homo sapiens
tactcttgtagccttcttgactttgtgcatatctgttttatttagacgttgtttaacttatactctggtgtccaccttatgcttacatgtaatactagtacacctctcctccttatcaagaagtgtaaatacaaaggcccttcttgggatcagatctaagatgctgcattttgactccacagtacagtaactgatatgtcaacattccactgtgataaacaagaggtgaagatgtaggttttcaagaataatctcttgttagatcaacttttgttatctgacagcccatctggtctttggcctggctgaaatatttaaatctttaatatgcttttaaagaattattgcctaatatttcctttaatttgtaaacctcagcattcttcaagtactgtatgagtcttacaaaaacagaaacactacaactaaaaaaaaagatacaaaataaatcactgatttaatcktatttttgcaattgtcatttttggatgatagccaagaatagatttttttttggtggcacttatgaatgcaaagtacaactccttccattgttatcagaacaaagatcacttactttgaatggctcaaggtatgtaaacacagctggtccaatagcttgagtggcaatgaaatacagtgccacgg

SEQ ID NO: 707163 - DNA, 536 bp, Homo sapiens
aatgactttgctcttctctgataaaggggttgtgtttgcacaaaaacgatattagcttaatcatggtaaaattggtttttgctttcgacaaggccagaattgttaaaggtagaaaagtctgtgtggaataaattatgcaattaagttcctcttaacatgactgaaaagaacccaatttatacctccagaatggaataggcagactctggaaataaatccctgagccacaagatgctgttctatttttgcaagatgcacagatagctggagctctgtggggctgcctgtgagacactcatttgaaggctctcttctcactgtctgaagasggggcagagaaaaagcaccaagcctttcaaaatgactgctctctcctttccctagggcttttcccctggaacaccacttgtgctgatttttggggaaaacttaaagcagcttaactggcatgtcccgcagctgctcaggtaaagccctaggcagacatgaagccaaccatcattagcagtcgggatctgaagaaggccttctgcaaa

SEQ ID NO: 707164 - DNA, 1348 bp, Homo sapiens
ttaaaatagaactgccattcgacccagtaatcccattactgggtatatacccaaaggaaaataaatcactctactaaaaagacatgcatttgcatgttcatcgcagcactatcacaatagcaatgatgtgcaatcaacccaggttcccatcaacagtggaatggataaaagaaaacatggtacatatacaccatggaatgctgcacagtcagagaaaagaacaaaatcatgtcctctgtggcaacatggatggagctgcaggccattatcctaagcgaattaatgcagaaacagaaaatcaaatattgtgtgttctcacttataaatgggaamtaaacagtgggtactcatggacagaaagatgagaataacagatactggggacacaggaggaaggagagagggagggaggccagggtagaaaaactacctattgggtactatgctcactacctgggtgacaggttcaattgcaccccaaacctcagcattacacatcaaactgcaaggattttaaaaagtgagtgcaatagtataggccaggtgtagacaagaagtaccctatatactactgcagggattcaagggaaccagcccctagcaatatttgtcaatgccttttatatatagcatatctttgccagtaattccttaaaagaataatctgaaatatatgcagagatgtatatgtagataacttctatagctactgttgtgtataatagtaaaatattgggaaaagcatgcaactccagcaatagaggacaggctaagaaaaattgtggtatatccatcagcttttagagtcacagatgaatgacatgatgacataggaaaatgttcaagggaaattgtgaagttaaaataaggaggaggatgggttgcaagccagcatgtttgctgtagcttcaacttttgtacaccactaaataacgaaagctctgattaagggcatagaaaaacactgaggggatctacatcactttatgaacagccatagcctctggatggtgacataataagagtttttcactttgcactatttggttttttttttcatttttcttcatcaaatatattaattttataataatttttaatacgcacatagattaaatgtgaataaattaaatgaccacatagagttattagctaaagccagttaaatttcaaaaatgatgccttgcattttagggcactgcctctgtggcccttttagttggcagtacttgaacaccaggacgagttatttttttgagatcactctttgttcgtgccaggaaaatcctgctttctgtgtttaagaaaatgcctcgccatctatccacccccgtaggagggcatgaat

SEQ ID NO: 707165 - DNA, 1348 bp, Homo sapiens
ttaaaatagaactgccattcgacccagtaatcccattactgggtatatacccaaaggaaaataaatcactctactaaaaagacatgcatttgcatgttcatcgcagcactatcacaatagcaatgatgtgcaatcaacccaggttcccatcaacagtggaatggataaaagaaaacatggtacatatacaccatggaatgctgcacagtcagagaaaagaacaaaatcatgtcctctgtggcaacatggatggagctgcaggccattatcctaagcgaattaatgcagaaacagaaaatcaaatattgtgtgttctcacttataaatgggaactaaacagtgggtactcatggacagaaagatgagaataacagatactggggacacaggaggaaggagagagggagggaggccagggtagaaaaactacctattgggtactatgctcactacctgggtgacaggttcaattgcaccccaaacctcagcattacacatcaaactgcaaggattttaaaaagtgagtgcaatagtataggccaggtgtagacaagaagtaccctatatactactgcagggattcaagggaaccagcccctagcaatatttgtcaatgccttttatatatagcatatctttgccagtaattccttaaaagaataatctgaaatatatgcagagatgtatatgtagataacttctatagctactgttgtgtataatagtaaaatattgggaaaagcatgcaastccagcaatagaggacaggctaagaaaaattgtggtatatccatcagcttttagagtcacagatgaatgacatgatgacataggaaaatgttcaagggaaattgtgaagttaaaataaggaggaggatgggttgcaagccagcatgtttgctgtagcttcaacttttgtacaccactaaataacgaaagctctgattaagggcatagaaaaacactgaggggatctacatcactttatgaacagccatagcctctggatggtgacataataagagtttttcactttgcactatttggttttttttttcatttttcttcatcaaatatattaattttataataatttttaatacgcacatagattaaatgtgaataaattaaatgaccacatagagttattagctaaagccagttaaatttcaaaaatgatgccttgcattttagggcactgcctctgtggcccttttagttggcagtacttgaacaccaggacgagttatttttttgagatcactctttgttcgtgccaggaaaatcctgctttctgtgtttaagaaaatgcctcgccatctatccacccccgtaggagggcatgaat

SEQ ID NO: 707166 - DNA, 1348 bp, Homo sapiens
ttaaaatagaactgccattcgacccagtaatcccattactgggtatatacccaaaggaaaataaatcactctactaaaaagacatgcatttgcatgttcatcgcagcactatcacaatagcaatgatgtgcaatcaacccaggttcccatcaacagtggaatggataaaagaaaacatggtacatatacaccatggaatgctgcacagtcagagaaaagaacaaaatcatgtcctctgtggcaacatggatggagctgcaggccattatcctaagcgaattaatgcagaaacagaaaatcaaatattgtgtgttctcacttataaatgggaactaaacagtgggtactcatggacagaaagatgagaataacagatactggggacacaggaggaaggagagagggagggaggccagggtagaaaaactacctattgggtactatgctcactacctgggtgacaggttcaattgcaccccaaacctcagcattacacatcaaactgcaaggattttaaaaagtgagtgcaatagtataggccaggtgtagacaagaagtaccctatatactactgcagggattcaagggaaccagcccctagcaatatttgtcaatgccttttatatatagcatatctttgccagtaattccttaaaagaataatctgaaatatatgcagagatgtatatgtagataacttctatagctactgttgtgtataatagtaaaatattgggaaaagcatgcaactccagcaatagaggacaggctaagaaaaattgtggtatatccatcagcttttagagtcrcagatgaatgacatgatgacataggaaaatgttcaagggaaattgtgaagttaaaataaggaggaggatgggttgcaagccagcatgtttgctgtagcttcaacttttgtacaccactaaataacgaaagctctgattaagggcatagaaaaacactgaggggatctacatcactttatgaacagccatagcctctggatggtgacataataagagtttttcactttgcactatttggttttttttttcatttttcttcatcaaatatattaattttataataatttttaatacgcacatagattaaatgtgaataaattaaatgaccacatagagttattagctaaagccagttaaatttcaaaaatgatgccttgcattttagggcactgcctctgtggcccttttagttggcagtacttgaacaccaggacgagttatttttttgagatcactctttgttcgtgccaggaaaatcctgctttctgtgtttaagaaaatgcctcgccatctatccacccccgtaggagggcatgaat

SEQ ID NO: 707167 - DNA, 1348 bp, Homo sapiens
ttaaaatagaactgccattcgacccagtaatcccattactgggtatatacccaaaggaaaataaatcactctactaaaaagacatgcatttgcatgttcatcgcagcactatcacaatagcaatgatgtgcaatcaacccaggttcccatcaacagtggaatggataaaagaaaacatggtacatatacaccatggaatgctgcacagtcagagaaaagaacaaaatcatgtcctctgtggcaacatggatggagctgcaggccattatcctaagcgaattaatgcagaaacagaaaatcaaatattgtgtgttctcacttataaatgggaactaaacagtgggtactcatggacagaaagatgagaataacagatactggggacacaggaggaaggagagagggagggaggccagggtagaaaaactacctattgggtactatgctcactacctgggtgacaggttcaattgcaccccaaacctcagcattacacatcaaactgcaaggattttaaaaagtgagtgcaatagtataggccaggtgtagacaagaagtaccctatatactactgcagggattcaagggaaccagcccctagcaatatttgtcaatgccttttatatatagcatatctttgccagtaattccttaaaagaataatctgaaatatatgcagagatgtatatgtagataacttctatagctactgttgtgtataatagtaaaatattgggaaaagcatgcaactccagcaatagaggacaggctaagaaaaattgtggtatatccatcagcttttagagtcacagatgaatgacatgatgacataggaaaatgttcaagggaaattgtgaagttaaaataaggaggaggatgggttgcaagccagcatgtttgctgtagcttcaacttttgtacaccactaaataacgaaagctctgrttaagggcatagaaaaacactgaggggatctacatcactttatgaacagccatagcctctggatggtgacataataagagtttttcactttgcactatttggttttttttttcatttttcttcatcaaatatattaattttataataatttttaatacgcacatagattaaatgtgaataaattaaatgaccacatagagttattagctaaagccagttaaatttcaaaaatgatgccttgcattttagggcactgcctctgtggcccttttagttggcagtacttgaacaccaggacgagttatttttttgagatcactctttgttcgtgccaggaaaatcctgctttctgtgtttaagaaaatgcctcgccatctatccacccccgtaggagggcatgaat

SEQ ID NO: 707168 - DNA, 1348 bp, Homo sapiens
ttaaaatagaactgccattcgacccagtaatcccattactgggtatatacccaaaggaaaataaatcactctactaaaaagacatgcatttgcatgttcatcgcagcactatcacaatagcaatgatgtgcaatcaacccaggttcccatcaacagtggaatggataaaagaaaacatggtacatatacaccatggaatgctgcacagtcagagaaaagaacaaaatcatgtcctctgtggcaacatggatggagctgcaggccattatcctaagcgaattaatgcagaaacagaaaatcaaatattgtgtgttctcacttataaatgggaactaaacagtgggtactcatggacagaaagatgagaataacagatactggggacacaggaggaaggagagagggagggaggccagggtagaaaaactacctattgggtactatgctcactacctgggtgacaggttcaattgcaccccaaacctcagcattacacatcaaactgcaaggattttaaaaagtgagtgcaatagtataggccaggtgtagacaagaagtaccctatatactactgcagggattcaagggaaccagcccctagcaatatttgtcaatgccttttatatatagcatatctttgccagtaattccttaaaagaataatctgaaatatatgcagagatgtatatgtagataacttctatagctactgttgtgtataatagtaaaatattgggaaaagcatgcaactccagcaatagaggacaggctaagaaaaattgtggtatatccatcagcttttagagtcacagatgaatgacatgatgacataggaaaatgttcaagggaaattgtgaagttaaaataaggaggaggatgggttgcaagccagcatgtttgctgtagcttcaacttttgtacaccactaaataacgaaagctctgattaagggcmtagaaaaacactgaggggatctacatcactttatgaacagccatagcctctggatggtgacataataagagtttttcactttgcactatttggttttttttttcatttttcttcatcaaatatattaattttataataatttttaatacgcacatagattaaatgtgaataaattaaatgaccacatagagttattagctaaagccagttaaatttcaaaaatgatgccttgcattttagggcactgcctctgtggcccttttagttggcagtacttgaacaccaggacgagttatttttttgagatcactctttgttcgtgccaggaaaatcctgctttctgtgtttaagaaaatgcctcgccatctatccacccccgtaggagggcatgaat

SEQ ID NO: 707169 - DNA, 584 bp, Homo sapiens
tgccctattgcgaagggctttgaagggcatgcggaacagcttggactttatttaatctttgcagtggcaagcagctcaatacacagatttttagctgaggcaacaccagcgcaggtctgcgtttggcgagctccgtaagttcccacgccccaaacttctctctagcacataactctctaatatgactaacgttattagtgctaactctctaacctgtcaatgtcgtatcccagatccctcgtttgcctctaaaacactggcgtyttcgtcaccgctgtcccccaggtgagcgccccagcacctgccgccctgggcgcctcctccacctgcgcgccccacgcccgcttccggccggcttccaggcctcagaggcgatcccgaggaatcgttccgctcccaaggggcggagctttctcatcgccgcgctcggcattcggcttatgctgcctcgccccggcggccgtccagcgggaggcggagcgagtccaaaatggcggctctcaggctggcgcgctccgtgctgctggggctttgaggtggtcgccgggggtccgggggaccctttccccgccgcggaagcccta

SEQ ID NO: 707170 - DNA, 898 bp, Homo sapiens
ttgtggtagtgacaaatatatgaagttcaaatttcagggtccataaataaagtttaattggcatacatccaggttcattagtttacttcttgtgtaaggcttctttcctgctacaatggcacagttgagtagttgcaacagacaatgggctgcaaagtctaaaatatttattatttaatcctttatggaaagagtttgccacctcctggtggaggtggttagctaatatggcaaagatcttggtgatatggcaaagatccagtgaactcgtcactgaaactctgggagattgtcatcatttatttccacccagtttataggtgaggaggaaactaaggctcagcgaggttcagtggcttccccaaggtcacacagctagtcagcagcaagcagggatttgaaatcaagttagatttgaaaggggcaggaggatacacagggctaaaaataacatatgctttactgagctttctttccacaactcacacccgctccgttctgcatgtcccccacacwcttcccactatctctcttttttatttttattttttatttttattttttaagagatgatatctctctatgttgtccaggctggatttgaagtcctaggctcaagagatgctgccgcctcatcctctcgagtagctgggactgcagcccttcctcttctgccctcactctatgggaggaagccgtggattcatcatcatttcctaataatgtggctcgtctcctcaagctcaggacaggcccctggggagggaactgtgtcttatacaaagttcacacactttagcaggacaggagaggtcctctgcggcttgagcctggtctccagcctcacctcacctctcccttgcttatgtttgatgctccagcgatcctgaattgtaac

SEQ ID NO: 707171 - DNA, 814 bp, Homo sapiens
gaaagtaactccagacctgggcggggcgggaggtaggaggaataaggagaaaaggaggcataagtggaaaggccaggggcctgtcatctcagcagctccgagacttgtcatgtttgaaagtgcaaatgtcaatggattttaaccatcttgaggttgtgatcttttaaaaagctcaatgaatgaggaagtcaattccttcaaatgcaaaatagctggctttctggctggaggtttgttgggtctggggtatttcttccccatctacctcctctcccacccccaccccattccccaaagaaaggtacaaaaggttgcagttctgcagcattaccgttacagggaaggcactggttacccaccagcgggcggaaggaagacagggtcgtgtcacttcaaagctaagtgccatagtgccttaagtattactaggggctggatgtctgtcagggaggagaagtaaggtggggcagaaaatgtggacagagaggaataagggtaaggtggsgggtggcagctgggggaggagcaaccaaaaccattaaaaaatcttcctacaaactggattctgaacccattaaaacatctagtatcctaaaatattgatctgggtctggtttcatttttcttcttaaacaaatctagtccttttctgattaaggctcctaaaaaatccttccctcctcccacccactttctcaagcccctcactttcccatctaaagtatcaaacccaaacctaaccagcttttgtctgcagggctacagagttgaccttaccaagctgtcaagcatgagtctttagcactgtgagtca

SEQ ID NO: 707172 - DNA, 592 bp, Homo sapiens
gatgatgatgatgatgataagaaaatagcctggcatatagtaggtactccatataagccatgctgccctcttctgtggctagccctaatcctaaacatctatcccctccccgcagtaagcacattttctttttccttctcacctcttttctggccatttgggtgctctgagcaagccagacagaggcttggctggatgcrgaaagaccaaatgtggtgttgcaggtgaagccactctttgggaatgaatgactaagctagcagaagctctagacaagttattgaaagatcatttcatctgcctaatttggaatatatattctgggtctctgcttacctatcaactaatcaagaattaaaatgcctcaaaagttccaagggagtgtaaaagcttttttttttggtgcccagtttttcctcagagtaaaatttgcagctgggaaagtttaatccacagtatgacagcagtgtttttttcctttcatttttgtttttttgctcagacaataaaaagccttattccctttcaattcagggtttcactcgttgttcttgaaaattcccttcagtttagctctcaagatggccttgct

SEQ ID NO: 707173 - DNA, 627 bp, Homo sapiens
taaagttggatagagaaacagacacatgtgatgaagcaaatatacccaaatatacttggatatggggcccactgtacaattctttcaactttttgatatgtttgaaacttttcaaaatataatgtttggtacaatgcagatacccctagaaatgactacacttttgaaaacattattccttttgcaatataaatgggtgttttccttcccttctcccacttcttttctactcctagcattggtctttttaaaattttggtctagggagccttcttgattaaaaagggcctggaatagttagaaagaatgaataagacctagtacttgatagcacaacaaggtgactagagtcaataataatttaattgtacatgttaaaataactgaaagagtataattggattgtttgtaacacaaaggataaatgcttgaggggatggatactccatattccatgatgtgattattatacattgcatgcctgtatcaacatttctcatrtacctcataaatatatacacctactatgtacccacaaaaattaaaaataaaaaaattttaaaaagggccggagtgagggtggttggtgattggctattcctttatgccaaagacttcatattcttc

SEQ ID NO: 707174 - DNA, 716 bp, Homo sapiens
taaacagtcatgggatttttgaaaataccatcaggttaaggcttgakgtttttaacatcttcaattagacctaaaatgtatgaatgtgaattgtggacatgcctttagtaagaagccaaaaaataatttaaagggaaaaaaaatcctctaaaacctacccctcccttctcacctcccacattcatgagggaggacaggggagagctagctactgaagactgtccatggttaattacaaaaaaaaaaatctttgagacaaagaagaattaaacatggtaggaaatgcatctagtcatattgaattgccttgaaactgccttctagaaaattctgattcttcagttttattccaatctctccacaacttgaaacgagcttcttgctaggaatagtagtattacattaaaaatataaacaattattagaaatatatagtcttagaaaccattaaatttgttccttaagcaggtttattacttttctgcatacttgcatgaaaatttgtcttctacccatttgacataaaatagccaggatcagatttattcatcttatcaataccattattttgtactgtcaggtatttagaatattatctgggttgcaggtatagtttttcaaaaagctgactttcccttcccccatcaaccaacacaccaatgttgagcaattatttcattggttgaaaaataagcttagtcttatatcaaaggctc

SEQ ID NO: 707175 - DNA, 716 bp, Homo sapiens
taaacagtcatgggatttttgaaaataccatcaggttaaggcttgaggtttttaacatcttcaattagacctaaaatgtatgaatgtgaattgtggacatgcctttagtaagaagccaaaaaataatttaaagggaaaaaaaatcctctaaaacctacccctcccttctcacctcccacattcatgagggaggacaggggagagctagctactgaagactgtccatggttaattacaaaaaaaaaaatctttgagacaaagaagaattaaacatgrtaggaaatgcatctagtcatattgaattgccttgaaactgccttctagaaaattctgattcttcagttttattccaatctctccacaacttgaaacgagcttcttgctaggaatagtagtattacattaaaaatataaacaattattagaaatatatagtcttagaaaccattaaatttgttccttaagcaggtttattacttttctgcatacttgcatgaaaatttgtcttctacccatttgacataaaatagccaggatcagatttattcatcttatcaataccattattttgtactgtcaggtatttagaatattatctgggttgcaggtatagtttttcaaaaagctgactttcccttcccccatcaaccaacacaccaatgttgagcaattatttcattggttgaaaaataagcttagtcttatatcaaaggctc

SEQ ID NO: 707176 - DNA, 3205 bp, Homo sapiens
cctttgccacctggaaaactacttttgtgccaagttcccgagttactagaatgatttaaatcaagctggtctctccaatcaatattttttctaaaggaagtgtgggatatagtggaaggagctcagaagttcacctggatctgacacagagaagaggaacactagctagctggcagactttagcaggatcagagccaatgttcaaaaaagaaggaaatagaacagggaaacaaagcccactgaattctattgagcagaatgacaataatggatgtcatgttatagacagaacccggctaagacctctaattccattgcctcatttagtcgttacaagaataattattggtaggtactattttttatctccatcttaacaatagtaaaagaagtctcaatcatgttgagcctcatcttttttctttcattctcaagaatataaaataaaaaataaattttaaaaaaaagaaagctccgaaaggttaagcaacttattcaagcttatacagtaggtggcaaagctgtaatccaaacccagaccattatgattccaatctctaatcttggttactaatgtataaacccaaataactaacaagtcaatcaaccttattttttcctgatctccatttatattggaaagataaaagcaaacaataagataacagagatctaactttaaaacaaattaaaacacgtccacactgctctcagagcagtacaaagtcagctgtattattacctctatttcccatttattcagtcagtcaattgttccacagaaatttattacaaatttatgtttaggctgaacaaagatctgaataggcaagcttattatgtctgttatatctgttatattatatgcaatatatgtactgtatatgcctattgtacatttattataaatgggaaatttatacaaaatattttaaacacaatggtaaacagccagaaatacattttgaggagaggaggagttctgcttttctcacaggttaaatcaattaaccactctcttaacattacagctttttgaggttttactgtagtgttttttgtgtacttatatcatttgctaataacaactaaggaaatgtccagctagttaccagggaagctcaactacctctaagcctatcattattagaattcaataatacgcaaatcaatatcaagattgaaaaaagaaaggaaggcccaaagtgttccttgaaaagacagcttctcatagaatgacggacaaccaggttttatttacttcgtagctaatttgaaaaatgcttttgagggttggaagatgtttgaggaaatacaactgtctactagccaactacaatactgcttcccaaaagggtccacccatcagactagaataacggagctccttctgaggagtccagggaggaattactggaaatggcaaagtatattagacctaatattatcccacaacataacatgatgtattaacactctgcctgaattcaagatgtttattgatttcttaaatcttaactaggttacatttgcattatatagtacaaaagaaccattttaagttatttctgttcacatctcaggctgagtattttgcctaaaatatttcttctctgactgaatttatagagtgaactgagatgatacaagtaaccaaagttaatcataaaatatttacgtgcattaaatactgcatttattcatagtcagaggccaaaataatgtttaaatgggagcatgtctgatagtaatatcaaattgagataaatttgtgaacgatagtttgattgcatggaatctaataactaagttgaggtccagtgttatgtaaaagaaacaagaaaaacgttcggcctaaattttttttaaaaagtgagattgacaatttaaataagtgtgtactaatttcctgcagcatagcacttgctcagaggtcatgtatcctgcaagcccaactatccggaaagacaggactaggaaagacctctgcaccatcaaataaacatcaaagtttcatcaagttaggctgacctgggctcatattcaggcaccacattggaggtttatttcacataagtcacttcactaccttgagtatattttcaactgtaccctaatttacagggctgctgtcagaattagtgttaatagaagtgccttcaaagtgctgacacataataggctctccacggaaagtaattagcatagcgttatgggctaaattgtgtttccccaaaattcctatgttgaagccctaatctccagtacctgagaatgtaactgtatttggacactgggcctttaaaaaggtaattaaggtattataggttatatgggtgggatctaattaagtatgactcgtgccattataagaagaggaaattcaggctgggtgcggtgattcaggccgggcgcggtggctcaagcctgtaatcccagcactttgggaggctgaggcaggtggatgacctgaggtcaggagttcaagaccagcctgaccaatatgatgaaaccccatctctactaaaaaatacagaaattagctgggcgtggtggcaggcgcctgtaatcccggctattcgggaggctgagacaggataattgcttgaacccgggaagcggaggttgcagtgagccaagatcgcgccagtgcactccagcctgggcaacaagagcaaaactccgtctcaaaaaaaaaaaaaaaaaaaaaaaaaaaagaggaaattcagacacacgaatagacaccacagggacacatatacacagagagaccacccagaaaagaagcagcaagagggaaactatctgcaaaccaaggagagaggcttcaatagaaaccaaatctttgacacctcgatcttggacttccagcctccagagctgtgagaaaataaatttctgttgtttacaccacccagactaatggtgttttgttatggmaaccctggcaaactaacacgtatagcgattgccaccttcttcaaagtagcgttgtgtgagagaaggacgtctaacatttgagtgacactttgattgatgcaaattcctagactttaaggttttttatgcatttggcatttatacccacatctagtacagcgggcctggcacatagtacactctcattaagtatttgttgaacatattaatgagtgaatacatgaatgaatgaatgaatgaatgttaattagaggctctagtgcca

SEQ ID NO: 707177 - DNA, 1305 bp, Homo sapiens
ttttctttggtacctctgcagaggccctgctgaatcatcgccttataggttgtgtgccaactctggaacaaacacaaaygtgtatttcctctccaaatgccccacttctgccaggaaactaacagatgcaccaacaaatgttggaagtctgtctattaaacatggagctcattgaatttctattgcatttctccagcacaagtgcatttggagcaaagaaagaaattaaaatgaagtcaggtgtcattcaagaaaattacagtcccacagaggatagttttgagttgcagttttgagttgccatgctgtgcctttcacagctgcctacagttctcgtcattaataatcagtaaataagatctgcaggtgggcctggaaggcaccccgagccaagaagacggtagttagggcttctgtctctaagatgggtggccaggctcatttgcacaacccagcttatgtttccacacaaaagtgcaaccctacttagcatagcttcagggaagccgccacaatatagggaatgctaattactgtaaccaactggcaacgatgcatccaaaattaaatggcctgtgactgagcagatgaacaatttttatggctcaaagatcagggaacagggataatttgttaaattaactgacaggctctttggtctaagtaggtgagttgaagtcatttgaaagctgtgtttgcgtgcagttacatagcagagtctctcctgcgtaagtacggttcccctgcagttttatgtgggagtatggctacatttagtacataaaattcacaaagttatccggttcagttcataaatgaccaggagaagctattctaaatccctgtgggattgatttttcacatccaaagatttgatcttttaaaattcagctgaatctaactcctagagttgtgtagagaggtttttaggaaacctacagaaccctgcatgaacaaaagcttttaacttctagtttccaacattgatcacacttagacaccaagccatttcactagcatatcagaagttgctgttattagatgttcattcccaactgttaatgcatatctaaaagtcttcctgaaaaacaaataatgtagagatgagagcatgtcctctaacatttccaaagcattgcttctagcaaacaacgctttttcacctcacagtttaagccaaaatttcttagcttcagcacaactgatattttagactgtgtaattatttgttccaggggagtagaggctgtcctgtgcatggtaagatatttagcagcacccctgacctctactcaccagacgcca

SEQ ID NO: 707178 - DNA, 1305 bp, Homo sapiens
ttttctttggtacctctgcagaggccctgctgaatcatcgccttataggttgtgtgccaactctggaacaaacacaaacgtgtatttcctctccaaatgccccacttctgccaggaaactaacagatgcaccaacaaatgttggaagtctgtctattaaacatggagctcattgaatttctattgcatttctccagcacaagtgcatttggagcaaagaaagaaattaaaatgaagtcaggtgtcattcaagaaaattacagtcccacagaggatagttttgagttgcagttttgagttgccatgctgtgcctttcacagctgcctacagttctcgtcattaataatcagtaaataagatctgcaggtgggcctggaaggcaccccgagccaagaagacggtagttagggcttctgtctctaagatgggtggccaggctcatttgcacaacccagcttatgtttccacacaaaagtgyaaccctacttagcatagcttcagggaagccgccacaatatagggaatgctaattactgtaaccaactggcaacgatgcatccaaaattaaatggcctgtgactgagcagatgaacaatttttatggctcaaagatcagggaacagggataatttgttaaattaactgacaggctctttggtctaagtaggtgagttgaagtcatttgaaagctgtgtttgcgtgcagttacatagcagagtctctcctgcgtaagtacggttcccctgcagttttatgtgggagtatggctacatttagtacataaaattcacaaagttatccggttcagttcataaatgaccaggagaagctattctaaatccctgtgggattgatttttcacatccaaagatttgatcttttaaaattcagctgaatctaactcctagagttgtgtagagaggtttttaggaaacctacagaaccctgcatgaacaaaagcttttaacttctagtttccaacattgatcacacttagacaccaagccatttcactagcatatcagaagttgctgttattagatgttcattcccaactgttaatgcatatctaaaagtcttcctgaaaaacaaataatgtagagatgagagcatgtcctctaacatttccaaagcattgcttctagcaaacaacgctttttcacctcacagtttaagccaaaatttcttagcttcagcacaactgatattttagactgtgtaattatttgttccaggggagtagaggctgtcctgtgcatggtaagatatttagcagcacccctgacctctactcaccagacgcca

SEQ ID NO: 707179 - DNA, 1305 bp, Homo sapiens
ttttctttggtacctctgcagaggccctgctgaatcatcgccttataggttgtgtgccaactctggaacaaacacaaacgtgtatttcctctccaaatgccccacttctgccaggaaactaacagatgcaccaacaaatgttggaagtctgtctattaaacatggagctcattgaatttctattgcatttctccagcacaagtgcatttggagcaaagaaagaaattaaaatgaagtcaggtgtcattcaagaaaattacagtcccacagaggatagttttgagttgcagttttgagttgccatgctgtgcctttcacagctgcctacagttctcgtcattaataatcagtaaataagatctgcaggtgggcctggaaggcaccccgagccaagaagacggtagttagggcttctgtctctaagatgggtggccaggctcatttgcacaacccagcttatgtttccacacaaaagtgcaaccctacttascatagcttcagggaagccgccacaatatagggaatgctaattactgtaaccaactggcaacgatgcatccaaaattaaatggcctgtgactgagcagatgaacaatttttatggctcaaagatcagggaacagggataatttgttaaattaactgacaggctctttggtctaagtaggtgagttgaagtcatttgaaagctgtgtttgcgtgcagttacatagcagagtctctcctgcgtaagtacggttcccctgcagttttatgtgggagtatggctacatttagtacataaaattcacaaagttatccggttcagttcataaatgaccaggagaagctattctaaatccctgtgggattgatttttcacatccaaagatttgatcttttaaaattcagctgaatctaactcctagagttgtgtagagaggtttttaggaaacctacagaaccctgcatgaacaaaagcttttaacttctagtttccaacattgatcacacttagacaccaagccatttcactagcatatcagaagttgctgttattagatgttcattcccaactgttaatgcatatctaaaagtcttcctgaaaaacaaataatgtagagatgagagcatgtcctctaacatttccaaagcattgcttctagcaaacaacgctttttcacctcacagtttaagccaaaatttcttagcttcagcacaactgatattttagactgtgtaattatttgttccaggggagtagaggctgtcctgtgcatggtaagatatttagcagcacccctgacctctactcaccagacgcca

SEQ ID NO: 707180 - DNA, 617 bp, Homo sapiens
ttattacatatttatccacctaggcattgaaatgaattaggttaagtcaaaatgctggtgaggatttggagcaacaggaatgatctagtacacacacatatttctatgccagcacctgagagagcttaaaagcaacaatacccctgtagcaacgagcacacctaatgcccagatctctttctaatacaatccttcaataaaggaaccagcactccttgaaraaatggtcgattctaggagagaagcaggaaatatactgatgcacctgaagttcttatagtgccaggaaataagaaagttctcaaaataaaaaatctacataaatgagtatgtcaaaaggacataggagccaactgaaagagctcccagtggtgaaagctggagcagcaaaataaagtaccagtgaactataacccaaagtatgaataaatatccgttaagtccacactgacatcagtaagtgattgaatcaacaaattggaaaaagagaccaagtccacactgacatcagtaagtgattgaatcaacaaactggaaaaagagaccaatctcccttacagagaagttccaagtatttacatagatactttgccctcaaaaaaggtagagcacaaccc

SEQ ID NO: 707181 - DNA, 617 bp, Homo sapiens
ttattacatatttatccacctaggcattgaaatgaattaggttaagtcaaaatgctggtgaggatttggagcaacaggaatgatctagtacacacacatatttctatgccagcacctgagagagcttaaaagcaacaatacccctgtagcaacgagcacacctaatgcccagatctctttctaatacaatccttcaataaaggaaccagcactccttgaagaaatggtcgattctaggagagaagcaggaaatatactgatgcacctgaagttcttatagtgccaggaaataagraagttctcaaaataaaaaatctacataaatgagtatgtcaaaaggacataggagccaactgaaagagctcccagtggtgaaagctggagcagcaaaataaagtaccagtgaactataacccaaagtatgaataaatatccgttaagtccacactgacatcagtaagtgattgaatcaacaaattggaaaaagagaccaagtccacactgacatcagtaagtgattgaatcaacaaactggaaaaagagaccaatctcccttacagagaagttccaagtatttacatagatactttgccctcaaaaaaggtagagcacaaccc

SEQ ID NO: 707182 - DNA, 617 bp, Homo sapiens
ttattacatatttatccacctaggcattgaaatgaattaggttaagtcaaaatgctggtgaggatttggagcaacaggaatgatctagtacacacacatatttctatgccagcacctgagagagcttaaaagcaacaatacccctgtagcaacgagcacacctaatgcccagatctctttctaatacaatccttcaataaaggaaccagcactccttgaagaaatggtcgattctaggagagaagcaggaaatatactgatgcacctgaagttcttatagtgccaggaaataagaaagttctcaaaataaaaaatctacataaatgagtatgtcaaaaggacataggagccaactgaaagagctcccagtggtgaaagctggagcagcaaaataaagtaccagtgaactataacccaaagtatgaataaatatccgttaagtccacactgacatcagtaagtgattgaatcaacaaattggaaaaagagaccaagtccacactgacatcagtaagtgattgaatcaacaaaytggaaaaagagaccaatctcccttacagagaagttccaagtatttacatagatactttgccctcaaaaaaggtagagcacaaccc

SEQ ID NO: 707183 - DNA, 617 bp, Homo sapiens
ttattacatatttatccacctaggcattgaaatgaattaggttaagtcaaaatgctggtgaggatttggagcaacaggaatgatctagtacacacacatatttctatgccagcacctgagagagcttaaaagcaacaatacccctgtagcaacgagcacacctaatgcccagatctctttctaatacaatccttcaataaaggaaccagcactccttgaagaaatggtcgattctaggagagaagcaggaaatatactgatgcacctgaagttcttatagtgccaggaaataagaaagttctcaaaataaaaaatctacataaatgagtatgtcaaaaggacataggagccaactgaaagagctcccagtggtgaaagctggagcagcaaaataaagtaccagtgaactataacccaaagtatgaataaatatccgttaagtccacactgacatcagtaagtgattgaatcaacaaattggaaaaagagaccaagtccacactgacatcagtaagtgattgaatcaacaaactggaaaaagagaccaatctcccttacagagaagttccaagtatttayatagatactttgccctcaaaaaaggtagagcacaaccc

SEQ ID NO: 707184 - DNA, 609 bp, Homo sapiens
tgatatcctgatatcttgagaacaaaagcattcctaattttgctttaaagataataatattgattcttgcaaaatatagtaattaaaaaaaattaaccctttatcacaagcctttgtagcagagtacatatccccatgatgttttttgttatcctrtatataaacaagcattgatctagggtgggcacgttactcctcttacttttgggaacaccctactgtctacggagtacctactctttcaccactttacttttttaacaaacttgcttttgctttatactgtggactcgcctgtattctttcttggatgagatccaagaaccctctcttggggtctggatcaggacccctttccagtagcaagagcattggtactttcttaccctgctttactacaaccctcctcaattaaaacattgttttttacatggtatattatttgaactatgaaaagctataaaatgaaaagtaattatattttctacctccaaactagtccttctttcagaggcaactactattaaagtttccttcccaaaattgtttatgtgtttactagcacatgtggactttaaaaatgttacccaaatgagattgtactatacc

SEQ ID NO: 707185 - DNA, 609 bp, Homo sapiens
tgatatcctgatatcttgagaacaaaagcattcctaattttgctttaaagataataatattgattcttgcaaaatatagtaattaaaaaaaattaaccctttatcacaagcctttgtagcagagtacatatccccatgatgttttttgttatcctatatataaacaagcattgatctagggtgggcacgttactcctcttacttttgggaacaccctactgtctacggagtacctactctttcaccactttacttttttaacaaacttgcttttgctttatactgtggactcgcctgtattctttcttggatgagatccaagaaccctctcttggggtctggatcaggacccctttccagtagcaagagcattggtactttcttaccctgctttactrcaaccctcctcaattaaaacattgttttttacatggtatattatttgaactatgaaaagctataaaatgaaaagtaattatattttctacctccaaactagtccttctttcagaggcaactactattaaagtttccttcccaaaattgtttatgtgtttactagcacatgtggactttaaaaatgttacccaaatgagattgtactatacc

SEQ ID NO: 707186 - DNA, 2425 bp, Homo sapiens
  misc_feature 884, 899, 910, 911, 912, 913, 914, 915, 916, 917, 918, 919,920, 921, 922, 923, 924, 925, 926, 927, 928, 929, 930, 931,932, 933, 934, 935, 936, 937, 938, 939, 940, 941, 942, 943,944, 945, 946, 947, 948, 949, 950, 951, 952, 953, 954: n = A,T,C or G
  misc_feature 955, 956, 957, 958, 959, 960, 961, 962, 963, 964, 965, 966,967, 968, 969, 970, 971, 972, 973, 974, 975, 976, 977, 978,979, 980, 981, 982, 983, 984, 985, 986, 987, 988, 989, 990,991, 992, 993, 994, 995, 996, 997, 998, 999, 1000: n = A,T,C or G
  misc_feature 1001, 1002, 1003, 1004, 1005, 1006, 1007, 1008, 1009, 1021: n = A,T,C or G
aaattttccccactaccccaattaggttcttgatgagggacatgatagttctttgtagctagactacataatttctggtagaacttttataatatatgttagttgttgaccaaagggagaagctaaagggtgaaagagggcagaaagagaaagtggaatgagagggcatgagtgcttcatgatgtcatcacaagatttagcttctcattatgccacataaagagtggcagtttcttagttcatttttcttgcttagaacacctgaggctgggtgatttataaggaaaataaatttatttgttacagttctggaggctggaaagtccaagggcatagctgggcatctggtgagagccttcttcctggcagggactctctgcagagtcccaaggttacacagagtatcacatggcaagggggctgagcatgctaatgtgctagctcagatctttctttcttctcttgtaaagccatcagttccactctcatgttagcccattgatccattaaccattaatctatgtatggattaatccattcatgcaggcagagcactcatgaccccatagcttcttgaaggctctaggtctcaacactgccatattgaggattgtatttcatcataagtttcagaggggacatcaaattataatagacagtgtcagtctttctttataattcttcatgttttctacaggtcctgggaaagctttttagattagactgttagcgtatcttgtcattgcatatgatgtgtgcacatattttgaaacatggatcaagaagacatgctccacctatatagatgaataggaggaaatttgtttcagagaatacagcaaagagtggtcatgttttggagttaaacatgaatttacagggtnctttagagtcgcccntacaggcattnnnnnnnnnnnnnnnnnnnnnnnnnnnnnnnnnnnnnnnnnnnnnnnnnnnnnnnnnnnnnnnnnnnnnnnnnnnnnnnnnnnnnnnnnnnnnnnnnnnncttagatatatncttagccaatatttgcagatttcttattgactaaaatctgatgtccaggccacatattttagcgtataaaagatgtactacttagaaagtcagatgattagcttgacattcacctttgctaccaaaagcaacgtagaggagtgtgtttttttttagttacatatagctacataagtcgctattcctcaaataagaaggtgctggttatggatatgcaaaatgtatatataaatttcaaaagttatacattttatgatgttcctctaaaagtttatctacagggtaattgctacaaaccagtattttagataattatacctgttcatattttctaaaaaaaaaataaagcaatgtagacaggaaattagtaacagaacaactgaaaattggaatgactagattctatgttgagattaatagtcatgcatgtgcaaataatgttttcccatagaagataatctttgtgactttgggttagacaaagctgttttagatttgacatgattcataaaagaaaaaaattgataaataggacttcatcaaattcaggatcctctgctcttcaaaagatgccattaatacaatggaaaaaaaaagtcacagactgggaagaaatatttgcaaatcacatattagataaatatcttgcatccagaatatgtaaagggcatttaagatgcaaaaataggaaaacagttcaattttaaaaatgsactaaagattcaaacagacatttcaccagtgaagatgtgcacatgaaaaataagcagaggaaaatgctcaaagtcagtagtctttagggaaacgcacattaaaaccacaatgagatactatgtacctattagaatgcctaaaattaaagtgactgactgaatgttggtgaggatgtgaagcaactgttggcagcagaccagtggttgcctggggacaggtagtgattataaagggatgcaaggaaagttttgagtgtggcgaatatgttcagtatcttgactatggtagtggtttcatggccatatttgtatgtcaaaacatatcaaattgtatactttatgtgcagtttctaatatgatcatgatatctcaataaagttgtaaattttttttcctgtaatgttgcttcctttggtttgtatttctgacttaattggtgataacatagattttatttcaggggtaaattctcaagatatatgacatttaaaatatacaaaataattagatgattaatatggatttttagtctttctggtataaatgtcacataataaatctgaatatttttggtaactgacatgtagctaatactgatacgcacttactataacactctcagcctcaatagatttaaataatttgacttatttagaaatttatatcatttatgtttttcccctttttaaaa

SEQ ID NO: 707187 - DNA, 2425 bp, Homo sapiens
  misc_feature 884, 899, 910, 911, 912, 913, 914, 915, 916, 917, 918, 919,920, 921, 922, 923, 924, 925, 926, 927, 928, 929, 930, 931,932, 933, 934, 935, 936, 937, 938, 939, 940, 941, 942, 943,944, 945, 946, 947, 948, 949, 950, 951, 952, 953, 954: n = A,T,C or G
  misc_feature 955, 956, 957, 958, 959, 960, 961, 962, 963, 964, 965, 966,967, 968, 969, 970, 971, 972, 973, 974, 975, 976, 977, 978,979, 980, 981, 982, 983, 984, 985, 986, 987, 988, 989, 990,991, 992, 993, 994, 995, 996, 997, 998, 999, 1000: n = A,T,C or G
  misc_feature 1001, 1002, 1003, 1004, 1005, 1006, 1007, 1008, 1009, 1021: n = A,T,C or G
aaattttccccactaccccaattaggttcttgatgagggacatgatagttctttgtagctagactacataatttctggtagaacttttataatatatgttagttgttgaccaaagggagaagctaaagggtgaaagagggcagaaagagaaagtggaatgagagggcatgagtgcttcatgatgtcatcacaagatttagcttctcattatgccacataaagagtggcagtttcttagttcatttttcttgcttagaacacctgaggctgggtgatttataaggaaaataaatttatttgttacagttctggaggctggaaagtccaagggcatagctgggcatctggtgagagccttcttcctggcagggactctctgcagagtcccaaggttacacagagtatcacatggcaagggggctgagcatgctaatgtgctagctcagatctttctttcttctcttgtaaagccatcagttccactctcatgttagcccattgatccattaaccattaatctatgtatggattaatccattcatgcaggcagagcactcatgaccccatagcttcttgaaggctctaggtctcaacactgccatattgaggattgtatttcatcataagtttcagaggggacatcaaattataatagacagtgtcagtctttctttataattcttcatgttttctacaggtcctgggaaagctttttagattagactgttagcgtatcttgtcattgcatatgatgtgtgcacatattttgaaacatggatcaagaagacatgctccacctatatagatgaataggaggaaatttgtttcagagaatacagcaaagagtggtcatgttttggagttaaacatgaatttacagggtnctttagagtcgcccntacaggcattnnnnnnnnnnnnnnnnnnnnnnnnnnnnnnnnnnnnnnnnnnnnnnnnnnnnnnnnnnnnnnnnnnnnnnnnnnnnnnnnnnnnnnnnnnnnnnnnnnnncttagatatatncttagccaatatttgcagatttcttattgactaaaatctgatgtccaggccacatattttagcgtataaaagatgtactacttagaaagtcagatgattagcttgacattcacctttgctaccaaaagcaacgtagaggagtgtgtttttttttagttacatatagctacataagtcgctattcctcaaataagaaggtgctggttatggatatgcaaaatgtatatataaatttcaaaagttatacattttatgatgttcctctaaaagtttatctacagggtaattgctacaaaccagtattttagataattatacctgttcatattttctaaaaaaaaaataaagcaatgtagacaggaaattagtaacagaacaactgaaaattggaatgactagattctatgttgagattaatagtcatgcatgtgcaaataatgttttcccatagaagataatctttgtgactttgggttagacaaagctgttttagatttgacatgattcataaaagaaaaaaattgataaataggacttcatcaaattcaggatcctctgctcttcaaaagatgccattaatacaatggaaaaaaaaagtcacagactgggaagaaatatttgcaaatcacatattagataaatatcttgcatccagaatatgtaaagggcatttaagatgcaaaaataggaaaacagttcaattttaaaaatggactaaagattcaaacagacatttcaccagtgaagatgtgcacatgaaaaataagcagaggaaaatgctcaaagtcagtagtctttagggaaacgcacattaaaaccacaatgagatactatgtacctattagaatgcctaaaattaaagtgactgactgaatgttggtgaggatgtgaagcaactgttggcagcagaccagtggttgcctggggacaggtagtgattataaagggatgcaaggaaagttttgagtgtggcgaatatgttcagtatcttgactatggtagtggtttcatggccatatttgtatgtcaaaacatatcaaattgtatactttatgtgcagtttctaatatgatcatgatatctcaataaagttgtaaattttttttcctgtaatgttgcttcctttggtttgtatttctgacttaattggtgataacatagattttatttcaggggtaaattctcaagatatatgacatttaaaatatacaaaatmattagatgattaatatggatttttagtctttctggtataaatgtcacataataaatctgaatatttttggtaactgacatgtagctaatactgatacgcacttactataacactctcagcctcaatagatttaaataatttgacttatttagaaatttatatcatttatgtttttcccctttttaaaa

SEQ ID NO: 707188 - DNA, 606 bp, Homo sapiens
tccaggtggttagccaagaaacagcacccccatggtgaaattccttgaataccaactgatatgcaaaatcaaaacaaaacaaaagaaaatacacacacacaaaaatcaaagtggattcagaaacttaagatctttgttagaaacataggaatattttattcctatgtttcctttattaatttactgtttgtaaagaacaagtgggttggttgcagtggctcacgcctgtaatcccagcactttgggaggcccaggtgggcgaattacctgaggtcaggagttcgagaccagcctggccaacacggtgaaaccccgtctctactaaaaatacaaaaattaactgggcatggtggtgggyacctgtaatcccagctactcgggaggctgaggcaggagaatcgcttgaacccgggaggcggaggttgcagtgagccaagatcatgccaatgcactgaagcctggccaacagagcgagactctgtctcaaaaaaaaaaaaaaaaatacaccagttaaaaagtcattgtttaatgttttaaattagatgagtttttcaaatatatttatttgatcctcagaacaacactttgggttgggtcagaaaagca

SEQ ID NO: 707189 - DNA, 912 bp, Homo sapiens
aggcatgcgccaacacgcccagctaattttgtatttttaatagagacagagtttctccgtgttggtcaggctggcctcgaactcctgacctcaggtgagccacccgcctcagctcccaaaagtgttgggattacaggcgtgagccaccgcgcccagcccaattgtcaaattgctttcaatggtgttctcccaatttacattctcacagtgtactggaattcctcayattctcattaatactgaatactgtcaaagttttaaatctttgctaatctcataaattaaaattaacatcacctcttttcacatgtttattgaccatttgttctttttctctgtaccatctgttcatgacctttgctcatttttcttctctctttttttgcttttatttgtgcaaatattttgtctcaaggaaattcatcctttgtttaatttgctaaaaacatctttccccaattttcctttatcattcagctgtttagaaaatttttttataagaagacatctaattttgaattctgtgtaaccaaatttatccatttgtgacttctgtggggtcatgtttagaaagatcttccagatgacaagtgccttaaaaaaaatcaatcagttttctttttcctggaatttttatggattaattttcttaaaaaaatttcattgatcaataatatagttcagtataagaagtgagatgagatcttttttctcccaagtagctagccagttttccacaatcatttattgaatgtatagcaccaacctgcaatttctcctgtttcttgtactaaaatctttttttttttttttttttttttttttggaaaggggtctggctctgtcacccaggctggagtgcagtggtgcaatctcggctcactgcaacctctgcctcctgggatcaaggga

SEQ ID NO: 707190 - DNA, 1901 bp, Homo sapiens
tgaagaataacttcacagaaaataaagaacatccagtatagtaattatattactcaatgacagagaaatacaggagcagtggataacgtatgacactagaaaagttggtaattgctagggtatgctgaattctgtatatttatttgctcaaatgcaaatatgacctagctatcataaggaagggtctacattttaaagtactttacaatcaacataacaaactttatgaattcagtccttacttatttttcctctctttgtagcaaagtttcaaaccggcagagctcagagcatatgcagaaaagaggaaaagctatcttactagaatttaccaagtaaagtgattttttattactcttacctcccatctgttgtactacaaatctaaccagtttagacaatttttgtgtgtgtttgtttgcttgtttgtttttgagacagggtgtcgctctgccacccaagctggagtgcagtggcacgaactcagctcattgcaacctccacgtcctgggttcaagagattctcccacctcatcctcctaagtagctgggactataggcgtgcgtcaccacacctggctaatttttgtatttttctgtcttttggtagagatggggtttcaccatgttggccaggcttgtctcaaactcctgacctcaagcgatccgcccaccttggcctcccggagtgctgggattataggcgtgagactgcactcagccagtttagacatctttcttctttacttcactgattttttttgaaatgtaactgcagtttcaatatccaagaaaattcattaattttttttttgagacgggttctcactctgttgcccaggctggagggcagtggcatgatctcagctcactgcaacctcttcctcctgggttcaagcaattatctaccttagcctcctgagttctgggattacaatcgcctgccaccatgcccggccaatttttgtatttttagtagagacggggtttcaccatgcttgccaggctggtcttgaactcctgacatcgtgatccaccctccttggcctcccaaagtactggtattacaggcatgagccaccgcacccagccagaaaattttatttgtttattgttactcttgagcaattcatgataaktttgaaaaaataataaagagttaattctaaaatgtgtatagaatattaaggggccccaatatccaaaattatcttgaaatagaagagcaaatgtggaggactcacattttctgattttaaaacttaatacaaacctgcagtaatcaaagccatgtggtatttgcataaggatagacataggtctatgaaataaaataggccaaaaataaaacctcatatatatggtcaattgatttctgacaagggtgccatgaacattcaataggacaaggaaagtttttttcctaacaaatggtactggaaaaaatgaatatccacatgcaaaggaatgaaattggactttttctttacacaaacattaactcaaatgtgtcgagcacttaaatgtaaatgttaaatttctaatactctttgaaggaaacacataggggaacagctttgtgatgttgaatttggcactgatttttaggatatgacatcaaaagcacatgcaacaaaaaaagaactttataaaaattcataatttgtgcactaaaaggtgacatcaaacatatctaaagcacatatatttttatatacatatatatacaatcttatttagctttaacaaaaaataaaattctaatacatgttgcaacaatgaactttgacaatatcatgctaaacaagacagttacaaaaggataagtactgtacaattccagtcgtaagaggtgcctaaaatataatagacaaattaagatagaaaatataagaatagtt

SEQ ID NO: 707191 - DNA, 1901 bp, Homo sapiens
tgaagaataacttcacagaaaataaagaacatccagtatagtaattatattactcaatgacagagaaatacaggagcagtggataacgtatgacactagaaaagttggtaattgctagggtatgctgaattctgtatatttatttgctcaaatgcaaatatgacctagctatcataaggaagggtctacattttaaagtactttacaatcaacataacaaactttatgaattcagtccttacttatttttcctctctttgtagcaaagtttcaaaccggcagagctcagagcatatgcagaaaagaggaaaagctatcttactagaatttaccaagtaaagtgattttttattactcttacctcccatctgttgtactacaaatctaaccagtttagacaatttttgtgtgtgtttgtttgcttgtttgtttttgagacagggtgtcgctctgccacccaagctggagtgcagtggcacgaactcagctcattgcaacctccacgtcctgggttcaagagattctcccacctcatcctcctaagtagctgggactataggcgtgcgtcaccacacctggctaatttttgtatttttctgtcttttggtagagatggggtttcaccatgttggccaggcttgtctcaaactcctgacctcaagcgatccgcccaccttggcctcccggagtgctgggattataggcgtgagactgcactcagccagtttagacatctttcttctttacttcactgattttttttgaaatgtaactgcagtttcaatatccaagaaaattcattaattttttttttgagacgggttctcactctgttgcccaggctggagggcagtggcatgatctcagctcactgcaacctcttcctcctgggttcaagcaattatctaccttagcctcctgagttctgggattacaatcgcctgccaccatgcccggccaatttttgtatttttagtagagacggggtttcaccatgcttgccaggctggtcttgaactcctgacatcgtgatccaccctccttggcctcccaaagtactggtattacaggcatgagccaccgcacccagccagaaaattttatttgtttattgttactcttgagcaattcatgataattttgaaaaaataataaagagttaattctaaaatgtgtatagaatattaaggggcyccaatatccaaaattatcttgaaatagaagagcaaatgtggaggactcacattttctgattttaaaacttaatacaaacctgcagtaatcaaagccatgtggtatttgcataaggatagacataggtctatgaaataaaataggccaaaaataaaacctcatatatatggtcaattgatttctgacaagggtgccatgaacattcaataggacaaggaaagtttttttcctaacaaatggtactggaaaaaatgaatatccacatgcaaaggaatgaaattggactttttctttacacaaacattaactcaaatgtgtcgagcacttaaatgtaaatgttaaatttctaatactctttgaaggaaacacataggggaacagctttgtgatgttgaatttggcactgatttttaggatatgacatcaaaagcacatgcaacaaaaaaagaactttataaaaattcataatttgtgcactaaaaggtgacatcaaacatatctaaagcacatatatttttatatacatatatatacaatcttatttagctttaacaaaaaataaaattctaatacatgttgcaacaatgaactttgacaatatcatgctaaacaagacagttacaaaaggataagtactgtacaattccagtcgtaagaggtgcctaaaatataatagacaaattaagatagaaaatataagaatagtt

SEQ ID NO: 707192 - DNA, 661 bp, Homo sapiens
tgaaatcttggaggaaagttagaaaaggaaacacaaattttcagatattaatagttgtctaaaggattctcacataggctccacaaataaggaagtgtttgagaaggcattagagaaaaaaaatgatctattgccgcttatctcatgtcagatctaatatagaaatatggaattagcattaaaagactataagaatgaagttgtaaatcttattatatctgatttttaaaatatctgactgggactatgagactagaaagctaaagaatctctttgagatactgttcagagataggaagtgaatgacagctttttcgaaggcagatggatcctgcttagagtatctagcaggtttgccttgcttaaataagtcagaactctaggggaacaggacagagtgtatggatggtttggtgtggtttcatcaccattactgtagcaacaaatatgcaagatatcttctgatttttattgtggcttattgacattgttaccagtggaaaatgtccaagttcttggcatcttgagcaaagaattggacaaaacgcacaaagaaagcaaagaaggaataaaamaacaaaagcagagatttattgaaaatgaaattatactccacagggttggagcaggcctgaggataggtgctcaagagtctcgttac

SEQ ID NO: 707193 - DNA, 1037 bp, Homo sapiens
tttacaaatgaggaaactgaggcccaaaaaggcttgctcacggtcatacatctgttgagctgggaataaacccaaatgcttctgaccattaaccacaaccttttaaatgacttcagcagtataggttttcttttcgaatgtaaagatgagattctccttgattatattgtcacctttcattgagatatagaaatgggagtaaagctgaaattgttccccaaaaccagctgtggggttctctcactgccctgaacagctttgttacaagctggctagagggaacttaagatcccagggaaattccatttttccttgagaccccctaagtccaaatcaatacactaagaagaaacgraaaaaatcctaagagtttaagtaggaagaatttttatcaaggtctgtgtgggaggaaattggggcataagttcctctgtggtcaggcattgagctaggtagaacttctaagccaaaaatgagtctcatgcacaaataataaagctaaaacactttctgttatacaagcatccaaatggggatggtaggaagttacaagttcattttaagcaaaactaaaagttagaagtgcctgaacttcatgttacaggaatggatcacagttgtagcagcagtattaactcaccagtaggggcacacattcattggagaatgttgaaatgaaattgctgaatgagtagcaaagtgctaccatgaattaaaaatagttcggttcattggaagggaatgagctgagccatagtaagctggagggcacgtgtaagacaaaaccttgtctctgtaaattgaacagaaatttaaagaacactttaagcctgcagaattataatatagcagccctgcatgtatatgggatgacaaaacagaccaaaatagtcaccccaaaaactcattgcaattgttaaaaatgacaaaaagatagttatttggcattctccatatctcttccttaaaaacacacagacacacacacacacacacagacagacacacagacacacacacacagcctttgtagctaa

SEQ ID NO: 707194 - DNA, 540 bp, Homo sapiens
atggtgaaacccygtctctactaaaaatataaaaaatagccaggcatggtggtgtatgcctgtaatcccagctactcgggaggctgaggcaggaggattgcttgaacccagggaggtggaggttgcagtgagcctagatcacgccactgcactccagcctgggcgacagagtgagactccatctccaaaaaaaaaaaaaagttatacagatgtaagtctaaatgaatataacaaactttgatgcaatataaatgttagcaattagtcttaaaacaaatattacatttaaaatatttttggaagacatcaggagaaaaaaaaatgtctaaggaaatagatttgtacaacacacaaaagccagatagaatattaccttcaaatgagtcttccttgaagttccagcatgaatttacatattactttctgctttatttcttactattttagaggattttctaagtaagtttcatagaaccagattcctagctcaaaaatatgaacttcactgttataatttcttttctttttttctttttcttt

SEQ ID NO: 707195 - DNA, 819 bp, Homo sapiens
ttttttattttatttttttgagatagggtcttgctatattacccaggctggccttgaacttctggtctcaagtgatccttcctcctcagccttccaagtagctgagattataggtgtgaggcactatgcccaccttggttctctgtcttgaatgatgaaaatgtgaattgccgaacctagagtaaactgggcttgaggaattaaaaggaccctttaattattaaacaaataattcctacaagtaaaattccttcaagagattctggaggactattgatgaaattctgtcattttgttaaatactgaaaaataggtcctattattttaatccttctaacattgccttttgagcaacagacatatagaaacatttctacatcaatacgtttgagtttaatgaatgagtaatatttgggtgaagtgttttgtttaggtgttcctccttctcaattcttggtaatataaaccaaaaataaaatcctcagcccctcatctgactgagtagaccccttctttcaacaagyattttctacagaaaatactagttctggccatgatgggaagggaggatcaggcatgcttcattctaccctcctccctttggtattcaggcacaactgactagcattaacattaaaacagattttaagatggacagaacagacttttgtagcaataagataccaaattcaaacctgactccagtgtagcatcacatgacagatatcaggccctgaaagaaatcaaagtatttttaccccaaaatatatttgacatattttgaaatggccctgcaaagtaagggaaacttacattctg

SEQ ID NO: 707196 - DNA, 631 bp, Homo sapiens
actcaggaggctgaggcaggaggattgcttgagcctgagaggcggaggttgcagtgagccgagatcacgccactgcactccagcctgggcaacagagcaagaacctgtctcaaaaaaaaaaaaaaaaaaaaaaaaaaagcccagccgaaagggaattgctttaaggtggtagaatccattggaaatggtagttggagaagcatcagagctctaatctgcccctgaggaaagtcattctttgttccttcttctataatgagactactatttgcttgttttcctagacccttttgtgtgatgattagtttgtttgtactcccttttcaacacggtcataattcagccatctcttgaggcccgtattagctttacttatggaagagaatcacaattcccgtttgctgcttgcatagtatctgtgtttgtaacaaataaaattcctcatgtcctgtgatgcttgtcatgtccggagacaagggaaagattgcatgattcgaagaaatatgcctgaacactgaatcgttacagtgcaacagaagaaactgaaattcaattatttgaacacttttttggctcaccaaggaactttsgcctttgcatgccatacaagtaacactcaattctataattt

SEQ ID NO: 707197 - DNA, 616 bp, Homo sapiens
ttgcattaacctaagtgtaccatttccttctaattatttcagyatggtttaaatagtttggtaattgttttcaaatgttaccttatattaatttatattttattagaatttagtaaatttaatgtacacatttaattttgagttctagtatttatcagccactcaatataaaccaatttattgctcataacccataagatatttaaatacttgccacttctctggcattcatgaatcccagtgagaacaacttatctgggtgtttaccctgtgccccacagcaagcagtaggatgaatccttcactttgtattatataccactcgcacttcaaaacctacacctggccaggcacagtggctgtaatcctgtactcccaacactttgggagactgaggtgggaggaatgctcgaggccatgagtttgagagcagcctgggcaaaatggtgagcccccatctctaccagaaaaaaaacatttaaaattagcctagtgtggtggtgcatacctgtagtcccagctactcaggaggctcaggtaggaggattgcttgagcccgtgagtttgaggttgcagtgagctaggatcactccactctcagttcactgcaacctcc

SEQ ID NO: 707198 - DNA, 616 bp, Homo sapiens
ttgcattaacctaagtgtaccatttccttctaattatttcagcatggtttaaatagtttggtaattgttttcaaatgttaccttatattaatttatattttattagaatttagtaaatttaatgtacacatttaattttgagttctagtatttatcagccactcaatataaaccaatttattgctcataacccataagatatttaaatacttgccacttctctggcattcatgaatcccagtgagaacaacttatctgggtgtttaccctgtgccccacagcaagcagtaggatgaatccttcactttgtattatataccactcgcacttcaaaacctacacctggccaggcacagtggctgtaatcctgtactcccaacactttgggagactgaggtgggaggaatgctygaggccatgagtttgagagcagcctgggcaaaatggtgagcccccatctctaccagaaaaaaaacatttaaaattagcctagtgtggtggtgcatacctgtagtcccagctactcaggaggctcaggtaggaggattgcttgagcccgtgagtttgaggttgcagtgagctaggatcactccactctcagttcactgcaacctcc

SEQ ID NO: 707199 - DNA, 1797 bp, Homo sapiens
taatcaccacagtctgaaagagattttgctttttctgaacataggttagcacctccatcagtaagggctcatgtgatggaaagagaaacctctctagcttcttacacattctacagggaattaggtgcttacaaaaatctgcgaaggggacagaggaggggctctaggaaaatcttccagaacagccccctctcctgggatcctggggtgctgctcctgtgccccagtcaggaaggctgggaagctgggttgtgcttcagaggttttactttttttttttcgagacggagtctcactctgttacccaagctggagtccagtggtgtgatcttggctcactgcagcctctgcctccccgattcaagcgattctccttcttcagcttcctgagtagctgggactacaggcgaatgccacaatggctggctaattttttggcatttttagtagagatggggtttcactatgtttcccaactggtctcgaactcctggcctcaagcgatccacccgccttggcctcccaaagtgctggtattacaggcgtgagccagggcacctggcctgcagaggtttcacttaggagcctgcactcttgctgaggccagggatcaggaagccaggctcctgccaccctccctgctagtgattagacacagggaagctaaccctgcagaaaagcccagcacatcctgcagcagggagacagtcttgtctctctttgctttccaaatctctaccaagagcatccacttggcagaacctgactcccacccagaagcctagctgtgaggaagtctggaaatgtcattaagaagggggaaaaaatccaacgtctggagcacaagatggcacagggaagaagcaggcaccgattctgaacgccagctcctatctccccagagcctccgagtctagtggttgcatactgcatcttgtctatcaccccagttctaggtaccaagacaactgcaaataccccgtggtccctttatgatggctctagtatctttcttgcttttcttttcttttcttcctgttttttttttttttttttttttttgaaacagagtcttacgcttgtcacccaggctggagtgcaatggcacgatctcggctcactgaaacctctacctcctgggtttaagcaattttcctgcctcagcctcctgagcatgtgggattacaacaggcatgcgccaccacgcccagctaatttttgtatttttagtagagacagggtttcacaatgctggccaggcttgtcccaaacttctgacctcaggtgatccgcccacctcagcctccaaaagtgctgggattacaggtgtgagccaccgagcctggcctttcccgcatttctgaacatgataagcaatgatagggatcatggaatcccaggatgctagaactcaaaagaatttgaaggaactggcccattcccaccatttctcaggtaagaaagtggaaaattagagcaggatgatggagcgccaaagatcgctcagctagtctgggtgatactggctacctttgcagaagggaggaacaggctcttttagcatctgccctaaaggaggtacctccagacctgacaacaaaggtgtgctctggcactaaaggtcctcttgggcccttgtgtgtagtgtggtaggggtacttatgagtccaatattccttcagacctttagtttgawgatgtcacttttgtaaaatttgggagacagaggaaggaggatcacttgatcccaggagttcaagaacagcctaggaaacaaagtgagacctcctctctcca

SEQ ID NO: 707200 - DNA, 2202 bp, Homo sapiens
ttgtatgtctgtatcacgttttgttaatccactaatctgtcaatggatattgaagttgcttccaccctttggcttttgtgaataatgctgctaggagcacaggtgtgcaaatatctcttcgagctcctgctttcaattcttttggatatacactcagaaatagaattgctggattattctaatccgtatttttgtttggttttgccttgcacttttccaacatggatttaaggttatgatttcctctaggctgacaaatataagacacaggagattaaaaagaagggcaaagacaagaaagggatgagtatgggacaaagagcagcggtggaggtgacattggcttttaaaggacttctacatttgtctttggcttacaaagcacaaggttatacatgggcagacagcacaacttttttcctaacttaggagaagtcactgatgtcaaagtgcctggcatgcattcattagaggccacagcagaactctccaagaaagcaaattttaccatctctccatttccagatgctaatctgcttactcagcctatggaaaatggagttattccggatatcaaatattaatgcaaaaggcatctgaagggaaagttgatctatcatgaaggcaatatacaggatgagttggactgaatgataacagtaaagttgagattgtaagtgctacttgtgcctggaattctatttcaacacagaagagagctttgcggaaactgcctggtgtcatctcagcaggaacagcttctttgcatgatgatgaacttgtggtttatagtaaacctcccccgacaaaggagtccttttccttgaagccacatggacaaacagtgtaaataagaatcaggtgcacaggagcccatggtttactgtccttgttatgtaagaatccatgtatgaggcataaacaggtcaagggtaagcaagagctgagagcattccttccaataggagaaaaatgccttcttaaagcggggtttcatatgatacccttagctgttaggaaaagtcagtatctaaaaaattacatgaagactatgcctgcatctttttaaaaacttattaaagattccagcatactgtgctgtttattgctgcttaaatgaaaatccttgcttaaaaaaaaaacctcctcaaaaattaatgaaaaaaagaaatgatttcacttcttttatgggaaaaaaaggttcatagaattttatttttttgccttagatatcaaagaagcccagagttacatgttttggtgagtaacaacaattattcttggcctattttctggtaccaaattcaaattcaaatatttctcatcattttaatatcattcatgttttcactcattgaacaaaatacttattgtgtaggttatataaaccaaatgctatatgtaatatatgttgaaaactgaaaacataacaagagagagtttctaccttacaggggtttagaaatttctgggaataggcaagcaaaccagtcatgataacatcatcacacatgcataaatgtatccacatctgtatctatgtatggagagagaagtgagtcacgagagagtgtaggactgacatcctgggagaaggcatggagtaaaggggtcttgggcattccctggagtgcatcaacaattaaggggcttgcrtaagtgaggaccctcagtggagtctgagaaggagtttcatattcatcacttttatctttcactgtaagtgatctaaataatgaaaaaaaatgaatgcatggacaaactgacaaaaaaaaagatgtttatgtctctgattcattaagccttgccaaagaataggggaagtcactgatgtcaaagtgcctggcatgcatgagggcagtgcagctgcttcattaaatgccactgcagaactctccaagaaagcaaattttaccatctctccattgcccagtaagttgggcctgcaagtttaattctattattctgagaaagagcttaggaaaagcgaggacaaaggaaaggataaaagttgaacttaggttctttttaaaaaacaagataattgcatttacacacactccccatatggattagtgtttatatcataatatccagtgttcatttaatgaatttgaattatcaagaacaacttacattattatcagtatattcttcttaagaaggcagggaaggatagggtaccttttagaaatatttttg

SEQ ID NO: 707201 - DNA, 681 bp, Homo sapiens
ggaaatagggtgtggggtatatgggaattctctatactatcttcatgtcttttctgtaaatctagaattattccaaaatacatcttttaaaaaacatctggccgggcgcggtggctcacacctgtaatcccagcactttgggaggccgaggtgggcggatcacgaggtcaggagttcaagactagcctggccaacatggtgaaaccccatctctactaaaaaaatacaaaaattagccaggcrtggtggtgggtgcctgtaatcccaactactcgggaggctgaggcaggagaatcacttgaacccaggaggcggatgttgcagtgagccaagattgtgccattgcactccagcctgggcgacaagagcaagactctgtctcaaaaaaaaaaaaaatcttcttgtaatacgaatgcaaatgaaagacagttgtgtctatcacaaccaagtggaatgcttaagttaatgacttgatgaaggcaagtctctaaagacattgttgtggacctagatatgaatgagaagagatttgggaagaaagaaaatgtggactactttcagactgtttcacaaggaaccttcattgtctcaattcaagtagaataaaaaacagaaatggaaactgaacaccctagaaaatgtatcatgggcatagttcactgaaaaagaccatatagtcat

SEQ ID NO: 707202 - DNA, 681 bp, Homo sapiens
ggaaatagggtgtggggtatatgggaattctctatactatcttcatgtcttttctgtaaatctagaattattccaaaatacatcttttaaaaaacatctggccgggcgcggtggctcacacctgtaatcccagcactttgggaggccgaggtgggcggatcacgaggtcaggagttcaagactagcctggccaacatggtgaaaccccatctctactaaaaaaatacaaaaattagccaggcatggtggtgggtgcctgtaatcccaactactcgggaggctgaggcaggagaatcacttgaacccaggaggcggatgttgcagtgagccaagattgtgccattgcactccagcctgggygacaagagcaagactctgtctcaaaaaaaaaaaaaatcttcttgtaatacgaatgcaaatgaaagacagttgtgtctatcacaaccaagtggaatgcttaagttaatgacttgatgaaggcaagtctctaaagacattgttgtggacctagatatgaatgagaagagatttgggaagaaagaaaatgtggactactttcagactgtttcacaaggaaccttcattgtctcaattcaagtagaataaaaaacagaaatggaaactgaacaccctagaaaatgtatcatgggcatagttcactgaaaaagaccatatagtcat

SEQ ID NO: 707203 - DNA, 681 bp, Homo sapiens
ggaaatagggtgtggggtatatgggaattctctatactatcttcatgtcttttctgtaaatctagaattattccaaaatacatcttttaaaaaacatctggccgggcgcggtggctcacacctgtaatcccagcactttgggaggccgaggtgggcggatcacgaggtcaggagttcaagactagcctggccaacatggtgaaaccccatctctactaaaaaaatacaaaaattagccaggcatggtggtgggtgcctgtaatcccaactactcgggaggctgaggcaggagaatcacttgaacccaggaggcggatgttgcagtgagccaagattgtgccattgcactccagcctgggcgacaagagcaagactctgtctcaaaamaaaaaaaaatcttcttgtaatacgaatgcaaatgaaagacagttgtgtctatcacaaccaagtggaatgcttaagttaatgacttgatgaaggcaagtctctaaagacattgttgtggacctagatatgaatgagaagagatttgggaagaaagaaaatgtggactactttcagactgtttcacaaggaaccttcattgtctcaattcaagtagaataaaaaacagaaatggaaactgaacaccctagaaaatgtatcatgggcatagttcactgaaaaagaccatatagtcat

SEQ ID NO: 707204 - DNA, 681 bp, Homo sapiens
ggaaatagggtgtggggtatatgggaattctctatactatcttcatgtcttttctgtaaatctagaattattccaaaatacatcttttaaaaaacatctggccgggcgcggtggctcacacctgtaatcccagcactttgggaggccgaggtgggcggatcacgaggtcaggagttcaagactagcctggccaacatggtgaaaccccatctctactaaaaaaatacaaaaattagccaggcatggtggtgggtgcctgtaatcccaactactcgggaggctgaggcaggagaatcacttgaacccaggaggcggatgttgcagtgagccaagattgtgccattgcactccagcctgggcgacaagagcaagactctgtctcaaaaaaaaaaaaaatcttyttgtaatacgaatgcaaatgaaagacagttgtgtctatcacaaccaagtggaatgcttaagttaatgacttgatgaaggcaagtctctaaagacattgttgtggacctagatatgaatgagaagagatttgggaagaaagaaaatgtggactactttcagactgtttcacaaggaaccttcattgtctcaattcaagtagaataaaaaacagaaatggaaactgaacaccctagaaaatgtatcatgggcatagttcactgaaaaagaccatatagtcat

SEQ ID NO: 707205 - DNA, 1358 bp, Homo sapiens
tgtaaaaatatggtttatgaaaaaaatgtcaattagtgctatttgcaagttctgtgcaagtggaaaaaagcaacatttgtttgatattccctccaccccacaattttcctttctttttttttttttctagatggagtttcactcttgttgcccaggctggagtgcaatgctgctatctcagctcactgcgatctccgcctcccaggtttaagcaattttcctgcctcagcctgaatagctgggattacaggcatgagccatcacgccccactaatttttgtagttttagcagagatggggtttctccatgttggtcaggttggtctcgaactcccgacctcaggtgatccgcgcacctcggcctcccaaagtgctgggattacaggcatgagccgtcgcgcctggctaccccataatttttcaaacaatttttcagaagtgtgccatgaaaataccaggccgtcagtggagacagaggcatcagtctgtctcatttatcagcagttttccctcaagctccttggaccactgccatgagccggcaggtgatggaagctaaataacaactccatacatcacctcatagctctgtcctgatacggaagtgaacgtttgcactaccttattaataactttatttctacaccttgattattttctgtttgcttttaagatgtgtaaaggagcctcagcttatcagttctcttttatctctttagaaacatgatttttagctcagtagaatgaggtctgacacctgctcaggggctcaggaaagggactaggaggggctaaggacccaggattttatttatttacttattatttttgagatggagtctcactctattgcccaggttggagtgcagtggtgtgatctcggctcactgtaacctccgcctcctgggttcaagcgattctcctgcctcagcctcccaagtagctgggattacaggcatgcgccaccacgcccggctcatttttgtatttttagtagagatggggtttcgccatgttggccaggatggtcttgaactcctaacctcaggtgatccacctgccttggcttctcaaagtgctaggattacaggtgtgagccactgcatcctgccaggacccaggactttatagaagatacttcagagcagccatcaggcagcaaagccaactctccctggaggtgacagaggagcaaggctctcgacagagcatcctctgactcaataagccctgcaagggcatttggcaaaataaaggacrgatcacttggggttgagccggcagaggtgcactctggctctattctcaataatgagtcacttctgtacacccctttacagtttgtaatttttttttct

SEQ ID NO: 707206 - DNA, 863 bp, Homo sapiens
cagtggctactccagaaatgcattggcggggtcagagggatgtggcgcttctattcctacctcacaggcagtgcaggtgggttcttggggttgttcctggggcttttgcaagttcctaatggttttcagattgccctaagccccagttaacaattatgtgtgtctgtgttgaatataaacatgtttaataatgcagtttggataaaaatctttgaaaactgaggtccatagtgtaggttaagggaaaggtagtcagagtcccttttactcgtttattcattcattcatttaacagtgtcattaagcacygctatgtggcagccactggcctggtaggttgggttacaaaggtgaacaagagccataagtccctgcttcacaaagctgccattttggtggggagatggacaaggaacacgtaaacaaatccctgtagtgggagtgatgggaagactggcttctgttctattgggtccagtagttactgggttctgggaggctggtagctggccctggctgacactccagctcaacaacattaagtttcatccaggccttagccctaattttaagggtgaaatcctggatctccaaggagcaggtagggaagaactagatggactacatctttcactttgccactcagagttcaggcctggccaagttttaacaaaagggaatgtagtctttggcatcttttggctccagtgtccttctgcaggccattctcagtccatgatctaggaaatgtggtttttttccccaatcttcattttttttggacaaaatttaattacttcataatcctcccccagagtcttgcagttttccctccagtgatggtttttctaacaccagcaaca

SEQ ID NO: 707207 - DNA, 520 bp, Homo sapiens
  misc_feature 419, 420, 421, 422, 423, 424, 425, 426, 427, 428, 429, 430,431, 432, 433, 434, 435, 436, 437, 438, 439, 440, 441, 442,443, 444, 445, 446, 447, 448, 449, 450, 451, 452, 453, 454,455, 456, 457, 458, 459, 460, 461, 462, 463, 464, 465: n = A,T,C or G
  misc_feature 466, 467, 468, 469, 470, 471, 472, 473, 474, 475, 476, 477,478, 479, 480, 481, 482, 483, 484, 485, 486, 487, 488, 489,490, 491, 492, 493, 494, 495, 496, 497, 498, 499, 500, 501,502, 503, 504, 505, 506, 507, 508, 509, 510, 511, 512: n = A,T,C or G
  misc_feature 513, 514, 515, 516, 517, 518: n = A,T,C or G
caccagcaccgtgacagtttacaaaggccatgacartgtctggaagttatcctatatagtctaaaaagggaaggaaccctcagttctggaaattcctcactcccttcctggaaaactcatgaataatccaccccttgtttagcatatgatcaagaaataaccataaaactagccaaccagtagcccttggagctgctctgcctatggagtagccaccattttattcctttactttcttaataaacttgctttctctttactctgttatcctctcttgaattctttcctgcgtgaagccaagaacccacttggcctcctgggctgaaccccaattttgagatttaccctgtgacagatatagttccacatatcactatatcacattctccatttaaagatatttaaatatagtgaccaannnnnnnnnnnnnnnnnnnnnnnnnnnnnnnnnnnnnnnnnnnnnnnnnnnnnnnnnnnnnnnnnnnnnnnnnnnnnnnnnnnnnnnnnnnnnnnnnnnntc

SEQ ID NO: 707208 - DNA, 520 bp, Homo sapiens
  misc_feature 419, 420, 421, 422, 423, 424, 425, 426, 427, 428, 429, 430,431, 432, 433, 434, 435, 436, 437, 438, 439, 440, 441, 442,443, 444, 445, 446, 447, 448, 449, 450, 451, 452, 453, 454,455, 456, 457, 458, 459, 460, 461, 462, 463, 464, 465: n = A,T,C or G
  misc_feature 466, 467, 468, 469, 470, 471, 472, 473, 474, 475, 476, 477,478, 479, 480, 481, 482, 483, 484, 485, 486, 487, 488, 489,490, 491, 492, 493, 494, 495, 496, 497, 498, 499, 500, 501,502, 503, 504, 505, 506, 507, 508, 509, 510, 511, 512: n = A,T,C or G
  misc_feature 513, 514, 515, 516, 517, 518: n = A,T,C or G
caccagcaccgtgacagtttacaaaggccatgacagtgtctggaagttatcctatatagtctaaaaagggaaggaaccctcagttctggaaattcctcactcccttcctggaaaactcatgaayaatccaccccttgtttagcatatgatcaagaaataaccataaaactagccaaccagtagcccttggagctgctctgcctatggagtagccaccattttattcctttactttcttaataaacttgctttctctttactctgttatcctctcttgaattctttcctgcgtgaagccaagaacccacttggcctcctgggctgaaccccaattttgagatttaccctgtgacagatatagttccacatatcactatatcacattctccatttaaagatatttaaatatagtgaccaannnnnnnnnnnnnnnnnnnnnnnnnnnnnnnnnnnnnnnnnnnnnnnnnnnnnnnnnnnnnnnnnnnnnnnnnnnnnnnnnnnnnnnnnnnnnnnnnnnntc

SEQ ID NO: 707209 - DNA, 557 bp, Homo sapiens
cttggaactcaaataggaagggctataagatcaggtacaggtgccagggtatacatattaatgatggcatttataccttaatgaattcctggaaaagagatatttagagatgggaaggtgagtgaagggctggctgtatttgcattgcttggaaagctcctgtatgttttaaatgtaattttccctctttttgccccagagttgcctgagtggaatttcgatggctcyagtactttacagtctgagggttccaacagtgacatgtatctcgtgcctgctgccatgtttcgggaccccttccgtaaggaccctaacaagctggtgttatgtgaagttttcaagtacaatcgaaggcctgcaggtgtgttatagcacagctatggatacccctcctcaatctgtgaatgctgtgaaggggagggagaagacattctgaaatcagcattgggaagactaggcaatttcagcactattttaagaatctgagtgattcttttccctgaacttctgctttgaggaagagataatatggcccatctttctatggtcttctctgt

SEQ ID NO: 707210 - DNA, 2101 bp, Homo sapiens
tattatataaaaaggggtgtggggaaggtcccctattctttccctttaagtggttgcatgaggatgcgatgtctggaactttggcagccatgttgagagcatgacgggccaagcctcagggctacagccaatatactgagggtgctgaagccaaaatgcgggtcctagatgacatcactgaacctctgaatgaaccaaaactggagccacgtaacctccagatttcttgactgcgaaggcacctattattgaattcaggagtaatagggtattctattacttgcagcctaaaacatcctagctgattgacactcaggtgcaaatgctgaaaacagctaagaggacaaggttaagccatgccagctgytacaacgaataactccaaaacctcagtggctttgcactacaaatacttggttcccttgaaacccctcctctgcttgaagttaggtagagccaagtaacatagctttggcctactctggatgttgtgcttttttggggaagttggggacagagcagcagttcaagcacaaaatgacctggctgctttgtgccaggtcctttatacacacagtgtatacacgggagcaaaatgcctggactcaaatcttgagtctgccacctcaccagccatgtgaccttgggcaaagtcaatcaacctcactgagccctagtttccccattgaaaacattggggtgattataaatattctacccacagagtaaaggattaaatgtccaattcagataaagaacttggcacattatctgtaaataaacacttaaaagattctgaccagagcctggtgggatgtgagtaatatcaaccccaccttagagatggggagtctagggttcaaggaaatgaagtccaaggacatataaataataagagacagagcctggattttaatacagacctaattgaacacctgctatgtgccaggcattgtgtgaggtgtttagatatattatcccattgaacatactagcaatcctgcatgggaggtattattattatcattattgttattcctattggacaaatgagaaagccaaaactcagagaagtgaaaagacttgcctacaggccaggtcaagatgcagtacttgaacctaggctgagtccaagcctttattctttccaccatgtataagcctccctaacagaagcccaccagactattatagtggaattgtaggcatcagaggagtaatacatttggctcccatggctattcagggttccctgaagtcatccccaaaagctggctgccagtccagcctgtcaccaaggttgtcctggtgatggctttaccctcactcctccagtagaataactgggccctggagtggatggtcctgagggaggaagtttggctcacttgataaagcagaactttcaaacactttgagctcatccatgatggaataggctgccttgggatgcgatgagttctgtggtcctgggaggatacaagcagagaaagtctggtggccacctgcaaggaagattattaagacagttactgcatagaaagtgaaattagattcaaagacctttcaggtttgaaatctgtggttgcaagattctcaggtcccattttctcagattccagtctaagattacatgatactcaaaatccaggaatctaaggctgcacgagttttctccttggattttttgttccctatttaggcagttagactgcagaacatctactgactcaggaaacagatgtgttagtaaaagcagagaatacatttctgggtttcaaaaacaccccttcctcccaggaaagaacattcctaagagacttgggcatcttgaacacctaatgaatctgaaagaggctctcactttctgtgactgtctttagggactgtccacaaatactctgtttcttttccttttagggtgccttagtctgttcaggctgctacagcaaaacatcttagactgggtaatttataaacaacagaaattcattgctcacagttctggaggttgggaaattcaagatcaaggctccagcagactcagtgtctggtgggagcctgtttcttatagatggtgacttctgtgtgtcctcacatg

SEQ ID NO: 707211 - DNA, 2086 bp, Homo sapiens
cactaagtccctgctctcaagagatgcgtgccagagaggtccagggcggtgggttcacttacccaaggtcactcagtgtgtcggtggcagagctaccatgaggacccaggtcttggactcctgggacagatactcccagatctgactcatgtttccacgttcccaactgctggagggcgagcagggccgtctacctccaaggcaaacctagtcagattagttctccctggtgagccttggggacaactaatctgactgggtttaccttggaggtagacgccctgctcgcctccggcagttgggtttgcctcccaaacacatcgctctgttttgttttcgtctgactttttgggttcatgtatgtaacatgtctgtctccctcatgagccgtttgctgagaggggggaccttgtctgtgtcatcatgtcgtgtcctcagcacctcgcacagcacctagtgctctctgtgttcaatgaccacaccgttatttcctcgtttccctgtcccatgtcagcaatgctgggtgctctccctgcaacaaggaaggggctgacctgcccccatgggacctggcagaacccacacgggggcagaggagccagggctgcctggtcagctcacagaacctgagcaccgtggccagaacccagatgagccacaggtgcccactgccaatcgaatgtcccctccctccctagccctgcttttggtgatgagctgggcagtgccagggtcagtgacttatgccactatggcctctcaactgacttttagtgtgaggccaggagacagagcagccctgggctgagaaactgtttcagctccacttcctccaggaagccctctatgctcagcctcatctaggctccgccagctccgaggtacacagtggaagggactgagcagtccccacagtgtctcctgctgacggggcctgacagctctgctgctgagaggtttcacagaaggcaagatgtgtcttccacctggggaaattcctgtggagccacagcatagggactcagcacacttaaactcgttttaaaggcaacaagactgaggctcagagagtgggaggaccttgagttagaaagtctaatgcayaccacagccaggaagctatttgactctaaacccggaggtctagcagcacgctccctgcatgccacatagcaaggtgctgggtcactgatgctaacatctaaacaggggccaggtgcggtggctcactcttgaaatcccagcactttgggaggctgaggtgggtggatcacttgaggccaggagtttgagacctcctcttcacagaggtggaagggaggaccagcgggggcaagtgtatcccaagtcccagctacttgggaggctgaggcaggaggatcgcatgaacccaggaggcagaggttgcagtgagccaaaatcgtgccactgcactccagcttgggtgacagaggaagactccagctcaaaaaaaaaaaaaaaaaaaaagtcactgaagtcacctggtacccaggactacttcaaggacagccattgttatggccaacatggtgaaaccctgtctctactaaaaacacaaaaattagccaggcatggtggcgcacacctgtaatcccaactacttgggagactgaggcagaagaatcacttgaacccgggaggcagaggttgtagtgagccgagattgcaccactgcactccagcctgggcgacagagtgagactctgtctcaaaagtcaaagtaggaccattaccaaccatgatgatgatgctgaccaatggcagctattgctgcagcacctgctctgagccaggcctgcacttggtgtttgagaggtgggtatgggtataattctcattttagagaggggaaactgaggcaccgtgaagttaaatgactcattcaagctcctctagctggaaagtgggaaatcaggactcagacccagagagcctgaccccagctggtgtccaagttcaaattccttgctgttctagctccctggtcactaggagtgcagaggttatcccccacaactgctcaggggcctgagaacattaagggctgagggcaagcctaccccca

SEQ ID NO: 707212 - DNA, 2086 bp, Homo sapiens
cactaagtccctgctctcaagagatgcgtgccagagaggtccagggcggtgggttcacttacccaaggtcactcagtgtgtcggtggcagagctaccatgaggacccaggtcttggactcctgggacagatactcccagatctgactcatgtttccacgttcccaactgctggagggcgagcagggccgtctacctccaaggcaaacctagtcagattagttctccctggtgagccttggggacaactaatctgactgggtttaccttggaggtagacgccctgctcgcctccggcagttgggtttgcctcccaaacacatcgctctgttttgttttcgtctgactttttgggttcatgtatgtaacatgtctgtctccctcatgagccgtttgctgagaggggggaccttgtctgtgtcatcatgtcgtgtcctcagcacctcgcacagcacctagtgctctctgtgttcaatgaccacaccgttatttcctcgtttccctgtcccatgtcagcaatgctgggtgctctccctgcaacaaggaaggggctgacctgcccccatgggacctggcagaacccacacgggggcagaggagccagggctgcctggtcagctcacagaacctgagcaccgtggccagaacccagatgagccacaggtgcccactgccaatcgaatgtcccctccctccctagccctgcttttggtgatgagctgggcagtgccagggtcagtgacttatgccactatggcctctcaactgacttttagtgtgaggccaggagacagagcagccctgggctgagaaactgtttcagctccacttcctccaggaagccctctatgctcagcctcatctaggctccgccagctccgaggtacacagtggaagggactgagcagtccccacagtgtctcctgctgacggggcctgacagctctgctgctgagaggtttcacagaaggcaagatgtgtcttccacctggggaaattcctgtggagccacagcatagggactcagcacacttaaactcgttttaaaggcaacaagactgaggctcagagagtgggaggaccttgagttagaaagtctaatgcataccacagccaggaagctatttgactctaaacccggaggtctagcagcacgctccctkcatgccacatagcaaggtgctgggtcactgatgctaacatctaaacaggggccaggtgcggtggctcactcttgaaatcccagcactttgggaggctgaggtgggtggatcacttgaggccaggagtttgagacctcctcttcacagaggtggaagggaggaccagcgggggcaagtgtatcccaagtcccagctacttgggaggctgaggcaggaggatcgcatgaacccaggaggcagaggttgcagtgagccaaaatcgtgccactgcactccagcttgggtgacagaggaagactccagctcaaaaaaaaaaaaaaaaaaaaagtcactgaagtcacctggtacccaggactacttcaaggacagccattgttatggccaacatggtgaaaccctgtctctactaaaaacacaaaaattagccaggcatggtggcgcacacctgtaatcccaactacttgggagactgaggcagaagaatcacttgaacccgggaggcagaggttgtagtgagccgagattgcaccactgcactccagcctgggcgacagagtgagactctgtctcaaaagtcaaagtaggaccattaccaaccatgatgatgatgctgaccaatggcagctattgctgcagcacctgctctgagccaggcctgcacttggtgtttgagaggtgggtatgggtataattctcattttagagaggggaaactgaggcaccgtgaagttaaatgactcattcaagctcctctagctggaaagtgggaaatcaggactcagacccagagagcctgaccccagctggtgtccaagttcaaattccttgctgttctagctccctggtcactaggagtgcagaggttatcccccacaactgctcaggggcctgagaacattaagggctgagggcaagcctaccccca

SEQ ID NO: 707213 - DNA, 2086 bp, Homo sapiens
cactaagtccctgctctcaagagatgcgtgccagagaggtccagggcggtgggttcacttacccaaggtcactcagtgtgtcggtggcagagctaccatgaggacccaggtcttggactcctgggacagatactcccagatctgactcatgtttccacgttcccaactgctggagggcgagcagggccgtctacctccaaggcaaacctagtcagattagttctccctggtgagccttggggacaactaatctgactgggtttaccttggaggtagacgccctgctcgcctccggcagttgggtttgcctcccaaacacatcgctctgttttgttttcgtctgactttttgggttcatgtatgtaacatgtctgtctccctcatgagccgtttgctgagaggggggaccttgtctgtgtcatcatgtcgtgtcctcagcacctcgcacagcacctagtgctctctgtgttcaatgaccacaccgttatttcctcgtttccctgtcccatgtcagcaatgctgggtgctctccctgcaacaaggaaggggctgacctgcccccatgggacctggcagaacccacacgggggcagaggagccagggctgcctggtcagctcacagaacctgagcaccgtggccagaacccagatgagccacaggtgcccactgccaatcgaatgtcccctccctccctagccctgcttttggtgatgagctgggcagtgccagggtcagtgacttatgccactatggcctctcaactgacttttagtgtgaggccaggagacagagcagccctgggctgagaaactgtttcagctccacttcctccaggaagccctctatgctcagcctcatctaggctccgccagctccgaggtacacagtggaagggactgagcagtccccacagtgtctcctgctgacggggcctgacagctctgctgctgagaggtttcacagaaggcaagatgtgtcttccacctggggaaattcctgtggagccacagcatagggactcagcacacttaaactcgttttaaaggcaacaagactgaggctcagagagtgggaggaccttgagttagaaagtctaatgcataccacagccaggaagctatttgactctaaacccggaggtctagcagcacgctccctgcatgccacatagcaaggtgctgggtcactgatgctaacatctaaacaggggccaggtgcggtggctcactcttgaaatcccagcactttgggaggctgaggtgggtggatcacttgaggccaggagtttgagacctcctcttcacagaggtggaagggaggaccagcgrgggcaagtgtatcccaagtcccagctacttgggaggctgaggcaggaggatcgcatgaacccaggaggcagaggttgcagtgagccaaaatcgtgccactgcactccagcttgggtgacagaggaagactccagctcaaaaaaaaaaaaaaaaaaaaagtcactgaagtcacctggtacccaggactacttcaaggacagccattgttatggccaacatggtgaaaccctgtctctactaaaaacacaaaaattagccaggcatggtggcgcacacctgtaatcccaactacttgggagactgaggcagaagaatcacttgaacccgggaggcagaggttgtagtgagccgagattgcaccactgcactccagcctgggcgacagagtgagactctgtctcaaaagtcaaagtaggaccattaccaaccatgatgatgatgctgaccaatggcagctattgctgcagcacctgctctgagccaggcctgcacttggtgtttgagaggtgggtatgggtataattctcattttagagaggggaaactgaggcaccgtgaagttaaatgactcattcaagctcctctagctggaaagtgggaaatcaggactcagacccagagagcctgaccccagctggtgtccaagttcaaattccttgctgttctagctccctggtcactaggagtgcagaggttatcccccacaactgctcaggggcctgagaacattaagggctgagggcaagcctaccccca

SEQ ID NO: 707214 - DNA, 1281 bp, Homo sapiens
  misc_feature 749, 750, 751, 752, 753, 754, 755, 756, 757, 758, 759, 760,761, 762, 763, 764, 765, 766, 767, 768, 769, 770, 771, 772,773, 774, 775, 776, 777, 778, 779, 780, 781, 782, 783, 784,785, 786, 787, 788, 789, 790, 791, 792, 793, 794, 795: n = A,T,C or G
  misc_feature 796, 797, 798, 799, 800, 801, 802, 803, 804, 805, 806, 807,808, 809, 810, 811, 812, 813, 814, 815, 816, 817, 818, 819,820, 821, 822, 823, 824, 825, 826, 827, 828, 829, 830, 831,832, 833, 834, 835, 836, 837, 838, 839, 840, 841, 842: n = A,T,C or G
  misc_feature 843, 844, 845, 846, 847, 848: n = A,T,C or G
tgaagaaagcctgcagcatgacaatgaccatgacgaattatgcagaaaagctaatcccaaagggaaaggagggggacttgcaaaaatggctaattaatatgagaattaatattaatatgagcgttgatataatgatgtattacatccagagaagcaagagaagtaaaaggagcaaaagaggaaggagaaggataggaagagagaaggacgtctcgtgaaaaaagaacaattacttcaaaatcatgccactttttaattcttatattaatcgctttctatctggaccatgcctacttctgttttgtttgctttagtggagaacaagaatgctgaatcaatttgaacgtttttccttaagttgcatggggctcgtgacactggaaccacagagaaggaagtataatcaaaagaagctactccattctcmattttcagtaagcaatgtttgtataatcattttaacaggaattctgcatgttcattcaacacgtgtttattgactccctactatgtgccaggcttgtgtaggcacatggactacatcagtgaacaagacagtaaacaaacaagcctccccattgtaagctacattctagaggaaatccataatatattatagataatcattaggtaagttttgtagggttaagtgcgctggggaaatgctagaacaggcagagggatagggtgtgagttgtgaagcaagttgcataggggccaatgaaattaggtgaaaaagatttttctannnnnnnnnnnnnnnnnnnnnnnnnnnnnnnnnnnnnnnnnnnnnnnnnnnnnnnnnnnnnnnnnnnnnnnnnnnnnnnnnnnnnnnnnnnnnnnnnnnnaaccactttttacgaattcgagctcggtaccgatcgtcaacgttagcagcctggcaatattaaagtcaatgcagaactcataaaggtgggagctcacgatggggaggagaagactgggatcagtctgtgcctttaaaagacactgcctttcattataagctcttttatgctctccactttttaaactacatatatggataaccaatttttaaattgtaggttaaatatgccaatttcagtctagaaagtagtcaagataaatacagtatcgcttatattcaaattgctgcttgttggcatttggggcagaacttattccctcatactggctttctaaattattttaaaacatctatgttatcatctctttcagtcatatgaacattttctgccatcttcatttacacatctgcagcacccagtattaaacagc

SEQ ID NO: 707215 - DNA, 1835 bp, Homo sapiens
cctctatgtacccacttttatttacccagcaagtaaaatgtagttaatttcaaagataaaatttcctacataagattatcttatcttcatcctccagtcaatagccctcagaagtgcatgctggttgtttaccttaaastcgaggaaaagtctaaggctatgttaactgtaccaagttgacattatccatatgtacactcggggaactgaatgttttcaaactattgctcattgttctcctttcagcaatttttgaacatcaagcaaaagcttatgatactttatgtttggtgatcttatagccatcctgagttatgcattataatggaaagttcacaggactatattctagttggaatcctgctattaaccagctatatgtgccttttggacaaatcacctcacctctctgtcttcacttcaccctttgaaacaagaggtttgggctagatgagtctaaaggtactttaatttctgtcctaaaatatttatgataggtcaataccattaaaattaaatctgatttttcaaggtgtaattgataaactgaaaaacatacagggagacccaagccctatttttatgggtgctagaaagcttcatttcaaggatatgtgtgggtactccttgcacgtagcaaaacaacagcaggagaattgagatataattaaataaattattatcttctctatgaagcagctgtgctttctgcttcttgatctcagaggtggaatcattatctagtaagcattaggagtcctttttttttctttttttttttttcctttttaacctttttggtggccctctggtgaatatgagggaattgtgaatagagaaacagggaggagaaatagttatttttcaacttaatctttcagtaaatgtttatacccttatgatctaccccactcctcagaatattacttgtatatatggtgtttcctatttcctatgctcttcaaatgcgagagataatctagtcggatcctggtacccaagagcaagcaataaacttgagacaagagttgaaatttcctttcatttatagaactcacgcctgtaatcccaacactttgggaggctgaggtgggcagatcacttgaagtcaggagcttgataacagcctggccaacatcatgaaaccccatctctactaaaagcacaaaaataagccaggcatggtggcacgtgcccgtaatcccagctaatcaggagctgaagcagaagaatcgtttaatcgagaggtaaaggttccagtgagccaagatcacaccactgcactccagcctgggcaacagagcaagacttcgtctaaaaaaaaataaagcacttgttctggggtcactacatagtctggaatgtgagggagtgaaagcagacttcatcttcatggacgcttcaagtgatccatactttctactcacagagccaggaaacaataaacagattaaccttgatgtctgagctaaagacaagatggagttgaccaaggtgatcaaagctcggattttctgtagctgggtgcaaaggtatttctagggccctgaggctaagtggcctatggttaatcatagaatcacttattagaatcaactccaactctcaattaagagacaagaacatttacatcccaagagactgagacaagtgccccagcagttgattagagtttgattcttggctcagtattttttgtcttgagttccatcttactatcattctctgaccaaaaccttggtgagttactaatttcataatgatgagttatattccaccccatgtttcatgatgtatattaaaatcaaatatcagtggatgagttttaaaatgta

SEQ ID NO: 707216 - DNA, 692 bp, Homo sapiens
taaatcagaaacctaatgaaaacacatgaatacaaaagtctgagacattgtatgtaataaacaaaaatggcaggtcttttatcactgtatttttagtgttaccatgaaatttttttttttttttttttgagatggagttttgctcttgttgcccaggctggagtgcaatcgtgtgatgttggctcaccgcaacctctgcctcccgggttcaagcaattctcctgcctcagcctcccaagtagctgggattayaggcatgtgccaccacacccggctaattttgattttttagttgagacagggtttctccatgttggtcaggctggtctcgaactccctatctcaggtgatccgcccgcctcggcctcccaaagtgctgggattacagcatgagccaccacgcctggcctcatgaatttttaaggaaagttattgcaaatctttaaccctagctaatcatataagctttagaagacaaaaaggtactttttcttgagtagttaagagatataaagttctggagatagactactccaagattttcataggatcatatctggatgataagattataagtgatttaaactttcatttccaaatcatctatatatatttttaaatatgaaataatcaataaatattaaattttaagataaccaaaaccactgttctcattccttctgtctgtctct

SEQ ID NO: 707217 - DNA, 731 bp, Homo sapiens
ctcagcattgtgccttgctcacagtagacactcaataagtgttagtggggcaaaatgcaggaaggcaatttaatttctgagtaacgcagaacaactgtgaagaagacacccaaaaaatgcccccattttcttttaccaattgatatctagtcaggagaactcctactacctacctaaaatttgctatgttctgccccacacggagaccagggaatacttgccatcagcttctcacccaagaacactgtgaaaattaacgatgaggtaatgtctgaaatgctcagagctctttggagatgtrtggcaaaaggcatcactatctttaatattcaaagtgattctacccaactctgatctctttttctgcagactaatgttacgtccacaggataaggtgatgccagattgacccctaaataaacctctccaacagacagtgccaacacaggtgcatactgctgagccctcacatgtggctgctggggtccagaaccataaggcaggagtggtttctgaccaccccaacgttgccaaagacttcaggagcaaagtgcattaggtagaaagtgatcttctgcgggaccccacttttaagcatgagaaagcccagtgaagacttcaaggggaatcattttagcaaaacccacatcctaagccagttaacatttttaggtctaacgcagtgcccaagaaaggaagaaataagaatagctccctgggctcaattacaa

SEQ ID NO: 707218 - DNA, 731 bp, Homo sapiens
ctcagcattgtgccttgctcacagtagacactcaataagtgttagtggggcaaaatgcaggaaggcaatttaatttctgagtaacgcagaacaactgtgaagaagacacccaaaaaatgcccccattttcttttaccaattgatatctagtcaggagaactcctactacctacctaaaatttgctatgttctgccccacacggagaccagggaatacttgccatcagcttctcacccaagaacactgtgaaaattaacgatgaggtaatgtctgaaatgctcagagctctttggagatgtatggcaaaaggcatcactatctttaatattyaaagtgattctacccaactctgatctctttttctgcagactaatgttacgtccacaggataaggtgatgccagattgacccctaaataaacctctccaacagacagtgccaacacaggtgcatactgctgagccctcacatgtggctgctggggtccagaaccataaggcaggagtggtttctgaccaccccaacgttgccaaagacttcaggagcaaagtgcattaggtagaaagtgatcttctgcgggaccccacttttaagcatgagaaagcccagtgaagacttcaaggggaatcattttagcaaaacccacatcctaagccagttaacatttttaggtctaacgcagtgcccaagaaaggaagaaataagaatagctccctgggctcaattacaa

SEQ ID NO: 707219 - DNA, 3034 bp, Homo sapiens
gttgatgtcctcggatgaagctggaaaccatcatcctcagcaaactaacacaggaacagaaaaccaaacaccgcatgttctcactcataagtgggagttgaacaatgagaacacatggacacggggaggggaacaacacacaccggggcctgtcgggggtggggtaaggggagggagagcatcaggacaaatagctaatgcatgtggggcttaaaacctaggtgatgggttgataggtacagcaaaccactaggcacatgtatacctatgtaacaaactcgcacattctccacatgtatcccggaacttaaagtaaaaataaataaataaatacatacatacatacatacatacataaatgtcgatgccctacatcccctccaaagggcatctcccccaccccaccaccaagggcagcccagtggtctccctgctctgaatctgtcacccacattttcatctcggtgccctccactcctctctcaggaaacatttcacagttccagcaggtgagtcagacacagaacctaataatcagtcatttattcagttattcatttattcaggtgatagctcttgggcgtctgtcatgctccaggtaccatactgaaacagaagtagagtcagcccttcatatctggggcttctgcatccgtggattcaaccaaacttgaactgaaaatattcggggaaaagatgcatggttgtgtctatactgaacatgtacagactttttcttgtcattattccctaaacaatacagtataacaactatttacatagcatttacactctattaggtattataagtaacctggagataatctgaagtatacaagaggatatgcataggttatatgcaaacattacaccattttatataaaggacttgagcatccatggattttcttatctgcagtggggtcctggaaccaatcccctatgggatactgaaggatgactatatagacaaaacactacgagaaaccaggagaggcaaagtcacgaggttagaacagcagaagaacactagaattgaaagataactaggagttttactggtagatggagtgkggcagtggagagggtaagcaaaggaaatagcatgaacaaaaatccagaggcctgctagagccttgtgcattgaagaaatgttttcattattaaggcatgagaacaacaggctggaggatgagactgaaaagttagctcaagcctaattcccatgctgagttcacctgctgatcagccccctccccctgcatctccactctggcatgcaatccccacctggcccatctccaatgcagactcctccaaaagacttcctgaagaaccatcttcagcatccatctatccagatctctcagcctggggcagaaatcctggcactcacaccaatttactcagcaatccccagtgaacagatcattctgttcactgactcttgggtataagacttactagtccagctacaaaagaaatttctggctaatgatgtctcttatacccctaggctgtcaacactaggctaaacttctaatgggcaatcaataaaagcctacggtatctaaacaaattaaattgggcagactaaatacaagagagggatgagtgtgcacaggttgtacgcatctaactgtcacccagacagctaggaaaattgaaactgtctttgaaaatgagcttctgaacacaatcatggcaaaagatagattaattctctttacgcatgtaattctgcatcttcccagacatttctcaggcacacaaacagtacttgttaaactgagctgcatgtcccaagagcttctgtacataaaggtcaatctattctgaagacttggatattttttttttctttccaagaggcaggagaataagagaggaaagaaggtccctcacataggtcatctctgctgggattttccatactgataattccaattcaaagcaaaaaatcctagtgccacctgggaagacctggtctccatcattcatatttttatgtagtaacaaacatttctagatagctcctccctgagggcagtgggcccatacattgatcaagtggctagtctctccctgttctggttccgatccctcagccctgtattccctaccacagcattcatgatgctgacttcttatttgtccccacactaggctgtgacctctgtaaggccaaggactgtaactccatctgtatttgctctggggcctagaacatcactttccaaataatgaatggccatggtttgaatgtaccccccaaagttcatgtgctaaaactgtgatccccaatatggcagtgatgggcggtggggcctaataggggatgtttggaacatgggagcaccaccctcatgaacagactaatgctgttattgcaggagtgggtttattattgtgcgattgggttcactcctcttgccctctctttgcccttctgtcatgggatgacacagcaagaaggctcatgaaagataccggcctcttgatttggacttccctgcctccagagccacaaccaataaatctttatttattataaatacccagtctgtggtattctgttatagcaacatggatgtgagggcaatctggctgtgacatctgtcaccccactggtcaccaggtttgattcagctgatctggctggctaggcaggtgtccccttcctccctcaccactccatgtgcatccctcccgaagctgcattcttggtcaaagaggacagccatccccgacagaggaggactggtctttggtcaagggtatacgagtagctgtgctcccctgctggaacctccaaacaagctgttagagcaacacaaaacagtctaagacatggattatctatgctgtgaaattaaatgtagtgtcaaagctgtagaggaccttggatataacctagcccacagataggaaactgaggcccagacaaggggaagcaaccttcaaattcacacagagaggtggtggtagtttgcaggtggaagagaataagaaacaaacatgtcaggaatgccgt

SEQ ID NO: 707220 - DNA, 2304 bp, Homo sapiens
gaaccccatctctactaaaaaaatacaaaaattagctgggcatggcagcagacgcctgtgatcccagctactcaggaggctgaggcaggagaatcgcttgaacctgggaggtagaggtcgcagtgagccaagatcgtaccattgcactccagcctgggcaacaagagtgaaactccatctaaaaaaaaaaaaaaaaaattcttgttgagtgaagtcccgagctcctcccctaaacttgtgaacacataggttgtgtttttacctcttcacagctttctgctgacaaaagtttcaggtcttgtttaacattaggcaatttttattattttggtgccctgtagttcctatttttcattgccatgaaattgcttccaatctgtgttcaagagcctcatttaagttttattcaaagtatcctatgaaaagaaacaggcctctaagaaaatacgtcttttcctggcacaagtactggtaactggtttctagttattaacaacaagttatcggtaacaggagatgggaaggatgccttttcacgtcttctctcaggtattgttttccttctgtttggagagagctgaggtgtgtgacttcatactctcctttctgttcctgcttttgctgggtggagggaaggagccctagagaagagccacagcggcagcactgagctcacactggtcaggagcaccagagggacaagggactcctttaacgaactctaatagcctaaggtgagtgactaaaccacctttggcctggacagagaagccaggcaaagaggcaccccaagggaggcttaaaatcagtttccctggggtctaaaaacaaaatacagtggatggtttcagactagaagagacgtccataagagctgagggttattgctagcatttatcatctactagattgagtacttgctggatttctatcccataaaatgggcactattagtatgccaatttgcagaaaagaaaaccaaagcactgagaggttaggtggcttgtctaaggtccaccaggatgaactgggattaactggctcaactggggtaagaaaggtatccaatatatttcttttgctttaattttcttaaaaaggcaaatctaattcaaggctttaatgttcggctttttatatatttaaaacaggaataaggtgcaagattcagggatgcaatcaatttcagataaagcacatgtgtggccttgcaatgaaagaacttcctgccacctagtggcaacctatgcttgctgcagtggggcagccaagaatcccaggcctcctggtgcaggcgctgcaaaccataacttgtgaaggtcgaagtctatcaaatattaccggtattcactcctatttgcaaaggttattgccaaataagtgtgatatgagaagtcaagactgtttttcagtgaccyccacctttctccctcacccctgccttcttgagtattccttttgcttctacactccttgggtacgctccttttatgataaacactttgctgatagtgatctaactaatctgtgcctagagagtctgtaagcatcctgaccagggggagagacttgtcttactcatctgtaaatcccaaggcctggcacaaaggaagtatccagtgaatgtctgttgaacgaatataagtgaatgcttttaacccaaactctatgactcaggccaagattaagcagcagtttatttgaatactctatatagtaaacatttgaagagggtgggtgggagagtggaaggggcttctcagggaagtgtccaaggcaggacagggcaggaggcccttgggccgttgacctgtttacagggccgtggatgcccggaacttctgggtcaaacagaacacggcggccgtgagggccgtgcactgacgggccaggagtttcacactcaggtcgtggtagcctctctcgcaggtcgatttagcagcctctataaactgatggtaggtgtacaccacatccctcaggttccccgctgcctccctgtgccgggcggagcagcggctacagtctgtgaactgaaagcacaggccggccagctggaccaggtgctggaaggtgtcacgcacggccccctgcatctcttcgggggactggtccattctgatcacatgccgacagctcgacaggagcttctgggagcccatgcagaggcggctccggctttcggtaaagtgccaggtgcacttctctgggggatgtttgtttccaaccccccaggaagtttctaaaatgtcttgtagctccagcaagctctccatgagttggatgaagccctcaggggtgctg

SEQ ID NO: 707221 - DNA, 1022 bp, Homo sapiens
taaatattttccagtggtgtactatttagtttaccagacaaattctagtacrtgacagagtcctcaggaattttaggctaaaagacacattgattttcagaggatctctaaggtcccttacgtgagtaggatttcacagttctctaatacataccattaaagtagcattaaagattcttccaccatatgtcttgagttctccgaggatctgtagataatttaaacgtagctgggcagcagaaataagttgcttaatagagaaaaaaaaacacttgaagtcagagttattcattggtctaaaatccaggcagtgttgaaaatgtttttcctaaggtttcacagacgacagctgagtgggtcggcagaggcaccttcattaccttctgtcggggttccagcaaattctggttcctcttcatgtggaagctaatggctttcttgatgtctttgcctttcatgtttcggagtaaagttggagatataaagttctctattccccagtctttcctgccatgagacattggagacaaggaggcccatttctacagggtacttggctctaatgaagagcataattacatttgattcagtacttagtgttcccataatacagcaattacgagccactttctcctcctctctttttctttctcacacacacatacacacactctccacaaaaatccccacaggcattcaggaactaaaccccattgatcattctgggagctcattactcttggtgtggtgtgaccatctatcagtcagagcaggagttctgaatctttttcactacaaaatacatggcaaataatgacagcatacaagagagtacaagacactctcatggggcaacgcagagctcctgtgaatcccctaggctaagcttcagcatggtgccagcctagcagcttcaaaatcccccagaaaattgctaaaactacagattctcaggccctgctgcgagagattggacttagtacatcaggggtagggccaaggatatgctgtatttttaaaaa

SEQ ID NO: 707222 - DNA, 1022 bp, Homo sapiens
taaatattttccagtggtgtactatttagtttaccagacaaattctagtacatgacagagtcctcaggaattttaggctaaaagacacattgattttcagaggatctctaaggtcccttacgtgagtaggatttcacagttctctaatacataccattaaagtagcattaaagattcttccaccatatgtcttgagttctccgaggatctgtagataatttaaacgtagctgggcagcagaaataagttgcttaatagagaaaaaaaaacacttgaagtcagagttattcattggtctaaaatccaggcagtgttgaaaatgtttttcctaaggtttcacagacgacagctgagtgggtcggcagaggcaccttcattaccttctgtcggggttccagcaaattctggttcctcttcatgtggaagctaatggctttcttgatgtctttgcctttcatgtttcggagtaaagttggagatataaagttctctattccccagtctttcctgccatgagacattggagacaaggaggcccatttctacagggtacttggctctaatgaagagcataattacatttgattcagtacttagtgttcccataatacagcaattacgagccactttctcctcctctctttttctttctcacacacacatacacacactctccacaaaaatccccacaggcattcaggaactaaaccccattgatcattctgggagctcattactcttggtgtggtgtgaccatctatcagtcagagcaggagttctgaatctttttcactacaaaatacatggcaaataatgacagcatacaagagagtacaagacactctcatggggcaacgcagagctcctgtgaatcccctaggctaagcttcagcatggtgccagcctagcagcttcaaaatcccccagaaaattgctaaaactacagattctcaggccctgctgmgagagattggacttagtacatcaggggtagggccaaggatatgctgtatttttaaaaa

SEQ ID NO: 707223 - DNA, 1022 bp, Homo sapiens
taaatattttccagtggtgtactatttagtttaccagacaaattctagtacatgacagagtcctcaggaattttaggctaaaagacacattgattttcagaggatctctaaggtcccttacgtgagtaggatttcacagttctctaatacataccattaaagtagcattaaagattcttccaccatatgtcttgagttctccgaggatctgtagataatttaaacgtagctgggcagcagaaataagttgcttaatagagaaaaaaaaacacttgaagtcagagttattcattggtctaaaatccaggcagtgttgaaaatgtttttcctaaggtttcacagacgacagctgagtgggtcggcagaggcaccttcattaccttctgtcggggttccagcaaattctggttcctcttcatgtggaagctaatggctttcttgatgtctttgcctttcatgtttcggagtaaagttggagatataaagttctctattccccagtctttcctgccatgagacattggagacaaggaggcccatttctacagggtacttggctctaatgaagagcataattacatttgattcagtacttagtgttcccataatacagcaattacgagccactttctcctcctctctttttctttctcacacacacatacacacactctccacaaaaatccccacaggcattcaggaactaaaccccattgatcattctgggagctcattactcttggtgtggtgtgaccatctatcagtcagagcaggagttctgaatctttttcactacaaaatacatggcaaataatgacagcatacaagagagtacaagacactctcatggggcaacgcagagctcctgtgaatcccctaggctaagcttcagcatggtgccagcctagcagcttcaaaatcccccagaaaattgctaaaactacagattctcaggccctgctgcgagagattggacttagtacatcaggggtagggccaaggatatgctgtattttwaaaaa

SEQ ID NO: 707224 - DNA, 397 bp, Homo sapiens
ggtggatagaaagcataaattggccataatatgatgaaattggaagagatggatgattagcaggacaggtagtaaggatagtagaacrtggtgataataatagtaactaccactaaattgtcatgagaaaacaattaaatcagagactgcatataaatacttagcacaggctacagatagtgctcaaaatgctaaagtaacacattgttaatgaaagaaatagagacaaaatatcaatttcaagttgtttatggttaagaaagatacttgctttctctttaagatcttttatattatccttattttaactgtgtgccagaagtttttaggacaaagcaaatgcaaatatattatttgaatgaagtgggcagaaataataagatgggctgatcctgac

SEQ ID NO: 707225 - DNA, 987 bp, Homo sapiens
tctcttttcaaatttcaagtaaataataccatattattagctattaatgtcattacatttctctatttgattcccagttcttgttcatcttattactgaaagtttggattctttcaccaatatcataatcaaacaaaaacagcaatgataggttctaaaatgcaactatcttaatatgacaattgatgttatgaatcttcagtrataacatctaattatcatccattaaacatagtacctcatttttacatcatttaccattttaaatttacttaaatctatattttgtttttacagcattagtttggaaaggattttgagaagtaattcctcaaccatcatataacattctacttgaaaacctgagtctatgaagatttgcatactacttaatgttttatgttcatttttttctactttcagatccatgtgtaatatcacaagaaattatggaaaaatataacataaaattaaagtggacaaaccaacaaaagctttattcaagaacaggtgacatagttgaatttgtttgtaaatctggatatcatccaacaaaatctcattcatttcgagcaatgtgtcagaatgggaaactggtatatcccagttgtgaagaaaaatagaatcaatggcattactattagtaaaatgcacacctttttctgaatttactattatatttgttttcaatttcatttttcaagtactgttttactcatttttattcataaataaagttttgtgttgatttgtgaaaatgcaattacaatctgagatgtgtcacaatggtgaggactatcttcaccaaatctaagtaacaacctaggaattgtctttttttttctttttaaaaaaattgacaataactgtatatattcatggagtacatagtaatgtttccatatatataatgtataatggtcagttagggtaattagtatatccattatctcaaacatttttcatttctttgggttaggagcatta

SEQ ID NO: 707226 - DNA, 1099 bp, Homo sapiens
atactgatcttactagactctttgtctaatgtcttgccttcaagtaggttgcttcaattcaatgcaaccaacattttgtgaaagccttccatatgctgaggcagcgagtagttctccaggtatggttctcagacaagcagcatcagagtctcctgggaactcatcagatacgcatatccgcagactccaccccacacctactgaatgagaagctccaggaatagggctctgtaatcaattttaataaacccttcaggtgatctagatgtacagatgtttgagaatcactgtgctggggtgaagtgggtcaggagcaggaggtggttgagggcagagctaaaaatgaataaaaaccaccttctatcctgaaggagtttacattggagagagaagtacagagaaataatgttatgaaaacaaaattattgtcttgactttctgctatttcctgcttccctttttcttcagattaattcacaacaatttagcctagattgttttagtttttatatgtgattatttataaacagcctaaaattttaggccatctgggtctatgcaaatcctaaaaggggaaataatttaagttacattggtagatagggtgaacagagattagwtcaccaatattagaatcttagaatcgatgaggatttactgaaaccaagaatggggtgttatttttcacagtgggtagtaaaattacagtacttattaccctgtaaagggttatatggcctagaaataaaaacagttgagcatggattagatttatgagtgagaaagtcataaaattccaataagcatgagttaggaatgttcaaattatttctgaaaatgtctgacatcaatatcgtagaaggaaactaccacctttgctgtcaccacctcttattataatcttcagtgttcagaacactagtctagaccagaccagaccaatgtggtattcgttgtgggctggcaagtagactgtgtgagaataaagactcttgtacctaatgtgttttgtataaaacctgtgcacacttcagattagatagataataaaggtagagaagataaaggagacaatgatgcactcataaagaaaataatt

SEQ ID NO: 707227 - DNA, 1110 bp, Homo sapiens
tcattctgctgagataaacccaggggcaagcaaaagtaattttcccacaattcctcctgcactccaatctcttctccctttacttccctttacttctccctytacttcagtaaaacacttttatctgaagtcttgacctgttttcttttgtgatcttttaggtaatgttgtccgcttttagtctaagccactagtggaattaaaggcatgcccccaaattcatgtagctaggtataatcctgatttccacaaactccattactcagggcctggatgctgcagttgttgaaatgagcccatattttcctgataccctcaccatgtctgctctatttgaactttctacctctttctacagcctatttccccaatcagatagtccaatacctgggttccagctctaggattagagctgaatggaatctccaggaactccttgtggcattagtcttctcaatcttatcctctagataggataagatccttcaaccttatcctctaaaagctacaaacttgactgtgctttccatactttctattctagcttcacagtctttcctctccactgaaggaagaccagtattgctgctagcataccgcacaaatgaatcatatattctaatcctgccagaagaaaatacaataattgcaataattatggagttcagatttgatcaacagtagcaactttcaaaacaaatgaaatggcatctcaattctatcagatgtggtgatccttggaatttattcaaaaaatgtcagaacctagctcaaggtttgctattttgttgttgttgttgttgttgttctttcaaaagtaatgattaagagagaacatccaccatattttcatttcagttctgtcactttctactttgtactaagtctctcaatttccttatttgtaaagtaagaaccaaaataccatgtgcctagataattgctgggaataaaggaaagtgtcagggaagagccctcaatctcatagagaagagcaaagagtagcaagactccaaaagagaagactaagcaaaaaaattgacttgtgacagttgcacacatcccaagagtagacaagacacattggatcagagaacaatttattactca

SEQ ID NO: 707228 - DNA, 633 bp, Homo sapiens
gaagaatttttgaagggggttggctcctgagctgaaccttagtgtataagtgggagttagttaggaaaaagggactgggcggaatgtagtcaagatcccaggcagagaggaaaacacatgcaatagcattttagagaaccacaagcagtgcagtcttgccagagcacagaatttgaagcaggggatgaggttggagaggtgggtaggaaccaactcatatgcggttctgtacaccgtatccggagagcaacagaggatttgaaactgaggagacaggcattaaggtagccagagtgacatttcagataaggcctctgcagccctgtgggattccaggttccctgtggagggaaaacttgcacgggacaagcctggctgcagttaggggttaccttgaagggttcagaagtaagacgcatttggattgggatggtgatcatagggatggagatgagaggtatggaaatcaactggcaggactgtctttaatgatcccaagagcccagtgagaagtagaaaggaaatacttaaacttcgggaaaggctttgtcacagacacagtctgggaaagcttcatggaggaggtgggacatgarcagccctttaaagaagaacgggacctaggtggagaag

SEQ ID NO: 707229 - DNA, 972 bp, Homo sapiens
tgatcctttttagttgttcaatttcattatctttctgtacattactggatatcagtgcttttagctgtatttctaaagctgcaaccagttgatctcgttcttctcgccacttttgaaggtcactatctttctctgtcagctgggctgtcagtatttcctaatcaggaaataaagaaaatattaaaatcaaccttgatatattatgaatctaagaatgtttagaaattattayatgtaacaccataaatatagctgcaaacaagattacaagacaaattaagtagtctagataaaatatttaactataaaacaacacatatcattttataaattaaatgtccatgttatttttatccatatcccatctcattccaaaaatcagcttactggtaacttctttcaatacacaattacagctatagctttcaaactagtatcaacatttctgccaacgtttggaaaattagtgggtaaaattacagtaatagcaacaaacaacagaaaaatgaaaacagaaaacaagaccatttacaataggttcaaaaatcatgaaatactgataaagaaaatgtataaaaccataaaatactgctgaaagagattaaagaacacctaaataaatagagagattggtctgtgttgaaggatcaaaatactcaatattgttaagatgtctcctccaaatagatctagagagtaaaagcagtttttatcaaaattcaggtatgtgtgaatgtgtgtggaaatggaaaaggtgactctaaaaattatatggagatgcaaatcatctagaatactcaaaattattttgaaaatgaagaacaaaatgacagcaattatctataatttcaagttagcacaataatcaagacagcatgtaaagacagagaaatcaatgggacagaagagacgatctacaaatgcatggtcaactgacttaaaaaagtggcaaaaaaattaaataaaaggaag

SEQ ID NO: 707230 - DNA, 972 bp, Homo sapiens
tgatcctttttagttgttcaatttcattatctttctgtacattactggatatcagtgcttttagctgtatttctaaagctgcaaccagttgatctcgttcttctcgccacttttgaaggtcactatctttctctgtcagctgggctgtcagtatttcctaatcaggaaataaagaaaatattaaaatcaaccttgatatattatgaatctaagaatgtttagaaattattatatgtaacaccataaatatagctgcaaacaagattacaagacaaattaagtagtctagataaaatatttaactataaaacaacacatatcattttataaattaaatgtccatgttatttttatccatatcccatctcattccaaaaatcrgcttactggtaacttctttcaatacacaattacagctatagctttcaaactagtatcaacatttctgccaacgtttggaaaattagtgggtaaaattacagtaatagcaacaaacaacagaaaaatgaaaacagaaaacaagaccatttacaataggttcaaaaatcatgaaatactgataaagaaaatgtataaaaccataaaatactgctgaaagagattaaagaacacctaaataaatagagagattggtctgtgttgaaggatcaaaatactcaatattgttaagatgtctcctccaaatagatctagagagtaaaagcagtttttatcaaaattcaggtatgtgtgaatgtgtgtggaaatggaaaaggtgactctaaaaattatatggagatgcaaatcatctagaatactcaaaattattttgaaaatgaagaacaaaatgacagcaattatctataatttcaagttagcacaataatcaagacagcatgtaaagacagagaaatcaatgggacagaagagacgatctacaaatgcatggtcaactgacttaaaaaagtggcaaaaaaattaaataaaaggaag

SEQ ID NO: 707231 - DNA, 972 bp, Homo sapiens
tgatcctttttagttgttcaatttcattatctttctgtacattactggatatcagtgcttttagctgtatttctaaagctgcaaccagttgatctcgttcttctcgccacttttgaaggtcactatctttctctgtcagctgggctgtcagtatttcctaatcaggaaataaagaaaatattaaaatcaaccttgatatattatgaatctaagaatgtttagaaattattatatgtaacaccataaatatagctgcaaacaagattacaagacaaattaagtagtctagataaaatatttaactataaaacaacacatatcattttataaattaaatgtccatgttatttttatccatatcccatctcattccaaaaatcagcttactggtaacttctttcaatacacaattacagctatagctttcaaactagtatcaacatttctgccaacgtttggaaaattagtgggtaaaattacagtaatagcaacaaacaacagaaaaatgaaaacagaaaacaagaccatttacaayaggttcaaaaatcatgaaatactgataaagaaaatgtataaaaccataaaatactgctgaaagagattaaagaacacctaaataaatagagagattggtctgtgttgaaggatcaaaatactcaatattgttaagatgtctcctccaaatagatctagagagtaaaagcagtttttatcaaaattcaggtatgtgtgaatgtgtgtggaaatggaaaaggtgactctaaaaattatatggagatgcaaatcatctagaatactcaaaattattttgaaaatgaagaacaaaatgacagcaattatctataatttcaagttagcacaataatcaagacagcatgtaaagacagagaaatcaatgggacagaagagacgatctacaaatgcatggtcaactgacttaaaaaagtggcaaaaaaattaaataaaaggaag

SEQ ID NO: 707232 - DNA, 2315 bp, Homo sapiens
tatccttttctccaaatgaataaagaatgcaaacaaagaaaacaaaataatgtgctgggatttaggcagaaaatactatatttataaaatcaaagtaatgagttttaactattataagcacagaaattattacatagactgcgaaagaaataataaaagcacaatttctaaaagcatatttattaagataaaagctttaactatgcccatccctagaaaatgtataactttccagaataaaaattcaagacgtttagattttctcaagatttttccttagacaagtgaatgcccctctgtttgccttgttctatttactggtttagaaattagctttcttaaacgcctgctgctggcagctgaagtagtacctttctttgctggtggttcatcttgctgaagttcattttcatttactctttttctttctgaacagattttagatttgctgtccttaggtacttcaactgtttcattacaaatcaatttattgtttattattaaagaagatgtatcagccttgtcctaaagcaaaataagttaaaaataattcacatatagaaagctacaaaaaatgtacaaatcacataaattactttcaatggtgtaccataaaaattttattttcaaatttgttgagacattttctaagttatttcttaagtttcgtcctaaaataactgatggctctagcaaataagtaacatttggggataactggagaatcttaagaagataaatctctgaagtcacatcagaaatgtgctttgaaaagaaaaatatgaactcaactatttattttgttttgtagccaaagcctcttaaagattagtattgtcttaaacattaacaactcctagaaaaatagttttgcccttagctttaagtcgatatatattcaaagatatacagcctacagacagctttgaaactgagcttctagatacgtcatttagactttttttttttttaaggcagactgcctcccttgaaaaggctagtagcaaccaagcacaggggctcctgcctgtaatcccagcactttgggaggctgaggccggaggattactcaagcccaggagtttgagaccagcctgggccacacagtgagaacccgtctctacaaaaaattaaaattccaggtgttgtggtccatgcctgcagtcccagctactcggaaggctaaggcaatgggatctcttgagcccagcagttcaaggctgcagtgagccatggtcacatcactgcacttcagcctgggcaacagagtgatgagaccctacctctaaaaagaaagaaagtgggggagctgagagagggggggaacttccaaaaaaagggtataatatggatttagaagaagggtaaaactcagcatttaagcgcaagtctatagagtaatcaaatgtatggtgaaggcagaaacttgtagcaatcaatttgaaaaaacaaagtgtatgatagagtgccgcttaatcagcaaacattgtattagcaggaaatacagataaaaataaccttttaaagtcataaagtaatgggttatttaagaaaaaaggcaaagtttttctagtatctctaaacaaaggatgtcataaagaacaatctccacgctttctcacaattagtcccttagtgtcactgataaatgacaaaatcatgggacaggcagatcacacctctgacacagctccataacaagtccaagttgttccttccccgatccttggtacctatcagaatgatcccgtcatttttccccgcttcaaaatatacaatcctcaccaaaaatctatccttcagaagttatagttattgaaaggagggttttctgctcccagggtatgcttgggtagaaaaagcaaagaattcaaactaaattttttcattattggaaagagtttgcgctcaagacaagatgtggaacagtgaccctagatcaactgttaatcaggacaattaggtaagttccaaactactttgtatatttgtatgtatttaagtgaacaatttaaatttagcacactgtattaagttagttgataaaacaagatctagaatctataaagtttatttacaagcaaggactaactaatttacaaatattgatttttttactatcacttccttaaatattgctaatatattatggtatgcaaacacactacagcaataaatataatcccatgtgaaatttccaactattttctttgaagttgtagtcrccagaaatgacctgtctctgactttcctttttgtttttatttaccaaatcaaagaacagacttaaaatccagatcaagagatgagagcaa

SEQ ID NO: 707233 - DNA, 2315 bp, Homo sapiens
tatccttttctccaaatgaataaagaatgcaaacaaagaaaacaaaataatgtgctgggatttaggcagaaaatactatatttataaaatcaaagtaatgagttttaactattataagcacagaaattattacatagactgcgaaagaaataataaaagcacaatttctaaaagcatatttattaagataaaagctttaactatgcccatccctagaaaatgtataactttccagaataaaaattcaagacgtttagattttctcaagatttttccttagacaagtgaatgcccctctgtttgccttgttctatttactggtttagaaattagctttcttaaacgcctgctgctggcagctgaagtagtacctttctttgctggtggttcatcttgctgaagttcattttcatttactctttttctttctgaacagattttagatttgctgtccttaggtacttcaactgtttcattacaaatcaatttattgtttattattaaagaagatgtatcagccttgtcctaaagcaaaataagttaaaaataattcacatatagaaagctacaaaaaatgtacaaatcacataaattactttcaatggtgtaccataaaaattttattttcaaatttgttgagacattttctaagttatttcttaagtttcgtcctaaaataactgatggctctagcaaataagtaacatttggggataactggagaatcttaagaagataaatctctgaagtcacatcagaaatgtgctttgaaaagaaaaatatgaactcaactatttattttgttttgtagccaaagcctcttaaagattagtattgtcttaaacattaacaactcctagaaaaatagttttgcccttagctttaagtcgatatatattcaaagatatacagcctacagacagctttgaaactgagcttctagatacgtcatttagactttttttttttttaaggcagactgcctcccttgaaaaggctagtagcaaccaagcacaggggctcctgcctgtaatcccagcactttgggaggctgaggccggaggattactcaagcccaggagtttgagaccagcctgggccacacagtgagaacccgtctctacaaaaaattaaaattccaggtgttgtggtccatgcctgcagtcccagctactcggaaggctaaggcaatgggatctcttgagcccagcagttcaaggctgcagtgagccatggtcacatcactgcacttcagcctgggcaacagagtgatgagaccctacctctaaaaagaaagaaagtgggggagctgagagagggggggaacttccaaaaaaagggtataatatggatttagaagaagggtaaaactcagcatttaagcgcaagtctatagagtaatcaaatgtatggtgaaggcagaaacttgtagcaatcaatttgaaaaaacaaagtgtatgatagagtgccgcttaatcagcaaacattgtattagcaggaaatacagataaaaataaccttttaaagtcataaagtaatgggttatttaagaaaaaaggcaaagtttttctagtatctctaaacaaaggatgtcataaagaacaatctccacgctttctcacaattagtcccttagtgtcactgataaatgacaaaatcatgggacaggcagatcacacctctgacacagctccataacaagtccaagttgttccttccccgatccttggtacctatcagaatgatcccgtcatttttccccgcttcaaaatatacaatcctcaccaaaaatctatccttcagaagttatagttattgaaaggagggttttctgctcccagggtatgcttgggtagaaaaagcaaagaattcaaactaaattttttcattattggaaagagtttgcgctcaagacaagatgtggaacagtgaccctagatcaactgttaatcaggacaattaggtaagttccaaactactttgtatatttgtatgtatttaagtgaacaatttaaatttagcacactgtattaagttagttgataaaacaagatctagaatctataaagtttatttacaagcaaggactaactaatttacaaatattgatttttttactatcacttccttaaatattgctaatatattatggtatgcaaacacactacagcaataaatataatcccatgtgaaatttccaactattttctttgaagttgtagtcaccagaaatgacctgtctctgactttcctttttgtttttatttaccaaatcaaagaacagayttaaaatccagatcaagagatgagagcaa

SEQ ID NO: 707234 - DNA, 607 bp, Homo sapiens
cagtagcaaaatcttgcttcaacctaaggtgcaactaaccctgctacaactagaaacaccctaaacctctctccaatgaggatatgaagtcccgtaggacttaccgcataggtcactttatctttggggaaagttcatccttttctagctsagtcacactgcccttttaatatcctgagatacatgctgaactacaatactattgacacgttttatgttcaatagtagaatggatggaggaagagaaagaaaatgaaccagtattatatttgcaaaatgaaaatcaatccttctgaaatatttaaacggtttctgcctttgtaggagaccgtttggtaacgtatcgaaatccataacggccgtgattggcgcgcaagcgcggggctgcccaggggccctccttgcctcccgccttatgggcccggaaggtccttctttcccctagcttggactccagctcctgcccgcggagcttggtctagctgcgggaagcattgaagcacaaggagagtacttttgcacaatgacctccaaattttactttgaggactttatcatagtgaaactaccatggctgtagcttatatcggtttttttttaaatgaaa

SEQ ID NO: 707235 - DNA, 607 bp, Homo sapiens
cagtagcaaaatcttgcttcaacctaaggtgcaactaaccctgctacaactagaaacaccctaaacctctctccaatgaggatatgaagtcccgtaggacttaccgcataggtcactttatctttggggaaagttcatccttttctagctgagtcacactgcccttttaatatcctgagatacatgctgaactacaatactattgacacgttttatgttcaatagtagaatggatggaggaagagaaagaaaatgaaccagtattatatttgcaaaatgaaaatcaatccttctgaaatatttaaacggtttctgcctttgtaggmgaccgtttggtaacgtatcgaaatccataacggccgtgattggcgcgcaagcgcggggctgcccaggggccctccttgcctcccgccttatgggcccggaaggtccttctttcccctagcttggactccagctcctgcccgcggagcttggtctagctgcgggaagcattgaagcacaaggagagtacttttgcacaatgacctccaaattttactttgaggactttatcatagtgaaactaccatggctgtagcttatatcggtttttttttaaatgaaa

SEQ ID NO: 707236 - DNA, 615 bp, Homo sapiens
taattttaatgctaaatcctaaagcactattattgtaagtctcatcggggaaccacagagagccataattgtttttctagtatcattttactgatttatctttaagctttctcactttctgatggaatagaaattgtttactgataagtttttattaattttaagaaagtacatatatcattcttgaaaagaacagtaagtctttcatttcccacgctgaatacttctttctaatacacattgaatcgactaccaatatggtgttttggaaaagcttaccactccaatttcatcacaagtctgtatagaccacattacttacaaaacttaaaatagagtttaaaatttgtttgacttatttcagaactattggacttcatgtctctcataagacwgatgagaactaataatggaactagggctttcattataagcccatctttaggggaaagtcactggatagaatatctccaatttctctaattacattagaaaaaactggcaggggtatgtcccttaaggtacaaaaagatttcgattggctgtttttaatcattttctgattatagtattaataagataggttcaggaaacttttggatatgcccttccgac

SEQ ID NO: 707237 - DNA, 596 bp, Homo sapiens
taatgtaacaagattaggatatcatcaaggcttctttacttcatattcagttataaccttttaataattaagagcaggcactccctaatataataataaaattttacatttgtatagtacatgactctacaggtatacttactattttaattttagtattatcaggaacaattggcacagaaagaccctttgacgtacttagttttaaagaaatagacaatttcctgtcattgctaatttcccattgtaaatccttgggtacaggtgcctgtatgacctggagccctttgcttgtgcatttatcctctggaatgaactctccctttctctattctatatgtgacccagaagataaatgcaaaactgcttaattaggaaaaagcctaccatagttgctaattctttctttttaataacactatttatggtgtgatagtctttctgaaaacctctttaaatgttattacagttttttttttttttaagatggagttttgctctgtccagtctctctctgcccaggctggagtgcaatggtacrttctcagctcactgcaacctctgcctcctgggttcaagcgattctcctgcctcag

SEQ ID NO: 707238 - DNA, 793 bp, Homo sapiens
ttccactttaatgctttgagctaataacatgcatctcagatttgcccaatttagagaaagcagaggccagatctgatggcagttctgctttgtcagtagttttagctatgtccataatcttaagagagacagagcctctaggggcctctgttggtctataaaacaaataaggataaagttagattgtcaccatgatcctttctagttttataactaattatggagaaaatttgttaagagagaaacagtaaaaaatattatcctagagacactgaagttaactaggtcataactaggtcatgaagcactgggcttcatgtttgtagactttgtcaacaacttaacaaatttgctgtatgttcaatgagataatgtattggaggactgcttagtatggactaaccaacttaaatagaaaatacatttcctgagctgaactgcaaaaatcatggacacagccatcttattaccgttctcatggactcacagagattgaggtagagaagtcactgttttgacaagtagagatgctccccaagcaagcacagggtcccttgacaaaatgactgcagaattgtwgccatgttgattgaaatgctgaatctcaccctctgattcctaacattgctattttaaagacatctaagcaactgccatgttaaaaaaaaaatcatcttcaacctcgcagtatctggtgttgcataatctgaagaaatcctaacaccgtggacagagttaccggacaaaactgttcagaaatatttcacaataaggacattgttttgaatattca

SEQ ID NO: 707239 - DNA, 793 bp, Homo sapiens
ttccactttaatgctttgagctaataacatgcatctcagatttgcccaatttagagaaagcagaggccagatctgatggcagttctgctttgtcagtagttttagctatgtccataatcttaagagagacagagcctctaggggcctctgttggtctataaaacaaataaggataaagttagattgtcaccatgatcctttctagttttataactaattatggagaaaatttgttaagagagaaacagtaaaaaatattatcctagagacactgaagttaactaggtcataactaggtcatgaagcactgggcttcatgtttgtagactttgtcaacaacttaacaaatttgctgtatgttcaatgagataatgtattggaggactgcttagtatggactaaccaacttaaatagaaaatacatttcctgagctgaactgcaaaaatcatggacacagccatcttattaccgttctcatggactcacagagattgaggtagagaagtcactgttttgacaagtagagatgctccccaagcaagcacagggtcccttgacaaaatgactgcagaattgttgccatgttgattgaaatgctgaatytcaccctctgattcctaacattgctattttaaagacatctaagcaactgccatgttaaaaaaaaaatcatcttcaacctcgcagtatctggtgttgcataatctgaagaaatcctaacaccgtggacagagttaccggacaaaactgttcagaaatatttcacaataaggacattgttttgaatattca

SEQ ID NO: 707240 - DNA, 793 bp, Homo sapiens
ttccactttaatgctttgagctaataacatgcatctcagatttgcccaatttagagaaagcagaggccagatctgatggcagttctgctttgtcagtagttttagctatgtccataatcttaagagagacagagcctctaggggcctctgttggtctataaaacaaataaggataaagttagattgtcaccatgatcctttctagttttataactaattatggagaaaatttgttaagagagaaacagtaaaaaatattatcctagagacactgaagttaactaggtcataactaggtcatgaagcactgggcttcatgtttgtagactttgtcaacaacttaacaaatttgctgtatgttcaatgagataatgtattggaggactgcttagtatggactaaccaacttaaatagaaaatacatttcctgagctgaactgcaaaaatcatggacacagccatcttattaccgttctcatggactcacagagattgaggtagagaagtcactgttttgacaagtagagatgctccccaagcaagcacagggtcccttgacaaaatgactgcagaattgttgccatgttgattgaaatgctgaatctcaccctctgattcctaacattgctattttaaagacatcyaagcaactgccatgttaaaaaaaaaatcatcttcaacctcgcagtatctggtgttgcataatctgaagaaatcctaacaccgtggacagagttaccggacaaaactgttcagaaatatttcacaataaggacattgttttgaatattca

SEQ ID NO: 707241 - DNA, 1208 bp, Homo sapiens
tgccaattgactttttttagtcaatgtgtgttatgaatcacgatcataaccttgacttgatttaaacagaaaaatgtggtgtggtcatatgattagaatgttgtttgtaatcccacccttttgttaattaaaatatcaacttccacttttgagagaaaaaatctcgtcttctaccctatcccgtatcattatcttcaggaaagcaacagttattgaaaataaagtaatggggcatggaggaaacaaaaaaaagataaataatcaccaaacagtgttgactttctgaaagcagaatatgcaccccaaattcttaacaaatacctcattctgtggatcatatgagtaactagccattagaagagccagctgtgacttaaaagaactgaatcctggctcaagtgatgtgattggctcaaatgtcaaaatcattgaaggatttttgggtgccccatgttgactctttatttaagtataacaaagaagtgttaagaggtcataattgcaggaaatactataattaataaaagcttactttcaatagagttctaattataatatgtggctattatgtggatatccacatattatttggatggatatggtagaaatagcaacctatgaacacacgttgcagctgagtccacaaaacagcgatgtagacatagacatatgtatgtatctttctggtgaaatgatttataaagcttaagttttcaaaaccttatactttcagaatatagtgtatacagagcaaaaccaaaaagtggacttaaaaaatttacatttccacttcattatcacctcatttagtagggaaaaaacacgtctctagttctggataaataaaatgaccatagggagaaaaattttagcaattacatggtataagtggaagaagatatatttaataatctttcatataatatggtacaggtcctccaaagtaatatggtttcaggatatagatatatcctgatattcatctagatatttgcgcatttatagagctttataaagaagcctaaatatctagatgaataagtgattttttagtcatctgggaatttcgacatttcagaacctgaagaatttaaaataayccctctcctattttcaattcaattcatggcgagcactactaattttaaaaaagaaataatgatttttctattacttttattttgaaattttggagaaatgtaaaaata

SEQ ID NO: 707242 - DNA, 703 bp, Homo sapiens
agtagtggcactgggacaagggtccacttcaggatgctcaaacagttgatctgttaccagctctaagggcaagtatagctcccactgtatcctgggaggacttctgccaggtctctctgcagaccactggaaggacagaactatcactggaccactgctgacagggattgagggaaccaatgacaaggctgcatcaagatctgcaatcagaatgaggttggtgagcctggtatccagggcaaaggcagggatgtcttttcccaggttcctgagtgaatggtgctaatggaaggacaaaagccaaaggagactgtagccaaatccatagggagatagggctgyttctgggtctgtagctgtgactacatgtagtgagtgtgccatctgcatgggaacctgccttctcaaaatagccctccttggtcacaggctccacctgggtttcactgcctcctgcctagaactcaaagttcccacaaaggcacttttctttccagatggctgccaaattgttgtgggggatataagtggggtttttcttattctaccatcttgctgacatcacttcatagttttgtttaatagtcaatgttagatgtcacaatgtaaattacatcctaggtagatcctacagtgttactgaatatatatgtatatataatattcagaatatatatatatatactgaatatatatatgtata

SEQ ID NO: 707243 - DNA, 714 bp, Homo sapiens
ggtaggggagtgtgctggggcaggaaagcaggtgagaaaagtgagaaaaccaagagtttagatttggatatggttgtccttgaaacacccaagtgccttttcattttaggcagtagaaaataggggcattgaggttggggctaagggtagaaaatattgttggatatttgaatccctagaaacctatagtatttcagttggtgggaatcaataaaatcttaagagaaaatgtggagaaagaagagggccccaaatggtaatttttagaagttagatagaagagattagatatcaactccctaaaaatatttctttttgtattgcatgtgtktacactgtttattcttagagataggaagtatgtttgatttagaatgttattcgattctgtgtcatttcggtggccatttgagttacatagagtttgatctatttgtcagtgaaaactcctcatggtagaatatttagggttcatattattgaacgtgggacttgggtttaaacataagttctgtttcttatagtataaataagctatgggaagtttctttactaatttggacccgttcactcatctgcaaaaatgatgatgctaacagtacctccctcatcctggtgctatgattaagggagaaaattcatgtgaatgctcagcacagtgcctgaaatgtagtgagcactatactaccactagtagtagtttttgagaaaaac

SEQ ID NO: 707244 - DNA, 3378 bp, Homo sapiens
  misc_feature 460, 461, 462, 463, 464, 465, 466, 467, 468, 469, 470, 471,472, 473, 474, 475, 476, 477, 478, 479, 480, 481, 482, 483,484, 485, 486, 487, 488, 489, 490, 491, 492, 493, 494, 495,496, 497, 498, 499, 500, 501, 502, 503, 504, 505, 506: n = A,T,C or G
  misc_feature 507, 508, 509, 510, 511, 512, 513, 514, 515, 516, 517, 518,519, 520, 521, 522, 523, 524, 525, 526, 527, 528, 529, 530,531, 532, 533, 534, 535, 536, 537, 538, 539, 540, 541, 542,543, 544, 545, 546, 547, 548, 549, 550, 551, 552, 553: n = A,T,C or G
  misc_feature 554, 555, 556, 557, 558, 559: n = A,T,C or G
agagaacccacactcccccacatcccctgcaatgtaacaaataacataaggaatgcttgattacccaccagcttaagatagaaaccatcaccaaagacctaaatgtaagagcgaaaactataaaactctttaaaaacaggggaaaagcttaacaatgttagatttggcgatgagtttcttggataatggtgggaggattgcttgagcctggtaggcagaggttgcagtgagctgagatcccaccactgcaaaaaaaaaaaaaagagaaaaagaaacagaaacagggtcccactctgctgcccaggctggagtgcagtggcaggatcatggctcaccatagcttcaaactcctgggctcaggtgatcctcccacctcagcttcccaagtaactgggaccacaggtgcacaccaccaggggatgcctcaagagtcgaacctgcaggcatgcaagtctgaacnnnnnnnnnnnnnnnnnnnnnnnnnnnnnnnnnnnnnnnnnnnnnnnnnnnnnnnnnnnnnnnnnnnnnnnnnnnnnnnnnnnnnnnnnnnnnnnnnnnnggagtttcgctcttgtcacccaggctggtgtgcaatggtgtgctctcggttcactgcaacatccgcctgccgggtttcaagctattctcccatctcagcctcctgagtagctgggattaaaggcatgcgccactacaccaggctaatttttgtatttttagtagagagggggtttcatcatgttggccagtctgctcttgaactcctgacctcatgtgatctgcctgccttggcctcccaaagtgctgggattacaggcatgagccaccatgcccggcctaaatttttttttttaattaagtttttaactcttttttttttttgcatattatgtgatgcagaatgaaatctaaatctgttttttatgtatatggatacttaattatcccagtgtcacttactgactcggctgtcatttcccactgatttgcaatctccccaccccgtgcctcagtgtctcatgcaatgcccacctgtctcacagatcacgtttccatttatgtacgggcctaattctaggatgtctgctttgttctgcttttctatctctatgccttcactttcatgtcttggcgatcactgctttacataagtcttctctctggtaggccacatccaccatctcgttcaacttcaaaattatctaggctcttccagatacatttcaaaactggtgtatcttgctgggttgatttctagatatttcaatggtttgttctataacaaatggcattgttaactttttttactaactgttgctagtatacaggactacaactgacttgtgtagacctaaacattgcaggtgccgcgcttgcgtctgctgagtttgaaggaggcagatcatggagctgctaagtgcctctgctctctgaggtggcaaggcaatggctggaggaacggatgtctgagtggctacttttggctaggaatggcaatgcgaggaaagacaaagaggacagggagaatgatgtagcagtgagagaactggaaagggaactggatgagagagctggagagatttttgcgttgaggcagggggtttagggagaggaaatgtctctggtgaaaatttctgggaagatttctgtacagtgctttggttaaatcctgtggttgagtcctttaaaaaaacctatagctacctctgtagtcagatttgtgaatcctttgactgtgactacacacaaatctragccaagttgatgaggtgaggtggcagggtggtggaggggagagtcccagtatgttaattggattagacgtggcactgagtagctcaccagtaattgttgattggatgatcacatccacattaggtcttgggcggttgccagagacagtcctggagggagctgcacttagtggacagggtttgttagaccttggcttggaaaatggggagctggcttacctcttcctttccagaccatttcagaatatccagaagtagcctgtaaatatttgggtaatgtgaggcagtgatgcaaggccagcaagcaggaagccctaaacatataataattcctattttctcccttgtgcttccttgagagccactgcagaggaaaccagaaggatggccttggaggaggcttgctgtggcaggcatgatagctctggacccacagcagatctcactgaggccacggctgctgttggttccaccagagccttgggagttggaactcaggtccaaccccacatcagaagccaagtggaaccccttttaatttccagcttggcagcattttaaagctgtgccctgctttccaaccttcaatccctgaggggctaggatggaggtacaccatggtctccttccctctgcacgctcaagaccccctgggctggaaagaggtggggaggccctcatggggcccccagccttcacagggagactgaggctcggccttgaataagctgccagctgagcagggacacagttcttcttctaaggaccacccaggtgaggggagaaagctctggccctcagagggcatctagtctcagttaggaaaacacagtctctgctgaaaaggaagttaaggattttgagatggaaagatcaccctggatttttgggatggacctaagatagctacagaggtccccgacagggaaagagggagcagggagagtcagatatgggagtgtgatggcagaagtaaaggtcagagtgatgtcgttgccggctggggagtcacaagttaagagattgtcaccgagtacccccattttctaagagatggtttaattctttttaaaatttattttctcttttccttacctcctgctccccacttctgatttaaccctttagaaattcagatatagctgttgaaatctctttcaccagacactccatgcagggcaagatgcaacccctttgaatagaatctctttgaatggaaccccatggaaacaacctggccagcagatctagggtgttgctcgaggcagcagctctctgagatgggagtggtgtgggagttgagtcaggggaagagctccccaagggggcagagtttgggatggggagaggggggatcaacaagatggagatggcttgagcaaggcctgagtgggagaaggaatgcagaggggagagaggctgagacggagctgcacagtggcagattgctccaaggtgaatttaagcagtaagatcacaaaatttgctttgtgttggtgccagcgtccatgtgctaacccttcactggaacccatcccaattagggctgtggctatggcaaggcaggtgtagctaagtccctgggctgacagcgggggcgtggagggcaaggttcctaattccc

SEQ ID NO: 707245 - DNA, 1061 bp, Homo sapiens
ctgtaagttttagttatttatttaaagcaatctaactcaaatatagaaaaatgtccaacttcaacaaagcttatgattagatattgtgttattttctgtacttttctgtacctttgaaatacttcatcattagaacaataggaaaagaaaaagaatctttaaaaaggaagagcatccatgaacagaaagcaagctgtgtatcagggaggagagtccagttcccctgagattttcccatgaaacacacaatgtcagcaaacagtagagagaaggttacagggctcagagagaaagggtgacccaagaattgtattccctgccaagctgcaacagactcgagttgaaagaaacaactcagggaatacataaaacaagggccctttgaaattcaaccaaccaaataataaatcacattaaggatgcaggaattaagaaaccaagctaaacgctctgtctgtgagcatcgcattcagagaactgaagctaaacttacatggaaatcacggttacaagacagaatgtaaatactgtatacataatataactatcagatagtgctactctggggtacrggaaatggaagtgtaaatgtattattttcctcatccccctggaagaattcgtaagtcaccgtctaaaatgaaaacgtgtagtaagggccgggcaaagtggctcatgcttgtaatcccagcactttgggaggccgaggtgagcagatcacctgagctcaggagtttgagaccagcctggccaacatggtgaaatcctgtctctactaaaagtattttaaaaaaaattagctgggcatgtattagctgggcatgtattagcagacacgtgtaatcccagctactcaggaggctgaggcaagaggattgcttgaacccgggaggcagaggttgcagtgagccgagatcgggccactgcactccagcctgagcgacagactccatctcaagagaaaaaaaaaattacctgaagttcaatattttgttcattttccctttggctaactacaagtaaaataatttaaattgacttttttgataaaaaacatttat

SEQ ID NO: 707246 - DNA, 2308 bp, Homo sapiens
cactgagcacttccaggccacaggaagaacttagcctgatgggtgaactcaatgaaggaacttcttatcctactctaaccattggattaaatgcctatagctagttaaaagacaagtatttcaattaatgcaggaatatggaaaacaagtcctctaatataatgatatgtcttatcacatcataaaacctgaagtccagtgtacaacaccattaccttcacaaagacaaaccaggagctacacacagaggtgaatcttaatgaatttcatttcattcggctcctgcttccagaacattacagatccctagggccgtcgttaggtgctaatcagaaacttctcagaggagaaatacatttgtgctttacccaggacaagcagacattaacagagacagttctcttttgacaacttccctttgtgaatgaatgcttgtctccctggagcacggtagatattgccagggaaaccctggatgtgcttccccagcctcatcccattacttctggtgaggtttttgtctgacacaagtgaatgcagaatgcagccttacaagggctttcttcccaaagtttgccttccaggaccccatccctgcctcaaagagctgaacgtttttgaaagggagttcaagtctcccactaatcatgtctattgatgatgggaattgagtcttcatggggatgtgctaggagctaagacctaaagcacccatcccaaaggaagaaaacaaaatttaaagaaataggacggaggtgatccattaaggcaggtctggtcagcttcaaccgttctgcccatacacactgaacgttcatttattcccagagagtctgtttgcaaataatcttcttcagatatttgcaagcatctactctggccccagaatcaaactgggagcttccaaaagagaaaagctcagtcctgacctccaagggctggagcgtggtgtgcacctcatttacagcagtcaagccccaaacgctcacaatgggaacttcatctcatttgttctaggacgtgcaaggcatttgtgttttatttaatttatcttgcgaggttaatatatttttctgtacagaaaagtttcatattttatgcacctaactggattattttcttctaaaaatacctccctcctcaaagaatataaaatgatttaggaatattggactagatactactaggaggaaaaatctgtttacttctgaatgatgcattgactcgctcatttttgagcattatacattaatttatttattttagctgagatccatttgttttagaaaagattgcctgggaagccaatacacaaaacaggaaaagcctgagctgtttgggcctgggcaggttcagggactctgagacatccaccccacaccccccaccaccacttgccccttcatggaggccccaggccctgaagagcacagtgagaaaccactgcatcggtgacagcacgaaagtccctctccttcagtgacacatggcatcgccacccacattgtcttgtgctctgtgacgtccctcaaaaaccaaatggagaccaaatggttagaccaggcccaccactgatggcagagggcatgttttccccattttcaggggcacaaaggtacatatatccttgtgactacagcaaaatctaatatgttgcaattagaaatacttatttactagaaaatctggtgtttttgttggttgaattatctgggtaakggagagctgattaacaaagaataactgaattctcagattttaggaattagaataaagagtgaaatacagttgacattttaacgacattgcccacgatttcattttcttatgatggttccgagctctagtttgtggctgatgattgttgagcgtttctgctgtacctgctttgggctgttgcgatgtgtgatggaagacagttgatcggggggcacgtgcccctggcatcacatacctggaaggggctgggtcaaggcggggctctgagatctgctttgccccttgtcatggttgactcctgagttgtgaactcacagatcgcatctgagcacttggcgctgacgggaagggagtcacagacatgaactctacccatgtgctaaatagtaatgaccacccccgtccctggactccccagccctgcccccaggctgggcacttgctccccaccctcagcagtgcctcaggccctgacgcctccatggccccctgtctcctcctccccatcccatctctcagcaatccagcatggacgtccgtaaggattcctaaatcctcacttctgttgagaaagccatggatctcttcc

SEQ ID NO: 707247 - DNA, 452 bp, Homo sapiens
catttttattattttaccacctaaatttgagttccttaaccttcatgtcttcatctttctttcttttttttttttttttttgagatggagtttcactcttgtcacctagaccagagtgcaatggtgcaatggcgtgatctcagctcactgcaacctccacctcccaggttcaagcaattctcgtgtctcagcctcctgagtagctgggattacaggtgcccgccaccacgcctggctaatttttgtattcttagtaaagacrgagtttcaccatgttggccaggctggtcttgaactcctgacctcaggctatctgcctgccttggcctcccaaagtgctgggattacaggtatgagccaccatgcccagcccatgtcttcatctttccttactgcacttgcaaagccacattgcatctgaatggcactcttatcttgtatcaacggaaaaa

SEQ ID NO: 707248 - DNA, 1427 bp, Homo sapiens
gctccacacgcccaggcccagcctctctcttggcatatgctgaagggttttgaatccgtgttctagtttgacctgcttgccttgtttgtggactccggacaccattaattaatcgatctgcagtgaagttaaatattgaaggactttctaataacccaggtcccctctctgcactaggaatcgcatgccgcagatgagatttactaggattcctgtaaataaaaatggttttaygtgttgagttataaaatgatcaaggcattacataacatgcatactgacatggaatagctaagctgaaatctgctctctgtttaataaagtataaaaataggatttggaatggttaactcctaacatataggataatgcaaatctattaacaatgtgccacaattctgcttagctgtttttcagtccaggcccaaattaaaatcaggcacacctgatgtgtacaagttgccccaaagcctcctctcagagaatctgaggcgggcacccatgccagattgtagtgcttagtctttacagaatgcagctgtgtgcttcaggtggctctgtctgcgaggagcaggactagtgatcaaagctctctcatcccaactccggaagggcagtagcgtaaagaccaaaactgctaagaccgccccggaacttgcctgcttcgaggaggatactgtctgagagaagtcagaggagacgccgcaggcttgaacgctggagacgtaaacccatttataaatccagtatttggaaatggagttacctagattcatttgaaaacagacaagtaaataaaccataaaacagacttcaatttcattaataccaacaaatctgtggaaactgagggcatttcttgatgttgtcagagtcatgacccatgctgagacatgtattttacaattttatcaccaatgggtgctgtttagaagtaggctggagcttttgtgcatcctttcagccaatccttacaacaatccagcgaggagaactgacacatgcggaagcaggcactgagaggaaagacgtggtcaagagcgcatgggctccaacaagtgttgtaacctttagcatgtcagtctgatacgacctccatcactggcaggaagtcaacagttcttgattcctgatggctttaatacaactcatcaacattctcaatcttaggagcacctgcacacccactgctgctcactcggcttcatccaaccacagcctgacagggcctttacctttaccccgacacaagtcctgctctgcagatcagggtattttcagatcatcattattccccaagtcacaaggtaagtatggcatgcaaatatactaacataagattcagaagaaattagaaagggtcacagaacccctaaaagatcttaagtagttaaaaatattgagcatagaattttaagtatcggcca

SEQ ID NO: 707249 - DNA, 1304 bp, Homo sapiens
catctccatctgaaatagatgatgcagctaccctggatttcagaagtttcattcttttgcagcagaaggcagatcgaatacagggcaggctccttgggcaagatcaacttgcataaaccaagtggcactgaagacacagaggacagggcaaagcagcggctctatgtgctaaccaaatatggaggcaggggagccggagtatcaaaaacaccacagcaaaacgtgactgtagctgttaaagcctaatgcacacaccctataatccagcaatttcacttccagatgcttccctaaggaagccctcatgtgggtatrtatgttttacttaagaaaacttgaactgggattctaccacttattacccattctgtctgatcagagagtattcattgattgatgatttattttgacactgtattagcagaagttgttctctgagcttcagtgacaggcttgatttttgcagcttattggagtgtttttgttaagcatcatgccatccagaaaaattcaatgccaggaagtgttgcctaatagatagagggcccaaaggaaacccagagggccagccacaccagccaacccctctgcagattgctgactgcccgggggtaaccttgctcacagcctgtttctcttatctgtgcatgtagctctttgcctcagatcttgaggtcactttcatttacaaagaacctcaggaggaccttaagtctttctgtacctcacaatggatgaatacctttgcaaccatctaaggtgaatgtctcatccctttaccaactgcattttagttgttagtgtaggagaaatagctgttcagacatcagcccatggaggtttttagatgaggctgaagttaaattgcacttacagcctcaggcaagtcaatgaatttatgtgatgaaaattttatttagccagatagcttttcatctgtcttctagtttggaagtggaaatgcaacctgatttaataatcaataaatatagaacgctaccgaaattgcaagtagaattgttcaaaattattatggtattacaaaacattacgtttcctttgacaatttgagactgtgggattagagcaagtcaatcaaggcaaagaattttagcttagtttcaatcctccaaatctgtccaatacaaaagataagccttaactatcaaagtttgttaagttctttagggaaaattatgtagttaaagaagtaagaaacacaccaacaaggatgaatttcagacataatgttgggcaaaataagtgaaacacaaaaggctatatatactgtaggattccacatg

SEQ ID NO: 707250 - DNA, 661 bp, Homo sapiens
tttcatgatcaggtacctctcttgcttttcatcctcaaactaccatgctccatccacatatattatattgctatgctattgtcatactttgtgcctttataaatcatgtaattcttactcattctttaagactttaatgtcactgataaatctttctagactctctcaggtagtaagatactcccctcacttctcrtgttttcttagcacttggtagtagaagtattcatagtagatgcttgattcagatttaccactttttatgtgacttacatcttggattctttagtgaattaggttacttatcccatatagttgggaaacatatacataaaactagcctctacgaattagtgcaaggattctaaaaacattcacttttatatatacctttgaatggccaattatgtgtgaggccagggatctataagatgaataggatatagctcctcttttcaaggggctcataggatagcagaaatacaccttgttgtggcatcacattgtatcaagactactcattcaataattattttctgaatgaatggtcaacatatataaaaaacacaatataatcttaaaagaagttttatgggtatagatttaagaaaaacaaatggcaacttccagcaactggtatcagattaaactatagcttaca

SEQ ID NO: 707251 - DNA, 648 bp, Homo sapiens
tttatatataaaatagccacattgatactttcagcggaaagtgtttattcaaatgcatagtaaaagcaaaagtattttaaaaattcagttttgctagttggtacatttaactctgatcatacagaaagtattacagctttcaacatgatttctcatcctgaatttgcttactaaattcaaattgatcgtataatagtacatttactttattgattacttgcccagttatgctaaaagaatatgcattctgcttcttagaatcactctattgagatctccttatcagacccctgcagaatgtgcctaaaacacagtagacttgaataatttgctgttttgtaatatgcagcaaacagagaccccaaaatctcttcccttattgtgcttacagaagtaagaatctctgaggatttgatcttcgtttctgaagttcaggtctctcaatcataccaataacaagaatgcctccgtttgtctacattacaaagataatcagaatcaaatcacatgaaatcattgaagtaacagtgctagyttaccttcaaactactataaaatatgttataatttaaggacattatcggggtttatgtatggttttctgcttcagaaaaagctaggggaagacttcaattcaatttttagaat

SEQ ID NO: 707252 - DNA, 530 bp, Homo sapiens
  misc_feature 2, 3, 4, 5, 6, 7, 8, 9, 10, 11, 12, 13, 14, 15, 16, 17, 18,19, 20, 21, 22, 23, 24, 25, 26, 27, 28, 29, 30, 31, 32,33, 34, 35, 36, 37, 38, 39, 40, 41, 42, 43, 44, 45, 46,47, 48, 49, 50, 51, 52, 53, 54, 55, 56, 57, 58, 59, 60,61: n = A,T,C or G
  misc_feature 62, 63, 64, 65, 66, 67, 68, 69, 70, 71, 72, 73, 74, 75, 76,77, 78, 79, 80, 81, 82, 83, 84, 85, 86, 87, 88, 89, 90,91, 92, 93, 94, 95, 96, 97, 98, 99, 100, 101: n = A,T,C or G
gnnnnnnnnnnnnnnnnnnnnnnnnnnnnnnnnnnnnnnnnnnnnnnnnnnnnnnnnnnnnnnnnnnnnnnnnnnnnnnnnnnnnnnnnnnnnnnnnnnnntctctctgtctcacctgctgccatgtaagacatgcctgcttccccttccaccattattgtaagtttcttgaggtctccccagccatatggaacagtgagtcaactagacttcttttctttataaattactcagtcttgggtggtatttctttataccagtgtgaaaacaaactaatacaaagactaaayttgcaagactaaatattttttaaatgactataagttatttacataagatcaaattacaaaataaatttcatgcaaatatgaaacaaaggaaacctacatagtcatatgaatgtgactaaaaaaaaaattagactacaaattaatattacaaaaaagagtgtgtaacatgaaaatatgtttttaatctatcaggaatatacaaggattcaaaattattttcacctattataaattgcatta

SEQ ID NO: 707253 - DNA, 1305 bp, Homo sapiens
tcactgatcccacattaccataatagatataataataatgaaaaagttcaaaatattgtgaaaattaccaaagtgcatcagagagagaaagtgaacacattctattgaaaaaaatagtgtcaatagacttgtacagttcagggttgccaccaaccttcaatttgtagaaaacacaatatctgcaaagygcaataaagtgaagcacaataaaatgaggtattgctgtgtttgttacttgaatgagacagtattcaccatcaattttattcctatattctcttttctttttctttttttttttaggtaggtgccgagaaaatgtgatcacaaaaacagatggtaatggaagctattttattatagcaaggtttcttggctctttgaacttcttaatagttatatgccccaaattacatagctatctatcttcaaaattatttttaataatctgtcatctgacaactctattaggttttcccttcattgtgttgaaagtaaataatgggaaacctgaacaaaaggatttattacccagccattaatgccattcacttttgcaataccaactttagcacttttatttctctctaagggtgtctcagggttatttgccttcagggcaaagcatcgtagttagagtgactatatagtttatcatccaaataaagaatacacataggcaatattaataagtaaacaagaaaaacaagcataagccatactctcattagcaaatcagcacataactatcaccctattggttaaaaaaataaaaatggataagagacaagccattgtttgtacaattagagagagaaatttgtagaaagagaagtgaaaaatggcagatctccttttcatggcaaatatattttaaaatagatatgttttactcttagaaagctgcatatttaaaagttgaggatcttaatatttccagatatttatgcctggaaacattaaggcacggcaatgtgttagaacaaaagacacagtggcagaacatgcaggtctttactgcaggagacctttgacatgatgttggtttatttggaatctactctttcagtaatgtgaaattatgttctaagacaactaagatccctgcctccaacactatatatcttgatctagggtaacctgtgttattaaattgtctgagaggattgtattggtcagaggacacatcccaatgtaatgaaataagttaatgccccactcacctttaactcacagagaaaagtttgcacaagtagcttatgtggtcaaatttagttgaaataccttcccagtttactcactccc

SEQ ID NO: 707254 - DNA, 831 bp, Homo sapiens
gcaaaatctgggaaacgcgtgtttatagtgtttaatttttagtaatgttatttggagtgacttcccattgtctccttgttttgtatgtatgttctgaataaatcaattatttacatttaacataaatgaatcacctattcagttaaaaataaagtgtgctttagatataggactttttattaaaaatgatttctatagaatattccttataaatacttttattatgtgtttgttttctcctgataaactatagatgttgaactaaaacatcttagttaaaagacaaaataaagtgaaactgtgaaataaaaatggtatttaaaatggaaattgtatctttgccttctaaaattaatatataattcaaattactcatatcaagaagtctgaatattgctcccctccatgtgtaaaaacttgttcgagaaaggaatgataaaacctagtcactgccagtgattctttgttgcaaagaatgagccaaaggggagaaaaagggccctttcttacactggtctccttagcaagcaaatgcttaaattcataaataatggggaaatgaagaattgaactctgaagagtcaaatgaaaggaaagcgtgttggaaaagaagaagggaaagagacagtgctgttgtaccaaatgaagagttatgcagacttggaatgcacttggtagccacctacaaccacaggagaaacctgcattaggataaattttaaactctgattggcatttcagaagayggagattctggtttatttacaacactgctaatatgctggacgactttatcactaggtttattttgatataagcttatacatttcc

SEQ ID NO: 707255 - DNA, 1257 bp, Homo sapiens
gtgtcctcccaagattcataggttgaagttctaatccacagtgtgactctctctggagattggggctctaggagataattaaggttaaacgaggtcacagggtggcaccctaatctgataggagtgtggctttataagaagaggaagagaactttctctttttctttttctctccctaccttgtgaggacacagcaagaaggttggctgcctgcaagtcaggaagagagccctcaccagaatacaaccatgctggctccctgatctcagwcttccagcctccagaactctgaggagcaaatttctgttgtttaaacccacctactagcttatgtttatttgtcatcgcagcacaagttgattaacgcaccatctcactcagttacttggaggattaagtgagaaacacagctacctgcagcagcccatagtaggcactaggtaacagataaggtaacctcctgtgtccccttttgtttgctcccagccctcccctatctcatctggaagacccttcatcatttggccttgacacacctgttcggcttcaccttctgccactccactccatgcatgcttgtaataaatgaatgcagccatgactttgcacaagcaggtccttctgcttagatcacctctccctttactttctttctacacaccacacacatgtgcatgcatacacacacacaccctccacatcctcctgacagacttctacttatctttcaagattgtctcaaacaacacagcagagttgctctatatcttcccccatgcatcgaggctgcgtgtacatacctctctgcccctgttagccacactaacctgtgcatatgttgagaacacgcctgcggcaggccctgtggacaggtgctctggggtagccatggtcctcccttgccctcagagctgggtcctttgtggcaatgaatcatgcctgccctgaatccttgcagcaatttcctccctcagccaggtgttcgtccagggtgttatgtgacctgatttggccagtgagctggaagaggaggccagcttttgcccgggagatggatgttttcacatgcgagtgcgatgctcaaccctgcaggggtcatcttgccacagtgagtgacctgaagagtctcagagacaccaacacattgttgaactgctgacacaattgtggaatcccttaccaccacgcttcttgttaagtttggtgataaatatctatattatttaagtaattgtaagttagaaactctgttcaaca

SEQ ID NO: 707256 - DNA, 1257 bp, Homo sapiens
gtgtcctcccaagattcataggttgaagttctaatccacagtgtgactctctctggagattggggctctaggagataattaaggttaaacgaggtcacagggtggcaccctaatctgataggagtgtggctttataagaagaggaagagaactttctctttttctttttctctccctaccttgtgaggacacagcaagaaggttggctgcctgcaagtcaggaagagagccctcaccagaatacaaccatgctggctccctgatctcagacttccagcctccagaactctgaggagcaaatttctgttgtttaaacccacctactagcttatgtttatttgtcatcrcagcacaagttgattaacgcaccatctcactcagttacttggaggattaagtgagaaacacagctacctgcagcagcccatagtaggcactaggtaacagataaggtaacctcctgtgtccccttttgtttgctcccagccctcccctatctcatctggaagacccttcatcatttggccttgacacacctgttcggcttcaccttctgccactccactccatgcatgcttgtaataaatgaatgcagccatgactttgcacaagcaggtccttctgcttagatcacctctccctttactttctttctacacaccacacacatgtgcatgcatacacacacacaccctccacatcctcctgacagacttctacttatctttcaagattgtctcaaacaacacagcagagttgctctatatcttcccccatgcatcgaggctgcgtgtacatacctctctgcccctgttagccacactaacctgtgcatatgttgagaacacgcctgcggcaggccctgtggacaggtgctctggggtagccatggtcctcccttgccctcagagctgggtcctttgtggcaatgaatcatgcctgccctgaatccttgcagcaatttcctccctcagccaggtgttcgtccagggtgttatgtgacctgatttggccagtgagctggaagaggaggccagcttttgcccgggagatggatgttttcacatgcgagtgcgatgctcaaccctgcaggggtcatcttgccacagtgagtgacctgaagagtctcagagacaccaacacattgttgaactgctgacacaattgtggaatcccttaccaccacgcttcttgttaagtttggtgataaatatctatattatttaagtaattgtaagttagaaactctgttcaaca

SEQ ID NO: 707257 - DNA, 1257 bp, Homo sapiens
gtgtcctcccaagattcataggttgaagttctaatccacagtgtgactctctctggagattggggctctaggagataattaaggttaaacgaggtcacagggtggcaccctaatctgataggagtgtggctttataagaagaggaagagaactttctctttttctttttctctccctaccttgtgaggacacagcaagaaggttggctgcctgcaagtcaggaagagagccctcaccagaatacaaccatgctggctccctgatctcagacttccagcctccagaactctgaggagcaaatttctgttgtttaaacccacctactagcttatgtttatttgtcatcgcagcacaagytgattaacgcaccatctcactcagttacttggaggattaagtgagaaacacagctacctgcagcagcccatagtaggcactaggtaacagataaggtaacctcctgtgtccccttttgtttgctcccagccctcccctatctcatctggaagacccttcatcatttggccttgacacacctgttcggcttcaccttctgccactccactccatgcatgcttgtaataaatgaatgcagccatgactttgcacaagcaggtccttctgcttagatcacctctccctttactttctttctacacaccacacacatgtgcatgcatacacacacacaccctccacatcctcctgacagacttctacttatctttcaagattgtctcaaacaacacagcagagttgctctatatcttcccccatgcatcgaggctgcgtgtacatacctctctgcccctgttagccacactaacctgtgcatatgttgagaacacgcctgcggcaggccctgtggacaggtgctctggggtagccatggtcctcccttgccctcagagctgggtcctttgtggcaatgaatcatgcctgccctgaatccttgcagcaatttcctccctcagccaggtgttcgtccagggtgttatgtgacctgatttggccagtgagctggaagaggaggccagcttttgcccgggagatggatgttttcacatgcgagtgcgatgctcaaccctgcaggggtcatcttgccacagtgagtgacctgaagagtctcagagacaccaacacattgttgaactgctgacacaattgtggaatcccttaccaccacgcttcttgttaagtttggtgataaatatctatattatttaagtaattgtaagttagaaactctgttcaaca

SEQ ID NO: 707258 - DNA, 1257 bp, Homo sapiens
gtgtcctcccaagattcataggttgaagttctaatccacagtgtgactctctctggagattggggctctaggagataattaaggttaaacgaggtcacagggtggcaccctaatctgataggagtgtggctttataagaagaggaagagaactttctctttttctttttctctccctaccttgtgaggacacagcaagaaggttggctgcctgcaagtcaggaagagagccctcaccagaatacaaccatgctggctccctgatctcagacttccagcctccagaactctgaggagcaaatttctgttgtttaaacccacctactagcttatgtttatttgtcatcgcagcacaagttgattaacgcaccatctcactcagttacttggaggattaagtgagaaacacagctacctgcagcagcccatagtaggcactaggtaacagataaggtaacctcctgtgtccccttttgtttgctcccagccctcccctatctcatctggaagacccttcatcatttggccttgacacacctgttcggcttcaccttctgccactccactccatgcatgcttgtaataaatgaatgcagccatgactttgcacaagcaggtccttctgcttagatcacctctccctttactttctttctacacaccacacacatgtgcatgcatacacacacacaccctccacatcctcctgacagacttctacttatctttcaagattgtctcaaacaacacagcagagttgctctatatcttcccccatgcatcgaggctgcgtgtmcatacctctctgcccctgttagccacactaacctgtgcatatgttgagaacacgcctgcggcaggccctgtggacaggtgctctggggtagccatggtcctcccttgccctcagagctgggtcctttgtggcaatgaatcatgcctgccctgaatccttgcagcaatttcctccctcagccaggtgttcgtccagggtgttatgtgacctgatttggccagtgagctggaagaggaggccagcttttgcccgggagatggatgttttcacatgcgagtgcgatgctcaaccctgcaggggtcatcttgccacagtgagtgacctgaagagtctcagagacaccaacacattgttgaactgctgacacaattgtggaatcccttaccaccacgcttcttgttaagtttggtgataaatatctatattatttaagtaattgtaagttagaaactctgttcaaca

SEQ ID NO: 707259 - DNA, 1257 bp, Homo sapiens
gtgtcctcccaagattcataggttgaagttctaatccacagtgtgactctctctggagattggggctctaggagataattaaggttaaacgaggtcacagggtggcaccctaatctgataggagtgtggctttataagaagaggaagagaactttctctttttctttttctctccctaccttgtgaggacacagcaagaaggttggctgcctgcaagtcaggaagagagccctcaccagaatacaaccatgctggctccctgatctcagacttccagcctccagaactctgaggagcaaatttctgttgtttaaacccacctactagcttatgtttatttgtcatcgcagcacaagttgattaacgcaccatctcactcagttacttggaggattaagtgagaaacacagctacctgcagcagcccatagtaggcactaggtaacagataaggtaacctcctgtgtccccttttgtttgctcccagccctcccctatctcatctggaagacccttcatcatttggccttgacacacctgttcggcttcaccttctgccactccactccatgcatgcttgtaataaatgaatgcagccatgactttgcacaagcaggtccttctgcttagatcacctctccctttactttctttctacacaccacacacatgtgcatgcatacacacacacaccctccacatcctcctgacagacttctacttatctttcaagattgtctcaaacaacacagcagagttgctctatatcttcccccatgcatcgaggctgcgtgtacatacctctctgcccctgttagccacactaacctgtgcatatgttgagaacacgcctgcggcaggccctgtggacaggtgctctggggtagccatggtcctcccttgccctcagagctgggtcctttgtggcaatgaatcatgcctgccctgaatccttgcagcaatttcctccctcagccaggtgttcrtccagggtgttatgtgacctgatttggccagtgagctggaagaggaggccagcttttgcccgggagatggatgttttcacatgcgagtgcgatgctcaaccctgcaggggtcatcttgccacagtgagtgacctgaagagtctcagagacaccaacacattgttgaactgctgacacaattgtggaatcccttaccaccacgcttcttgttaagtttggtgataaatatctatattatttaagtaattgtaagttagaaactctgttcaaca

SEQ ID NO: 707260 - DNA, 979 bp, Homo sapiens
tgattcaattatctcccaccaggtctctcccacaactcatgggaattatgggaatacaattcaagatgagatttgggtggggacacagagccaaaccatatcggggggatgtagtttttccattggtrtttagcttaagggggacagatattgccggaaatgtgttctgctgttaggtcacccatttctcagtgtttggggtatggggcacaggcttttcttggagatttttgttggcagctctgggttgaagccttatgttggatccctgtctggaatatacaggaagcaataaaaaaaacctgggggacccaccactgtgtttctcctccagttctgaggacactgagaagtctgccatgttttttctgccctttaggatctttttatgctttcttgttgtgtcatgtccagggtctttagttgcaagaggaaggagctgggaggaatagggctacttcaccttggttggaatcaaaagtctgattatagttggcatgtttaggagaggtcatatatgtgccatcagacctgcaaatgagactaacaaatgcgccatcagacctgcagtttcctttggggttacaaggcaatcacaatgtttcctcataaccaaatggggtggaaaagtagctgagagaaagagccggtgagtttgccaaaaggttgctgtgacatggaagaaaaagtttttattgctttaaacataatgcctttcccacaaattaaaattaagtaatgatccaggaaccttgtacattaagccagttttcaaaacataaactacaaactttatagagcacagctcactttcccatgttgggtgaatacatttggttattatttcttactcactaggctttccaaggtgcttacaagaaaaacaccataaggaccataagtaagccaacatttctagattctaagttctaacatttctcaacggtggctttttaagacactgtctttgaaggccctt

SEQ ID NO: 707261 - DNA, 1191 bp, Homo sapiens
ccacaatacttaaatgatataaaaaacacagctttttaagtatgcaaaagagttaattaacaattatattttaataagtgttatattctagtttcagatgaagaagctatataataaaatagtttagtagtttctttcaaacctatgcaaaaaatattttcccattaagaaaaaaagcagacatactacataaaaagttaaacaaaagagactttaagccaaaataaaactcagaaatttatattcttcatgtttatatttaatttaactcaagaattttattttaaaaatgagatactccataaactaacacaaaatataattattatattttgagcactttctatgtgccagacacagaacagattggctcatttagtcttcacagtgaccctacgaaataggtactcattttacagataagaaaactgagacataagaaagttatataatctacctaaggtctcacagctgatagggaatgggatagttttccaagccaagcaacctggccctagagcctgtccttaaccaccaggctgtgtcacttgactaacacctaaagattaacaaacaaaaatacttattgatcaatcaatgaatatcacaattgactaaacccaaatatgtattccctgacactcaatgatctaaggttgatgtrtttgctaaaattaaataaaatatgcctattcctagttaacgcatgcaaagttttcttaccccttcctcctctttatctgacttgagttttggttatagtactcacctctccccccagcaatcctactttcagcatcctactgctttagtagcatttgtcagttccaaactttgggtgttaatttgtgatgctccattattcaggaactacggcatgctttgacaccctctctcttcccaacaccctaccctggctccccagtctagcttttgaattgtctcctaagatgctgtgagttgaattgtgtcccccaaaaagacatgctgaagtcctagccccaggacctaagaatgtgaccttatgtgaaaatagggttgttggagatgtaagtagttaagatgaggacataatggagaagattaggcccctaagccaatatgactagtgtctttatacgaagaggggaacttggatgcagacacagagacatgcaggaagaatgctatgtgatagcagaggcagagatt

SEQ ID NO: 707262 - DNA, 1268 bp, Homo sapiens
gggacactgaaattagaatataatgccatttacaacaactcaaagaaagagataaatacttaagagccataaaccattaaatggaacatagaaggtacacacttaaatgctgaagagtttagtatagtcygaaatacaaatataaccatgaatatctatatagatataaagtggcgttacataaattttgtttaacactaattccaagagattgccacaaaagagggcatgtgctaggtgaataggtgaacatccaagataatttgggaaactctcaatattatacctccgtcttttaaaattggtcctcatatgagcaaatcagagctttataaaattctgtagtaaaatcccactttaatgcattccagcatttttgacctcagaacgttttttccaattaattctgagagcccaggttaagctgtccaagactgatctgttgagggctggcctttgaaagaagaatttgtcccagagttgttgtgataatacaactcaccaaaggcaaggcttagaatccagccctctgtctccatcatgccaggcaggattgctgacaacaatcacgaacaaatatgtgactcctgtcaatagcttgcctctccccacaactgtgaacacacagttagaatcccaggcatctgatcaagccaggggaaaggctagcctcttccccaaacccaaatgctgagctggcaggatggcatccaggtaaggttcttgcctggcttgtttccatacaccagctcttgatcatgcaaggggcagggcaaaacttccttaatcaaataatataaggaccctgttgcctaaggttggctctgacccatatatatttctggtgctaacctagaatatactgggcaaagggggcctaaatgctgcttctcctttgtctccctgcgtttcttgcaaaaaaccctgctccagtaggtctggccccttcctctgatgtgtgcttttaaaatttcagctcagatttacagatgggcaagttctttaaatttttcaagaaaaatttttgagtataaaagtttttgtagaatagaaaaatacgtaaaccttcttaattcattttacaaaataagactttttgtttatcatccccaacagacatttaccctcactatccccaatctaggaattcacttagcaaactcctccacttcattctcatgaatcacttactcgtttcctaagttactttccctaaggaaagtttccgatctctggtagaggtttttattttattttcctctccatat

SEQ ID NO: 707263 - DNA, 1268 bp, Homo sapiens
gggacactgaaattagaatataatgccatttacaacaactcaaagaaagagataaatacttaagagccataaaccattaaatggaacatagaaggtacacacttaaatgctgaagagtttagtatagtctgaaatacaaatataaccatgaatatctatatagatataaagtggcgttacataaattttgtttaacactaattccaagagattgccacaaaagagggcatgtgctaggtgaataggtgaacatccaagataatttgggaaactctcaatattatacctccgtcttttaaaattggtcctcatatgagcaaatcagagctttmtaaaattctgtagtaaaatcccactttaatgcattccagcatttttgacctcagaacgttttttccaattaattctgagagcccaggttaagctgtccaagactgatctgttgagggctggcctttgaaagaagaatttgtcccagagttgttgtgataatacaactcaccaaaggcaaggcttagaatccagccctctgtctccatcatgccaggcaggattgctgacaacaatcacgaacaaatatgtgactcctgtcaatagcttgcctctccccacaactgtgaacacacagttagaatcccaggcatctgatcaagccaggggaaaggctagcctcttccccaaacccaaatgctgagctggcaggatggcatccaggtaaggttcttgcctggcttgtttccatacaccagctcttgatcatgcaaggggcagggcaaaacttccttaatcaaataatataaggaccctgttgcctaaggttggctctgacccatatatatttctggtgctaacctagaatatactgggcaaagggggcctaaatgctgcttctcctttgtctccctgcgtttcttgcaaaaaaccctgctccagtaggtctggccccttcctctgatgtgtgcttttaaaatttcagctcagatttacagatgggcaagttctttaaatttttcaagaaaaatttttgagtataaaagtttttgtagaatagaaaaatacgtaaaccttcttaattcattttacaaaataagactttttgtttatcatccccaacagacatttaccctcactatccccaatctaggaattcacttagcaaactcctccacttcattctcatgaatcacttactcgtttcctaagttactttccctaaggaaagtttccgatctctggtagaggtttttattttattttcctctccatat

SEQ ID NO: 707264 - DNA, 1268 bp, Homo sapiens
gggacactgaaattagaatataatgccatttacaacaactcaaagaaagagataaatacttaagagccataaaccattaaatggaacatagaaggtacacacttaaatgctgaagagtttagtatagtctgaaatacaaatataaccatgaatatctatatagatataaagtggcgttacataaattttgtttaacactaattccaagagattgccacaaaagagggcatgtgctaggtgaataggtgaacatccaagataatttgggaaactctcaatattatacctccgtcttttaaaattggtcctcatatgagcaaatcagagctttataaaattctgtagtaaaatcccactttaatgcattccagcatttttgacctcagaacrttttttccaattaattctgagagcccaggttaagctgtccaagactgatctgttgagggctggcctttgaaagaagaatttgtcccagagttgttgtgataatacaactcaccaaaggcaaggcttagaatccagccctctgtctccatcatgccaggcaggattgctgacaacaatcacgaacaaatatgtgactcctgtcaatagcttgcctctccccacaactgtgaacacacagttagaatcccaggcatctgatcaagccaggggaaaggctagcctcttccccaaacccaaatgctgagctggcaggatggcatccaggtaaggttcttgcctggcttgtttccatacaccagctcttgatcatgcaaggggcagggcaaaacttccttaatcaaataatataaggaccctgttgcctaaggttggctctgacccatatatatttctggtgctaacctagaatatactgggcaaagggggcctaaatgctgcttctcctttgtctccctgcgtttcttgcaaaaaaccctgctccagtaggtctggccccttcctctgatgtgtgcttttaaaatttcagctcagatttacagatgggcaagttctttaaatttttcaagaaaaatttttgagtataaaagtttttgtagaatagaaaaatacgtaaaccttcttaattcattttacaaaataagactttttgtttatcatccccaacagacatttaccctcactatccccaatctaggaattcacttagcaaactcctccacttcattctcatgaatcacttactcgtttcctaagttactttccctaaggaaagtttccgatctctggtagaggtttttattttattttcctctccatat

SEQ ID NO: 707265 - DNA, 1350 bp, Homo sapiens
gttaatccataggcttcctaattaatttattttcttctgtcttacaatttttatcacaatacagttttcatttggctggaatacttccttaaagatttttaaaaatatgatttttaaaaatattgcctactgttattgaaccttttattgcaaaagtatcacatggtctttcagtgcagaaaataattttctgctcaaacctttctttcttagaaaggtttcaatagtctcatgtgtctattgtctatgtcttatctttcatctcataatttgtaattcaatactcttttactccacactcaagtataatttctgaagttggatttaagatcagtaattctgactgaagccatacccattccattatttcctcatttttctcagggatttatctttgtgttttcgattctgcaaagtcctttatttctatttcttggttttcttttgtgagtcagcctggatccaatcaacaaaatttttaatgccattatctttcaattaccactgagattgaacaatagacatttcaagttctcttctacctcctccattacaatgtcagtgggagacacttgatctatctgtgccaatcaatcccctcttgcactttctgacttctgttacatatcaagtgagtcttcattgtatgatcatagtaataaatataggcaagcaattgccagcagaaagattatacagcctgtaatcccagcactttgggaggctgaggtgggcagatcacctgaggtcaggagtttgagaccagcctggccaacatggcaaaacctcatctctactaaaaatacaaaaattagctcggcatggtggagggcacctgtaatcacagctacttgggaggctgaggcaagagaatcacttgaatctcagaggcaggttcaaaaaamaaaaaaagaaaaaaatagaagattgtatagcccatttggtaagtctgcctgggtttaaattccagctctttactccctacctggatagtgtacttctgtttcctcagccataaaatcaagataataataacagtaaagtcatggaatcattgtgataattaactatatggaacacttagccaatgcttgatacatagtcagtgccgaaatagtgataactgtaataatggctcacagtgctgttagcagtagagcatctttaattccttgtgtagtatagatctgctgtagggttttctgaccattggtcactatcagacacctcacaaaaaaaggaaagttttctctccaaggatattggagatgaataaattggaaggctggattccctacattgaagtagatggttgccgagggaagtggcctgggggagcttccagttcca

SEQ ID NO: 707266 - DNA, 608 bp, Homo sapiens
aactccacaagtattgagcacaaggataattaaraaaagaccgtcactttcaaggagcctacaccctagttggtgaggaaaacaagacaagacaacaaaagcacacatttcaacagaatagcatttataaaataatccacatgattatctgctccgtgaatacaaaaatcaaggcttacttatctttatgtcccctagagcctgataataatgctcaataaatgtttgctggattgagttgaatacattaacaagcacaaacaaataagagtttgagcaagtaattgcccaaagaatgtcacacctaggagtgatcacgtggaactctggggtccccatcagaaccctggtagatgtaggggagccagcccccagctttcttttatgagttcctgatgagccagtcaccttggaatcactgaggagcaataaaatcaaatggtatataccaggtacccttaggcagtccagagagtctacttaatatttaagacatgtagtagtgaaatgtttcttccttctaataacatgccctagtttgaaagccttgttttctgtgaatgattttataagtaattttatttataatgaaatcaatgctaactatc

SEQ ID NO: 707267 - DNA, 939 bp, Homo sapiens
aaaagataagaaacttttatccacttaaaaataccatagagaaacttacaaagtaatgagacactgggaaaaatacttgcaacatataatgaagtctgtttaccagagtgaaaaacaaaaagacaataggaacagtttggttgaaagaaatggaccaaagaacaaatggctctataaatagacaaaaaacataaatgaaaacaacggataacttttcacctgtcaaagcaggaatatatttttagagataatgtataggatcagaataatggtgttctccttaactgctgatgagagtacaaattggtatggagaacaattggtataatatgtattaagcmcctaaattaaagacataattcttcaaggaattcactcacaagtatttatcttgaggaattaatcatggatttgcacaaagacttagcttcaaaggtgttacttcagcagtttataattttgaaaaatcagaaaaaggttagtgtgaatagtgcaggcttgtttataaaatgttaatatcaagaaattatgcagctattcaagatatatcactaagtgaaaaacttatcctatttttattttttgaaaaagtataaatagctgaataaaaaactaaaattcattatctacatagaaaaaaagactgaaaactatgcttagtggttatcattgaatggtgggattgtgggtgatttttattttcttctctttgcttatttttttttaacttttacagtgaccatgtattgttatgataataaagaaaggaaagaaaaccaatcttagaaccaaatctttaggaaacaggctgtaacatcttcgagtcagtttccttttggtataaggatatcctctcctttggtcaaagaaaacagagacattttagtagatgaaaggttataactttttttctgtttacataaataatactatgcttat

SEQ ID NO: 707268 - DNA, 1182 bp, Homo sapiens
tgtttgtagtagactgtgggccactctctgagtttctaccatttccttaggcaaggttcttaagctcctcgtagctcagttttctcatctgacaatagggataatagcccctatctcataaggctgtcaggattcaatgggggtaatccttgtagtctcagaataatgcctggcacatagtaagtgctacagatatgagctattactatgattatatttacttcagaaaaggcaaaagtggtactgtgacctcttttttagttttattataccctaggagtcaacatccaaccagagaacatattccccgtgatccatctggatgcctgaactgtttgccagaatttaaactattcatgcaaatattttcaaaccatacaagcycctctggctttagggccagtttctggctctgttattaaatataatctggctggcaaatagatttacatgtgaaagttgagttactggaatctaatagtcaacccctagcctgaggaaagagctgaagacagagacatacttcttctaaaggggagaacactaaagaaacccagtcagattgggggaaaacaatacagagcattttatacttctttcacagagatgttttgtatctccctagacagggagagagaagaaaggaaaattcttagagcagggagtcaaaggaaaactacacacattttcactatatacacgtaccagaaaggcaaatcattaccctgttttggttaactccaaagctgtcagttagctcttcacctgagggagaaggaaacttgaacattacaaaacacaaaatcaatcaaagagaagccagcatggcctagctggagcttaaagagtcaactgaggacagccagtatgccctggtccctggtcactaccagacagggaaagaactgtgcatattcaaacccaggggtacatggaagagggaagtgtgtttggtaggattttgttttgttctgtttcccttgagctcggaaaccttaatggaacagagtaaggcaaatctgtgatccagtgtgtctgagccagaggcttcaggaactgtagaggatgaaccaaaagccagggtgaggaatcatcccgctcactctcagtgcaaatgggtctgcatctggggactcctcacgtgacaacaggctctgctcttctagaaatagtttggatccc

SEQ ID NO: 707269 - DNA, 1182 bp, Homo sapiens
tgtttgtagtagactgtgggccactctctgagtttctaccatttccttaggcaaggttcttaagctcctcgtagctcagttttctcatctgacaatagggataatagcccctatctcataaggctgtcaggattcaatgggggtaatccttgtagtctcagaataatgcctggcacatagtaagtgctacagatatgagctattactatgattatatttacttcagaaaaggcaaaagtggtactgtgacctcttttttagttttattataccctaggagtcaacatccaaccagagaacatattccccgtgatccatctggatgcctgaactgtttgccagaatttaaactattcatgcaaatattttcaaaccatacaagctcctctggctttagggccagtttctggctctgttattaaatataatctggctggcaaatagatttacatgtgaaagttgagttactggaatctaatagtcaacccctagcctgaggaaagagctgaagacagagacatacttcttctaaaggggagaacactaaagaaacccagtcagattgggggaaaacaatacagagcattttatacttctttcacagagatgttttgtatctccctagacagggagagagaagaaaggaaaattcttagagcagggagtcaaaggaaaactacacacattttcactatatacacgtaccagaaaggcaaatcattaccctgttttggttaactccaaagctgtcagttagctcttcacctgagggagaaggaaacttgaacattacaaaacacaaaatcaatcaaagagaagccagcatggcctagctggagcttaaagagtcaactgaggacagccagtatgccctggtccctggtcactaccagacagggaaagaactgtgcatattcaaacccaggggyacatggaagagggaagtgtgtttggtaggattttgttttgttctgtttcccttgagctcggaaaccttaatggaacagagtaaggcaaatctgtgatccagtgtgtctgagccagaggcttcaggaactgtagaggatgaaccaaaagccagggtgaggaatcatcccgctcactctcagtgcaaatgggtctgcatctggggactcctcacgtgacaacaggctctgctcttctagaaatagtttggatccc

SEQ ID NO: 707270 - DNA, 637 bp, Homo sapiens
tataacctgaataaataagagtatgatattaatgttagaattaattgacaataaaaatcaatagacacacatgacatggactaacactaatacttgagaactcagaatgtggatgagcttggaggacattgttaagcaaaataacttaggcacataaagacaaataccatgtattctcattcacatgtggaagctaaaaaatgtgatctcataccagtagagtgtagtagtggttactagaggaagggaaggatgtgggaactatgtagtaagaggttggttaaccaatacaaaagtacagctagacaggaagaataggttaagtgttctatcacacaataggctgactacagttaacaacttattgtatattttcaaatagctagacgagtggattttaaatgttcccaacacaaagaaacgataaatgtttgaaatgatggatgtgataatcaccctgatgtaatcattacaccttgtaracaggtaccaaaatctcacaccttaccccataaatatgttcaatttatgcgtaattaaaaataataataagaccaggcacagtggcccacgcctgtaatcccagtgctttgggtggctaaggcaggaggatcatgtgagctcaggagttggaggc

SEQ ID NO: 707271 - DNA, 1742 bp, Homo sapiens
  misc_feature 771, 772, 773, 774, 775, 776, 777, 778, 779, 780, 781, 782,783, 784, 785, 786, 787, 788, 789, 790, 791, 792, 793, 794,795, 796, 797, 798, 799, 800, 801, 802, 803, 804, 805, 806,807, 808, 809, 810, 811, 812, 813, 814, 815, 816, 817: n = A,T,C or G
  misc_feature 818, 819, 820, 821, 822, 823, 824, 825, 826, 827, 828, 829,830, 831, 832, 833, 834, 835, 836, 837, 838, 839, 840, 841,842, 843, 844, 845, 846, 847, 848, 849, 850, 851, 852, 853,854, 855, 856, 857, 858, 859, 860, 861, 862, 863, 864: n = A,T,C or G
  misc_feature 865, 866, 867, 868, 869, 870: n = A,T,C or G
tgagggggaagtttctgaagagaattccaagatgaggacttaagagaattgcaygcataggggctatgattgtcagaatttgccacctctgggctggcacttgggactggagtgggaaaggaagattgacatttgaggcaatgacattgtaaaaaactaggggattacgcagaaagtctgggtacaaaattgaagtgcagagtgctaaggtgccagatgaaagtgccaaattcagagtatgaagtcagaaatctaggtcccaggagaaagagcaagtatgcatgagccaagaacaggagggcagcggttctgggaatgttgccactgactcccaactggccagggtgaacatggccgggcttaaagaaccaaaataggagaataacttttgcatcttatgagggagcttgaggtgcacatatagacaaactgcttgaaactggatttggaattcaggggaaagaaggacactaaaagtggagacagtctgaattcatcttcataaaggtggaattaatggcatgagaaagattatgtcactgaaaggaaaaatgtagaaagggaaaatgatctatgttgcatattggtgaaatgggttccagtaaaagtggagtagagaaagagtaccaggctggtgggtatacatttttcagtcaaaaaacaccatttttgtaaaaaataaaaacaaaaaaattacttttccatacttaatagatgtctcaaacttccatttttttctgaaaccttactctggctaacacattccagttnnnnnnnnnnnnnnnnnnnnnnnnnnnnnnnnnnnnnnnnnnnnnnnnnnnnnnnnnnnnnnnnnnnnnnnnnnnnnnnnnnnnnnnnnnnnnnnnnnnncctgcttatgccagcccctgtgatatggtttggctgtgtccccacccaaatcttgtcttgaattgtaactcccataattcccacgtgttgtgagagggacccggtggcggataattgaatcatgggagcagtttcccccatactgttctcatgttagtgaacaagtctcatgagatctgatctgctttcatttggctctcattctgagacattattctgctgacatataagatatgcatttcaccttccaccatgattgtgaggcctccccagccatgtggaactgagtccattaaacctttttttcttataaattgcccagtctcaggtatgtctttatcagcaccataaaaatggactaatacaccctgggagccatcttagtccctgaaggctcacatggtgccatggcattagtggggagggagcttttagtgcttggttgtcagagtgggccgagctgtaactcttactccctgattcttgtgcacctcaggtagggtttacccatctgccgatgtaggatatggtggactttcattctttatgggatgtctgaactccttttacctggtagtagtgaccagcatatcactactacctcttccaaccctctttcaactaacttcttctgtcttctagaaagcagatatctctagtgttgagggataatctttgaggttgccttaggctccctctgagaaacaacactcaaaacagccacttatattcttgccatatttgcacagcaaacttatttaggctacagacatataggtatcagacaagaagaacagaaatctatgctactcaagaattgtcccatgcttctctgaggatgcccatttgcttaccaattactgtaacagttg

SEQ ID NO: 707272 - DNA, 1742 bp, Homo sapiens
  misc_feature 771, 772, 773, 774, 775, 776, 777, 778, 779, 780, 781, 782,783, 784, 785, 786, 787, 788, 789, 790, 791, 792, 793, 794,795, 796, 797, 798, 799, 800, 801, 802, 803, 804, 805, 806,807, 808, 809, 810, 811, 812, 813, 814, 815, 816, 817: n = A,T,C or G
  misc_feature 818, 819, 820, 821, 822, 823, 824, 825, 826, 827, 828, 829,830, 831, 832, 833, 834, 835, 836, 837, 838, 839, 840, 841,842, 843, 844, 845, 846, 847, 848, 849, 850, 851, 852, 853,854, 855, 856, 857, 858, 859, 860, 861, 862, 863, 864: n = A,T,C or G
  misc_feature 865, 866, 867, 868, 869, 870: n = A,T,C or G
tgagggggaagtttctgaagagaattccaagatgaggacttaagagaattgcacgcataggggctatgattgtcagaatttgccacctctgggctggcmcttgggactggagtgggaaaggaagattgacatttgaggcaatgacattgtaaaaaactaggggattacgcagaaagtctgggtacaaaattgaagtgcagagtgctaaggtgccagatgaaagtgccaaattcagagtatgaagtcagaaatctaggtcccaggagaaagagcaagtatgcatgagccaagaacaggagggcagcggttctgggaatgttgccactgactcccaactggccagggtgaacatggccgggcttaaagaaccaaaataggagaataacttttgcatcttatgagggagcttgaggtgcacatatagacaaactgcttgaaactggatttggaattcaggggaaagaaggacactaaaagtggagacagtctgaattcatcttcataaaggtggaattaatggcatgagaaagattatgtcactgaaaggaaaaatgtagaaagggaaaatgatctatgttgcatattggtgaaatgggttccagtaaaagtggagtagagaaagagtaccaggctggtgggtatacatttttcagtcaaaaaacaccatttttgtaaaaaataaaaacaaaaaaattacttttccatacttaatagatgtctcaaacttccatttttttctgaaaccttactctggctaacacattccagttnnnnnnnnnnnnnnnnnnnnnnnnnnnnnnnnnnnnnnnnnnnnnnnnnnnnnnnnnnnnnnnnnnnnnnnnnnnnnnnnnnnnnnnnnnnnnnnnnnnncctgcttatgccagcccctgtgatatggtttggctgtgtccccacccaaatcttgtcttgaattgtaactcccataattcccacgtgttgtgagagggacccggtggcggataattgaatcatgggagcagtttcccccatactgttctcatgttagtgaacaagtctcatgagatctgatctgctttcatttggctctcattctgagacattattctgctgacatataagatatgcatttcaccttccaccatgattgtgaggcctccccagccatgtggaactgagtccattaaacctttttttcttataaattgcccagtctcaggtatgtctttatcagcaccataaaaatggactaatacaccctgggagccatcttagtccctgaaggctcacatggtgccatggcattagtggggagggagcttttagtgcttggttgtcagagtgggccgagctgtaactcttactccctgattcttgtgcacctcaggtagggtttacccatctgccgatgtaggatatggtggactttcattctttatgggatgtctgaactccttttacctggtagtagtgaccagcatatcactactacctcttccaaccctctttcaactaacttcttctgtcttctagaaagcagatatctctagtgttgagggataatctttgaggttgccttaggctccctctgagaaacaacactcaaaacagccacttatattcttgccatatttgcacagcaaacttatttaggctacagacatataggtatcagacaagaagaacagaaatctatgctactcaagaattgtcccatgcttctctgaggatgcccatttgcttaccaattactgtaacagttg

SEQ ID NO: 707273 - DNA, 2459 bp, Homo sapiens
ttctgggacctgggaatgaaggagaatataagaggctgagaaaagtttgttaaaattggatttaggagttataaagttgtatttctcatgaagtgtacttacattattttctgtggtcaggttcaaatatctcttcccctaaaagagtgagggataaattcatgcgagagcctagagatttacattttaattgtgaatgggtgaccttaaaaatgttaaatgttttccagaaaaagacattcccaggcaacagtggatcttttattttattgagcttactgtctgtggacaagggatatagtcatgtaggatgaaaggaagtwggtaccaaatgaattcatatttctggaaagaacaagaagtgatagttgagttcaagaaaagctattacaggactgaaaatagggacgaacaggagaaacggcttaaaaagagctgggaaaccctgatacagataagaggaatattgaatccacctatccaaaagtcccactgctaaggcgaagagagaaaggagtggtacaaaacagtattggccataaaagagaattcaaggggaccttcggtgggaagcaatcttgacctacaaaaatgaagtttaactttgatgcctaaattggattttgttttccaagaccatgagagtgagcacagcactggactgagatgaagactctactcattcttcaagaactcctctgtgaagcgggctgtcagccattgcttctcctgtgttccctctataaatgtgactgcctgatttgtttatacttgatagaaaggaattgtcttatgcctgaatagaggatagctctataattgaatcaacaggcagagagaaaaaggaagagctcatgacaaaggcaaatgtaggaaaacagcaaggcccagaagcaatctctgttttgcctttgacataggagtaaaaagcgaagctgagagaaaacaagcacagaaaggggctgctcacctagaaaccaggtggacagtggtgtaccttctggctcctggtatttcgtatatcaaacctcaagtctagtcacatatacgtataaattatgaagactttcttgtgttttctcatttctaaatctttgtatttttccttattgatctattgccaatgccttttactacttttctttgatttacaatagacatttctttctttttcttttttttttctttttttgagacggagtttcaccatgatgcccaggctggagtgcaacggtgtgacctcacctcactgcaaactctgcctccccagttcaagcaattctcctaccccagcgtcccaagtagctggaactacaggcatgtgccaccatactcggctaattttcatatttttaatagagaaggggttttaccatattggccaggctggtctcgaactcctgacctcaagtgatctgcccgcctcagcctcccaaagtgctgggattacaggtgtgagccaccatgtccagcttacaatagacatttccaaatatattagttattgctttaatgtagaactctaagttgaggattggattcaaaaaattttttaaacaaggacacatttttaaaggaaataatataccccaaatgagaaaaagcccgttagctaacgtattatacctcaatgtcctattttctaaaaaattatttattagcttttgggatgaattaatctgtatgttaagctgagattcagcaaaacaaaataagtaaattaactgaatttgaactcttttcttacttgaaaaatacaaaaaggcaatgatgcttaaagaaagtaaagataaatgtgaacaaagtatgaatagcattttctacatgctttgcatgagcgagtatatgaaaaactgccataaactttaccttattttattttagtgggtaatatgttaaatttagaaaaaatgtgagttatcttttcttctgtccctctgtcttgattcttccccagcacaggtgtgtggaatattttaaagtttgtctaaagaaataattattataggtaaacagatataagtgtattgagttgggcaagatgtttttccagttccacctcaaatgtgagaaaaaaatagcagtgtgaagctttgattatgaagtctgggacattcttactataggcaaatactttcagagtagagggcccatgaagattaatttatgttacagaaacaaactttctgatgattcataaactgaatttcttagttcactttgttatttctaaagaaatttggtatgatttgatatgtgactacccccatggtaaccagatatagcttgctcatgcatttatcgtaattgacgtcaaagaagtgatacttccttgttgctctaaatatcttccctggagtctaagaacttactctaattgagtcaattggcatccttcacggatttttttctaacttcaattgcacttaatctttcattgttacccaagaagtcctgca

SEQ ID NO: 707274 - DNA, 796 bp, Homo sapiens
tttcttttttttcttttyttttttttttttttgagatggagttttgctcttgttttccaggctggagtgcaatggcgtgatcttggctcactgcaacctctacctcccaggttcaagcgattctcctgcctcagccgcctgagtagctgagattataggcgcccaccaccacgcccagctaattttttgtatttttagtagagacagggtttcaccatattggccaggctggtcttgaactcctgacctcaggtgatccacctgcctcggcctcccaaagtgctgggattacaggtatgagccaccgcgccctgccccagttttcttatcttcaaagtgagaccattagagatttcataggttgtttctctttcatattgtagggtgtggtgtcctgggtttgggaagcaggcagccacagccacagcctccagaacagttcttttccctacaattttccttctgcaaaccctgaaacccatgcttagcgtgaggtttgtgagaaaattacacaaatggtagttttaccatttgctgggaatggggattcttttccactgatatactgtctgaaggagatggctgtaaaccagagtgaccacaatatttacaaaagtatttaatgaaaaagacgactttggcaaccgatgtaacccatcacttatgggggggataaagagaagttcacttgaggtttaataaatcaaaacatagtgtttgtccacagcctcattttttccccattactggaagatgatatcatcattttcatttccattagaatcttttagtgtcc

SEQ ID NO: 707275 - DNA, 796 bp, Homo sapiens
tttcttttttttcttttcttttttttttttttgagatggagttttgctcttgttttccaggctggagtgcaatggcgtgatcttggctcactgcaacctctacctcccaggttcaagcgattctcctgcctcagccgcctgagtagctgagattataggcgcccaccaccacgcccagctaattttttgtatttttagtagagacagggtttcaccatattggccaggctggtcttgaactcctgacctcaggtgatccacctgcctcggcctcccaaagtgctgggattacaggtatgagccaccgcgccctgccccagttttcttatcttcaaagtgagaccattagagatttcataggttgtttctctttcatattgtagggtgtggtgtcctgggtttgggaagcaggcagccacagccacagcctccagaacagttcttttccctacaattttccttctgcaaaccctgaaacccatgcttagcgtgaggtttgtgagaaaattacacawatggtagttttaccatttgctgggaatggggattcttttccactgatatactgtctgaaggagatggctgtaaaccagagtgaccacaatatttacaaaagtatttaatgaaaaagacgactttggcaaccgatgtaacccatcacttatgggggggataaagagaagttcacttgaggtttaataaatcaaaacatagtgtttgtccacagcctcattttttccccattactggaagatgatatcatcattttcatttccattagaatcttttagtgtcc

SEQ ID NO: 707276 - DNA, 1386 bp, Homo sapiens
cactacatacaaatatcagtaatgtggtctccttatctcactcataaatggtactttgtaaatcccaaatcattgccagttatattctttgagctctttcagttttttgtttttgtttttagaaaaatctgtaagtactgttgctyccttttgaaagattaagaaactgatgctaatgaagtcaacatagactccaaagctatggtcattctaatgcctaaatccaggctttagcccaattcactcagcccagcctcctttccatgattcttcaacgagaactcatctcagctcccagtgtgggaaagcaagccaaagtggccctggcagaaggactgatagtgagacatggtcttggtcctccaccctgccacctggtggtaagaccttggaaagtcactctgcttcctgagcctgtttccacattcctgagggaatctactgcccaggtttgttgtgaggatgagctcttagcttgtagacatgctttgagaatgctaaagtattctaaaaatataaggaattatcatgtaatacctgaaggaatgtcttagaaggtgagctatgagaagaagtttctctttacagacatgatggagagtctacagagaaatgaaagggatttaaaatctcagcataaacgtggtatttccctgtctattctgaagcacagagaggagcttgccttacatccattgaaccttgaagtagtggttttaaaattacatcctcaatctagagaggagggtctttgacaacttcatcagaccgttgaatcttctcttatcccctagggaatgaatgttctttctctttctctctcttttaatttttccagtttatatgaataaaagacaaagagagacaagcccaagctacacacacacacacacacacacacacacacacacacacacacacacactcctctgtatttgaggtttcattcctatgggatatctatcctaaaagagaaggagcttaattaatttgagaaaagagaactaatggaaaagaggaaagaggcagacaacttaatcctttgaaaaaggtcagccttacattctggacacaacacagaacatccttttgagctgtttgtccactggctgggtttcagacttcagcaaatcctcctctccccaactagcacttttccaatgtgctatatgaagggttaggtttcaatggtctgaggcagacagctgttgatgtatatcaatctagcatctacaactcctgttgccagcaccccagtttttcttgagagtctatgccttcccccatctcagggccatgcatttcaggtgtagctgcctcctggtgcaagctccaagcatggctgtctctgggatgagcccagttaatccccctgaccagcaattg

SEQ ID NO: 707277 - DNA, 1291 bp, Homo sapiens
cgcttcttcccttggagagaaaggggatggttaaaccccagagacatttggatccttagattaaaaaaataataatgtgaattcattacatttgaaaccataacttacttataatcaggaaaacaataataatcaatattataaaaaggaaacaacaacaggtataccatcatatgacacggtgcttgtcaagttgtgatacagagaaatggacctagaactctatactctttattttattaatacttatgattcttggaggtagtcatgagatgtgcactttaccrtaagggaactaggcttagcaaggtgaagtatcttgctgaaggccagcagcttacaatgtgaccgaagtgaagtttgtattaacttccagctgagtccaaagagaaggctcttctcactgcctaactcttagcttgcatcctacctgtttctacagatttcagagctccctatagcaactctgcaattgggcacatccctattattccaactttgtgaatataaaattgaaaccatgaaagattgtgggactgactccaaatcccacagtctataaatagcagagccaagacacaaacgcaggagtctgaccctccagggccctagatccttatttttcagactattgtgtataagtcactccatcaagactatcagcaacagttgttggaaaggtcatgggattccagggaaatacgtgattcctcccaaatgaggttctcaaaagataagactagacttgataccataatccatggatctgccaacattttatgagatggaattctctacaatggaggatacagatgggagcctctgatgctgtcttctgcagaaagggcccgaaataagagatacatttgctctggggtatatgattcccatacttacaggagattttaaagaagcaccatgggcagtgagaagcggcacatatccttccctggtctgtgcctcatgaggcccagagctgtgaagcaagggaaatgcctgcagccacacatgaagcaggaagaggctagcaaacactagagggggtgtctctgcaccatcttgcataccttctcccattcttctccacctcaggcttggaccaggtttgaaactcctaattcatttcctgcctccagtcttatcccttctgtcccatctttcatactgactgtcagtgaacttggtaaatcccagctctaattagatactcctctgatcaatagcttcccagtacttagagaagaaatataaattagcttctctggcattcggacttcataatcttgccccc

SEQ ID NO: 707278 - DNA, 1055 bp, Homo sapiens
gggatagcattgggagatatwcctaatgctagatgacgagttagtgggtgcagcgcaccagcatggcacatgtatacatatgtaactaacctgcacaatgtgcacatgtaccctaaaacttaaagtataataaaacaaaacaaaacaaaacaaaacaaaaaaaaaacaaaaaaaaaatccaatttataatcatacatgcaaaaatcttaaagaaactctagtaaacagaatggtgaacacaagtttacattttaactttaaaaaatttaaattcctcattaataaatttaaaatgaaaaataatatatttcaaattatatacaaaactgaaaaaataatagccatccattaaataagctcttagcaaacaaagaattttaaaaaaatactcataactgaaaaaagcaaacatcatacttccttgtgaaataatgatcatagccatcaaagtcagcttggattgaaaaaacaaaagccacattataattttaacaggtaatatgtttgtctattaataaaataaaaaataaactacgtattattttaattaacagttcatttttacagattttctcaatagtaattttgcttgcaaaataatttgaatgtctatatactagcaggataaaactaaaatatgttttaaaattataatatttaaataacatcaaatgttaaatacattggaatgcatctaataaatatgtaaattatgcacaatattaatgttttattaaaaaaattaaagaagatgtaaataaggagatataccactttaagaaattacaagattcaggattatgatgtcaagtattgccaaattaatcaacagagtcaatgtaatattaataaaactctaattttggtgtgttagttttgctttttagaactagacaagattaaagtacaaactactccaagatactcttgaagaagatcaaggtggatgaacttgccctacagtttagaaattaagatctaaaggtgttaaaatagagatgaacaaagagactaataatggaataaaacagagaacacagaaatagatttatgga

SEQ ID NO: 707279 - DNA, 1055 bp, Homo sapiens
gggatagcattgggagatatacctaatgctagatgacgagttagtgggtgcagcgcaccagcatggcacatgtatacatatgtaactaacctgcacaatgtgcacatgtaccctaaaacttaaagtataataaaacaaaacaaaacaaaacaaaacaaaaaaaaaacaaaaaaaaaatccaatttataatcatacatgcaaaaatcttaaagaaactctagtaaacagaatggtgaacacaagtttacattttaactttaaaaaatttaaattcctcattaataaatttaaaatgaaaaataatatatttcaaattatatacaaaactgaaaaaataatagccatccattaaataagctcttagcaaacaaagaattttaaaaaaatactcataactgaaaaaagcaaacatcatacttccttgtgaaataatgatcatagccatcaaagtcagcttggattgaaaaaacaaaagccacattataattttaacaggtaatatgtttgtctattaataaaataaaaaataaactacgtattattttaattaacagttcatttttacagattttctcaatagtaaytttgcttgcaaaataatttgaatgtctatatactagcaggataaaactaaaatatgttttaaaattataatatttaaataacatcaaatgttaaatacattggaatgcatctaataaatatgtaaattatgcacaatattaatgttttattaaaaaaattaaagaagatgtaaataaggagatataccactttaagaaattacaagattcaggattatgatgtcaagtattgccaaattaatcaacagagtcaatgtaatattaataaaactctaattttggtgtgttagttttgctttttagaactagacaagattaaagtacaaactactccaagatactcttgaagaagatcaaggtggatgaacttgccctacagtttagaaattaagatctaaaggtgttaaaatagagatgaacaaagagactaataatggaataaaacagagaacacagaaatagatttatgga

SEQ ID NO: 707280 - DNA, 1310 bp, Homo sapiens
tcattatactttgttcatatccatagaatgtacagcaacaagagtgaattcaaatgtaaactactatggaatttgggtgaaaatgatgtgtcaagtaggttctctgtttgtaacaaatgtgtcactttggcctaggacgtggataatgggagaggctgtgtaatatgggggcaggagatatatgggaaatctctgtaccttctgattaatttctctgtaatcttcaaactgctctcaaatgtaacatctgttaaaaatggacattatttttttaaagaaacggaagacttctgctactgrtaatgacagacaagataatttgaattaacctacacaccaaggacaactgaaaaagctaaaaaaaataaaatatttttctgtgtgaaggcagtggagatcaaaccctagagtcaggaattatggggccaagtgtctagggtaaaagggcacccaatgtgaaaagcgacacagatagggtcattttcttcccaagggcaattttagaagagaaactgagaaggtgtgcatcattattgacagcccaatgtcttgggacaacaaattttaggttaagtgtgaaaaattacgagtagaccttatagggatgaaaaagcccaattttgaaacttaatccttgaaactgaacaaagtgagcttatattgctaatgcccctagaatcctaccagaaccagattctctttattgaaaaataatatgatccttgctcacaagttcatgtttaatatttttccattaattatatttgtccaataccccccaaattttcaagcatataaatgaaccagaccacataattaaaaactaggaacaaatatagatagcagaaatagacccatggaggctcctgataatagagttacagccactacttttccagtaactatgcttgcttaatattcactaggagattaaaactgaatattatttttggaaaaagagacaaaaattctagaaattaaaacatatagaagttttaaaatgtaaaaattaatagatggcatccgtgaagatttgccatagctgaaaataaacagagtggaagcaatatgtaaataaaatatatacaatgaaatagacagaatggaaattagccatttagaatgatgagcaacagcatagagcatgggtcagtaggcaaacattagcccacatgccaaaactgacccatggtctgtttttgacagacacctatgtgacccacaaacctaaaattctctggtcatttatagaaaatattttccaacccatagaataaaaaaagttaagtccgccaaatttttaattggaa

SEQ ID NO: 707281 - DNA, 1254 bp, Homo sapiens
ttattcagttgctagtttgtgctctattgtaaaatagcttgtcatcctctctgagtctttggttctcaattttctcattttacaataagtagctaattctcaatgcatacatgagatgttctctacggtttctgccagctgtaggtccctatttctattgggaatatagagtaatttttctccttcttttcaacgaggcatttaaaaaagaagcaaaatcaaggccttggtatctattccaatgtgcttaaacagtttggcagattgctgaagtcatatatttaccaaagtctcaatgttatttactacaggaaaacagtgtccttcttcccctcactatacctcccaaagtctaacgtgcaaagtgcccttgctgttagcttgcaataggcttaaggaaaaaaagtatggaattcactactacaaatattctttagccttaaagaaggttaaagtgacttccaggatttcactgggattgtgtagttttgcaaaacacttcaaatttcagagcatagggtgtggctatagcaagttagttgttttccttttgctgaactttgtataactaaaggtactaattttgctagatgaattcagctgtatttctcaagatcctgagcaaaacatactagcctcagaaacaaagaatcctaatgttcattagaattcaaaataattttacaggaaaaaggagtttctgagatactttaaagatctaagcttcatatataacatttttattttcaggtttcaaagataaactttaaaaacacaggttttacttaagaagggaaaacattatagtctactgaattcaggtgacaattttaggtggtgatacaaatgtcctgtaattcaccttggcatgatatgcaccaactcaaatgcatatcaatactctaagtattcctacaattgtgtgtctgtatctttaactttattttatcataaaaatgaataaatatgcaactgccaattctaagtttaagtactcttagacctacattttagataagggtacctgtccaatacagtatgaagctgatagttgtttgacattcagttacaaagatattcaatgggatttggtaamtattttcttatctttgtgtttctttctatcacagatgttctagctttctacagtctcttccagggagactctgaaacattgccattttcacttattagtttacttattatttcaatattaatgtaattcatttaactttattaaatcaatataatcaa

SEQ ID NO: 707282 - DNA, 577 bp, Homo sapiens
cctttgtgattagcaaagtactatatgtgtccatggataggaaattatcttattgctgaacctcctttttttwaaaaaaattattttaacaggaaatggtgatagtcagggtttggggttgtgggactgatacacactctcatttgctttgtttttatttttctttatgtgtacagatcccttacaaacttgaaatatgctagtagattcagggtggtggaataagcctatggtctaaaaggcttgcagtgaactacctgttaacttttttctgcacttaccatgggatagagtctccaagatgcatactttgtcaaccaatccatcagttaacaaatagttcctgaaagcccagcaagttttgggggttccaagccaggtcctggggtagggtggagggatgaggcagcacagcctggagttaggcttcatttgcccatgatgtctcccctatctttactgaagtcagtctctttgagacattcagtaaaggaggaagtgggaaggtgggagttggattagtcttattttttggcagtgggggattgagcctcaagggaagcgctgggaaacagta

SEQ ID NO: 707283 - DNA, 1639 bp, Homo sapiens
tctcttgggtttcatcacagccctcactctgggatccagaataaggtgtcagctattatctgaatattggcagaaaccatggctaagggagaaaagaaatgatcaaagcatgaactggatattatagtgtctgccagatgtgacacctaatcatttctgccctcttttcactgaccacagcaacttacataactatgtctgagaaataaagccaagatggttaagcctcctgcagaaaggataaacaatgaaatatattatgttcaacatatctgggtgtttacaggggatattaagcacatacattccaaatgattatttctgtgaatagaatatatatattttactaaagcataagcacttgatgttgtttctccacatcccaaattttctcagtatcttgcaaatgtttgagttattaagttaaaaataaatcaacatttcaacaatctatggactaaaatacaattttgttcatagacaatttttgtgctgctgctccttattctcatgagactctgattaagtaattagaaaacatcacaagtgcaaagggctgggttgggggtgtctcattttcaccagaaactggtgcctttaaaagtgctcacctcctaacaccgatgcattagtgttggcacagactagaatccctgcagcatgggctggcaggcaatgccaatttgggatagcttgaaaatatcattagagagctactgtatgaaagctgaaggtaagaaagagaattcagatgtcagtgtgcaaaaataagtgtgggttttattaaagtcgacatctgaaaattaaagataatttgtgtgtgtgtgtgtgtgtgtgtgtgtrtgtatatgtgtctgtttatatatatatagatgaaatctcactctgtcaccaggctagagtgcagtgcagtggcgtgatctcagcgcactgcaacctccacctcccaggttcaagtgattctcctgcctcagcctcccgagtagctgggactagagatgtgcaccatcacacccagctaatttttgtattttagtagagatgtggtttcaccgtgttggccaggatggtctcgatctcttggcctcatgatccatcagccttggcctcccaaagtgctgggattacaggcgtttgctaccacacctggccaatttgtatatattttcatgctatgttattcactgtataaaatgttcattcatcatgtataatcactatagattaaactttgtatcaacagaacctgattcattcaaatcagatattttaaaaatttaatgactttaatctggattctcactttaatattaatattctgctttttgtttactttattttgacatactttatgcattttcagtctccctgtgcatttttatcgtcagtttttcttgtacatagtatatattttaagcttatttgagaaacttcatcttttataaagggaatttaagtaattcatatttatttaaataaataacttttggtattgattctaataggtaataattgatatatttcatgattcctttccttttttctattatgctttataaattatgcttactttttggctctgtagttatttgcaaattagaatatttaaagataatttatattagataacattttaaat

SEQ ID NO: 707284 - DNA, 1639 bp, Homo sapiens
tctcttgggtttcatcacagccctcactctgggatccagaataaggtgtcagctattatctgaatattggcagaaaccatggctaagggagaaaagaaatgatcaaagcatgaactggatattatagtgtctgccagatgtgacacctaatcatttctgccctcttttcactgaccacagcaacttacataactatgtctgagaaataaagccaagatggttaagcctcctgcagaaaggataaacaatgaaatatattatgttcaacatatctgggtgtttacaggggatattaagcacatacattccaaatgattatttctgtgaatagaatatatatattttactaaagcataagcacttgatgttgtttctccacatcccaaattttctcagtatcttgcaaatgtttgagttattaagttaaaaataaatcaacatttcaacaatctatggactaaaatacaattttgttcatagacaatttttgtgctgctgctccttattctcatgagactctgattaagtaattagaaaacatcacaagtgcaaagggctgggttgggggtgtctcattttcaccagaaactggtgcctttaaaagtgctcacctcctaacaccgatgcattagtgttggcacagactagaatccctgcagcatgggctggcaggcaatgccaatttgggatagcttgaaaatatcattagagagctactgtatgaaagctgaaggtaagaaagagaattcagatgtcagtgtgcaaaaataagtgtgggttttattaaagtcgacatctgaaaattaaagataatttgtgtgtgtgtgtgtgtgtgtgtgtgtgtgtatatgtgtctgtttatatatatatagatgaaatctcactctgtcaccaggctagagtgcagtgcagtggcgtgatctcagcgcactgcaacctccacctcccaggttcaagtgattctcctgcctcagcctcccgagtagctgggactagagatgtgcaccatcrcacccagctaatttttgtattttagtagagatgtggtttcaccgtgttggccaggatggtctcgatctcttggcctcatgatccatcagccttggcctcccaaagtgctgggattacaggcgtttgctaccacacctggccaatttgtatatattttcatgctatgttattcactgtataaaatgttcattcatcatgtataatcactatagattaaactttgtatcaacagaacctgattcattcaaatcagatattttaaaaatttaatgactttaatctggattctcactttaatattaatattctgctttttgtttactttattttgacatactttatgcattttcagtctccctgtgcatttttatcgtcagtttttcttgtacatagtatatattttaagcttatttgagaaacttcatcttttataaagggaatttaagtaattcatatttatttaaataaataacttttggtattgattctaataggtaataattgatatatttcatgattcctttccttttttctattatgctttataaattatgcttactttttggctctgtagttatttgcaaattagaatatttaaagataatttatattagataacattttaaat

SEQ ID NO: 707285 - DNA, 1639 bp, Homo sapiens
tctcttgggtttcatcacagccctcactctgggatccagaataaggtgtcagctattatctgaatattggcagaaaccatggctaagggagaaaagaaatgatcaaagcatgaactggatattatagtgtctgccagatgtgacacctaatcatttctgccctcttttcactgaccacagcaacttacataactatgtctgagaaataaagccaagatggttaagcctcctgcagaaaggataaacaatgaaatatattatgttcaacatatctgggtgtttacaggggatattaagcacatacattccaaatgattatttctgtgaatagaatatatatattttactaaagcataagcacttgatgttgtttctccacatcccaaattttctcagtatcttgcaaatgtttgagttattaagttaaaaataaatcaacatttcaacaatctatggactaaaatacaattttgttcatagacaatttttgtgctgctgctccttattctcatgagactctgattaagtaattagaaaacatcacaagtgcaaagggctgggttgggggtgtctcattttcaccagaaactggtgcctttaaaagtgctcacctcctaacaccgatgcattagtgttggcacagactagaatccctgcagcatgggctggcaggcaatgccaatttgggatagcttgaaaatatcattagagagctactgtatgaaagctgaaggtaagaaagagaattcagatgtcagtgtgcaaaaataagtgtgggttttattaaagtcgacatctgaaaattaaagataatttgtgtgtgtgtgtgtgtgtgtgtgtgtgtgtatatgtgtctgtttatatatatatagatgaaatctcactctgtcaccaggctagagtgcagtgcagtggcgtgatctcagcgcactgcaacctccacctcccaggttcaagtgattctcctgcctcagcctcccgagtagctgggactagagatgtgcaccatcacacccagctaatttttgtattttagtagagatgtggtttcaccgtgttggccaggatggtctcgatctcttggcctcatgatccatcagccttggcctcccaaagtgctgggattacaggcgtttgctaccacacctggccaatttgtatatattttcatgctatgttattcactgtataaaatgttcattcatcatgtataatcactatagattaaaytttgtatcaacagaacctgattcattcaaatcagatattttaaaaatttaatgactttaatctggattctcactttaatattaatattctgctttttgtttactttattttgacatactttatgcattttcagtctccctgtgcatttttatcgtcagtttttcttgtacatagtatatattttaagcttatttgagaaacttcatcttttataaagggaatttaagtaattcatatttatttaaataaataacttttggtattgattctaataggtaataattgatatatttcatgattcctttccttttttctattatgctttataaattatgcttactttttggctctgtagttatttgcaaattagaatatttaaagataatttatattagataacattttaaat

SEQ ID NO: 707286 - DNA, 575 bp, Homo sapiens
taactcaacccaacttcagtgctttcttaagcatgagtgagtatttgctgcacaggggmataagcccatcccacccagaccctggctttaaagagctcccaaggtaactgagccagagagggcagcatgcaaaaggaggaggacagtaaggtgcaggcagaactataggaggtaggatggaggtgcagggaacatttgagctggcccttttaagggagcgtataattctgaccatcagagagaggagggatggcgttccaggtggaagaaatcacatgtgcaaaggtgccaggaccagagaaggtgagatgggacaggagacaaaaatggtgtgcacagaacctgaggaacaacagccacacacagaagaagtgggctgggggtgtaggcttcttttcgtaggcaatggggagcccatcacagaggtctgtcacacacacagacacacacacacacagacacacacagacacacagacacacacagagacacacacccacagacacacacgcacagacacacacacagacacgcatgtaccccttatttttatttttttatttatttatttttaa

SEQ ID NO: 707287 - DNA, 1063 bp, Homo sapiens
aatagttttcttatgataaaagtaatgcgttaattttagacattttgaaaactatgtgttaaacaaaaataataaaaattaaaatacctagtgatgccaccacccagggatacttagtaacattttgatatacttccttccagtctcttttctctataatcactggcatttaaccaatttaccagtgttctgaaaacattgaagaccaaattctatgaaagggtagacaactcctcggaaaagtggggcttcggccaaccccggaacggctccccactccatgccaccacactggctgattgtgaagctgggccgcccagcccaggcaagtcacgcctcccctctgatgctcaggtcagtgcccgtaaaatggaatctaatgttcccacctcacaggtggttgtgaagattaaatgagaccatgtaagggaggagtgccctgtaaattatggagccttgagctggtgttagttcaggctcctgccgcctggtccttggagccacccacacagcacctccagccccrccctgccccgccccacctgccaggctaacctgcagggcactgagggacaggccacgggtctgcagcgtggggatgcgctctgccaggtagcgcaccttctcagcctcgcgctcctcgtgctcctgctcccagcattccttggccttggccagcatcaggctctggacaggacacacctgctgagctgggggcctcacatctcccacccggcatcagggaatgaggggagggcagccacagcctgggccaactctgagaccactgtccagtgtagaagtgtatgcagcagccatggacaggccaccatgagggtacacccagtggctgcacacaatgttcctcaagccctggaacttgttttccccggacagtcttcctcttatccacttactgtctgttttgacccacaaaactccaaagagagaaacacatatgaaaataaaggaagtccctctgcctgcatgagtagcttcccactctgaagctggtcaccacctactctagggaccacaggcggatgccagaatccatactcga

SEQ ID NO: 707288 - DNA, 1063 bp, Homo sapiens
aatagttttcttatgataaaagtaatgcgttaattttagacattttgaaaactatgtgttaaacaaaaataataaaaattaaaatacctagtgatgccaccacccagggatacttagtaacattttgatatacttccttccagtctcttttctctataatcactggcatttaaccaatttaccagtgttctgaaaacattgaagaccaaattctatgaaagggtagacaactcctcggaaaagtggggcttcggccaaccccggaacggctccccactccatgccaccacactggctgattgtgaagctgggccgcccagcccaggcaagtcacgcctcccctctgatgctcaggtcagtgcccgtaaaatggaatctaatgttcccacctcacaggtggttgtgaagattaaatgagaccatgtaagggaggagtgccctgtaaattatggagccttgagctggtgttagttcaggctcctgccgcctggtccttggagccacccacacagcacctccagccccaccctgccccgccccacctgccaggctmacctgcagggcactgagggacaggccacgggtctgcagcgtggggatgcgctctgccaggtagcgcaccttctcagcctcgcgctcctcgtgctcctgctcccagcattccttggccttggccagcatcaggctctggacaggacacacctgctgagctgggggcctcacatctcccacccggcatcagggaatgaggggagggcagccacagcctgggccaactctgagaccactgtccagtgtagaagtgtatgcagcagccatggacaggccaccatgagggtacacccagtggctgcacacaatgttcctcaagccctggaacttgttttccccggacagtcttcctcttatccacttactgtctgttttgacccacaaaactccaaagagagaaacacatatgaaaataaaggaagtccctctgcctgcatgagtagcttcccactctgaagctggtcaccacctactctagggaccacaggcggatgccagaatccatactcga

SEQ ID NO: 707289 - DNA, 1116 bp, Homo sapiens
tttcaagtcttctgttgtttttacttgtctttaatctcaatttagatcctttaattaaaaagtacaatcctagttttgctaactttccagcaggttattatatcctctgctgtgttttcttatagctgtgctataatttttggccaccatattttaaaatatccattcatttttccttagtagttattccagctaaatatatactgtaattatctacaactaaatcaattcataatctaagctctaaaatgtttycttatatgtgtgtattatggcaaaatgtctttaaaattaccttgcctttaaaaaaaacatccacacagtgtcattatctatatacttttattttagaccacaatggactgtatgatgtgcaaatgtctagtttgcatttgtttccaaaagattactagactctttttggtagaattagatttagcagtatgttgatacacattattctgagaaacattttatgttagaataacaggaatgtttataagtctattttaagaaaaccaaatgtggatcttttaaaatgactcattttgcactgagtgcaaacagcaacaataaaaataaacaacaaaaattacttcatattctgttctttcagggaagaaagaagtccttgcaaacaaacataaatggtttattttgctcagttatttcttttgtcatgttacagcattaaagctaggtcctgaatcattcaagtttgatggtgcagtggaggctgtggctgtccggcaggctgaaaagtattatatcctccgtccagaagtaattgaaacctattggtacctatggcgattcactcacgatccaagatacaggcagtggggctgggaagcagcactggtaaataagccaatattccattttatctgcaagagtgttaactcatgccctcctatgatgccacataccctcacccatgttacctcatttttagtatctgtagggcagtttttatttatctgatgaagaaactcttagtcaatttaagtttctgggcagtagaaataaatcttacgatatatattaaatatatattaaaatatattaaaaatatataaatatatatatttcaaaggaggaatttttaatggttag

SEQ ID NO: 707290 - DNA, 2266 bp, Homo sapiens
atacagctttttttgaattataaaaatagcatgtggatattgcaaaacgagttaaatagtgcagaactgaagaaatgacaaaaaaaaaaaatgagtttctttgtgcctcacatccaatctcacttcccaaagagaataattattaaatagttcttgatatagccttctggaaattttctgggtatatgcaaacatataaaaatatatataatatatatcctttagccttttttctccatatataagattatatatacctattattctgaaacttgcatttccacctttttatctaggaaaggtttccatattggcatatataaatccactgaggaatgttttataatttgtttaatcagtaccctattgttagatatagaacttggttctgtttttttgctcttataaacagtgcttcagtgaatgtccttttacatatatctctgctccctgtgtgaagataaatgttggttagattcctagaagtaaaatggatgactagggcagtggcatgtgcatttgacataactataattaagcaaaataagctgagagagcgaacttttcagaaaacttctcagagagtttcagaaaattaattagaaatggttaaaatcagatgggtattctgagaagtatggagacatttaggcactacctgataatgtgtagtaagatttgaatgaacaaaccttttgttttaagtaaatcttagacaacagagtaaatcacttaaaacttgttttctgtaagttaagaacacagatgaaaagtcaaacaatcagattcttaggaagtaaatggaatgacagtttcagtgtttgctcatccttttaaactagtgctttctggaatccttaattccacctctttgttctttatcaagatgtgagctctttttctactaagtaaatagtgattaaaatatataaacaatacaaatgtaatatatgaaatgatttatccaacaaatgtttgttgttaagtgcctgatgtgtgccagctgttttgtatgctagggctgcatcaatgaatgtaaaataatcctgacataaaataacttacatcctaaaaatttcattcactctccccctaacttataattatgctgttttgagtgcctgcctgtaaaaatatgccctatgtgtattatccaaacccttcattattctctgtccttgccctcctttatttttcttcataacactaacatcatctgtattagtccattctcacactgctataaagaactgcccaagactgggtaatttatgaagaaaagaggtttaattgactcacagttctgcataactggggaagcctcaggaagcttaaatcgtggcagaaggggaggtgggcacatcttacgtggtggcaggaaagagagcatgtgaaagaggaactgtcaaacattataaaaccatcagatctcatgagaactcactcattatcaggagaacaatatgggggaaaccacccccatgatccagtcacctcccaccacatccctccctctacatatggggattatggggattacaattcgagatgagatttgggtgggacacagagccaatccatatcaccatctgacataggtgtgtggtgttcttgtttggtagagatgcgggtcttgctaattgccctggttggtcttgaactcctaggctcaagcaatccttctaccttagcctcccaaagtgctgggactacaggtatgagtcatcatgctcagcctagatggatttttttttttaatctatcttccagtagaatgtaagcctcatagccgtagggactttttccttttaactactatgatctccccagcacctagcacatgaggcactcagtaaatatgtattgaatttgttgataaatttttagtctgttaggcaagaaaagaacttggctatttgcatctttactctgatccctctttagtttttaattatatcattttatcagttgtgtttaaggcattacctgatcatcctgtatacaatktcaaattgttcccttactccctcttacttttccctgctttacttttcttcatagcacctatcttccaacatagcacataattttcttaagcattccccaattagaatataaactacatgaagagtttacagtatttttgtatatttgggttattgttttatccgcagtatctacggtagggccactcatatactatgtatttcagtattaaatgtttgctgaataaaggattgaatcatttcatttcaaaggagacagc

SEQ ID NO: 707291 - DNA, 544 bp, Homo sapiens
gattttaaaaattgtgcttagttggctccatgaatatgcagagatgagtgaaaaagttggactatcagtgacaacttatcttttaggtttacttttaacactattttcatctaagttaagatgaaattgaaataagctttctggatgcttctaaatttcacttcagcctggttgaaatcatgtcccctcctccttaagtatttttctcatttccattttaggaagaaattttgctaacatatataaacaggagtaataaagagatttcatatgccagcactggtaatagactatggcttgagttaatgtttcagcayggcgtagagtcacagcctcactctcatagaggtccctgataatcaaaaagcatggtgcttcctgggaccctcaaacagcatgagcagtagcaaacatgacagtatttagttcaaagtaattaagaaaaacagtacaagaaaagttgaattctttatagtacagcgtagtaagaacacttttatgggaatgtgtgattttacagaaatgttttaaggaacagagttaa

SEQ ID NO: 707292 - DNA, 544 bp, Homo sapiens
gattttaaaaattgtgcttagttggctccatgaatatgcagagatgagtgaaaaagttggactatcagtgacaacttatcttttaggtttacttttaacactattttcatctaagttaagatgaaattgaaataagctttctggatgcttctaaatttcacttcagcctggttgaaatcatgtcccctcctccttaagtatttttctcatttccattttaggaagaaattttgctaacatatataaacaggagtaataaagagatttcatatgccagcactggtaatagactatggcttgagttaatgtttcagcacggcgtagagtcacagcctcactctcatagrggtccctgataatcaaaaagcatggtgcttcctgggaccctcaaacagcatgagcagtagcaaacatgacagtatttagttcaaagtaattaagaaaaacagtacaagaaaagttgaattctttatagtacagcgtagtaagaacacttttatgggaatgtgtgattttacagaaatgttttaaggaacagagttaa

SEQ ID NO: 707293 - DNA, 652 bp, Homo sapiens
ttgcccaggctggagtgcaatggcgcgatcttggctcattgcagcctccgcctcctgggttcaagtgattctcctgcttcagcctcccgagtaactgggattacatgtgctcaccaccatgcctggctaattttgtatttttagttaagacgggatttcaccatgttggtcaggctggtctcacactcctgacctaaggtgatccacccaccttggcctcccaaagcgctgggattacaggcatgaaccaccattcctggccaagtattttttcattaaaagttatttctctttgcatactaaaaaaaatattttttaaacattttttgtttttcttgaggaagtcaggtgggtaatttgtcttgtagactttgttacattcttggtttggcttatttcatccacagtgcatcatttaactctgcctggtatgcwgatggttagatttagaggcatgatcatgctaggtttaactttctgtttctttaatttaacaagaactttctgttgcatcttatcaacaagcacataatctttggttttatttccttgtgattttcagatcggttccatggtttagatgttatcagcctgatccatccattgtaaaattcccttttatttattgtcttttttttttcttttttctttt

SEQ ID NO: 707294 - DNA, 1038 bp, Homo sapiens
tttttgagacagagtctcacactgtcgcccaggctggagtgcagtagcatgatcttggctcactgcaaccgccgcctcccaggttcaagtgattctcctgcctcagcctcccaagtagctgggattacaggcgcctgccaccatgcctggctaatttttttgtatttttagtagatacagggtttcaattgggatctgaagcaaagacaactaaaaaataccagtactttcacacaagttcctttgaataaagaatcttaaytgaatcctagtctcataatcataacctaaggatgattataatccctcccaaaacctaactacttttaagcctagatatatgaaatacaactattgctatctagcaccatttttatactctcaagatgtttggttaagataaagtcagcataacatagtagagtcaagaaatctgcattttagtttcaattctgccccaactaactatgcatgtctagcaaattacttaatcctcttttatctgtgaaatgaagtcatattagatcatctccattgactcttttgttcaatatatcagaagaggtatatttcctccgctgatgataaccaaaatatttttcatatattgagagcttccctgtatcagtcagtatgttaagtgttttacatttatttttcttgtttaacccatgcttactagtgccgttttccaggtgaggaagctgaggcttagagatgttaactgatctgttcaacatcttacaactgataaatggtagacatggcatttcagcccatgtattctgactccctgattccaccaaaacctgtctgaggctgaggacattgcaatgtaatgaagtcgtttaacatcaggggtctcgggcttcaaactccttgggaatcgggctctgagattaacaagcaggaggtttagtagggactgctttgtggaagggaaaggaaggaagcaggattagatagagggagacagtgagttctgatgtagtctcaacacatggctcagcgggtcttactgggagttctgacaatgta

SEQ ID NO: 707295 - DNA, 638 bp, Homo sapiens
  misc_feature 596: n = A,T,C or G
cacccctgattagcactccaaaagcacaccacacagtgagagttgactaaatatttatcaaataagcgtcagataccaacagagctagaactaaaamccatagccaaggctacagttgtcttaatcatgctgccttgtttcttcaatactaaaacaaatgctataaaatgaagttattcaaacctgaatttttcttgacacgtggactatatccatacttctggaaatactctcttattttcataatatccattgaatttttttccattagtacttttgttgcctttatgaaatcaatgccttcttgattttccaaccttgctttatcaagaagaatattaacatcatccttttatgaataaagaaagtacattttaatttctctaacttctgactaaatctatttaggataaaaaaattactcgccacagaaaaataataaatcaatattgtaggagtgatacctttagagtctgaacttctgaatgaaggtcatataaaattctcattggataatcttcaaagtcttcaatatgaatattgaacgaaaagcagtccaataaatctaaggaaaaggaggaagaaaaagaatcatnacaatcatataccttataatgacattggtcaatcacagatca

SEQ ID NO: 707296 - DNA, 638 bp, Homo sapiens
  misc_feature 596: n = A,T,C or G
cacccctgattagcactccaaaagcacaccacacagtgagagttgactaaatatttatcaaataagcgtcagataccaacagagctagaactaaaacccatagccaaggctacagttgtcttaatcatgctgccttgtttcttcaatactaaaacaaaygctataaaatgaagttattcaaacctgaatttttcttgacacgtggactatatccatacttctggaaatactctcttattttcataatatccattgaatttttttccattagtacttttgttgcctttatgaaatcaatgccttcttgattttccaaccttgctttatcaagaagaatattaacatcatccttttatgaataaagaaagtacattttaatttctctaacttctgactaaatctatttaggataaaaaaattactcgccacagaaaaataataaatcaatattgtaggagtgatacctttagagtctgaacttctgaatgaaggtcatataaaattctcattggataatcttcaaagtcttcaatatgaatattgaacgaaaagcagtccaataaatctaaggaaaaggaggaagaaaaagaatcatnacaatcatataccttataatgacattggtcaatcacagatca

SEQ ID NO: 707297 - DNA, 674 bp, Homo sapiens
tttttttttgtttttaaatttattttttactttcaaaacttttttttctaaaaacaaagacataaacatactcattagcttagacctacacagggtcaggatcatccatatcactgtcttctacccccacatcttgtcccactggaaggtgtttaggggcagtaacacacatggagctgtcgtctcytatggccgcaatgccttcttctggatacctcctaaaggacctgcctgaggctgtttacagttctttttgttttgttttgtttttttaaaaaaagcagaaggaatatactctaatgattatagtatagtaaaggcatacaccagtaacatatttattatcaagtattacgtactatatataattgtatgtgctagacttttatagggctggcagcatagtgggttggtttataccagcatcaccataaacaggtgagtaatgcattgccctgtgactttatggcagctatgacatcagtaggtgataggcatttttcagctccatcataatcttatgggaccatcttcatatatgtggtctgccattgacccatatgttgttgttgactatacatacacataaacatgtatgcacacacacgcacacatgtaattttgtcacttgtgttcatatacatgtcttctctacattcccacacctttggctg

SEQ ID NO: 707298 - DNA, 674 bp, Homo sapiens
tttttttttgtttttaaatttattttttactttcaaaacttttttttctaaaaacaaagacataaacatactcattagcttagacctacacagggtcaggatcatccatatcactgtcttctacccccacatcttgtcccactggaaggtgtttaggggcagtaacacacatggagctgtcgtctcttatggccgcaatgccttcttctggatacctcctaaaggacctgcctgaggctgtttacagttctttttgttttgttttgtttttttaaaaaaagcagaaggaatatactctaatgattatagtatagtaaaggcatacaccagtaacatatttattatcaagtattacgtactatatataattgtatgtgctagacttttatagggctggcagcatagtgggttggtttataccagcatcaccataaacaggtgagtaatgcattgccctgtgactttatggcagctatgacwtcagtaggtgataggcatttttcagctccatcataatcttatgggaccatcttcatatatgtggtctgccattgacccatatgttgttgttgactatacatacacataaacatgtatgcacacacacgcacacatgtaattttgtcacttgtgttcatatacatgtcttctctacattcccacacctttggctg

SEQ ID NO: 707299 - DNA, 594 bp, Homo sapiens
gtcatttcatattcatccccactctggtccctagcaagcactccattactttatgttccttactctggacatttcacatcaagagaatcatataaaatgtggccttttgtgtctggcatctttccacttaccatgttttcaaggttcattcatgttataccggtatttcattcctttttacggctgaaaaatatttcactgtaattgttataccacatctttagtattcattcatcagtggataaacatttggattgtttctacttttggacttttatgaagaaggtgctatgaacattcatgtacaggtttttgtgtgaaagacatacattttaaaataaataatcattttcagaagtgtcctaatggcatttcatagaggactggttccatggaaagttctgtaaaacaacaaacaakttctatggtcaaataagttttgttaacacttcaaaacatgcttccttgctctgtcagagccactgtagacattagaggcacaaagaacacctgctctaaggaaacttgtttaactttcctgcccaggattcctccaacttctatcatgctggaaccttctttcacagaacacta

SEQ ID NO: 707300 - DNA, 1274 bp, Homo sapiens
  misc_feature 1170, 1171, 1172, 1173, 1174, 1175, 1176, 1177, 1178, 1179,1180, 1181, 1182, 1183, 1184, 1185, 1186, 1187, 1188, 1189,1190, 1191, 1192, 1193, 1194, 1195, 1196, 1197, 1198, 1199,1200, 1201, 1202, 1203, 1204, 1205, 1206, 1207, 1208: n = A,T,C or G
  misc_feature 1209, 1210, 1211, 1212, 1213, 1214, 1215, 1216, 1217, 1218,1219, 1220, 1221, 1222, 1223, 1224, 1225, 1226, 1227, 1228,1229, 1230, 1231, 1232, 1233, 1234, 1235, 1236, 1237, 1238,1239, 1240, 1241, 1242, 1243, 1244, 1245, 1246, 1247: n = A,T,C or G
  misc_feature 1248, 1249, 1250, 1251, 1252, 1253, 1254, 1255, 1256, 1257,1258, 1259, 1260, 1261, 1262, 1263, 1264, 1265, 1266, 1267,1268, 1269: n = A,T,C or G
gttgcagcgagctaaggttgagccactgcactccagcctgggtgacagagggagactccaaaaaaaaaaaaaagaaggaggataatcctatgacatgaggctcaaagatggaggaatttacagaggtgtaaggaataatagggaaattggggaaatggtctgaacatggccctggtgattaaaatgaatgctgatcctactgcctggcccaaagggtttgaagggcttaaaactgggaagaattagcaacacccagtggagaggccacaagaagatgggcatcttgtggggaggaacagccattgcatcatttttatttctgcatcttcattgtctggcagagtacaaggctcagagataagcatcrctgtctcctccctgcccttcatctgatgctccttatccaacaacgaccaccccaaaagcatggacctgaatcagctggacttgtagccagtttcatgtgttttggaaggattcccccactggcccaaaactgactgtcttgcctttgcatccccagtgcccagctggatgctggcattcagcaaaccacatttcttagaaagacaacaatatccactcacactgatcccaacaagcagacacaggagcaaggccagagctgcaggggtcaggccagaggacaggggtctagtgctcactgctgctcctttctactcatgagagtggtgcagagagcaagtgcctatctggcctctggcaaggccccaggcaagggttccagtttacaccctgatctaggctcaccaagctaggtaggtaggatgcgtcctcccaggtgtgtgagcacaggtgaatctcaaagcccaacaaccaaaaaagaagagtgaccaaatcaggattcaggacactgtggggagcactctggaagcagacatttgctggggagcatttctgtacctagtggagcatctacaaagcagttaaccaacaacttcctgttctgtctaagatacacacggccaaggaaaaggaggaagtatcttgtgggagtagatgctttattgtccatgggggtctccagaggcccctgggtagggtgggatcactggcttcccccggaacagggtgccactccatgcattatcttgtggtggtctatggttatatcccccagcaaggaaagaaactcagaataattaaccnnnnnnnnnnnnnnnnnnnnnnnnnnnnnnnnnnnnnnnnnnnnnnnnnnnnnnnnnnnnnnnnnnnnnnnnnnnnnnnnnnnnnnnnnnnnnnnnnnnnttttt

SEQ ID NO: 707301 - DNA, 1530 bp, Homo sapiens
aataaataagaagtatggtctttctgccataagcagagacaggctaaaaacattcataacatccgtctgaccctgaatactttgttcaaattcagccttgctttctgctggctttccaatgatacatgtgattgatgaagaaatatattttagttccttgccagattttatttttatttctgttacagtttttactgcagaattttttttttttttttttgagacggagtctcactctgtcgcccaggctggagtgcagtggcgcgatctcagctcactgcaagctctgcctcccagattcatgccattctcctgcctcaacctcccgagtagctgggactacaggcgcccgccaccacgcctggctaattttttgtatttttggtagagacggggtttcaccgtgttacccaggatggtcttgatttcctgacctcgtgatccgcccgcctcggcctcctaaagtgctgggattacaggcttgagccaccgcatccggccagaaatttttatctgacaggaagaacaaatgattcccaacggtatgcaagtttctgcttttgctattaagaaacctcaaaaaagaagccaggcgcagtggctcacacctgtaatcccagcacttttggaggccgaggcgggagaattactggagctcaggagtttgagaccaacctgggcaacatggcaaaaccccatctttacaaaaaatacaaaaaaattagccaggcttggtggcacacgctggtaagtttcagttacttgggtggctgaccctgtctcaaaaaaagctgaccctgtctcaaaaaaggctttgaatcatttatcattaagtttgaagaaactctgggggaagcactggattaagtatgacacaactttaaaaatcactggagaaattgtagaggttcacctggacatttgattttcacatgctccggttcttgggatggagtcatattatgtaacccagtatctcaaggcccatctatgcccagagtgaggttcttcattcaaataaatgggtgtaaatccacatttcaaataatcttctggattaattgaagtcctgggccttgaaaaagggtcagtttgacatttttttttcttgtctcattctgtcaaccaggctgagtgcagtggcaagatctcggcttactgcaaccaacacatccccggctcaggtgatgctccctcttcagcctccgaagtagctgggactataggcatgtgtcaccatgcctggctaatttttgtayttgtttttttgtagagatggggtttcatcttgttgccaaggctggtttcgaactcttgggttcaagtgatcctcctcccttgaccttccaaggtgctgagattataggcaccagccatggctcctggcctaatactatcctcattcattcacttcttttttcaagatggctttattattcttctacagctttactgaggtataattaatgtgcaataaactgcacatatatgaagtgtaaaatctgatgtgtttttgtgttgtgacctatg

SEQ ID NO: 707302 - DNA, 2209 bp, Homo sapiens
attattattatttagatacaggttctcactctgtcacccaggctggaatacagtggtatgaccacagctccttgtaacctcaaactcctgggctcaatcaatcctcgcacctcagcctcccaaagtactgagattacaggtgtgagccaccgtgccctcccataatatatgatatttttatcagccagaaacttcccggatgttcctttgtagccagccccccatccctgccctatgcagccactgatttgatatctagcactacagattaaccctccttctcctagaacttcatacaaatggaatcaaacaacttttatgtttatgttgacttctttcactcaacgtaatataaatatccaaacttatgccccaggctaacattttcttttcttttttttttcatttttaattaactttgaagttccagagtatatgtgcagatttactatgtaggtaaaccagtgtcatgggggtttgtcatacagattattttgtcaccccagggattaagcctagtatccactggaaaccacaggacactttgaaactccttcaggacagaggtaattcacctgctgtgttgcatatatcagtattttgctcttttacattactctgtagtattctattatatgaatatatccaattttctgttgacagatatttgggttgttctcagttttttagcttttatcaattaggcttctatgaacatttatgtataaatctctttatggacatatgttttaatttcttttgagcaaatgcctgagggtgaaattgcttagctatgtttaacttygtaggcaacggccaattgttttccagagttgttgttcaccgaaaatctatgagggttttagttgttccacctgcttgccaacacacacagaccataagtctttaattttagccacttaagtaagtttatgtgtcatctcattgagagatggttaatttaaaaaaacctcctatcctcttgtgggtttccttgctggtaattctaacaaggggaccaatcagcttagagtataacgtagagatgtataaaatcttccggtatgaaattgacagagatcactaggtcatgtgcacagctgattaactatcgacctgtgatcacactgggaacttgagggcatcgcttgtgccctcttttttggaaatttaatctgactgaatattttctctttgaatatttaaatttctttaaagaagttaacaattaaaggaaggcattgtgttagtttcctatggctgctgtaacaaattaccacgcacatgtggcttaaagcaacagaaattccatttttaatttaatcgtctttttaaaaattatttatttattttttaaacttttatcttaggtttgggggtgcacatgcaggtttgttacataggtaaacttgtgtcatgggggtttgttgtatatattagttcgtcactcaggtactaaacctagtacccatcagttatttttcctgatcctctccctcctctcaccctccaccctcaagcaggccccagtgtctattgtttcccactttgcatccatgtgttctcatcatttagctcccacttataagtgagaacatgtgatatttggttttctgttcctgcattagtttgctaaggatggcttctaactccattcatgctcctgcaaaggacatgattttattcttttttattactgcatagtattccatgataaaacaacagaaatgtattctgctgcaattctggaggccagaagtccaaaatcagcttctcggggttaaagtcaaggtgtgtacagggctgtgttcactccagaggctctaagagagaagccattctttgcctcttccaacttctggtggctgctggcatttcttggattgtggctgcatcccaccaagatgttcctctgtcttcacattgttccgtcttctgtgtgtagtgtaaactcacctctgcctttctcttataagagcacttgtactcatatctaggtcctacctggaaaatccaggataatctctctgtgcccaaatccttaatttaatcacatccacaaagactctttttccaaataaggtaagatttatgggctccaacggttaggacctgatatcttgggagtggggatttttcagccttctacaggcattcagccttaaagatagttgtgtctgaagttgaagttcttgtttccttttgagga

SEQ ID NO: 707303 - DNA, 2209 bp, Homo sapiens
attattattatttagatacaggttctcactctgtcacccaggctggaatacagtggtatgaccacagctccttgtaacctcaaactcctgggctcaatcaatcctcgcacctcagcctcccaaagtactgagattacaggtgtgagccaccgtgccctcccataatatatgatatttttatcagccagaaacttcccggatgttcctttgtagccagccccccatccctgccctatgcagccactgatttgatatctagcactacagattaaccctccttctcctagaacttcatacaaatggaatcaaacaacttttatgtttatgttgacttctttcactcaacgtaatataaatatccaaacttatgccccaggctaacattttcttttcttttttttttcatttttaattaactttgaagttccagagtatatgtgcagatttactatgtaggtaaaccagtgtcatgggggtttgtcatacagattattttgtcaccccagggattaagcctagtatccactggaaaccacaggacactttgaaactccttcaggacagaggtaattcacctgctgtgttgcatatatcagtattttgctcttttacattactctgtagtattctattatatgaatatatccaattttctgttgacagatatttgggttgttctcagttttttagcttttatcaattaggcttctatgaacatttatgtataaatctctttatggacatatgttttaatttcttttgagcaaatgcctgagggtgaaattgcttagctatgtttaactttgtaggcaacggccaattgttttccagagttgttgttcaccgaaaatctatgagggttttagttgttccacctgcttgccaacacacacagaccataagtctttaattttagccacttaagtaagtttatgtgtcatctcattgagagatggttaatttaaaaaaacctcctatcctcttgtgggtttccttgctggtaattctaacaaggggaccaatcagcttagagtataacgtagagatgtataaaatcttccggtatgaaattgacagagatcactaggtcatgtgcacagctgattaactatcgacctgtgatcacactgggaacttgagggcatcgcttgtgccctcttttttggaaatttaatctgactgaatattttctctttgaatatttaaatttctttaaagaagttaacaattaaaggaaggcattgtgttagtttcctatggctgctgtaacaaattaccacgcacatgtggcttaaagcaacagaaattccatttttaatttaatcgtctttttaaaaattatttatttattttttaaacttttatcttaggtttgggggtgcacatgcaggtttgttacataggtaaacttgtgtcatgggggtttgttgtatatattagttcgtcactcaggtactaaacctagtacccatcagttatttttcctgatcctctccctcctctcaccctccaccctcaagcaggccccagtgtctattgtttcccactttgcatccatgtgttctcatcatttagctcccacttataagtgagaacatgtgatatttggttttctgttcctgcattagtttgctaaggatggcttctaactccattcatgctcctgcaaaggacatgattttattcttttttattactgcatagtattccatgataaaacaacagaaatgtattctgctgcaattctggaggccagaagtccaaaatcagcttctcggggttaaagtcaaggtgtgtacagggctgtgttcactccagaggctctaagagagaagccattctttgcctcttccaacttctggtggctgctggcatttcttggattgtggctgcatcccaccaagatgttcctctgtcttcacattgttccgtcttctgtgtgtagtgtaaactcacctctgcctttctcttataagagcacttgtactcatatctaggtcctacctggaaaatccaggataatctctctgtgcccaaatccttaatttaatcacatccacaaagactctttttcsaaataaggtaagatttatgggctccaacggttaggacctgatatcttgggagtggggatttttcagccttctacaggcattcagccttaaagatagttgtgtctgaagttgaagttcttgtttccttttgagga

SEQ ID NO: 707304 - DNA, 2209 bp, Homo sapiens
attattattatttagatacaggttctcactctgtcacccaggctggaatacagtggtatgaccacagctccttgtaacctcaaactcctgggctcaatcaatcctcgcacctcagcctcccaaagtactgagattacaggtgtgagccaccgtgccctcccataatatatgatatttttatcagccagaaacttcccggatgttcctttgtagccagccccccatccctgccctatgcagccactgatttgatatctagcactacagattaaccctccttctcctagaacttcatacaaatggaatcaaacaacttttatgtttatgttgacttctttcactcaacgtaatataaatatccaaacttatgccccaggctaacattttcttttcttttttttttcatttttaattaactttgaagttccagagtatatgtgcagatttactatgtaggtaaaccagtgtcatgggggtttgtcatacagattattttgtcaccccagggattaagcctagtatccactggaaaccacaggacactttgaaactccttcaggacagaggtaattcacctgctgtgttgcatatatcagtattttgctcttttacattactctgtagtattctattatatgaatatatccaattttctgttgacagatatttgggttgttctcagttttttagcttttatcaattaggcttctatgaacatttatgtataaatctctttatggacatatgttttaatttcttttgagcaaatgcctgagggtgaaattgcttagctatgtttaactttgtaggcaacggccaattgttttccagagttgttgttcaccgaaaatctatgagggttttagttgttccacctgcttgccaacacacacagaccataagtctttaattttagccacttaagtaagtttatgtgtcatctcattgagagatggttaatttaaaaaaacctcctatcctcttgtgggtttccttgctggtaattctaacaaggggaccaatcagcttagagtataacgtagagatgtataaaatcttccggtatgaaattgacagagatcactaggtcatgtgcacagctgattaactatcgacctgtgatcacactgggaacttgagggcatcgcttgtgccctcttttttggaaatttaatctgactgaatattttctctttgaatatttaaatttctttaaagaagttaacaattaaaggaaggcattgtgttagtttcctatggctgctgtaacaaattaccacgcacatgtggcttaaagcaacagaaattccatttttaatttaatcgtctttttaaaaattatttatttattttttaaacttttatcttaggtttgggggtgcacatgcaggtttgttacataggtaaacttgtgtcatgggggtttgttgtatatattagttcgtcactcaggtactaaacctagtacccatcagttatttttcctgatcctctccctcctctcaccctccaccctcaagcaggccccagtgtctattgtttcccactttgcatccatgtgttctcatcatttagctcccacttataagtgagaacatgtgatatttggttttctgttcctgcattagtttgctaaggatggcttctaactccattcatgctcctgcaaaggacatgattttattcttttttattactgcatagtattccatgataaaacaacagaaatgtattctgctgcaattctggaggccagaagtccaaaatcagcttctcggggttaaagtcaaggtgtgtacagggctgtgttcactccagaggctctaagagagaagccattctttgcctcttccaacttctggtggctgctggcatttcttggattgtggctgcatcccaccaagatgttcctctgtcttcacattgttccgtcttctgtgtgtagtgtaaactcacctctgcctttctcttataagagcacttgtactcatatctaggtcctacctggaaaatccaggataatctctctgtgcccaaatccttaatttaatcacatccacaaagactctttttccaaataaggtaaratttatgggctccaacggttaggacctgatatcttgggagtggggatttttcagccttctacaggcattcagccttaaagatagttgtgtctgaagttgaagttcttgtttccttttgagga

SEQ ID NO: 707305 - DNA, 2209 bp, Homo sapiens
attattattatttagatacaggttctcactctgtcacccaggctggaatacagtggtatgaccacagctccttgtaacctcaaactcctgggctcaatcaatcctcgcacctcagcctcccaaagtactgagattacaggtgtgagccaccgtgccctcccataatatatgatatttttatcagccagaaacttcccggatgttcctttgtagccagccccccatccctgccctatgcagccactgatttgatatctagcactacagattaaccctccttctcctagaacttcatacaaatggaatcaaacaacttttatgtttatgttgacttctttcactcaacgtaatataaatatccaaacttatgccccaggctaacattttcttttcttttttttttcatttttaattaactttgaagttccagagtatatgtgcagatttactatgtaggtaaaccagtgtcatgggggtttgtcatacagattattttgtcaccccagggattaagcctagtatccactggaaaccacaggacactttgaaactccttcaggacagaggtaattcacctgctgtgttgcatatatcagtattttgctcttttacattactctgtagtattctattatatgaatatatccaattttctgttgacagatatttgggttgttctcagttttttagcttttatcaattaggcttctatgaacatttatgtataaatctctttatggacatatgttttaatttcttttgagcaaatgcctgagggtgaaattgcttagctatgtttaactttgtaggcaacggccaattgttttccagagttgttgttcaccgaaaatctatgagggttttagttgttccacctgcttgccaacacacacagaccataagtctttaattttagccacttaagtaagtttatgtgtcatctcattgagagatggttaatttaaaaaaacctcctatcctcttgtgggtttccttgctggtaattctaacaaggggaccaatcagcttagagtataacgtagagatgtataaaatcttccggtatgaaattgacagagatcactaggtcatgtgcacagctgattaactatcgacctgtgatcacactgggaacttgagggcatcgcttgtgccctcttttttggaaatttaatctgactgaatattttctctttgaatatttaaatttctttaaagaagttaacaattaaaggaaggcattgtgttagtttcctatggctgctgtaacaaattaccacgcacatgtggcttaaagcaacagaaattccatttttaatttaatcgtctttttaaaaattatttatttattttttaaacttttatcttaggtttgggggtgcacatgcaggtttgttacataggtaaacttgtgtcatgggggtttgttgtatatattagttcgtcactcaggtactaaacctagtacccatcagttatttttcctgatcctctccctcctctcaccctccaccctcaagcaggccccagtgtctattgtttcccactttgcatccatgtgttctcatcatttagctcccacttataagtgagaacatgtgatatttggttttctgttcctgcattagtttgctaaggatggcttctaactccattcatgctcctgcaaaggacatgattttattcttttttattactgcatagtattccatgataaaacaacagaaatgtattctgctgcaattctggaggccagaagtccaaaatcagcttctcggggttaaagtcaaggtgtgtacagggctgtgttcactccagaggctctaagagagaagccattctttgcctcttccaacttctggtggctgctggcatttcttggattgtggctgcatcccaccaagatgttcctctgtcttcacattgttccgtcttctgtgtgtagtgtaaactcacctctgcctttctcttataagagcacttgtactcatatctaggtcctacctggaaaatccaggataatctctctgtgcccaaatccttaatttaatcacatccacaaagactctttttccaaataaggtaagatttatgggctccaacggttaggacctgatatcttgggagtggggatttttcagccttctacaggcattcagccttaaasatagttgtgtctgaagttgaagttcttgtttccttttgagga

SEQ ID NO: 707306 - DNA, 1446 bp, Homo sapiens
ttgtagagagctttttaaaaattctatgtgattatcactagagtcattgggtagaaagtggaaaatatttgaagtataagaaaggactcttaacagagctgtcaatcactgagttgattgccttgggaaaagtgagtttatcatyaaggaaatcatcacacacttgtcagcggtgttatagaggaggtcaagcactggataagtaattagatttaatctgtggttctcaacttgttttttttttcccatagagaaacatatggcagatggcattgacctgctgtgcacacgctcttatgtggtttcctataagccagggcaacccagtatatttttctcctccctagaaagtatattaaaatgcaagtaagtatgaggttgttaccacagagatagccttaagtttgctttagcttattagaaacaaaaagcaaataattcacaagttctaacgctttgaagaggagaaaattattgggaccaacctcacaatgacccttgacatccagccggtcctctgggacagttgaccactaaagtccattctaactatgaggggttttgattctgtgagtagagcacctacaatttctggctctacacagaagttactcacatggagaagttggaaatgaatgctcctttggggatctgaacatcaaacacgacattctgaggctgcggggaattgttcaccactttgctctggatcatggtggtggccatccgagaagtaatagtagactggactttatagctataaagagttacttgatcaacctcttcctgaaattggcaagaaagcataactgtactgatagaaaaatcacacagaacttcatcaaatgtagtgcatttgatgttaacaacactacattttacttgttttactagcagaacaattccagggccttggtaaggacagaattcatgtatggttaagcattctcctaacttcttggaacccgcaatgagcagaagtctgccttggtttcaagatactttgagctaaaaggcatttttcagccctatgagtctataaataatgatttttcaaaaattagaatacaagtagaaaacggtgtgggaagccagattggattgaggaagtccaggtaataactccaaatgcaagaccatcagctggggagaggatactggattgcgaggttgaaagaggaacttggttgtatctttagtaggggtcacacaggggtgctgtggggtggaaacacacatatggcctccaccaacccccccttacagctctctaccttctttaatctcctctattacaatttcatctgcagtccttttctcctcccccaagtcaaaacaagctaggagaacagtgacgggtgtaagcaagagacattgatcttggacagggcattctgatgcaagtattggtccaacactctggacctccttacccgatcactactg

SEQ ID NO: 707307 - DNA, 1446 bp, Homo sapiens
ttgtagagagctttttaaaaattctatgtgattatcactagagtcattgggtagaaagtggaaaatatttgaagtataagaaaggactcttaacagagctgtcaatcactgagttgattgccttgggaaaagtgagtttatcatcaaggaaatcatcacacacttgtcagcggtgttatagaggaggtcaagcactggataagtaattagatttaatctgtggttctcaacttgttttttttttcccatagagaaacatatggcagatggmattgacctgctgtgcacacgctcttatgtggtttcctataagccagggcaacccagtatatttttctcctccctagaaagtatattaaaatgcaagtaagtatgaggttgttaccacagagatagccttaagtttgctttagcttattagaaacaaaaagcaaataattcacaagttctaacgctttgaagaggagaaaattattgggaccaacctcacaatgacccttgacatccagccggtcctctgggacagttgaccactaaagtccattctaactatgaggggttttgattctgtgagtagagcacctacaatttctggctctacacagaagttactcacatggagaagttggaaatgaatgctcctttggggatctgaacatcaaacacgacattctgaggctgcggggaattgttcaccactttgctctggatcatggtggtggccatccgagaagtaatagtagactggactttatagctataaagagttacttgatcaacctcttcctgaaattggcaagaaagcataactgtactgatagaaaaatcacacagaacttcatcaaatgtagtgcatttgatgttaacaacactacattttacttgttttactagcagaacaattccagggccttggtaaggacagaattcatgtatggttaagcattctcctaacttcttggaacccgcaatgagcagaagtctgccttggtttcaagatactttgagctaaaaggcatttttcagccctatgagtctataaataatgatttttcaaaaattagaatacaagtagaaaacggtgtgggaagccagattggattgaggaagtccaggtaataactccaaatgcaagaccatcagctggggagaggatactggattgcgaggttgaaagaggaacttggttgtatctttagtaggggtcacacaggggtgctgtggggtggaaacacacatatggcctccaccaacccccccttacagctctctaccttctttaatctcctctattacaatttcatctgcagtccttttctcctcccccaagtcaaaacaagctaggagaacagtgacgggtgtaagcaagagacattgatcttggacagggcattctgatgcaagtattggtccaacactctggacctccttacccgatcactactg

SEQ ID NO: 707308 - DNA, 1446 bp, Homo sapiens
ttgtagagagctttttaaaaattctatgtgattatcactagagtcattgggtagaaagtggaaaatatttgaagtataagaaaggactcttaacagagctgtcaatcactgagttgattgccttgggaaaagtgagtttatcatcaaggaaatcatcacacacttgtcagcggtgttatagaggaggtcaagcactggataagtaattagatttaatctgtggttctcaacttgttttttttttcccatagagaaacatatggcagatggcattgacctgctgtgcacacgctcttatgtggtttcctataagccagggcaacccagtatatttttctcctccctagaaagtatattaaaatgcaagtaagtatgaggttgttaccacagagatagccttaagtttgctttagcttattagaaacaaaaagcaaataattcacaagttctaacgctttgaagaggagaaaattattgggaccaacctcacaatgacccttgacatccagccggtcctctgggacagttgaccactaaagtccattctaactatgaggggttttgattctgtgagtagagcacctacaatttctggctctacacagaagttactcacatggagaagttggaaatgaatgctcctttggggatctgaacatcaaacacgacattctgaggctgcggggaattgttcaccactttgctctggatcatggtggtggccatccgagaagtaatagtagactggactttatagctataaagagttacttgatcaacctcttcctgaaattggcaagaaagcataactgtactgatagaaaaatcacacagaacttcatcaaatgtagtgcatttgatgttaacaacactacattttacttgttttactagcagaacaattccagggccttggtaaggacagaattcatgtatggttaagcattctcctaacttcttggaacccgcaatgagcagaagtctgccttggtttcaagatactttgagctaaaaggcatttttcagccctatgagtctataaataatgatttttcaaaaattagaatacaagtagaaaacggtgtgggaagccagattggattgaggaagtccaggtaataactccaaatgcaagaccatcagctggggagaggatactggattgcgaggttgaaagaggaacttggttgtrtctttagtaggggtcacacaggggtgctgtggggtggaaacacacatatggcctccaccaacccccccttacagctctctaccttctttaatctcctctattacaatttcatctgcagtccttttctcctcccccaagtcaaaacaagctaggagaacagtgacgggtgtaagcaagagacattgatcttggacagggcattctgatgcaagtattggtccaacactctggacctccttacccgatcactactg

SEQ ID NO: 707309 - DNA, 1608 bp, Homo sapiens
aatacttgaccatctctttgatatattcacttgaagtagcaaatatagaatcactgcagtaatattgcattgttaggcaatttaattttcattattagcttttagacaactaatccaaatcaggaaaaaatggtaaagaagcaaactctgaattcattcataagaagtaagcccagatttccctcccatttgagaattagatggtcagaagaacaatacctttagctatatctaatctggaggaatcccaactgtatgaaaattcaaagcaacttaatgagaaaggggcatagtgagaactgtcctgcataagcttgcaggctcagtgccttgcaatttccagtgagtctcttgcaatctgagtttttatcagcagtgaacaactcagcgcttttcacttcctgcaatggaaagaaaccatctacgaaagacgtgaagtactagagttgaattttaccgataacagtcctagatttccagaaatctgcaatgtagaaatcagacattttttatatatatgtatatatttttttcctcttgctaaccacgttgaacagaaaggggaagaaggaataaaagattgctaaggaaatgtttgtcattgttgggaaggcagagaactccagcatttcttatttggcagggcagttacattttcctgtggttttgggtgaacatagtttaaaaggaagaagtaaatgacaaacgataacttctgtctttcctttcattttttttgttattattttctaggaaattattgtgaaaattataaccaagaaactgggagagaaatatcataagaaaaaggctattgttaaggtaaggacgtgcaattatgaatggaatttgtgaaaaaagcttgggtcactgagtgaagctattttggtatttcttgaaaatcaagtcctagtagcagaagtactatgtttaaaattcttgattattccatgaaatggaagctgaattcatgattgttggagaaatatttctttttcatccatagtttctactcagcgttgatctrttttcttactaggacagatagtatgtatgaaggcccatcagcacctcttcaaaacctcagcatgcatgccttgcttgtcagtaaaatgtactttattttttaatgataggccatatattaaaagtagtggcaaaaactgcaattacttttatgccagcctaacaattatactgtcagaggtctcatgaggacttcttgtgttttgcttgagaaactgtcttttggctactctgggattttatttatttttatttttatttctgagacagagtctggctctgttgcccaggctggagtgcagtggtgcgatctcagctcattgcaaccatcgcctcccaggttcaagtgattgtcctgcctcagcctcccgagtagctgggattacaggtggccaccaccgcacctggctaacttttatatttttagtagaaacggggtttcaccaagttggctgggctggtctcaaactcctgacctcaggtgatctacctgcctcagcctcccaaagtactgggattacagatgtgagccactgcacccggcctactctgagattttaaagtttgtatcaatattctagg

SEQ ID NO: 707310 - DNA, 1226 bp, Homo sapiens
taagaagataatgtgataaacttaatattgtcaggtatcttctagttttcacattttaaattaaatgaaattatttcttatstcataaataagaacaaatcaccatgacattaaaaatattctcaagcatactaagtgaagaagattttgatctattttaaaaatactactgagcaagaactattagcagaaggagctaaattttacttggaacagtgtgcagctacagctgtaaacttctgcttatctaagatgtcaacttaatactctcccctcactagtattctacttttatgtaaaagaattacatgataaattgacaagaagaatttttgaagtgtcagaatatgactacagttcagagaatacattcagtttaatgtcctctatcttcaatgtgtacaatttaatggatgataactgaggttcacaagtaacttttgaattagcaccaaagactgaattatatttactatacctttggagttctatattttattggttatcaaacaataatcactgcgaaaaggcttgaattagccagggtgtctctgtgttcttttttttttttttgagacagagtctcgctcagtcgcccaggctggagtgcagtggtgtgatctccgctcactggaagctctgcttcccaggttcacgctattctcctgcctcagcctcctgagtagctggtgcccgccaccatgcccggctaattttttgtatttttttttttttttagtagagacagggtttcactgtgttagccaggatggtcttgatctcctgacttcgtgatccacctgcttcagcctcctaaagtgctgggattacaggcatgagccactgtgcccggccactgtgttcttttttgaaagagacaggattggaaatcgaggctttggatggccattggggttgactaccttttacctgtgtgatctggcaaagtcacacagtgaatgactttggcctagactggaaaagtgaagagtttatatttaagaagctctttttctttacagtttatcttcatagtttaacttcttccaaaaaaatttcaagcatatttttaatatgctgaaagtttagtttacaaaacataacaaagtgtgtaaagatcagaaatgacatagagttggaaataactaataaaataactaaatttcactcaccagcagtcacactgaagtggggttgcaaactcgaatgtctacagagactagaca

SEQ ID NO: 707311 - DNA, 1226 bp, Homo sapiens
taagaagataatgtgataaacttaatattgtcaggtatcttctagttttcacattttaaattaaatgaaattatttcttatctcataaataagaacaaatcaccatgacattaaaaatattctcaagcatactaagtgaagaagattttgatctattttaaaaatactactgagcaagaactattagcagaaggagctaaattttacttggaacagtgtgcagctacagctgtaaacttctgcttatctaagatgtcaacttaatactctcccctcactagtattctacttttatgtaaaagaattacatgataaattgacaagaagaatttttgaagtgtcagaatatgactacagttcagagaatacattcagtttaatgtcctctatcttcaatgtgtacaatttaatggatgataactgaggttcacaagtaacttttgaattagcaccaaagactgaattatatttactatacctttggagttctatattttattggttatcaaacaataatcactgcgaaaaggcttgaattagccagggtgtctctgtgttcttttttttttttttgagacagagtctcgctcagtcgcccaggctggagtgcagtggtgtgatctccgctcactggaagctctgcttcccaggttcacgctattctcctgcctcagcctcctgagtagctggtgcccgccaccatgcccggctaattttttgtatttttttttttttttagtagagacagggtttcactgtgttagccaggatggtcttgatctcctgacttcgtgatccacctgcttcagcctcctaaagtgctgggattacaggcatgagccactgtgcccggccactgtgttcttttttgaaagagacaggattggaaatsgaggctttggatggccattggggttgactaccttttacctgtgtgatctggcaaagtcacacagtgaatgactttggcctagactggaaaagtgaagagtttatatttaagaagctctttttctttacagtttatcttcatagtttaacttcttccaaaaaaatttcaagcatatttttaatatgctgaaagtttagtttacaaaacataacaaagtgtgtaaagatcagaaatgacatagagttggaaataactaataaaataactaaatttcactcaccagcagtcacactgaagtggggttgcaaactcgaatgtctacagagactagaca

SEQ ID NO: 707312 - DNA, 634 bp, Homo sapiens
aggcagctgtgctttcattacctgtggacaggatcagcttgtactcttccaacgacaggccactgaagctggtgtctctggggcgagggtactggtcaccggggcagaaaggaagtgaagggaggggagagatcagcacacaagccctgctctctaactgcatttcacctrggccctgggcaaccagaggccaggaggcctagcaaggagaagagcagcgccacctcgaggtcaagacttggcctcgcaagaaccagtacagtctccaggaggcagctccaactataatgtacccgtgagtcctccctggaaaacgcaggtatgggtggggcccctgattctgcatttctaaccagttcccaggtgatgcccatgctgctgctcatggatcacatgttagcagggaggatttagaaaacatcaattttccacataggcatatggccacaaatgtttgtggagttaatgagcatatttttcaagtatgggaaaaaccactctaaatggaatttgacagtaatcatgttgggcccagctccgtaaaaggagggcactttcccaatcatcccatctttatcaccagaatgtggggaggtgtcagttccgtcagagtggatgggaaaataggtataaa

SEQ ID NO: 707313 - DNA, 634 bp, Homo sapiens
aggcagctgtgctttcattacctgtggacaggatcagcttgtactcttccaacgacaggccactgaagctggtgtctctggggcgagggtactggtcaccggggcagaaaggaagtgaagggaggggagagatcagcacacaagccctgctctctaactgcatttcacctaggccctgggcaaccagaggccaggaggcctagcaaggagaagagcagcgccacctcgaggtcaagacttggcctcgcaagaaccagtacagtctccaggaggcagctccaactataatgtacccgtgagtcctccctggaaaacgcaggtatgggtggggcccctgattctgcatttctaaccagttcccaggtgatgcccatgctgctgctcatggatcacatgttagcagggaggatttagaaaamatcaattttccacataggcatatggccacaaatgtttgtggagttaatgagcatatttttcaagtatgggaaaaaccactctaaatggaatttgacagtaatcatgttgggcccagctccgtaaaaggagggcactttcccaatcatcccatctttatcaccagaatgtggggaggtgtcagttccgtcagagtggatgggaaaataggtataaa

SEQ ID NO: 707314 - DNA, 374 bp, Homo sapiens
ttgtttaagatggagtcttgctctgtgacccaggctggagtgcagtgacgtgatctcagctcactgcaacctccgctgcctgggttcaagcagttctcctgcctcagcctcctgagtagctgggattacaggcrtgtgccaccacgcctggctaatttttctatttttagagacagggtttcaccatgttggtcaggctggtctcgaactcctgagcttgtgattcacccgccttggccccccaaaagtgctgggattacaggcgtgagccactgcgcccagctgacttcactactgttatggtccattcggattctctggggtctgtaagggttggagttagcaaacaggtttttctgtttgaagaattgatt

SEQ ID NO: 707315 - DNA, 989 bp, Homo sapiens
ttgcattctataactttcaaacaattgagtatagaaaatgttgaagtgcttaattaacaaatgaatcaaggcactaccatttctttcttaaatgtcacatatttttacccagctaaaaatatttttctgtgttcttggcattttgcatgtgacatggcatatgctctgaaagtaacaatagaattacaacagacccctcaactgctattttgagtaaactattttgtcattgtaaawtcttttgttaaaatgcaagagaagataattattccttttttctttatgccattgtgaataaaaatgcagtgtacttacaatagaaaaattatcattgaactgtctaatgaggttgatatggagtcattttagtaatacattaatactcttggggccacttcatatttttttacccatgctatttctgcctcaataacttaaacattgctactctgatcaaaatccgttcatcaggcttttcttttaagggacacaagtacataatcacttccttttctgtttaaatagagatcgggcaatgctgatatatcaggataacagattccctaagctgccattaaaaagcctagctctatggaatcagacctaggaacaagaggtaacatttgcccagagaatttgcaagattaaaacccaggttcctcaaatattttaatatctcagttgcaaattaagtaaaaatcaaacaattaaaagagatcaacttcatttgtatgtaatgccaaataaatgcctggattacttttcctcccataaaattaatgggttggttaattagttagtagattatttgccaaactgtagaaacagaatataattgaactacaaattaagattatagaaataagaaaagtaaagagaaaatgaagtgaaaaaattaagtaggtaattatgcatattaaaattctgatggaaaagcagtgttttgtatctgaatcctgagaatgcctcaatatcaatatagtttataa

SEQ ID NO: 707316 - DNA, 1410 bp, Homo sapiens
gataattgaaacacaaaagcagtttagaaatagtaagagagtatataggctaagttcattttattataatcattgtgtaaaatgataggctttttgcataatcatagcattcataattatcaatttaccaatttatttctcctcctagattataagccttttgtgggtcagaatagtattcatttaataacctcagtgtctaacaaatagtaagaccycagtaaatgctaaatgaaagaagaaaaaaaataagagcaagataaacgcagagatctaagaatacaatggtcttactgaccttattatttacaataatatcatgacacattgtacaacttttagcattaccaatgattagaatcatcataatgactaaaacagtgatattgaaaacacctcattttctatcttattgtaattttgaataattccagttttttctctcaatgccatttcagcaatgctttaaacattctgcagaaccaaaagcttttagagctaaatgcatcaattacacataatcttgtgatgcaatcctgccatgaatccttagtcattcatcctcagcccacagaatgccatctgcttattttcagtgtaccttgttacaaagagaaagagagcaaaagaaatcttaaactgatttcattgccctgaattatgctactttatagttttgttttcaatgactttttttgttttcaatgacattgattctaaatgctaaagtttctataaagatattatctaaacattctgacctttctggtaaattatctgcatgcattctcctttgtttagtaataaagtgaaacaattatctgaggaaagctctagctttatccatagacacagtccttatattgtttctcactggacttacaattttatagaatcccagttttgtaagtgtggagtttggactattcattccatgtggcagactctctgggataaggtgaaagctaagtaatttcatggtagaacaagcatccaaaaatgcattccatctttttagcaataatgaccagacataaaaccaatccaaggagaaatgagattataatctcacttggttctgttcattttaatattatctataaatgatgtttttataataaatatttaaggaaggcttaacactctataagtatttctaccatcagcctgaggactgtatatgcatctagaaagcaaattttcttaggtgacaagaacagacaaaagaaaaactaggactaacgccctggtcatccagtgctgggagaagcactggcatcaaatcctcattctgtcttaccagatttttatgcacttatgtatttttatcattatactataaacattctttgacatagatatagggggcatggctttgcctgcagtataaacacatctggcaagtagaag

SEQ ID NO: 707317 - DNA, 1410 bp, Homo sapiens
gataattgaaacacaaaagcagtttagaaatagtaagagagtatataggctaagttcattttattataatcattgtgtaaaatgataggctttttgcataatcatagcattcataattatcaatttaccaatttatttctcctcctagattataagccttttgtgggtcagaatagtattcatttaataacctcagtgtctaacaaatagtaagacctcagtaaatgctaaatgaaagaagaaaaaaaataagagcaagataaacgcagagatctaaraatacaatggtcttactgaccttattatttacaataatatcatgacacattgtacaacttttagcattaccaatgattagaatcatcataatgactaaaacagtgatattgaaaacacctcattttctatcttattgtaattttgaataattccagttttttctctcaatgccatttcagcaatgctttaaacattctgcagaaccaaaagcttttagagctaaatgcatcaattacacataatcttgtgatgcaatcctgccatgaatccttagtcattcatcctcagcccacagaatgccatctgcttattttcagtgtaccttgttacaaagagaaagagagcaaaagaaatcttaaactgatttcattgccctgaattatgctactttatagttttgttttcaatgactttttttgttttcaatgacattgattctaaatgctaaagtttctataaagatattatctaaacattctgacctttctggtaaattatctgcatgcattctcctttgtttagtaataaagtgaaacaattatctgaggaaagctctagctttatccatagacacagtccttatattgtttctcactggacttacaattttatagaatcccagttttgtaagtgtggagtttggactattcattccatgtggcagactctctgggataaggtgaaagctaagtaatttcatggtagaacaagcatccaaaaatgcattccatctttttagcaataatgaccagacataaaaccaatccaaggagaaatgagattataatctcacttggttctgttcattttaatattatctataaatgatgtttttataataaatatttaaggaaggcttaacactctataagtatttctaccatcagcctgaggactgtatatgcatctagaaagcaaattttcttaggtgacaagaacagacaaaagaaaaactaggactaacgccctggtcatccagtgctgggagaagcactggcatcaaatcctcattctgtcttaccagatttttatgcacttatgtatttttatcattatactataaacattctttgacatagatatagggggcatggctttgcctgcagtataaacacatctggcaagtagaag

SEQ ID NO: 707318 - DNA, 1267 bp, Homo sapiens
gtatatttatagctgttcttttgcataataacatactctgcttgtttgagtttgatgtgtctcctttaaatatatgatgaatgtagcttctctgtgtgctacatgaagaatatgtctcaccagcacaggaataatacacttaagatgcattaatgaaactaggtttaaaagccattcttcatttcatrccatccagcactcttcttttaaaaaagagtaagtttattattcaaagccatatttaaccagaagaatttccaccagttagccattctttcacagagcagaaatgcaaattgtatgctgcttatagtctaagtgcaactgtcttattgaacattttaacagattgtaacaatgctatgattatagagaatctattatgagaagttttctaagttacaggccaagaattgcattgaatttcagtcaaaaatggtacatgttgaattgtaattattaatggagtcttcccaccatttcaaaaagagagaacacaacagctcaatggttctcttttctttgttttgcattcccttagacagtttaagtgaccacgatggaatctcttgttaatttttgtccaaacttattttgctaccaaataaatgatgccattttaaaataatttgttcagctactgtgattttaaggtttccatttttgttcattgaacaaattcttaattatctcagggaaattgaaatgctccacaaatctttgtgcagtcaaagttatttctgtgaataatgtacaaactaacctcttgggagcccatctatatttgaaaggtttactaatgggctgcttcttccccttgcacatatgctggtttataatttacagcagccttccaggagctatgtctaatttcacagccctgccacacatcacagcacatagctctcagctgccacaaatccctggatgggaactttctgttctcttttttgcctacagtttatggtattttgtttctatggctttagtgtttccaattatttaactgagtccaaaacatgttaagctttatgtcattaaagaagtaacttccttctttgaagatatatgtttacattttttataatatttttacttctcagttcaagacatggatcattatcatttctttttatgattaggtgattggttaaggagtcaaaacaagtggaatgttctgagaatatttttatggctgtttcacccattgttgttcattaccactcatcgttctgctagttctcttgcttcttctgcctcagcggat

SEQ ID NO: 707319 - DNA, 749 bp, Homo sapiens
tttttggtattaagtctttgaaatccagactgttttacacttgcaacacatacacttggggctaatcacatttcaggtgctcagtagcaacatgtgactaacagctaccaaatgaacagtgcagttctagtgcactgtttttaaaaaaattagatttttttttaaaattagatttctctagctgaatagttgtagtttcagataaacagccaaaaatgttctgtctctccacagcttcatctcaattgtgaagaaattgcattaggtgatttttttttttttttttttttaaataatagaaacaacgtctcactatgttgcccaggctggtctccaactcctgagctcaagtgatccttcttcctcagcctcccaaagtgctaagattacaggtgtgagccaccgggttcctggccgaatcaggtgatttcttaggccctttctaaatacaaggtttaagtgttttgaggcagccgacagctatacctttaagtctcttgcttctctaagaataagacattttggatcatttgttctaccataacgtaatgaatacaagttgggagcattttgctcttctgttaagcacagttggccttcctgtccaaggatttttgcatccttgaattcaactaacctcaratggaaaatatttgggggaaaaaaagtatgtacaacaaaaataatatgatcaaaaataatacagtataacgactatttacataacttttacattgtattaggtattg

SEQ ID NO: 707320 - DNA, 600 bp, Homo sapiens
cactcacataccacagttatgcaatacatatcttttaagaagtgatttttcctgtatccgaagtccttttcttaggatattttctcagcaattaaatcacagagttaaaacaggagatggtgaaaaggcagattaatgtttggtaggtgactgggccaagcccttcaggacataatttacattttctcttctgtttatctcaataccccttagaggtagaggcycatttcacagacaaggaaagctgaggttgcatgcccaaggttggcaccacatgtcagagcagaattcaagctcagaccactttggcacaaagcccatgtgctttctattacataaggctgcctgttttatcctaattcaccctcgggcaattcacctagggcatttatattgcttcaggttttttactttcataggcgtcattgtaatgataatttgtgcttgcaggtgtttctttattatagattatgctcttagagtagattttcagagttgaaatttatgggtccctgtacattacatcttggatatgtattgctgaaggtgatggaatttcttctttgctaaggtaaacagcccccaggagtcaagtcagtg

SEQ ID NO: 707321 - DNA, 618 bp, Homo sapiens
gtttgaaactgcgtagcacctcccccttggctctctctctctcctgctctgacatgttaagacgtgctctcttcccctttgcctttggccatgactgtaagtttcctgaggcctcccagccatgcttcctatacagcctgcagaactgtgagtcaattaaacctctttttttcataaattatccagtctcaggtagttctttatagcagtgtgagaatggactcatacagtagaataacttaattgaatattgttcaaatgagtccttcctgaggagtcttctagactagggatcagaaaactatggcctgcaggccaatctagctcactacttgtttttgtatggtgcatgagctatacaaaaggtgtaacgtaaatatcaatgggtccatrtagatataaataaatgtttcaacatgaaataagtgggggagattagataaattgcctggacagaataattccatattaatttatgtagctaattccctctccgccctacccaaatgggggatgcacttagcaactggcttccaaacaatagagtattgaagtgaggttgtgggaacagagaataagtttacagtgaaaaaaacctgacaaaccctacctcagcca

SEQ ID NO: 707322 - DNA, 989 bp, Homo sapiens
ttttaaaatattctacttgttgctgtctaggatttagtaaatcctatatcacagtcaactgggaagtgtctgaggaaagcagttcttcagaactagctgcctatatatctacctaaccctaaacctctgcacccatcaggagcagatgatagggctggccattcttcatttcatataatgttgggttcagctttcacagcaccttttatttgaggcgctgtcgttattcatccagtgcygcctaagaaccctcaggacaaagcttatattttcagcgtggtgaagaagaaccaccttcatctacctgcagctgacttctgtgagttccatttctcatctctcctacctttcggccatatgaaaggctggccatgtcccaagggaactttgctttctcttgcttccaggcctcatctcgtgcttccctttctatctggaatgtctttctttcttgatatggttttgctgtgcccccacccaaatctcaccttgaattgtagctcccataattcccttgtgttgtgggaaggacccgatgggagataattgaatcttgggggcagttttccccatactgttctcttgacagtgcataagtctcacgagatctgatggttctctaaggggaaaccccttcgcttggtccccattctctctcttgcctgctgccatgtaagacgtgcctttcactttctgccatgtttgtgaggcctccccaaccacgtggaactgtgagttcattaaacctctttttctttgtaaattacccagtttcgggtatgtcattatctacaatgtgagaacagactaatatacttctgtcgcccaattccctcttttctcgtacaatttatcctactcatctttcaggattccatctagatgtcacctgctccaagaagcttaacccttcagagctatattaaataaatgtttctcttaggagatttggcaacagtgttcatgcctctaaaatctggaaaaatcct

SEQ ID NO: 707323 - DNA, 989 bp, Homo sapiens
ttttaaaatattctacttgttgctgtctaggatttagtaaatcctatatcacagtcaactgggaagtgtctgaggaaagcagttcttcagaactagctgcctatatatctacctaaccctaaacctctgcacccatcaggagcagatgatagggctggccattcttcatttcatataatgttgggttcagctttcacagcaccttttatttgaggcgctgtcgttattcatccagtgccgcctaagaaccctcaggacaaagcttatattttcagcgtggtgaagaagaaccaccttcatctacctgcagctgacttctgtgagttccatttctcatctctcctacctttcggccatatgaaaggctggccatgtcccaagggaactttgctttctcttgcttccaggcctcatctcgtgcttccctttctatctggaatgtctttctttcttgatatggttttgctgtgcccccacccaaatctcaccttgaattgtagctcccataattcccwtgtgttgtgggaaggacccgatgggagataattgaatcttgggggcagttttccccatactgttctcttgacagtgcataagtctcacgagatctgatggttctctaaggggaaaccccttcgcttggtccccattctctctcttgcctgctgccatgtaagacgtgcctttcactttctgccatgtttgtgaggcctccccaaccacgtggaactgtgagttcattaaacctctttttctttgtaaattacccagtttcgggtatgtcattatctacaatgtgagaacagactaatatacttctgtcgcccaattccctcttttctcgtacaatttatcctactcatctttcaggattccatctagatgtcacctgctccaagaagcttaacccttcagagctatattaaataaatgtttctcttaggagatttggcaacagtgttcatgcctctaaaatctggaaaaatcct

SEQ ID NO: 707324 - DNA, 620 bp, Homo sapiens
aaaatacctacgtgtgtatagctgaaatttccagtctcttgatgaaataacttgcagttgtgcatcagttaaaaaataataatttcactattccactcactgggtatgttggaaactttaaaatgtcttacggtctaggaaccacaggggctggttgaatggatgtgctacatcaattatgggaaattagagatttctttttccagccacagacatggttaacctgatctgaactgcttttagttttccacttgcagttcctcctttccaaagaaaatatggctcctcaagttaacactttttccaatataagattgacacttggttttgtaattctgcaccagggaaggccggaggttggaaattttaggcagttagaggaaggggaaycctccacaaaggacatcaaaatgccgtgggaggtgtttatgatcttgttctgaaaagctggtttgtgtgtgtttcgtgttcagttaagtggaaaatgacaactgaggcaactgttggaacctaagcacataggcaggatttgattgcccatcctaaaggagaaacttcccggcaaatgagttacgtgcacagtcctgtaacttaaaacatcaaatctcaacaaaaaaggg

SEQ ID NO: 707325 - DNA, 628 bp, Homo sapiens
ccgctaatcgcttctgccacagtggcctcgggaggcactgccctctgccttaaaaatccagcccaagaaaagggacacaactgccccttctgcacaattcagcggataatcatctttggtgcatgaccagactttgctgattacaaaaggcaattatgcctctctaaaaaaaagttttctttttgactgtttgctgggtaacatcattgtcggtgccccaaagcccccaggttatttgtcgcagggtcttccggggcttccggtctgccgagttcctgttcagcatctgggtagcatggactgtcttacccctgtcaagcccatctagataggccgggcgcggtggctcacgcctgtaatcccagcactttgggaggccgaggcgggcggatcacaaggtcaggagatagagaccatcctggctaacacagtgaaaacccgtctctaccaaaaatmcaaaaaaaaaaaaaaaaaaaaaaaattagccgggcatggtggcatatgcctgtagtcccagctactcgggaggctgaggcaggagaatcacttgaacctgggaggcggagcttgcagtgagccgagatcgtgctattggactccagcctgggcgacagagtgagactccgtc

SEQ ID NO: 707326 - DNA, 622 bp, Homo sapiens
aaaaaaaaaaactagccgggcatggtgatgcacacctgtagtcccagctactcaggaggctgaggcaggaggatcacttgagcccgggaggtctaggctgcagtgagctatgactgcaccactgcactccagcctgccaagaccctgtctcaaaagaataataacaataataatgataataattttaaggttatttcatgtacgtctattggaaatgattaattcaaacccaatctgatttccaatcaaatcctcactcccaacttaatggaaaacattatagctaactccatttatccaaccccagcagtatcactgaaagcagaaaatcattttacatccttatagaagaaaaaagaagccaggcgcagtggctcatgcctgtaatcccactactttgggaggccaaggcgagataaatgcttgagcccaggagttgaagaccagcctgggcaacaaagaaakaacttgtctctacaaaaattaaaataattagccagatgtggtgcgctcacctgtagtcccagctacttgggaagctgaggcaagaggatcacttgagcctagaagttcaaggcagctgtgagctatgatcacaccactgtactctagcctgggaggc

SEQ ID NO: 707327 - DNA, 959 bp, Homo sapiens
tgagcatgagccatgaaacctggagagggccaaaggaaaagcaaaggctggcggcataaagaggatttccgcagtgtctccygcctactggtcctaggtcgtagggtcccttaagtttggtggtcaacctgagaccaggtggctggctcctttttatcctccctgtcttttttttgtttctctttcccttttctttttttcacattggaaagggtggaggccgtcggattggaggggcagggttaagcttgtagttggcctttgtagagccatagtgccatcgagcggaatctgtttctggaaactggaggcagctgggcatgagtgctggagaaatcccaggagcacgaaagagatggtggcggtgtggggcccccaggctgaagctggacgagagaggaactcctggctggccctttgcccttgctcattaccaggatggcacccgggctccacagccctctccgaaaaaagggcaggaaggggcggccctccatgggttcccctggccatctccaggaattgccgggcaggagtcgtcccgcccacagcaccccacagctccttggttcactgggaggataggggacctctggccccagcgtgattccaggcaagggcaccccagaactccccacaaaagagaccagtgtaaacgaccccagtctcggccgtcagtagtcagtggcttcccttaagcccacctcaagatggctgccagggcacctccgcactctggactgactggtcttggggctgcctggctgctctgtccctgggcctctagattagctgcttctccgtggggtccaaatggcaggcacacttccttcaaaggttaaaaccgcgagggggaaactctggcttagtcagagtccacccagcccgacatattctcgctgaagtctgtgcctgtcagaaggcaagtatccctgcagccggtcgtgttcagaaacaac

SEQ ID NO: 707328 - DNA, 959 bp, Homo sapiens
tgagcatgagccatgaaacctggagagggccaaaggaaaagcaaaggctggcggcataaagaggatttccgcagtgtctcctgcctactggtcctaggtcgtagggtcccttaagtttggtggtcaacctgagaccaggtggctggctcctttttatcctccctgtcttttttttgtttctctttcccttttctttttttcacattggaaagggtggaggccrtcggattggaggggcagggttaagcttgtagttggcctttgtagagccatagtgccatcgagcggaatctgtttctggaaactggaggcagctgggcatgagtgctggagaaatcccaggagcacgaaagagatggtggcggtgtggggcccccaggctgaagctggacgagagaggaactcctggctggccctttgcccttgctcattaccaggatggcacccgggctccacagccctctccgaaaaaagggcaggaaggggcggccctccatgggttcccctggccatctccaggaattgccgggcaggagtcgtcccgcccacagcaccccacagctccttggttcactgggaggataggggacctctggccccagcgtgattccaggcaagggcaccccagaactccccacaaaagagaccagtgtaaacgaccccagtctcggccgtcagtagtcagtggcttcccttaagcccacctcaagatggctgccagggcacctccgcactctggactgactggtcttggggctgcctggctgctctgtccctgggcctctagattagctgcttctccgtggggtccaaatggcaggcacacttccttcaaaggttaaaaccgcgagggggaaactctggcttagtcagagtccacccagcccgacatattctcgctgaagtctgtgcctgtcagaaggcaagtatccctgcagccggtcgtgttcagaaacaac

SEQ ID NO: 707329 - DNA, 2813 bp, Homo sapiens
tgctggcggagggtgcgggatgtgttgggggtggagacagcagggagcagggcagcctcctggcccaacaggcctctgtgcacatgcagtgcagacctgggcataaggggctgacactttctcctggctggttggtggctcttcctctgtgaagccacagaaggtcactcgggttgccacctgtccatctgggacattctgcattcttgttcgctgtcatcctcattgctcacgttgattcttagtatacttttggagtttttcttccttcacttttttcttcttcactgtctttacttctcgtccacttctggtttggggaggtcaggattcgcctggaaggcagggtccggttggcaagcgaacatatttagggagaacacgccttcttttcctcaggaaattagaaagacctcagttgactcctgccagatgtaatcggggtgcccctctcctttctgccctctctccctagtgccataggtggctgattacctcctttccctggtgtccttttcctctccgtttttcctctctcctcccatttctggggtcctacccttcattggccttgtagactaggggctcgtggccccttgcggtttgcagatgacatccagagggtatggtttagcctgcatctttgtcctctgtagcccctgcagacctatttgtggatcaaagcttttgatccgactcacaagggatcccatcaacaagaagcttcttggtggtgtgtcctttcactgggatgtcactgttgtctctttgtcactcgttatgtatgtcaccacgcattgaggcacccatgaactctatccttcaggacagctgaggtggcatgaagctgccatttcttgttctttttctccatctggttcttcttcctcttcctcctcttcctctttctttctcttttcttttcttttctttctttctttccacctcctcctcctttttcttcttcttttcttccctcctcctcctcctcctctctcttttcctttcactttcagatcttggcgagacaaatgttctatggagactgcttcttctgctccttggtaatgggggatgtccctctgcgtgctaggcaaggagaaagcttcacttttgttctgaaaggagcagagatgaaggtcacatgttcagttcctctggtcctctaaaaaaccacccatgtgttacttttaagtgaaatgtcattctgaatgcacttcctaccagtacctcacgattcatccttctaccttgttctccttgaagacgatctaataatgtaatcttggccagtaggagcctcagcaagttttcccccatttcctctccttccagtcaagccatgtgaacacaactatccggatttcagtgtatacaggcaggctgtctctgccatgtgccagtttacccactctcacacaggaaggcacccacaaaccatagacacagatacacatacacacactcactagggacctcagaaatgaaatcacaaacacacccgcacacagagacacatgcagacacacacaaacacacacatagacacacaaacaagaaacctcacaggggcacaggggtgcaggcccaagcattctcccacacagacacatacacaccaccacaggcacgagactgcctacaatttctcccacacaggttctaaatgtgcaaagggaacaggagacaggggagaattcctgactccaggcctgggccatcatgccattgattgatgggcaactctcgccttctcctgagaatcaatgtgggaagtctgttaacagataggatccagcagctggtgtaaaactggagcatcctgggtcaagctgcttaaaaaggaacctcactttgtgttagagacagagagagttcccttgggagccttggccctgtgtgatgccataagaatctgtggtgtgtggtggcattccccagcacccctgagccaccctcctcccacccccatctgtgtgaaacccaggacagcctgagcagagtcagacttgagcaagttgctgagtgtcctctctgagagatactcctgcttcaggccctgtggtttccagttgagcagtccacctattttgatgacctccatgtgtcagcccaaggcggtaaactctacctggagctccaggctttcgtaggacccccagtcctgcagcagaaccttgtgtaagccagctgggtgaccagcaccttgtcctggggcagtagccctatgatcctagtcctcctgtggtgtcccagtratgatcatgttttttgttgtttactttctgcacgggcaagagccatgaaacctgcagagagccaaaggaagggcaaaggctggctccctaaacaggattcccacaggatctccagcctactggtcctggtccttggtcacacggtcccatgagtttggtgatcaatctgggaccaggtgactgattcctttcactcctctgtctttttttttgtttctctttcctctttaccttttttcacatgggaaaaggcggaggccctggagttgaagtggcagggttacagttgtagttggcgtttgtggagccatactgccatcaagcggaaactgtatctagaaaccggaggcagctgggcacaagtgctggggaaaccccacgagcgcaaaagagatggcggcatggagcccccaggctgaagcaggacaagagaggaactccaagctggcccttggcctgtgctcattcccaggatgcctccctggttccacagctctctccgaaaaaaagggcaggtaggggcgacccaccatgggttcccctggtcatctccag

SEQ ID NO: 707330 - DNA, 2813 bp, Homo sapiens
tgctggcggagggtgcgggatgtgttgggggtggagacagcagggagcagggcagcctcctggcccaacaggcctctgtgcacatgcagtgcagacctgggcataaggggctgacactttctcctggctggttggtggctcttcctctgtgaagccacagaaggtcactcgggttgccacctgtccatctgggacattctgcattcttgttcgctgtcatcctcattgctcacgttgattcttagtatacttttggagtttttcttccttcacttttttcttcttcactgtctttacttctcgtccacttctggtttggggaggtcaggattcgcctggaaggcagggtccggttggcaagcgaacatatttagggagaacacgccttcttttcctcaggaaattagaaagacctcagttgactcctgccagatgtaatcggggtgcccctctcctttctgccctctctccctagtgccataggtggctgattacctcctttccctggtgtccttttcctctccgtttttcctctctcctcccatttctggggtcctacccttcattggccttgtagactaggggctcgtggccccttgcggtttgcagatgacatccagagggtatggtttagcctgcatctttgtcctctgtagcccctgcagacctatttgtggatcaaagcttttgatccgactcacaagggatcccatcaacaagaagcttcttggtggtgtgtcctttcactgggatgtcactgttgtctctttgtcactcgttatgtatgtcaccacgcattgaggcacccatgaactctatccttcaggacagctgaggtggcatgaagctgccatttcttgttctttttctccatctggttcttcttcctcttcctcctcttcctctttctttctcttttcttttcttttctttctttctttccacctcctcctcctttttcttcttcttttcttccctcctcctcctcctcctctctcttttcctttcactttcagatcttggcgagacaaatgttctatggagactgcttcttctgctccttggtaatgggggatgtccctctgcgtgctaggcaaggagaaagcttcacttttgttctgaaaggagcagagatgaaggtcacatgttcagttcctctggtcctctaaaaaaccacccatgtgttacttttaagtgaaatgtcattctgaatgcacttcctaccagtacctcacgattcatccttctaccttgttctccttgaagacgatctaataatgtaatcttggccagtaggagcctcagcaagttttcccccatttcctctccttccagtcaagccatgtgaacacaactatccggatttcagtgtatacaggcaggctgtctctgccatgtgccagtttacccactctcacacaggaaggcacccacaaaccatagacacagatacacatacacacactcactagggacctcagaaatgaaatcacaaacacacccgcacacagagacacatgcagacacacacaaacacacacatagacacacaaacaagaaacctcacaggggcacaggggtgcaggcccaagcattctcccacacagacacatacacaccaccacaggcacgagactgcctacaatttctcccacacaggttctaaatgtgcaaagggaacaggagacaggggagaattcctgactccaggcctgggccatcatgccattgattgatgggcaactctcgccttctcctgagaatcaatgtgggaagtctgttaacagataggatccagcagctggtgtaaaactggagcatcctgggtcaagctgcttaaaaaggaacctcactttgtgttagagacagagagagttcccttgggagccttggccctgtgtgatgccataagaatctgtggtgtgtggtggcattccccagcacccctgagccaccctcctcccacccccatctgtgtgaaacccaggacagcctgagcagagtcagacttgagcaagttgctgagtgtcctctctgagagatactcctgcttcaggccctgtggtttccagttgagcagtccacctattttgatgacctccatgtgtcagcccaaggcggtaaactctacctggagctccaggctttcgtaggacccccagtcctgcagcagaaccttgtgtaagccagctgggtgaccagcaccttgtcctggggcagtagccctatgatcctagtcctcctgtggtgtcccagtaatgatcatgttttttgttgtttactttctgcacgggcaagagccatgaaacctgcagagagccaaaggaagggcaaaggctggctccctaaacaggattcccacaggatctccagcctactggtcctggtccttggtcacasggtcccatgagtttggtgatcaatctgggaccaggtgactgattcctttcactcctctgtctttttttttgtttctctttcctctttaccttttttcacatgggaaaaggcggaggccctggagttgaagtggcagggttacagttgtagttggcgtttgtggagccatactgccatcaagcggaaactgtatctagaaaccggaggcagctgggcacaagtgctggggaaaccccacgagcgcaaaagagatggcggcatggagcccccaggctgaagcaggacaagagaggaactccaagctggcccttggcctgtgctcattcccaggatgcctccctggttccacagctctctccgaaaaaaagggcaggtaggggcgacccaccatgggttcccctggtcatctccag

SEQ ID NO: 707331 - DNA, 602 bp, Homo sapiens
caagagcagaaggtggcccaagcccagagaattttgatacccaacatagcaacagaacacaacttagtcaggtaggtttatttctccccaggatctaatagaagcctcaccaacaacacttggcaaactcaagagaaatcacctagaacataagtggccaagaaaaccattctccttttctgcgaaatgtgagataccactttcttccatctagagactctggccagggaggtggtgctggtagcaccctctgkgggggtcttgccataatcaacaacctgcctggggaacctcattatcttcaccaatcctgagactctactcccctctttagagataccagggatttaggtgattcaggaaagggagatcccacgattaaaagtactcagacctggaagcactctttgttctacaggtctgtgaagtcctgtcatcagctaaagactggcccaaagtgtctgagccagaaagtacttttcatccccccaggctggagaatcctttatcccacctagaaaaaccacataatcaggtgactggatggcattgttagtgagaccacaccaaagtaagtttaaggcctggaagcactatttatc

SEQ ID NO: 707332 - DNA, 618 bp, Homo sapiens
cgctggtctcgaactcctgacctcatgatctgcccacctcggcctcccaaagtgctaggattacaggtgttagccaccccgcccagccagtaatgtcttctaaacctctgttttcttcctatggacataatgagacaaaatttgaatagagaaaaacacaattgcaaccagggttgcattcctgtcaccttaggtaaggaagaagaggaaatgaaaatcagagaggcgacaaagctgcgtgggctggagggaggaaatctgytgtaaatatcaaaaagcgaagctgaaaataaacctcagccctttagagaattactagtgaagttaagttcaattgatttaaagattgcttttcagagagttcataaaactcatgatcctgaattgagggttgtttgggaaaaaccccaaaccatttttttcctctgctttcacatcaacacaacaatcaacatggaagatttctgcagccaaatgtgtgggatagtttcccccacacacaaagcagcagacaccagctgagtgtcctctaattcaattccaacaccatctacctaaagatagcctcaggtctcacaagttgagggcttatttcccaagacttcccttcaccaaaga

SEQ ID NO: 707333 - DNA, 618 bp, Homo sapiens
cgctggtctcgaactcctgacctcatgatctgcccacctcggcctcccaaagtgctaggattacaggtgttagccaccccgcccagccagtaatgtcttctaaacctctgttttcttcctatggacataatgagacaaaatttgaatagagaaaaacacaattgcaaccagggttgcattcctgtcaccttaggtaaggaagaagaggaaatgaaaatcagagaggcgacaaagctgcgtgggctggagggaggaaatctgttgtaaatrtcaaaaagcgaagctgaaaataaacctcagccctttagagaattactagtgaagttaagttcaattgatttaaagattgcttttcagagagttcataaaactcatgatcctgaattgagggttgtttgggaaaaaccccaaaccatttttttcctctgctttcacatcaacacaacaatcaacatggaagatttctgcagccaaatgtgtgggatagtttcccccacacacaaagcagcagacaccagctgagtgtcctctaattcaattccaacaccatctacctaaagatagcctcaggtctcacaagttgagggcttatttcccaagacttcccttcaccaaaga

SEQ ID NO: 707334 - DNA, 1287 bp, Homo sapiens
taatttatttaaccaacctctctctgataacggactttgaggttatttctaattttccacttttgcaaacactttataatgaacatctagattgatttgagtttctgaatattttcatatgttaaattaatattatatattgctaaatccagagaaactgtaccattaacactgtttactgaagtctgtaagagagcattttttacccacactttcacatatactggaaactcttaaatctccattaacctgtttgagaaaaattatattttgtttttattattatgtctttttaaaaaattagtatttttgttgggcatcttttcaaatgtcaatttgtgatgtgtatttccccttttaattttctttgtctggtctattgagtgtttctatttttaaaagttcatatcagccgggcgtggtggctcacgcccgtaatctcagcactttgggaggccgaggcaggtggatcaccaggtcaggagatcgagaccatcctggctaacacggtgaaaccccgtctctactaaaaatgcaaaaaattagccggatgtgcatgtagtcccagctatttgggaggttgaggcaggagaatcgtttgaacctgggaggcggagattgaagtgagctgagattgtgccactgtactctagcctgagcaacagagtgagaccccgtctccaaaaaataaaaaataaaacagtttatattcagcatctaggcttggcacatagtagacagtcattactagctacgtaactatgtgccacttatgcatatttgcaacattttcacaagtacagagaataatacattgaacccccatataggcaacacccagattccataactatcaacacgaggccaatctggttcataccattctcacctacttcccaccctgaccctgattaatttctttagtgttctttgtatgtagggatttaaactttgtcatatggtacaaatattccctgcccccctgcagtttcycatttgtctttcagtatattaatatttttgtgccatactggttttaaactttcatattgtcacatctgttaatcttttctataggatttctggattttgtgtaatttttaaaaagatcccctcctccccaacatcaaagtttataaaaatattgtctttgggctgggcgcagtggcttacgactgtaatcccagcactttgggaggccgaggcaggtggattacctgaggtcaggagttcaagaccagcctggccaacatggtgaaaccccctccctctctactaaaaatacaa

SEQ ID NO: 707335 - DNA, 1287 bp, Homo sapiens
taatttatttaaccaacctctctctgataacggactttgaggttatttctaattttccacttttgcaaacactttataatgaacatctagattgatttgagtttctgaatattttcatatgttaaattaatattatatattgctaaatccagagaaactgtaccattaacactgtttactgaagtctgtaagagagcattttttacccacactttcacatatactggaaactcttaaatctccattaacctgtttgagaaaaattatattttgtttttattattatgtctttttaaaaaattagtatttttgttgggcatcttttcaaatgtcaatttgtgatgtgtatttccccttttaattttctttgtctggtctattgagtgtttctatttttaaaagttcatatcagccgggcgtggtggctcacgcccgtaatctcagcactttgggaggccgaggcaggtggatcaccaggtcaggagatcgagaccatcctggctaacacggtgaaaccccgtctctactaaaaatgcaaaaaattagccggatgtgcatgtagtcccagctatttgggaggttgaggcaggagaatcgtttgaacctgggaggcggagattgaagtgagctgagattgtgccactgtactctagcctgagcaacagagtgagaccccgtctccaaaaaataaaaaataaaacagtttatattcagcatctaggcttggcacatagtagacagtcattactagctacgtaactatgtgccacttatgcatatttgcaacattttcacaagtacagagaataatacattgaacccccatataggcaacacccagattccataactatcaacacgaggccaatctggttcataccattctcacctacttcccaccctgaccctgattaatttctttagtgttctttgtatgtagggatttaaactttgtcatatggtacaaatattccctgcccccctgcagtttctcatttgtctttcagtatattaatatttttgtgccatactggttttaaactttcatattgtcacatctgttaatcttttctataggatttctggattttgtgtaatttttaaaaagatcccctcctccccaacatcaaagtttataaaaatattgtctttgggctgggcgcagtggcttacgactgtaatcccagcactttgggaggccgaggcaggtggattacctgaggtcaggagttcaagamcagcctggccaacatggtgaaaccccctccctctctactaaaaatacaa

SEQ ID NO: 707336 - DNA, 736 bp, Homo sapiens
tagctttccctttataactacaaggggttaagtctgacataggtaaccaaagaatcgaaaaaagcaggatttacaaattgcacagggccaggagggggagctatgatcctctgacattgagtctgactcttccccgctactggaaattggatattgcacagctgtggctggattaaggcatcaaaataatacaagtctagttttgctataactgtagaatagttatagcaaaataaaaaaaacttttgtgacactcttaattttcgacatyttagaagaaaaaaactgatagatttttttatagcaaataagcatcaggtcattacacaaagtatatacaaaatagcactacataattttcaaggcaatgtacatatctaaatacatttatgggattcatttggaatgcactgtcaatacacacagtgacttagagctgtgatatgagtgaacaccgatgacttttccatctcagactcctgaaatgcagtggaagaggggatgtccagttacatgttgatgaataaaaatagcaaaggaaatatataagtagaaagcccataataagacagagtctcccagtcatccacacgaccacaacagtcccatttagtaaactgtactgcagttccctgagtgatggtctggtgtccgtaatgaatagtgcctctgtccaatgtaccaacgtctggccctcaggaaaaaaaaatatatatatataaaatatatataaaat

SEQ ID NO: 707337 - DNA, 1019 bp, Homo sapiens
ttacgtacctactctggcagttccatatcagttgcttcagattgaccttttcctcgtgttaaaagcacgtgatcccacttattaaacaaggagtttgtggttttctttcactgtgcagtggaaaggcttttaaaagttgctttggaagaaagaaaatttgaagtcattctttggagttataagggcagatttaaacagtatcattactcattctttgaggttttttatgtgtgtaggaataatatttgtccttcagtaaaaaacaaagtagctagtcctattcagagcaaccagaacattccaatcagctgcctaaaaatcacatctgcaattttctaaaaaataaaacatcagcaaatcaagtaaaaaccaaagaaacaattttaaaaatgatgttgtggcctaaactataaactgtatggtatagaaattttgtgcttcagtctcaagatatgtgacctcagccacaaggaggataaaatgccaaagtactgacaggtatctatattttgagattagcaatcatttcaaatttcttttatagacagttttatatttttcaaaatatttatggtgaatatttattacttcataatcaggcaaccagtaaaagttatttttaaaataaaataattcaaaaaagtatagataaaagaatatttgaaaacaccaaaatattatctgtctttaggtggtgacattctggctaatcttttttcttttctgtaatttctagttgtgtgtgtgtgtgtgtgtgtgtgagtgtgtatgcataacctttatcataagaaaaataacaaatatttctcaaaatctacatgtggaatatgaccctttcttttagcctttgcagcaggtggtgagaattctctagacagagttcagcagagctcctaatgaagcctgwctgggttctgatcctggctctggcagtcacttgctttgtgatcttgtgtaagttatttactttctccgagcctcaagttctcatctgtaatgtgtacataatccccatatca

SEQ ID NO: 707338 - DNA, 658 bp, Homo sapiens
agtcctcatcccaggagtgcatccttgagctattaggaacygtgctgtgacagtgctgactccttgttagagaaaagcttgcttgaatgcaattattgcttcgcttgagtttgtgcattatttactaataacagctacaggaaaacaagatcttcaacagagataaaagaaaatttgccaaccaacagctctaagaatgggctgacgaacctgtagaagctcacgaaacactgatgaagaaagcaatgattaactggctgcctattgtgcacatttcacagaaatgttttggtcatcatttcccctaatttcccttaaaccccccctggatcaagatccagaagcaaagctccgagaggtggtctctgagtgctagttcactccctcctctggtttgccggcttcttgaatgaagcgaactttcttttcaccaaagctctcttgagtttttggctttcaagcaatgagtagcccagatctgagttcggttacaatgatagtgtttgtttgtgtctcttagtgtgggaatgggtagaaaaaattgtctgtgctgagagtcagccatcctcatgggccaaggttaaggcctagttgagaagatggctcagaggagccttagcttaatcaagaagagagtctttgtcagcgggcatgtaac

SEQ ID NO: 707339 - DNA, 658 bp, Homo sapiens
agtcctcatcccaggagtgcatccttgagctattaggaaccgtgctgtgacagtgctgactccttgttagagaaaagcttgcttgaatgcaattattgcttcgcttgagtttgtgcattatttactaataacagctacaggaaaacaagatcttcaacagagataaaagaaaatttgccaaccaacagctctaagaatgggctgacgaacctgtagaagctcacgaaacactgatgaagaaagcaatgattaactggctgcctattgtgcacatttcacagaaatgttttggtcatcatttcccctaatttcccttaaaccccccctggatcaagatccagaagcaaagctccgagaggtggtctctgagtgctagttcactccctcctctggtttgccggcttcttgaatgaagcgaactttcttttcaccaaagctctcttgagtttttggctttcaagcaatgagtagcccagatctgagttcggttacaatgatagtgtttgtttgtgtctcttagtgtgggaatgggtagaaaaaattgtctgtgctgagagtcagccatcctcatgggccaaggttaaggcctagttgagaagatggctcagaggagccttagcttaatcaagaagagagtctttgtcagcgggmatgtaac

SEQ ID NO: 707340 - DNA, 2020 bp, Homo sapiens
tacaattcagtatatatgcagacagtaaaattaaagggaaaaaatcagtaaaaataaaactattcaccataaactaatggaaatttagaagtacctaactggccaagacacagaataatacaagcgatcattgttaaacatgcagtagagcatggaaataagaaaggctttggatttaggtaagaatccctgattcagcaagtcctgtctatattacctgatagggttaattatgaggcatgcagagaaaggttgtagagtatgctatgatgcctaacacaaaaaagatagggcttccccccagactttgcaaatcttatatttcaaggctcgcttcaaggcctcacctgcgtattatctccaaataaatgtcttggagatgaggaagtgtactactagtgctcatcatattcatccaagggttgaatgcatagtaggtatatcatcatcatcaccacaacagcaacaatagtaaaagtagctcatatttatcaaggacttattatatgcaagcactgttctaaggacttttttccataaaaactcatttaacttttataacaaaactatgaagcaggccctactattatgtctattttacagatgagaaaattgaggctgagaaaggttaattgtcacacaactaatgaatggtaaagtaaggttataatttatacatttttcattgataattgttaaaaaatacatattgaaaactgaggaggtgggaagagagacaccaatagtatttgcattgtggtcattttactggatattccagctctttctattaactttgccttactgtaaattctgcaaaagagtcgactgctatttctgttttaatgatgctgttttagtctaagattacaagaaatgtaatgacagaattcaaaatataacaaagtacccgttgactttctacactttaatttacaccagtctactcaattagatatcattaaatcttttctttaaaaatatatcctagttatacacaaaagcaaatattaccagtattcttttatagtattatatgcagaaacatttgaaatagagcaaaaagaaaacatttacaataacacctaaacacttgatcttagccaaaggtcgagaagccattatagtaacacttaggattagaccaaaataaaagagtactagcaaataacctaagcagagagcggtgatgcttatcacagacacatttaatgatgtgacctatggattttcctagtttctggttttacttagtcattagtttcgtgcctaagttggctaggttagatcatcttctatcaccgttgcaggtgtgaatcccacgaaggctggtaagcgctgcaggcacacagagcccctgcccacacttgggtcatagctcatgttcaacaaatccagtgttcatgggtgttgcttatatattattatctatactgtttgatagagataatttctgaaatatccacaacaaaagtttaaagcacagaacaaggtattagcatgactacycaatgttaacacaggttatttcaggaaaggtggatttaaaaaaattgtccatctctttgtaatttgctttattagttgattcattgttgttggtttcttagtgagtaaaatacaaataaaataaaaattaccattttaaccatttttaagtttacagttcagttgagttaagtacatccaaaatgttgcgtgaacatcaccactaagaattgccaaactgttttccacagcagctgagccattttacattcccatcattttacgaggattccaatttttccacatcctaaccagcacttgtaattttccaatttaaaaaaataacagctatccgaatatggatgagctggtgtctcattgtgattttgatttgcatttccatagcactaataatgttgagcatcttatgtgctcattggccatttgtacatcttctttgaagaaatgtcaggccaagccctgtgaccatttttgaattgggcacagggcttgggctgacattgtattgtca

SEQ ID NO: 707341 - DNA, 2020 bp, Homo sapiens
tacaattcagtatatatgcagacagtaaaattaaagggaaaaaatcagtaaaaataaaactattcaccataaactaatggaaatttagaagtacctaactggccaagacacagaataatacaagcgatcattgttaaacatgcagtagagcatggaaataagaaaggctttggatttaggtaagaatccctgattcagcaagtcctgtctatattacctgatagggttaattatgaggcatgcagagaaaggttgtagagtatgctatgatgcctaacacaaaaaagatagggcttccccccagactttgcaaatcttatatttcaaggctcgcttcaaggcctcacctgcgtattatctccaaataaatgtcttggagatgaggaagtgtactactagtgctcatcatattcatccaagggttgaatgcatagtaggtatatcatcatcatcaccacaacagcaacaatagtaaaagtagctcatatttatcaaggacttattatatgcaagcactgttctaaggacttttttccataaaaactcatttaacttttataacaaaactatgaagcaggccctactattatgtctattttacagatgagaaaattgaggctgagaaaggttaattgtcacacaactaatgaatggtaaagtaaggttataatttatacatttttcattgataattgttaaaaaatacatattgaaaactgaggaggtgggaagagagacaccaatagtatttgcattgtggtcattttactggatattccagctctttctattaactttgccttactgtaaattctgcaaaagagtcgactgctatttctgttttaatgatgctgttttagtctaagattacaagaaatgtaatgacagaattcaaaatataacaaagtacccgttgactttctacactttaatttacaccagtctactcaattagatatcattaaatcttttctttaaaaatatatcctagttatacacaaaagcaaatattaccagtattcttttatagtattatatgcagaaacatttgaaatagagcaaaaagaaaacatttacaataacacctaaacacttgatcttagccaaaggtcgagaagccattatagtaacacttaggattagaccaaaataaaagagtactagcaaataacctaagcagagagcggtgatgcttatcacagacacatttaatgatgtgacctatggattttcctagtttctggttttacttagtcattagtttcgtgcctaagttggctaggttagatcatcttctatcaccgttgcaggtgtgaatcccacgaaggctggtaagcgctgcaggcacacagagcccctgcccacacttgggtcatagctcatgttcaacaaatccagtgttcatgggtgttgcttatatattattatctatactgtttgatagagataatttctgaaatatccacaacaaaagtttaaagcacagaacaaggtattagcatgactactcaatgttaacacaggttatttcaggaaaggtggatttaaaaaaattgtccatctctttgtaatttgctttattagttgattcattgttgttggtttcttagtgagtaaaatacaaataaaataaaaattaccattttaaccatttttaagtttacagttcagttgagttaagtacatccaaaatgttgygtgaacatcaccactaagaattgccaaactgttttccacagcagctgagccattttacattcccatcattttacgaggattccaatttttccacatcctaaccagcacttgtaattttccaatttaaaaaaataacagctatccgaatatggatgagctggtgtctcattgtgattttgatttgcatttccatagcactaataatgttgagcatcttatgtgctcattggccatttgtacatcttctttgaagaaatgtcaggccaagccctgtgaccatttttgaattgggcacagggcttgggctgacattgtattgtca

SEQ ID NO: 707342 - DNA, 402 bp, Homo sapiens
tgtcctcatgaatgtattcatgcttttaccatgctagtggattcatttttgagagagggttataaaagtgagttcatccctctcttgctcttgtatgctcctgccatccaacttctgccacatgatgccctacaccccattttgacacagcaagaaagcctccaccagatgcggcctcttgatcttgaacttcccaacctccaaaactgtgagccacataaacttctacagtttataaattatccagtcccaagtattctgttttagcagcacaacattagatacccactaatatggagtgttttagtagaatctaaacactctggctagtagaattgattctttagtagaatcaattctggctagtagaatttgattctttagtagaatcaaaytctggct

SEQ ID NO: 707343 - DNA, 1276 bp, Homo sapiens
  misc_feature 2, 3, 4, 5, 6, 7, 8, 9, 10, 11, 12, 13, 14, 15, 16, 17, 18,19, 20, 21, 22, 23, 24, 25, 26, 27, 28, 29, 30, 31, 32,33, 34, 35, 36, 37, 38, 39, 40, 41, 42, 43, 44, 45, 46,47, 48, 49, 50, 51, 52, 53, 54, 55, 56, 57, 58, 59, 60,61: n = A,T,C or G
  misc_feature 62, 63, 64, 65, 66, 67, 68, 69, 70, 71, 72, 73, 74, 75, 76,77, 78, 79, 80, 81, 82, 83, 84, 85, 86, 87, 88, 89, 90,91, 92, 93, 94, 95, 96, 97, 98, 99, 100, 101: n = A,T,C or G
annnnnnnnnnnnnnnnnnnnnnnnnnnnnnnnnnnnnnnnnnnnnnnnnnnnnnnnnnnnnnnnnnnnnnnnnnnnnnnnnnnnnnnnnnnnnnnnnnnnatgcgcatttgaatcatcttagaattttggtaaaatgcagattctgatttagcagggcttgaaattctgcatttctaacaaacccctaggtgacactgctgctgctgatcatgaacacacttggaatagtaggaattcataatatatatactcaatatgaccttttttatttattgagaactcccaaagaacacatacaaaatgttaaaaatcctcatctacctcatttacttatatagaaactataaaacagctaggatatactacatttgttccaaaatttaaccatagtatagatgttggtaacaatttctcaaagaaagaaaactgatactattgaataattacttaaagaatggaaccaataaagatagcctcagacttagctactaaaagcagctttggtaaaatattgctcagrctagaaaataaaacggataaattaaaaattgccaaataattattgttgagttttattcataaaaaaactctaatgtttagataaagttaatggaaaaattaagaaaaggtcagtttattaactctaagtaatgaggtaaagtgaaatagatttaaatatgttgttttatataaatgaggtatcttttatatcttttatcttttatatctcatttatataaaacaacatatttaaatatatttcccatatataaagagaattataaagagatttaaatatgttgttttacataaatgaggtatcttttatatctcatttatatatcaatgagatatcttttacatgactacctaaaatttctatatcatttaggaaggaaaaaaaggaaaaagggaggaaagaagagaagaaatcagtagtgagggtcctgtctgtcagaaggaaaactaacaaacagaaaggacatccacaccaaaaacccatctgtacatcacggtcaccaaagaccaaaagtagataaaaccacaaagatggggaaaaaacagagcagaaaaactggaaactctaaaaagcagagcgcctctcctcctccaaaggaacgcagttcctcaccagcaacggaacaaagctggacggagaatgactttgacgagctgagagaagaaggcttcagacgatcaaattactccgagctacgggaggaaattcaaaccaaaggcaaagaagctgaaaactttgaaaaaagtttagaaga

SEQ ID NO: 707344 - DNA, 656 bp, Homo sapiens
taatcttagttgggtaactcctccttcctaaagatataaattactgacatatctaaatataaacgttaaacttttatttggaaaaaagacaccataaagttaaaacacaagcaaaagaatgggacaataatatttgcaatatgcacaaaaggttaatttccatgacactggccaggcatggtggctcatgcctgtagtcccagcattttgggaagcccaggtgagaggatcacttgagcccaggaattccagaccagcctagggaacagagcgagaccccgtctcatcaaaaatatataaattgttttttaaaattttccatgacattaaatcagttactgaagcyaatggtgggggaggagagagacaatactttagcataatgctgctattggtgtaaaaactgaaaagactatatgtagtttgcaaatacacagaaagatgtctttttttgttgttgttgttgcttgtttgtatttttttttttttttttttgagacagagtcttgctctgttgcccaggctggagtgcagtggcgtgatctcggctcactgcaagctccgcctcccgggttcacgccattctcttgcctcagcctcctaagtagctgggactacaggcgcccgccaccacgcccagctaattttttcttttt

SEQ ID NO: 707345 - DNA, 574 bp, Homo sapiens
aactgtttctgtacttactttgtgttaggcattgtgctgggcactttatagataccacttcattaaatccaacatccctgtgaggtaagtaccgttaaccttctatacactgacttagggaagttaaacaggtagccaaagatcatcaatttagtaactgaaaaaactrcagtttgactccacagcataagcttttaaccaccacactatagtgccttcatagaacagaataaaaagattaagtatccaatagtattcccagaaattatgtaatcctgtcactctcaaaagagaatagcagattacaaagagcaaatcgaaaagaagcacaccaaaggggagacagaacaagctgagaaagacacccagaattctctaccagttctcaagacaatgaaaaccataataaagaagattaagagcaagagacaaaaattatccagtagttactagatattattagagagtgtaaagaaggtaatttttaaagtaaatatatttttttaaaaaggtgctggggcggggggtggaggcggggatggggattcacacatctcccaaagctttcaggaag

SEQ ID NO: 707346 - DNA, 574 bp, Homo sapiens
aactgtttctgtacttactttgtgttaggcattgtgctgggcactttatagataccacttcattaaatccaacatccctgtgaggtaagtaccgttaaccttctatacactgacttagggaagttaaacaggtagccaaagatcatcaatttagtaactgaaaaaactgcagtttgactccacagcataagcttttaaccaccacactatagtgccttcatagaacagaataaaaagattaagtatccaatagtattcccagaaattatgtaatcctgtcactctcaaaagagaatagcagattacaaagagcaaatcgaaaagaagcacaccaaaggggagacagaacaagctgagaaagacacccagaattctctaccagttctcaagacaatgaaaaccataataaagaagattaagagcaagagacaaaaattatccagtagttactagatattattagagagtgtaaagaaggtaatttttwaagtaaatatatttttttaaaaaggtgctggggcggggggtggaggcggggatggggattcacacatctcccaaagctttcaggaag

SEQ ID NO: 707347 - DNA, 574 bp, Homo sapiens
aactgtttctgtacttactttgtgttaggcattgtgctgggcactttatagataccacttcattaaatccaacatccctgtgaggtaagtaccgttaaccttctatacactgacttagggaagttaaacaggtagccaaagatcatcaatttagtaactgaaaaaactgcagtttgactccacagcataagcttttaaccaccacactatagtgccttcatagaacagaataaaaagattaagtatccaatagtattcccagaaattatgtaatcctgtcactctcaaaagagaatagcagattacaaagagcaaatcgaaaagaagcacaccaaaggggagacagaacaagctgagaaagacacccagaattctctaccagttctcaagacaatgaaaaccataataaagaagattaagagcaagagacaaaaattatccagtagttactagatattattagagagtgtaaagaaggtaatttttaaagtaaatatatttttttaaaaaggtgctggggcggggggtggaggyggggatggggattcacacatctcccaaagctttcaggaag

SEQ ID NO: 707348 - DNA, 916 bp, Homo sapiens
cactatacttgtggattcactttgaaaattaagtaaattcatatgtgagtgtgtacataagtatggaggtgctattatgtctccaacatttgaggacaggaaatgatgtggacagagagattgctgaggaagagacaagtaaaaacaagtaggtgaaaatgggaggagctgctgggaatcaaacaaaaaccaggctgggcacagtggctcacacctataaccccggcactttgggagaatgaggcaggtggatcacttgagcttagaagtttaagaccagtctgggcaacatggcaaaaccctgtctctacaaaaaagtacaaaaattagccaggtgtggtggtatgtacctgtagtcccaggtacttgggaggctgaggtgggaggatggcttaaggccaggaggcagaggttgcagtgatccaagattatgccactgcactccagcctcagtgacagagctagaccctgtctcaaaagcaaaacaaaaaacagaaaacagtagaaaatatgattatcgtatgataaaggcaatcatgtccaacaccccacaacttctcaggttcacaaaattcaacacacataagctatttgacagattcttaggaaaggtataatccgagaagccagtgaggcaaacagtgcccagagcagcaggtttcacttacttgtttgcagctgattctaaaagggcaaagagctggtcaggctggtcygtttgtgggtcaaagtccatcaaatttctaatcatgtccagagcctgcatattccatcggggatccagagggatcacaaattcatctagtttaaaaacagaacaaaacaaaaatcagaaatattggagaaactccttgcctgggaagtttcagttgaatattttcattgttttactttgagcacattgaatcatgatggg

SEQ ID NO: 707349 - DNA, 639 bp, Homo sapiens
ttagccactccagtcttagggcctttgcccctgtagattccttttcccaccacaaggtcagttgacactattcacaaatgtttgcaatgccacataagcatcattattggtttgtctgattactttgtaattactttccttttacttgatgatcatctatctggtctaccacagaggcccaggaataaagcatacgtgtgtgtacctcatcagtatcatagacaaccagtacctcyggtgtccagcatcctaccttgctctgcttgttaggcatgcgaaactaaaaagtaactttcccttgggtaaaagtcagcaagcattgacttgaggaaaacaagataagataatctgacagccaagctaatatacacaaacttgaaatcagacctctctgtggcatttctacttgcccagaagccagtttttatattttgaatgcaatgtattttattccctctcttcagagcatatcttgaagcatagagacaattttcatcttatgatactgaggaaacctaggcccaatatatcatttcagctacccaccaaattaccaacactcttaattgtcttatttaagatcaacccctctgtttcttctcatcatccctgacctgttacatcactctcttcctaact

SEQ ID NO: 707350 - DNA, 588 bp, Homo sapiens
taatttacaaagaaaagaggtttaattgactcacagttccrcatggctggggagacctcacaatcatagcacaagacaaggaggagcaaagtcgtgtcttacatggatggtggcagtcgagagcttgtgtagggaactcccctttataaaaccatctaatctcatgagacttattcactatcatgagaatagcatgggaaagacccacccccatgattcaattacctcccacctgtcccttgcacaacacgtgggaattggagctacaattcaagatgagatttggttggggacacagccaaaccatatcacccaggatgaatcttgagctcctgagatcaagtagtcctccccagtcaacctcccaaagtgctgggattacaggcatgagccactgtacttggcctttttagattaattttaaaaacttttaaaaattatttttgttttttttttgagacagggtctctgtcacacaggctggagtgcagtggcaccatcagggcttattgcagccttgacctccccggctcaagctatcctcccacctaggccctcctgagtagttgggactacaggcatgtgcca

SEQ ID NO: 707351 - DNA, 588 bp, Homo sapiens
taatttacaaagaaaagaggtttaattgactcacagttccgcatggctggggagacctcacaatcatagcacmagacaaggaggagcaaagtcgtgtcttacatggatggtggcagtcgagagcttgtgtagggaactcccctttataaaaccatctaatctcatgagacttattcactatcatgagaatagcatgggaaagacccacccccatgattcaattacctcccacctgtcccttgcacaacacgtgggaattggagctacaattcaagatgagatttggttggggacacagccaaaccatatcacccaggatgaatcttgagctcctgagatcaagtagtcctccccagtcaacctcccaaagtgctgggattacaggcatgagccactgtacttggcctttttagattaattttaaaaacttttaaaaattatttttgttttttttttgagacagggtctctgtcacacaggctggagtgcagtggcaccatcagggcttattgcagccttgacctccccggctcaagctatcctcccacctaggccctcctgagtagttgggactacaggcatgtgcca

SEQ ID NO: 707352 - DNA, 939 bp, Homo sapiens
aaaaaatcgagtctttctttatagatggttaatggttgtgacccaggatatgttctcatataaagacaatctttagaggattgttggagaaaagaggaatttctttcatactccatggaaatgattattggttaataataagcagtaaatacaccaggtgtattagtgttatatatattttggaaagaaagtgcagttgaaattgggtatcmgatttatttgccactttaatagaagtgttagggggacaggtggtgaggaagcaagtgaaattgctcaaaaaaatgtgcactggccagtggagtatttctgagcatggctggtcccctgctgctttgtccctggagagcagagctttcgtcccagcctgagtcttctcaggatgtcctgtctgttgtttctccctctgccacatggttttagatgcaatccaggatttccaggaaggcactatgccaaggtttctaagctggaagacaagatagcaacttttgatggaaatatgtctggcctgtgtgatgcagtgatttaattaattatgttcaaagtactaaactaccatcagctgtaataattacaggaactgaggctccatgaagaacattgaagtaatggaaatccaataaaaagtaacactgagttggcttagataaggggaaaaagggagatatcaaagaggaggctggacttcttgtctgtgtagttgactcattataaacttcaagaaaaatctgctgggccccaacaccatctttcatcgtgaagtgaaaatggttgtataggaaagattatcactgtggcttctagagactatgatctgtttctgctgttactgagtttataaaaagaaaaaaaatgcttttcccaaagtgatcatttatggggcctctgcattgggatgattctgttagttcttgaagcacttgaatctaaaatgtc

SEQ ID NO: 707353 - DNA, 939 bp, Homo sapiens
aaaaaatcgagtctttctttatagatggttaatggttgtgacccaggatatgttctcatataaagacaatctttagaggattgttggagaaaagaggaatttctttcatactccatggaaatgattattggttaataataagcagtaaatacaccaggtgtattagtgttatatatattttggaaagaaagtgcagttgaaattgggtatcagatttatttgccactttaatagaagtgttagggggacaggtggtgaggaagcaagtgaaattgctcaaaaaaatgtgcactggccagtggagtatttctgagcatggctggtcccctgctgctttgtccctggagagcagagctttcgtcccagcctgagtcttctcaggatgtcctgtctgttgtttctccctctgccacatggttttagatgcaatccaggatttccaggaaggcactatgccaaggttwctaagctggaagacaagatagcaacttttgatggaaatatgtctggcctgtgtgatgcagtgatttaattaattatgttcaaagtactaaactaccatcagctgtaataattacaggaactgaggctccatgaagaacattgaagtaatggaaatccaataaaaagtaacactgagttggcttagataaggggaaaaagggagatatcaaagaggaggctggacttcttgtctgtgtagttgactcattataaacttcaagaaaaatctgctgggccccaacaccatctttcatcgtgaagtgaaaatggttgtataggaaagattatcactgtggcttctagagactatgatctgtttctgctgttactgagtttataaaaagaaaaaaaatgcttttcccaaagtgatcatttatggggcctctgcattgggatgattctgttagttcttgaagcacttgaatctaaaatgtc

SEQ ID NO: 707354 - DNA, 1298 bp, Homo sapiens
ggtgagatttgcaggctgtctgaaatgtttcttgctaaagtagttccaatccttcccccatttagaaaaaaatacattcttagtaaatgactttcaggcagaaaaagaaaaccacactggaaataggattctaataaaccaacatggggctctagctggtgaacatatttctgagccatccctatacagaaaccacaagacaaataagaaaaagtaaatccagatcacttagacccttcaaascacatcctgggttccaaggacagtggctgcgagttaggaaagatacatttatccagtggaccttttgactgtcttgtcaatcttaagaaaaaaatgtagagtaaaaaattttggctgggcgtggtggctcacgcctgtaatcccagcactttgggagaccgaggcgggcggatcacgaggtcaggagattgagaccatcctggctaacacagtgaaaccccgtctctactaaaaatacaaaaaaaactagccaggcgtggtagcaggcgcctgtaatcccagctactccggaggctgaggcaggagaatagcgtgaacccaggaggcagagcttgcagcgaggcgagattgcaccactgcactccagcctgggctacagagcgagactctgtctcaaaaaaaaaaaaaaaagaaaaaatttggtttgggtcccttcccaccttcccttgcttcatcactttccttaagcctctaagcatccagatcttccccaaagcagtgcttcctagtcagtgattaccctatcctctttttattccttttcttcatgcacaccttcagtccataaatccaagctttttgtaaggagggagggtgagtaaaccaattcatactaaggtgagagtgaattatatataaacctcttaatatattaaatctaccaagcagtgtttcagaaggaaatctgctaacatgggcatcttacttgaaaaaaatttcagttggttcaacaaagtatggtttagaaatcattttcaatcaggatcggggagagaatttttttttttcttaaagcagttaggtttccccagcagatttcgaatgcttggatatttgtgattcttttctatgggaatctgatctggataagacctaagaccataaacactctagctttccctttgggtctttgctattgaaaactagttggacttaaacaagtgaagtgggttttaaggatggctcctttcacccatttctaaaagatagcattcttgagggtctgctttatttagcagaaggaatgctggttttccaatctctcactcaaaagg

SEQ ID NO: 707355 - DNA, 1298 bp, Homo sapiens
ggtgagatttgcaggctgtctgaaatgtttcttgctaaagtagttccaatccttcccccatttagaaaaaaatacattcttagtaaatgactttcaggcagaaaaagaaaaccacactggaaataggattctaataaaccaacatggggctctagctggtgaacatatttctgagccatccctatacagaaaccacaagacaaataagaaaaagtaaatccagatcacttagacccttcaaaccacatcctgggttccaaggacagtggctgcgagttaggaaagatacatttatccagtggaccttttgactgtcttgtcaatcttaagaaaaaaatgtagagtaaaaaattttggctgggcktggtggctcacgcctgtaatcccagcactttgggagaccgaggcgggcggatcacgaggtcaggagattgagaccatcctggctaacacagtgaaaccccgtctctactaaaaatacaaaaaaaactagccaggcgtggtagcaggcgcctgtaatcccagctactccggaggctgaggcaggagaatagcgtgaacccaggaggcagagcttgcagcgaggcgagattgcaccactgcactccagcctgggctacagagcgagactctgtctcaaaaaaaaaaaaaaaagaaaaaatttggtttgggtcccttcccaccttcccttgcttcatcactttccttaagcctctaagcatccagatcttccccaaagcagtgcttcctagtcagtgattaccctatcctctttttattccttttcttcatgcacaccttcagtccataaatccaagctttttgtaaggagggagggtgagtaaaccaattcatactaaggtgagagtgaattatatataaacctcttaatatattaaatctaccaagcagtgtttcagaaggaaatctgctaacatgggcatcttacttgaaaaaaatttcagttggttcaacaaagtatggtttagaaatcattttcaatcaggatcggggagagaatttttttttttcttaaagcagttaggtttccccagcagatttcgaatgcttggatatttgtgattcttttctatgggaatctgatctggataagacctaagaccataaacactctagctttccctttgggtctttgctattgaaaactagttggacttaaacaagtgaagtgggttttaaggatggctcctttcacccatttctaaaagatagcattcttgagggtctgctttatttagcagaaggaatgctggttttccaatctctcactcaaaagg

SEQ ID NO: 707356 - DNA, 1298 bp, Homo sapiens
ggtgagatttgcaggctgtctgaaatgtttcttgctaaagtagttccaatccttcccccatttagaaaaaaatacattcttagtaaatgactttcaggcagaaaaagaaaaccacactggaaataggattctaataaaccaacatggggctctagctggtgaacatatttctgagccatccctatacagaaaccacaagacaaataagaaaaagtaaatccagatcacttagacccttcaaaccacatcctgggttccaaggacagtggctgcgagttaggaaagatacatttatccagtggaccttttgactgtcttgtcaatcttaagaaaaaaatgtagagtaaaaaattttggctgggcgtggtggctcacgcctgtaatcccagcactttgggagaccgaggcgggcggatcacgaggtcaggagattgagaccatcctggctaacacagtgaaaccccgtctctactaaaaatacaaaaaaaactagccaggcgtggtagcaggcgcctgtaatcccagctactccggaggctgaggcaggagaatagcgtgaacccaggaggcagagcttgcagcgaggcgagattgcaccactgcactccagcctgggctacagagcgagactctgtctcaaaaaaaaaaaaaaaagaaaaaatttggtttgggtcccttcccaccttcccttgcttcatcactttccttaagcctctaagcatccagatcttccccaaagcagtgcttcctagtcagtgattaccctatcctctttttattccttttcttcatgcacaccttcagtccataaatccaagctttttgtaaggagggagggtgagtaaaccaattcatactaaggtgagagtgaattatatataaacctcttaatatattaaatctaccaagcagtgtttcagaaggaaatctgctaacatgggcatcttacttgaaaaaaatttcagttggttcaacaaagtatggtttagaaatcattttcaatcaggatcgrggagagaatttttttttttcttaaagcagttaggtttccccagcagatttcgaatgcttggatatttgtgattcttttctatgggaatctgatctggataagacctaagaccataaacactctagctttccctttgggtctttgctattgaaaactagttggacttaaacaagtgaagtgggttttaaggatggctcctttcacccatttctaaaagatagcattcttgagggtctgctttatttagcagaaggaatgctggttttccaatctctcactcaaaagg

SEQ ID NO: 707357 - DNA, 600 bp, Homo sapiens
ggcaggagaatcgcttgaacccgggaggcagaggttgcagtgagccgagatcgtgccactgcactccagcctgggtgacagagtgagacaccatctaaaaaaaaaaaaaaaaaaaaaaaaaaaccagaaaaaaagaaagatgacagatacatagatgatagatataaatagatagatracagagagagtgatatagcaaatgcggcaaaatgttaacaatgggtgaacctgggtgaaggttatattggtgttctttgtattaatactatttctgcaaattttctgtaatgtctgtacatttgagctataaaaaaaaaagaatacacgtggtctaatattacttgtcagcctgggtacaaggctcacgtcatccaaaaatccagacctggggactccggctggggagcaggagtgtgtctccactcaaaggggtacctgtttaagcagcttttgtgttctcacttacgaagggccagtctgctcatttaatattgaaacctcagcactagagaaagcagcctgtgggttgagcctttgtttttcagttttcatctatttttctctttggaacagctttgattgaataccatacaattcaca

SEQ ID NO: 707358 - DNA, 607 bp, Homo sapiens
gggccaggtgcagtggctcaagccaataatcccagcactttgggaggccgaggcaggcagatcacttgaggtcaggagttcaagaccagcctggccaacattgtgaaaccccatctgtactaaaaatacaaaaattagccagttgtgatggtgcacgccttgtagtcccagctactcaggaggctgagacaggagaatcacttgaacctgggaggcagaggttgcaatgagccaagattgtgcctctgtactccagcctgagtgacagagtgagactcyagtttcaaaaaaaaaaaaaacccagaatgcagtgaaagtaaaaaaatcagaatggaaattaataaaaaatagaaatatccgtggtcatttttccatcttaactttcctatttggttaagtaactaaaatttaaatgatacaggcttgccttggcctttctacaaagatcagcttggaagcctgtattctggtcatttaagcaattagctcttaggggctatttcagtatggtcacagaatcatgttcaacacacagcttcccaaatctcatcctctaaaagagctaccaggattcccagcactagcagaggctctctcagaagacacc

SEQ ID NO: 707359 - DNA, 668 bp, Homo sapiens
cagtgagccgagatcacgccactgcactgcagcctgggcgacagagtgaggctccgcctcaaaaaaataaataaataaaaataaaaataaaaaaagtcagtgtcatgaaagattttaaaaaacaaagtaagctggcagtggtggctcacacctgtaattccagcactttgggaggccaaggtgggaggatcgcttgagcacaggaactcaagaccagcctsggcaacatggcaagacctcatctctattaaaaaatatataaataaataaaacaaaatgtgtgttttggaggggtctgtgttaggttgactaaagaggcaaccaaatcctggactggacattagaaagcatctctaaagacctttctgtggaacctgaagaaatttgaatgagactatgtattaggtaataatattgtattcattctaaatgccttatatgtgatagtgatactttggttatgtcagagaatgtgcttgttcttagataatagaaaaaatgtttagggagcaaatgtaataacgtccacaacttaatttaaaacgtatatgtgcacaaaaaccaaaaaaatgcaaaatgtgtgcaaaaaatgtgtgcaaaaccaaaaaaatgtttctgtgcagaaacaaatgtggatgtgtgaaaaaccaaaacgtgtatgtgtggat

SEQ ID NO: 707360 - DNA, 668 bp, Homo sapiens
cagtgagccgagatcacgccactgcactgcagcctgggcgacagagtgaggctccgcctcaaaaaaataaataaataaaaataaaaataaaaaaagtcagtgtcatgaaagattttaaaaaacaaagtaagctggcagtggtggctcacacctgtaattccagcactttgggaggccaaggtgggaggatcgcttgagcacaggaactcaagaccagcctgggcaacatggcaagacctcatctctattaaaaaatatataaataaataaaacaaaatgtgtgttttggaggggtctgtgttaggttgactaaagaggcaaccaaatcctggactggacattagaaagcatctctaaagacctttctgtggaacctgaagaaatttgaatgagactatgtattaggtaataataytgtattcattctaaatgccttatatgtgatagtgatactttggttatgtcagagaatgtgcttgttcttagataatagaaaaaatgtttagggagcaaatgtaataacgtccacaacttaatttaaaacgtatatgtgcacaaaaaccaaaaaaatgcaaaatgtgtgcaaaaaatgtgtgcaaaaccaaaaaaatgtttctgtgcagaaacaaatgtggatgtgtgaaaaaccaaaacgtgtatgtgtggat

SEQ ID NO: 707361 - DNA, 668 bp, Homo sapiens
cagtgagccgagatcacgccactgcactgcagcctgggcgacagagtgaggctccgcctcaaaaaaataaataaataaaaataaaaataaaaaaagtcagtgtcatgaaagattttaaaaaacaaagtaagctggcagtggtggctcacacctgtaattccagcactttgggaggccaaggtgggaggatcgcttgagcacaggaactcaagaccagcctgggcaacatggcaagacctcatctctattaaaaaatatataaataaataaaacaaaatgtgtgttttggaggggtctgtgttaggttgactaaagaggcaaccaaatcctggactggacattagaaagcatctctaaagacctttctgtggaacctgaagaaatttgaatgagactatgtattaggtaataatattgtattcattctaaatgccttatatgygatagtgatactttggttatgtcagagaatgtgcttgttcttagataatagaaaaaatgtttagggagcaaatgtaataacgtccacaacttaatttaaaacgtatatgtgcacaaaaaccaaaaaaatgcaaaatgtgtgcaaaaaatgtgtgcaaaaccaaaaaaatgtttctgtgcagaaacaaatgtggatgtgtgaaaaaccaaaacgtgtatgtgtggat

SEQ ID NO: 707362 - DNA, 585 bp, Homo sapiens
tgagctgagatcgtgccactgcactccagcctgggcgacaagagcaaaactcggtstcaaaataaaataaaataataatttctaacttggagctttagaattggcttaagttaaactggtttttggatgaactggtttctctagttttagaatgctgtttatttaaatgataaactgaatatgattggcattaactccactataaacaaagcaaatgatgcttgtatctaactatccagagatccaaagcaacaaatggatgggcagaaggaatcacaagtgaaaaatctacagattcaattctatttttaaaatgaaaaatttctatattaaaaacatcaaagccttcctccctctttccgccctccttccttccctctctctctttctcattttgaataatgtgctggtgtgattttttttaaaaaacaggcttccatttaccctaatttcttcacttatttcttttcaatttggatatgcttctgtaaggtgacttaaactctttttaggaacaaggctgattatgaacagagaaatttaaaataaatagaatagaaacacactaaataaagggagaaaatt

SEQ ID NO: 707363 - DNA, 564 bp, Homo sapiens
gaaaatatttaaaagtgtaaaaagttaaaagacaaaaacctttcatggatttttaaagggagactgtttaatttwagcaaagcattttgagttttaactaggattttttattgtaataaaatatacatagcattaaatttactgtctgaacatatttacgtatacggttcagtggcattaagtacactcacattgttgtgcaaccatcaccaccatctatctttagaactttgtttcagattacatgtttttaatgtgcattgtttgttacagatctggggagtttagtaagtagaatcagtatttcgttaaggttgtttataggtagcagtgcatccttcttttaaaaaatctgttttatcttatgatggcctctgtcctcttttgggccaagcaccagggacgccccagaatgttttctttgcccctctggtgctctgccaggaaacttcacaaaactctgaccagccacatcatagaatccaagaaggcaatggagggaccctgggatcatccagggtgacacacctgaggtccagcagggtgacaggcttctagcaagcc

SEQ ID NO: 707364 - DNA, 564 bp, Homo sapiens
gaaaatatttaaaagtgtaaaaagttaaaagacaaaaacctttcatggatttttaaagggagactgtttaatttaagcaaagcattttgagttttaactaggattttttattgtaataaaatatacatagcattaaatttactgtctgaacatatttacgtatacggttcagtggcattaagtacactcacattgttgtgcaaccatcaccaccatctatctttagaactttgtttcagattacatgtttttaatgtgcattgtttgttacagatctggggagtttagtaagtagaatcagtatttcgttaaggttgtttataggtagcagtgcatccttcttttaaaaaatctgttttatcttatgatggcctctgtcctcttttgggccaagcacsagggacgccccagaatgttttctttgcccctctggtgctctgccaggaaacttcacaaaactctgaccagccacatcatagaatccaagaaggcaatggagggaccctgggatcatccagggtgacacacctgaggtccagcagggtgacaggcttctagcaagcc

SEQ ID NO: 707365 - DNA, 1186 bp, Homo sapiens
acacacacagaatattgggatattgttttctaactgcctattgcattgtgttaaattacaaactaattccccagatgatgggataagttatttttttctctgccaagtcacaatattaataatgcagctaaatttagctctgctgtaaaagagtttaattttcaaagccaattagacaatttgatggctgacttgctgcatttgtctctaactactcagttgataccatgttgccaccctaacagattcttgctgatagtcaaaggagagatgagttgtgggaagtataaagcttttcaattaatttatgatcctattaggtgtaaagcctataattaccctgcggttgttgcctctgccaaaaaagaagaaaagaataaagaaaacccatcttatgaaaaagttattttctgaacataaaagtggcatgggaaaagaaaaaaaagcttgtgcctcccctcctaagtgtgggaaggaattaagatttttggctttctcctggccagtgagttcataaartgatttttttttgtggatagggtgatcatttagaactgtcttcagattctgtttttactttcttgattagacctctcctatctactcatccattcatccatctgttcatgcaacaaatatttataagtgctgctgtgcccagggactttccaggtgcaggggttcagtggtgagcattaacagggttcctgccctcttggagctctcatggggatgagggtgaggggagacaagatgcacagaagtaaattagtcaaccaggtaagttcaagtggtgttgattgttgtgcagaaaatatagaactcagtaatatgatggcctgtggagttcagggagagaggcagctattccatcttaacctgccagaaatgttttggacctagggagctaatgtctgagaaaggctcctcatccccaccctcccacctgaatttgcaaggcagtgctgcacacttggcagatggaaatggaaacctctgcagaaacctggcaaaccattagcaggactctctttggactctcagctcagcttaagtagagcacatagcttctttggggggaaaaaaaggcattcaaagtcttaaacaagagtaaagttctcatttgccactttaatcaagttcattaaaaatggaatgtatatttaaaacttccttttgattaact

SEQ ID NO: 707366 - DNA, 602 bp, Homo sapiens
agataaataaagcatattatctctccagaaggcttgaaattctcagatacctagaaaacaatagcaaaaaaaaaattacctattttcagagagggcaaaagaaattgcacttaatgtagcaaggccataatttacccagtcacagtacaaactttccttaagtattggttttagtttcctttgakacatatggtttcaggccgggcatggttgctcacacctgtaatcccagcactttgggaggccaaggcgggaggatcgcttgaggtcaggagttcgagaccagactgaccaacatggtgaaaccctgtctgtactaaaaatacaaaaaaattagctgggtgtgatggcacatgcctgtagtcacaactacttgggaggctgaggcagaagaattgcttgaacccgggaggcggaggttgcagtgagctgagatcgtgccacggcactccagcctgggtgagagagagagactccatctcaaaaaaaaaaaaaagatatatatggtttcacatatgtccacttcttgaatctcatatgacatattggtaagcaggacagttgccttggcaacccaaagagtgccgtacaagatgtctatg

SEQ ID NO: 707367 - DNA, 602 bp, Homo sapiens
agataaataaagcatattatctctccagaaggcttgaaattctcagatacctagaaaacaatagcaaaaaaaaaattacctattttcagagagggcaaaagaaattgcacttaatgtagcaaggccataatttacccagtcacagtacaaactttccttaagtattggttttagtttcctttgatacatatggtttcaggccgggcatggttgctcacrcctgtaatcccagcactttgggaggccaaggcgggaggatcgcttgaggtcaggagttcgagaccagactgaccaacatggtgaaaccctgtctgtactaaaaatacaaaaaaattagctgggtgtgatggcacatgcctgtagtcacaactacttgggaggctgaggcagaagaattgcttgaacccgggaggcggaggttgcagtgagctgagatcgtgccacggcactccagcctgggtgagagagagagactccatctcaaaaaaaaaaaaaagatatatatggtttcacatatgtccacttcttgaatctcatatgacatattggtaagcaggacagttgccttggcaacccaaagagtgccgtacaagatgtctatg

SEQ ID NO: 707368 - DNA, 602 bp, Homo sapiens
agataaataaagcatattatctctccagaaggcttgaaattctcagatacctagaaaacaatagcaaaaaaaaaattacctattttcagagagggcaaaagaaattgcacttaatgtagcaaggccataatttacccagtcacagtacaaactttccttaagtattggttttagtttcctttgatacatatggtttcaggccgggcatggttgctcacacctgtaatcccagcactttgggaggccaaggcgggaggatcgcttgaggtcaggagttcgagaccagactgaccaacatggtgaaaccctgtctgtactaaaaatacaaaaaaattagctgggtgtgatggcacatgcctgtagtcacaactacttgggaggctgaggcagaagaattgcttgaacccgggaggcggaggttgcagtgagctgagatcgtgccacggcactccagcctgggtgagagagagagactccatctcaaaaaaaaaaaaaagatatatatggtttcacatatgtccayttcttgaatctcatatgacatattggtaagcaggacagttgccttggcaacccaaagagtgccgtacaagatgtctatg

SEQ ID NO: 707369 - DNA, 1543 bp, Homo sapiens
tcgcagccgaaggaaactgtcaccaggacactggtctcaatgcaaaacaggcttaggcagtggtcagaaggcacacatgtgattttctttttcaccgctgggccatgctgctgtcttcctgctccttttcaccggcctcaggaggcctgcctttcacctgggaatggtgactgtcctgtgcacgtagagagcggccgtcagagctttggcaggcgcgttgggaaggcttctcgttcatatgttataatattgatactaacagccagagcaatcaaacccctgctgtgggcttgacattcattatccctcatacccacagcaaagctacaaggaggaatgaagaagcggaggctccaagaggctgatggccttgcccaaaactacactggagtaagtagcagagacagaaacgaactcccagtctacatggcactaaagccacgcactttccacaccatattgcatcccagtgatcaatcattatgtgttaaggacagcaaatgattatccatgcaatgaaaactaggaataattttttaaaatgataaacctccctgattcacactattatggatgtccagaagaaaataaacctattcacaaaccagaggcaatatccggctaatgaccttgagtgaggtcagcacaattactaaacaatttcaccaaagaatgagaattgttccccatggtaaacaagcctgtgctcaagttagcaggatacagttccctagagattccccactcccagctatccctgggggcaaagaaggctgtgttggtcccttattttctctcccttaagggcatagtctcaaaagtgagaactagaaatgtgggaagatctacatttgcaatattacattctaaaaggaagtagtagctcactattttcccagcttgagatgtatatttaataaaaggttcaccacagtccgcatgtagtacaggtcaaacttcttcctgagaaccgatgagcaaatcagctaattagtgtccattacaggtgagggctgctggctgactgctgagcagatgtggccttctccccagggtctgggctgcagtaagaaatagctcagtctttcgagctgactgctgggtttaaattctgcctccatttccttcctagagatgaggcttttgagggctcactaacttctctgtkcctcagttttttaatctataaaatggagataatggtcacaccctcccttgaagctgttgtgaggattaaatgatcaatgtatgaaaagatcttagaacagtccttggcacatagtcagctttctttaagggtcagccattccatgagggtaggggtgagatgcaactaacaatgttaatttcagacaggtctctccaaaattaggtaggtcttacaaatcataccaaggacatttattatcatttccagctggctgaaagcaaggcacttcatccatacaacaaatttttgagcagggagcttaactaagatgtgtatagactgacacctcccacacacccaccctaaagttctcagagaaaaaaataagtgaat

SEQ ID NO: 707370 - DNA, 1543 bp, Homo sapiens
tcgcagccgaaggaaactgtcaccaggacactggtctcaatgcaaaacaggcttaggcagtggtcagaaggcacacatgtgattttctttttcaccgctgggccatgctgctgtcttcctgctccttttcaccggcctcaggaggcctgcctttcacctgggaatggtgactgtcctgtgcacgtagagagcggccgtcagagctttggcaggcgcgttgggaaggcttctcgttcatatgttataatattgatactaacagccagagcaatcaaacccctgctgtgggcttgacattcattatccctcatacccacagcaaagctacaaggaggaatgaagaagcggaggctccaagaggctgatggccttgcccaaaactacactggagtaagtagcagagacagaaacgaactcccagtctacatggcactaaagccacgcactttccacaccatattgcatcccagtgatcaatcattatgtgttaaggacagcaaatgattatccatgcaatgaaaactaggaataattttttaaaatgataaacctccctgattcacactattatggatgtccagaagaaaataaacctattcacaaaccagaggcaatatccggctaatgaccttgagtgaggtcagcacaattactaaacaatttcaccaaagaatgagaattgttccccatggtaaacaagcctgtgctcaagttagcaggatacagttccctagagattccccactcccagctatccctgggggcaaagaaggctgtgttggtcccttattttctctcccttaagggcatagtctcaaaagtgagaactagaaatgtgggaagatctacatttgcaatattacattctaaaaggaagtagtagctcactattttcccagcttgagatgtatatttaataaaaggttcaccacagtccgcatgtagtacaggtcaaacttcttcctgagaaccgatgagcaaatcagctaattagtgtccattacaggtgagggctgctggctgactgctgagcagatgtggccttctccccagggtctgggctgcagtaagaaatagctcagtctttcgagctgactgctgggtttaaattctgcctccatttccttcctagagatgaggcttttgagggctcactaacttctctgtgyctcagttttttaatctataaaatggagataatggtcacaccctcccttgaagctgttgtgaggattaaatgatcaatgtatgaaaagatcttagaacagtccttggcacatagtcagctttctttaagggtcagccattccatgagggtaggggtgagatgcaactaacaatgttaatttcagacaggtctctccaaaattaggtaggtcttacaaatcataccaaggacatttattatcatttccagctggctgaaagcaaggcacttcatccatacaacaaatttttgagcagggagcttaactaagatgtgtatagactgacacctcccacacacccaccctaaagttctcagagaaaaaaataagtgaat

SEQ ID NO: 707371 - DNA, 2046 bp, Homo sapiens
  misc_feature 1190, 1191, 1192, 1193, 1194, 1195, 1196, 1197, 1198, 1199,1200, 1201, 1202, 1203, 1204, 1205, 1206, 1207, 1208, 1209,1210, 1211, 1212, 1213, 1214, 1215, 1216, 1217, 1218, 1219,1220, 1221, 1222, 1223, 1224, 1225, 1226, 1227, 1228: n = A,T,C or G
  misc_feature 1229, 1230, 1231, 1232, 1233, 1234, 1235, 1236, 1237, 1238,1239, 1240, 1241, 1242, 1243, 1244, 1245, 1246, 1247, 1248,1249, 1250, 1251, 1252, 1253, 1254, 1255, 1256, 1257, 1258,1259, 1260, 1261, 1262, 1263, 1264, 1265, 1266, 1267: n = A,T,C or G
  misc_feature 1268, 1269, 1270, 1271, 1272, 1273, 1274, 1275, 1276, 1277,1278, 1279, 1280, 1281, 1282, 1283, 1284, 1285, 1286, 1287,1288, 1289: n = A,T,C or G
caactaatgtgtataaatacccaatatgggctaggtgtggttgtgttcccaatttcactaaatccctgcaaagacctgtgctgtcctcactttacagattatgtgtctgagggtcatggctactctgagctcaggtggaggcagggaatggggtctctgagcctgtattccacactctcccaccaccccatatctctgcacagaggcctccctgacctgtgaaggaacctctccccaggagtcctttgttttggcacagaatgctttctccatattgtactgctctagaagcccagtagttgaaagagataaaaatggagtcactggttaagttgggtggggcactgagcccagcctttccaatctgtcctctgcctcttcctccgtttttagtgatccttgggccttatgaaccacagcttgaaaacacaactaccctccatcgtcctcttaagctatttgttttaggtctatctgaaggatttctccagaattggagctctcactttggcctttcagtacttacataggcaaaacgctgggctcaatytgcgcactcgtcccagatggtaacgactcaggtggttctcagagctgcctgttcttagtgctggtggaaggggtgggtgatgttagacagacaggcctgggctctcaggttgccccatcctagtcctatatttattttacattattattactattttttgagatagcatctcactctgtcacccaggctggagtgcagtggcacaatcatggctcactgcagcctggacctcctaggctcaagcgttcctcctgcctcagcctccgagtggctgggactacaggcaagcaaaaaccaaaccaaacaaacaaacaaaaaacaagcaaacaaatgaaaacagttgatttaatttttaaaatcaaaaattttgatttttaaaaatttctgtagagatgaaggcttattatgttgcccaggctgatctcaaactcttgagctcaagtgatcctcctgcctcagcctcccaaagtgctgggattacaggtgtgaaccatcatgttcagcccctgatcctttaaatgcagcaggctctccttgggacaagcccttaaatggctcccttaagaaccattgctgacattttaagtatgatagtggtgttgtggttacattaaatgaaagagcctgtatcttttagagnnnnnnnnnnnnnnnnnnnnnnnnnnnnnnnnnnnnnnnnnnnnnnnnnnnnnnnnnnnnnnnnnnnnnnnnnnnnnnnnnnnnnnnnnnnnnnnnnnnngtgtgaggatggctatgaactggatctctattggtggatgggaagacatgtgcaggggccagccttgggagagttgctcatgatgcttttttttgtggggggacagggtcttgctctgtcaggctggagtacagtggcatgaccttagctcactgcaacctctgctccccagactcaagcaattctcccacctcggcttcctgagtagttgggactacaggcatgtgccaaccgctcccagctaattttttgtatatatatatttttgtagcaatggggtttagccacgttgccaaggctggtcttgaactcctagactcaagcaattcgccctccttggcctcccaaagtgctaggatcacaggtgtgagccactgtgcccagccttaacatggcgccatcttgatcactgacaaccacatatcctcaagtgaatcatttatttttaatttttttacatttattttattttattttttgagacagggtttttgttctgtcactcaggcaggagtacagtggagtgatcatggctcattgcagccttgactttttgggctcaagtgatcctcccacctcagcctcctgagtaactgggaccacaggcatgtgccaccactcttggctaatgttttgttcatttgtttcttttgtagagacgaggtctacctatgttgctcaggctggtctgagagatcttcctgccttggcctcccaaagtgctgggattacaagcatgagccaccgagccctgtcc

SEQ ID NO: 707372 - DNA, 2046 bp, Homo sapiens
  misc_feature 1190, 1191, 1192, 1193, 1194, 1195, 1196, 1197, 1198, 1199,1200, 1201, 1202, 1203, 1204, 1205, 1206, 1207, 1208, 1209,1210, 1211, 1212, 1213, 1214, 1215, 1216, 1217, 1218, 1219,1220, 1221, 1222, 1223, 1224, 1225, 1226, 1227, 1228: n = A,T,C or G
  misc_feature 1229, 1230, 1231, 1232, 1233, 1234, 1235, 1236, 1237, 1238,1239, 1240, 1241, 1242, 1243, 1244, 1245, 1246, 1247, 1248,1249, 1250, 1251, 1252, 1253, 1254, 1255, 1256, 1257, 1258,1259, 1260, 1261, 1262, 1263, 1264, 1265, 1266, 1267: n = A,T,C or G
  misc_feature 1268, 1269, 1270, 1271, 1272, 1273, 1274, 1275, 1276, 1277,1278, 1279, 1280, 1281, 1282, 1283, 1284, 1285, 1286, 1287,1288, 1289: n = A,T,C or G
caactaatgtgtataaatacccaatatgggctaggtgtggttgtgttcccaatttcactaaatccctgcaaagacctgtgctgtcctcactttacagattatgtgtctgagggtcatggctactctgagctcaggtggaggcagggaatggggtctctgagcctgtattccacactctcccaccaccccatatctctgcacagaggcctccctgacctgtgaaggaacctctccccaggagtcctttgttttggcacagaatgctttctccatattgtactgctctagaagcccagtagttgaaagagataaaaatggagtcactggttaagttgggtggggcactgagcccagcctttccaatctgtcctctgcctcttcctccgtttttagtgatccttgggccttatgaaccacagcttgaaaacacaactaccctccatcgtcctcttaagctatttgttttaggtctatctgaaggatttctccagaattggagctctcactttggcctttcagtacttacataggcaaaacgctgggctcaatctgcgcactcgtcccagatggtaacgactcaggtggttctcagagctgcctgttcttagtgctggtggaaggggtgggtgatgttagacagacaggcctgggctctcaggttgccccatcctagtcctatatttattttacattattattactattttttgagatagcatctcactctgtcacccaggctggagtgcagtggcacaatcatggctcactgcagcctggacctcctaggctcaagcgttcctcctgcctcagcctccgagtggctgggactacaggcaagcaaaaaccaaaccaaacaaacaaacaaaaaacaagcaaacaaatgaaaacagttgatttaatttttaaaatcaaaaattttgatttttaaaaatttctgtagagatgaaggcttattatgttgcccaggctgatctcaaactcttgagctcaagtgatcctcctgcctcagcctccyaaagtgctgggattacaggtgtgaaccatcatgttcagcccctgatcctttaaatgcagcaggctctccttgggacaagcccttaaatggctcccttaagaaccattgctgacattttaagtatgatagtggtgttgtggttacattaaatgaaagagcctgtatcttttagagnnnnnnnnnnnnnnnnnnnnnnnnnnnnnnnnnnnnnnnnnnnnnnnnnnnnnnnnnnnnnnnnnnnnnnnnnnnnnnnnnnnnnnnnnnnnnnnnnnnngtgtgaggatggctatgaactggatctctattggtggatgggaagacatgtgcaggggccagccttgggagagttgctcatgatgcttttttttgtggggggacagggtcttgctctgtcaggctggagtacagtggcatgaccttagctcactgcaacctctgctccccagactcaagcaattctcccacctcggcttcctgagtagttgggactacaggcatgtgccaaccgctcccagctaattttttgtatatatatatttttgtagcaatggggtttagccacgttgccaaggctggtcttgaactcctagactcaagcaattcgccctccttggcctcccaaagtgctaggatcacaggtgtgagccactgtgcccagccttaacatggcgccatcttgatcactgacaaccacatatcctcaagtgaatcatttatttttaatttttttacatttattttattttattttttgagacagggtttttgttctgtcactcaggcaggagtacagtggagtgatcatggctcattgcagccttgactttttgggctcaagtgatcctcccacctcagcctcctgagtaactgggaccacaggcatgtgccaccactcttggctaatgttttgttcatttgtttcttttgtagagacgaggtctacctatgttgctcaggctggtctgagagatcttcctgccttggcctcccaaagtgctgggattacaagcatgagccaccgagccctgtcc

SEQ ID NO: 707373 - DNA, 2046 bp, Homo sapiens
  misc_feature 1190, 1191, 1192, 1193, 1194, 1195, 1196, 1197, 1198, 1199,1200, 1201, 1202, 1203, 1204, 1205, 1206, 1207, 1208, 1209,1210, 1211, 1212, 1213, 1214, 1215, 1216, 1217, 1218, 1219,1220, 1221, 1222, 1223, 1224, 1225, 1226, 1227, 1228: n = A,T,C or G
  misc_feature 1229, 1230, 1231, 1232, 1233, 1234, 1235, 1236, 1237, 1238,1239, 1240, 1241, 1242, 1243, 1244, 1245, 1246, 1247, 1248,1249, 1250, 1251, 1252, 1253, 1254, 1255, 1256, 1257, 1258,1259, 1260, 1261, 1262, 1263, 1264, 1265, 1266, 1267: n = A,T,C or G
  misc_feature 1268, 1269, 1270, 1271, 1272, 1273, 1274, 1275, 1276, 1277,1278, 1279, 1280, 1281, 1282, 1283, 1284, 1285, 1286, 1287,1288, 1289: n = A,T,C or G
caactaatgtgtataaatacccaatatgggctaggtgtggttgtgttcccaatttcactaaatccctgcaaagacctgtgctgtcctcactttacagattatgtgtctgagggtcatggctactctgagctcaggtggaggcagggaatggggtctctgagcctgtattccacactctcccaccaccccatatctctgcacagaggcctccctgacctgtgaaggaacctctccccaggagtcctttgttttggcacagaatgctttctccatattgtactgctctagaagcccagtagttgaaagagataaaaatggagtcactggttaagttgggtggggcactgagcccagcctttccaatctgtcctctgcctcttcctccgtttttagtgatccttgggccttatgaaccacagcttgaaaacacaactaccctccatcgtcctcttaagctatttgttttaggtctatctgaaggatttctccagaattggagctctcactttggcctttcagtacttacataggcaaaacgctgggctcaatctgcgcactcgtcccagatggtaacgactcaggtggttctcagagctgcctgttcttagtgctggtggaaggggtgggtgatgttagacagacaggcctgggctctcaggttgccccatcctagtcctatatttattttacattattattactattttttgagatagcatctcactctgtcacccaggctggagtgcagtggcacaatcatggctcactgcagcctggacctcctaggctcaagcgttcctcctgcctcagcctccgagtggctgggactacaggcaagcaaaaaccaaaccaaacaaacaaacaaaaaacaagcaaacaaatgaaaacagttgatttaatttttaaaatcaaaaattttgatttttaaaaatttctgtagagatgaaggcttattatgttgcccaggctgatctcaaactcttgagctcaagtgatcctcctgcctcagcctcccaaagtgctgggattacaggtrtgaaccatcatgttcagcccctgatcctttaaatgcagcaggctctccttgggacaagcccttaaatggctcccttaagaaccattgctgacattttaagtatgatagtggtgttgtggttacattaaatgaaagagcctgtatcttttagagnnnnnnnnnnnnnnnnnnnnnnnnnnnnnnnnnnnnnnnnnnnnnnnnnnnnnnnnnnnnnnnnnnnnnnnnnnnnnnnnnnnnnnnnnnnnnnnnnnnngtgtgaggatggctatgaactggatctctattggtggatgggaagacatgtgcaggggccagccttgggagagttgctcatgatgcttttttttgtggggggacagggtcttgctctgtcaggctggagtacagtggcatgaccttagctcactgcaacctctgctccccagactcaagcaattctcccacctcggcttcctgagtagttgggactacaggcatgtgccaaccgctcccagctaattttttgtatatatatatttttgtagcaatggggtttagccacgttgccaaggctggtcttgaactcctagactcaagcaattcgccctccttggcctcccaaagtgctaggatcacaggtgtgagccactgtgcccagccttaacatggcgccatcttgatcactgacaaccacatatcctcaagtgaatcatttatttttaatttttttacatttattttattttattttttgagacagggtttttgttctgtcactcaggcaggagtacagtggagtgatcatggctcattgcagccttgactttttgggctcaagtgatcctcccacctcagcctcctgagtaactgggaccacaggcatgtgccaccactcttggctaatgttttgttcatttgtttcttttgtagagacgaggtctacctatgttgctcaggctggtctgagagatcttcctgccttggcctcccaaagtgctgggattacaagcatgagccaccgagccctgtcc

SEQ ID NO: 707374 - DNA, 571 bp, Homo sapiens
tccaattatttttatttttattttttttttttgagacggagtctcgctctgtcgcccaggctggagtgcggtggcgcgatrtcggctcactgtaacctccacatcccgggttcacgccattctcctgcttcagcctcccaagtagctgggactacaggcgcccagcaccacgctcagctaatttttgtatttttagtggagacagggtttcactgtgttagccgggatggtctcaatctcctgaccttgtgatccacccgcctcagcctcccaaagtgttgggattacaggcgtgaccgtcctgcatccttttattgttagccattgagcagcaatttcccttcaatttcatctacccctcctcaactctctgaagaatctgagagacaaataaaagagagctaaagatgagggccagaggagaaaaagaaaaaggttgcctcaaaaagtggctcgcttttcttatcaatgtctttttcttgtctatcattatcgattccacccagcaatttctctgcctgatctgcagcccacctccttatctgcagacatccagagtgccccttctttg

SEQ ID NO: 707375 - DNA, 1307 bp, Homo sapiens
tgatctgctgaccttgtgatccacctgcctcggtctcccaaagtgctgggattacaggcgtgagccaccatgcccggcaaaccgattatttttatttatttatttttttgagacggagtttcactctygttgcccacgctggagtgcaatggcacgatctcggctcactgcaacctctgcctcccaggttcaggcgattctcctgccttagtctcctgagtagctgggattacaggcacccgccaccatgcctggctaaatttttgtatttttagtagagatggggtttcaccatgttggccatggtggtctcgaactcctgacctcaggtgatccacctgccttggcctcccaaaatgctgggattacaggtgtgtgccaccccacctggcctaaatgttttttttaagcccacaactaacatcatatgtctttctctctttataaggcctagttacctctaaaaatggaagctgagtttagttcatactgcaccctcttccctattgcaaaggaatattactgatgaataggtgtccttaccactgtaactagtttatttgtttatctttgacaagcatgttgaccagcgttatggaatttcactctatttacatgtggcttagtgttcggcatcagactcagtgggaccacaatacatttctgatcctctttttcatatagctcttctctggcaaaattgcccccaaaatcccagctgccttagtttcctcaaacttgatctctgcttcctcaccccatgaacactgctatgttctgcttggatttcctcaccctgagcagaagcctagaaactgtctacaggcagaaagccaaagtgtttttaggctcatcttacttgcttttttcttctctcagggaacagagtcctgtactccttgtccagtgtctgagaataggtatttcatataaatttgtctacttttctcattctttatcaccagagggcaagtccagtaccaactattagaggaacttaggatttcatttttgaaaaacttttaataattaatttaattgggttggagtaaagaaagggggaaaaaatgaaggtggacaccataagacttaaaaggtaaatggcaaggagagatctttttaaatacatttaacagaaggataatgtatggaatatgccagctccttcaaatatataagaaaaaaggaaacaacccagtggtaaaatgggcagaggataataacaagcaattcacaaatggtcaataaacacaagaaatatacagcataaggaaatacaaattaaaatccaatgaaaaaccattcat

SEQ ID NO: 707376 - DNA, 839 bp, Homo sapiens
ccaacactttactttcagtctatgcacatccttaaatctaaaatgagtttctcatagacagcgtatagttggatcytttttttttttttaaatccgttcagccactctgtgtctctttattggaagttatatctatttatttatcagaagttaaacctatttacgtttgaagtaattactgataggaaattatttattattgccattttgttcatcattttctgtttgtcttatagttcatttgtttttggagttccagagctttttggaattccttagtgcacagttcttagttcatttttctcccttgctctcatcctttgtgtttcgttgattttttttgtattgataaacttttattaatttcttttttacttttgtgtaacttatatgggtattttgtttccagttaccctggggcttatataaaatatggttatgacagtttaagttgataacaacttaactttaatcacatgcaaaaactctacagttttactcctcctaccttcacattttgtcgttgatgtcacaatttactatatggtgtattcattcattcacatattttttacttatagttgtttttaatactttcgtgttttaacttttacattagaaataaaagtgatttacccaccaccattagagtaataaagcattctgtatatctgtatatttacctttgtgttctatactttcttatggtatcatgttgctgtacagcattctattatttctacctgaagaactgcctttagcgctccttgtaaggcaagtctgttagtgatgaacttcctcagcttttgtcagggaaatttttatgtttccttcatttt

SEQ ID NO: 707377 - DNA, 1991 bp, Homo sapiens
cttcagggatagtgagtacttgtttgaatgactgcttgaatcaatgactgctttgaagaatgaatggatgaaaaattagaaaagataaaaaccataagttgaaaccatatattgttataaaatgccttctacgaaagggtgatgatgtttgggaaagtataatcttaacacctaatctaatgaataaattattaataataccctgttcaagttgaaaaaaagcagaagcataactataggctaggcataaaagggtgaagtacacaaaagttaatttattaaccaacactacataagcattatatgacttcttacctgggaatatctgacatatcctaacctatcttcctttgaatcatttcaaggcaagtttatagctaatactaatacaaactatatctctgcatctcaaaagtatgtgaaaatcagaaacttgaattacatctgttttttcctatgtcaagtctctctcaattcttataaattcatgtatcttctccattgagatagtagaccagaaatcacaagtcctggttttttttttttttctgagtcttactttgattcaactctatgttgttgggaaatgccacataatccctctgagcctccatctcctccctctataaaatgggaaaaagagtcgttttcttgtctacttccaaaactgttgtaaggctcagaaaattaaaatagctaatgtttactagggatttactgaagtgcagggaccatgtagcatattacatgcttaatttcatttatctttacagtaaccatatggagtagatactttttttaatctagtttttcagagcaaaacacaggagcttggagggattaaataactagtccaagtttacaattagttgtacaatggtcaggatacaaatccaagtatttctcaagcaaactcactctcttaacccttcacctatgttgcatttaatataagaaagcactctaaaaatggtaaactattgaatttcattgtagtattattactattgttctatttttaaattctccactaaaatctaaatgagacaatctgaaatatgtggttcttagatatatacttatattgtctaaggacctaaaatgtataaaaggctgaaacatgcataaatgcttattgaatggtaagaaagttcccttccatcagtaataggctcctggattattatttcactgtaagtcacaagagaattgacctttaatattttaggattaaaagttctacattttaaaagttatcccattttctaaccttggagaaacacattttatgaatttcatctttatgacattctaaaaggaataaataatataaatgatattccttcaaatctccctttaaaaataaattttttgagaagtaatgtcagaaattttatatagtggataactcttccttgatctacttttaataactaaattctaatattcagcgaaatattaatataaaccacatactacttctttataacactaaaaagaatataataatccaatttttcttaggatttcaaatcttaaacattccaactctcttaaagtagtattttgagagacaaaataaaatttgtataatagtgcatatgatactttttcagagcagcaaggtacaatgatcaatacagaaagcaggtttcatgttactaatatgtataaaatatactatgwtcttctaaacaaaagtctccttcaaaactggaaggtatgaggagtatcactgaaatggcaattattcaaagaagccacatatcctttgaagaataaagaatgttaacttccagtattaataagtgattcaaactatacagtaaagcataccaatgaaaaattcaactccttaatacaaaagaaaggtgtcaagttggcagaagaaatggaaatgacagtctgactgtctaaccctctacgacatatcctgttcccttattaaaagatcacattattttacattaggaaacaatgacaaaacagca

SEQ ID NO: 707378 - DNA, 837 bp, Homo sapiens
tcaaaactttttttgacagtaactaatttgctttagatcctcattcttgaaaataattttgtatccaataagctgtacttcctaaagaaattccaaattatctctcttttaatatgttagttactttgttctcagcctgcctgttctatttcttttcatgaacgaacttaatgcaacaaggtaagagtcctttcttactgttctgtgttgaatctccctgttsacaccttgaaattcagacttgccttctgcattctttctgaagtctcttccttctaccctttatttcttccgtttcttgtcatctttcttttcttctcctttgctgcatgattttatttttgcttgtcttagtgtcactgttttggattctttcaacatgatgctttcactccctttactcattaaaataaaattatggataattcttttacaagacttttctaaaaacttttcctagaaatatttgagaacattttagatacttactctcaaagttctcgtttaatttaaaagtggaaaaaactcttaaaattttagtagaagtatttgtgatattgcatctattatatatcatgggtctctcactcttgatggcactgtcaagttgattcaacagataatttgtaattaaatggaagtattaaagcatgcatattattcaaatgattatgatgttcatcattaggtgtagcaaaaatagctgcattttgcaagttttttttattcaatataaagaattatttaatttggcaaattaagtaatgttataccaaaaatattgaaatgacaataaatcagtttcaaaagcaagatgccacagcttaacaatgctca

SEQ ID NO: 707379 - DNA, 837 bp, Homo sapiens
tcaaaactttttttgacagtaactaatttgctttagatcctcattcttgaaaataattttgtatccaataagctgtacttcctaaagaaattccaaattatctctcttttaatatgttagttactttgttctcagcctgcctgttctatttcttttcatgaacgaacttaatgcaacaaggtaagagtcctttcttactgttctgtgttgaatctccctgttcacaccttgaaattcagacttgccttctgcattctttctgaagtctcttccttctaccctttatttcttccgtttcttgtcatctttcttttcttctcctttgctgcatgattttatttttgcttgtcttagtgtcactgttttggattctttcaacatgatgctttcactccctttactcattaaaataaaattatggataattcttttacaagacttttctaaaaacttttcctagaaatatttgagaacattttagatacttactctcaaagttctcgtttaatttaaaagtggaaaaaactcttaaaattttagtagaagtatttgtgatattgcatctattatatatcatgggtctctcactcttgatggcactgtcaagttgattcaacagataatttgtaattaaatggaagtattaaagcatgcatattattcaaatgattatgatgttcatcattaggtgtagcaaaaatagctgcattttgcaagttttttttattcaatataaagaattatttaatttggcaaattaagtaatgttataccaaaaatattgaaatgacaataaatcagtttcaaaagcaagatgccacagcttaacaatgytca

SEQ ID NO: 707380 - DNA, 1318 bp, Homo sapiens
gattccacaacttatctggagacgggggagaggaaatgaatcatgtccccaggctcctatgactcagcttgggaacaagaactcaggctcttttctcaggagcacactagtatctaagcgctcttccttctgactcttctccaactagccatcctrtgagatttttatgtaatttggagttaaggtagccaggagctgtaactattctgacaaaatctaatatttatggcaaaagcataatgccctgagacctgcaagactttaaagaagcattttttaactggatgctgtaggctttgggggcaggataattcttcatcatatgagagtcacattgcatgccctgctccccaacccctagtcctcctcattgtgaaatccaaaacatgcacacacatttccatatgtcttccagctaaaatttatgaagctcaaaaagtttgtaaaactacaaacccaaagccttttctttccgtattattctctatagaataagtttcaaaaacaagggattgactttttttgcttgctgttttttgttacctctccccttgaggcaatgtgtgtctcttgaactgcccaaatgagttggatctctgtggcaaggaagtgtaggtgagaactctttaatactttaaaagtttctaggtagaaaaaaattttaatcatctttaacactttccattttctaatatgttgaagtgaggtcatcagcagactgaggtggggagcgattgcagagaattgaggagagggaaaaagatatgaaatattcatcctcagataatggggagacagaatttgagtgtgagtgtcccatatcttgccagacaggtatgtctgtagatatcttttgactccctatttccttgtgacttaccaaaccactctggaaatttgaccttctcgttaataagaagagactttttttttttgcttcacctactatgtgcagaagtgtatgacaactactctctctcaacaaatgttatcttcccctatttctttttcctgctaaaatccacttattcttagcataattttagcaataatgagacgagaatgctgtcttcaactggatctcgcagagttacagcctttgatgggggaggaggatggagtggagtgggaagggaggatcatcagagtccagtgttttgtccttagttttgcacagtctgaagatgatgattggctcattcagaaatgattggctgattcacagtaaccaaacttgccaagagggttgtatgtatatattggaaagctaatgcattgatttataatgacatgctgaactttctagtgactcagagaa

SEQ ID NO: 707381 - DNA, 1851 bp, Homo sapiens
ggaggagatctgtagatatcagatgtggctttgttccttactactttcttggaccttttcctacaatagtgcttgtggaacctaagctatctgtccatctcatagtaaatttgagagagatttcaaaaaatcaaagtactgaatcttactacagggcccttaggatgagtcaagatcttgtttgggtttcaaagaaaaattcagtgccctggcatcacagatacgtccatttgagttgcagttacccttgttccagggtctggaatgcatggttagcataggcaaacctagccaaggagagagagctcagcagtcaccagggaaaacagtgccattcattctgagaatgtgcagaaacagcatttgattgggaagaggccttcggtcatttatctctcacttttaaaatgatgagatcgatgtgtctccccaatgggctgtcccccttctattcagcaacaatacactacttcttttcaaagagaaatatgcttccaataagggggaagggaggctgrgggtggtagtgaaggggatcaagcaactttcattgaaggattcatttttgatttaaatattttgttctaatctccaacttcctttttaacttggcagaatgaccaaaagaaaaacaatgtccctccctagcccagtttacagcctgtcagaggagaggatccggttacttcttccaaattgtatacgttgggttgtttgatatactaggttttttttctttttacatccattgctcatatacatagggttttcttttaatggcttgtcaaagtggactttggtgaaaaaccacaggagaaaaaaaaagaatgaaaaatatagatcaaatatagccagctatttaataatttttttttttttttggttctttgagtatgttgtggaaggaattctctgcaagtgatacatcctgtaactgtaggcagatgtaatcccctggccgtgacacaggcaaaaatttcccttcacattggagacatttgcagccattttgttccctcccacaaagaggaagtgcacagggaggaggacgctctgggcctcatgcactccctgcaatgctccagaattgtttttacaattcccatgatgccccatgaactctgccttggaagggaaagaagcccagggtattgcagcctggggttggaatctgggctgaatcttctccaaaagccctttctccttcttgttgccaatttgccccactccttgctttgagcttggcttcaaactcttctcaaggacacatgctgagattgattctgcccaatctggtctctgctctttttagcgttacctatagtgtgtcttaagaggttactgcttgtcttatattcattgggacttgtacctttgctttgtaaatatgtaaaaagcatattttttccttgtggtggagagtgcttcttctagtgggtataggaataaattccaccttactcagaccagaaatagcccaatgcaattcttgtttgggggtccccagaagcacaccctgagacaatgatttgagtgcagtggcgcaatggggaggaatcccaggagatcctaggagaggagtggagaaatgagacagggaagggaaggaggccaccaaagggaacctcgtcaaggtggtggccactgtggacaactggatcttaacacagcccaggaggcttgtcaacctcagcactgttgacattttgagctgatgattccttgttatgggggctgtcttgtgaattacaggaggcttacagcagccctgacctctacctgctaggtgctggtagcactccttccttcacggcttattgtcatgggttgtaacaatcaagaatgtctcca

SEQ ID NO: 707382 - DNA, 1851 bp, Homo sapiens
ggaggagatctgtagatatcagatgtggctttgttccttactactttcttggaccttttcctacaatagtgcttgtggaacctaagctatctgtccatctcatagtaaatttgagagagatttcaaaaaatcaaagtactgaatcttactacagggcccttaggatgagtcaagatcttgtttgggtttcaaagaaaaattcagtgccctggcatcacagatacgtccatttgagttgcagttacccttgttccagggtctggaatgcatggttagcataggcaaacctagccaaggagagagagctcagcagtcaccagggaaaacagtgccattcattctgagaatgtgcagaaacagcatttgattgggaagaggccttcggtcatttatctctcacttttaaaatgatgagatcgatgtgtctccccaatgggctgtcccccttctattcagcaacaatacactacttcttttcaaagagaaatatgcttccaataagggggaagggaggctgggggtggtagtgaaggggatcaagcaactttcattgaaggattcatttttgatttaaatattttgttctaatctccaacttcctttttaacttggcagaatgaccaaaagaaaaacaatgtccctccctagcccagtttacagcctgtcagaggagaggatccggttacttcttccaaattgtatacgttgggttgtttgatatactaggttttttttctttttacatccattgctcatatacatagggttttcttttaatggcttgtcaaagtggactttggtgaaaaaccacaggagaaaaaaaaagaatgaaaaatatagatcaaatatagccagctatttaataatttttttttttttttggttctttgagtatgttgtggaaggaattctctgcaagtgatacatcctgtaactgtaggcagatgtaatcccctggccgtgacacaggcaaaaatttcccttcacattggagacatttgcagccattttgttccctcccacaaagaggaagtgcacagggaggaggacgctctgggcctcatgcactccctgcaatgctccagaattgtttttacaattcccatgatgccccatgaactctgccttggaagggaaagaagcccagggtattgcagcctggggttggaatctgggctgaatcttctccaaaagccctttctccttcttgttgccaatttgccccactccttgctttgagcttggcttcaaactcttctcaaggacacatgctgagattgattctgcccaatctggtctctgctctttttagcgttacctatagtgtgtcttaagaggttactgcttgtcttatattcattgggacttgtacctttgctttgtaaatatgtaaaaagcatattttttccttgtggtggagagtgcttcttctagtgggtataggaataaattccaccttastcagaccagaaatagcccaatgcaattcttgtttgggggtccccagaagcacaccctgagacaatgatttgagtgcagtggcgcaatggggaggaatcccaggagatcctaggagaggagtggagaaatgagacagggaagggaaggaggccaccaaagggaacctcgtcaaggtggtggccactgtggacaactggatcttaacacagcccaggaggcttgtcaacctcagcactgttgacattttgagctgatgattccttgttatgggggctgtcttgtgaattacaggaggcttacagcagccctgacctctacctgctaggtgctggtagcactccttccttcacggcttattgtcatgggttgtaacaatcaagaatgtctcca

SEQ ID NO: 707383 - DNA, 1024 bp, Homo sapiens
ttttttctttaacacacccgacttattaaaaaacttgcaagtgagtgagtcagtattacccaagctcacccaaactggtggtagaatgatggagctcagaactacgccagtgtttaagctaacctgagatgaagtctggaacagttaattctgctgtgtgaaaaacaaataatgaaaagcatatttttaataaaaaactggaaaaacaaataaaaagcaactgcccaacctcccttccttaatttttgagggagacgtagcatgtaaatgtatatgtatgtaaatttgtatttaattgtgtattagtttttctcctttgcagggtcttctctctgaaggctagtggctggacctgcactcagatggcaattcaggtccagttcatgagatcttggactgttttgacaaatgatttggggaaagggatagggagagagttgtcagtaccgatgctgagactgtgagagccatttctgagtggaggtgaggaaaaacggagcgatgaccgtgagggtctttgcgtggcgcctcgagaccacacctgggaacggtgactttggaactggctgacgtgtttatttggtgtgaggtcaactacagctctgagggcaataacatgatcctcataaaacagaccccccaggctgggcctcagcccgcttgctgccaagcaggggtggtggcctaataagtgagacattgctatcaactctctgtaaatggtgggttcattcactctgtggatgacatagcctgttctttgcccttctgtgtcagccccattgattgctttttaaccaccttcttgctttgtgctgcttctttcagatgaaaaggaagggaaaagagacttcatttccatacccactaaccatgccaacagaaggctttgtgaagaaggaagtaaaagctatcggtaggagttagaaaraaacatttctagttacaagaacagcagaaaaagacctgaacttcagagtggaccacaaatgaatatgaattaataacacagatctcttttcaa

SEQ ID NO: 707384 - DNA, 1292 bp, Homo sapiens
ggatatgtggagcttactttcctagtcagaaattttactttttcagcatagtcaggcctacaaatctgagctgagcgtctcctttctattggttttttcttaagtattgatgagaaattattgtgcaattctggctgggttttcactatggaaatggaatggattttgaaagctctgccgaatactagcaggttagccccgtctggaaggatattttaggtctgatttaagttaacacctaccctgaattcctcagaattggcatttatayccaactttcattgccacttgcattcaggtgattcttaatctatgtccctagtcttaattactctctgagcaccagatcctaaatttggacaataccacacagaaaccaattcagagcttatttaactttctcaactcaaaaccaagctaaatctttaaggtgcctctaggaagaaagccaactctatcactcactagccagaaaacacttcctgtgtccatctcattcctctgtgagactccccattcctattcaaatatctccattacccttctaaggcagagaaactatagaacttattaagagtcaactctggagtctgttggatgcctagttaatgcaaatacaggatgtccagttaaatttgaattttagataaagaataaataatttttagtataagtatgcccccaaattgcagagaaattaaaagtactctctaattattgtattgctccactaaattgcaggggacatacttatattaagaaattactcattgtttattgaaatccaaatttaactgcgtgtcctgtatttttatttactaattttcaaaatcctgaattatgccattaatcatctaagcttgccaaatttctgagcccttttgttggatggctacaataatggtacctaccttcctaaggtacttagctatgtaacatgttaaaacagtgcctggcacatggtgagtgattagtaagtgttccctaattttattattctgatcatctagagcagggatgggcaaactttttgtaaagggcaagatagtaaatattttacactttgcaggtcatatggtctcttttgcaactatttgactctgagactgtagtgtggaagcagccatagacaatttctaaacaaatggccttgatcatgttgcaataccatttatttacaaaaataggcagtgggctgaatttaactggtaggctagagtttgccatgatctagattaaaactctatcctctttatatatcttatgacattcatctacttctatttaaatat

SEQ ID NO: 707385 - DNA, 1292 bp, Homo sapiens
ggatatgtggagcttactttcctagtcagaaattttactttttcagcatagtcaggcctacaaatctgagctgagcgtctcctttctattggttttttcttaagtattgatgagaaattattgtgcaattctggctgggttttcactatggaaatggaatggattttgaaagctctgccgaatactagcaggttagccccgtctggaaggatattttaggtctgatttaagttaacacctaccctgaattcctcagaattggcatttatatccaactttcattgccacttgcattcaggtgattcttaatctatgtccctagtcttaattactctctgagcaccagatcctaaatttggacaataccacacagaaaccaattcagagcttatttaactttctcaactcaaaaccaagctaaatctttaaggtgcctctaggaagaaagccaactctatcactcactagccagaaaacacttcctgtgtccatctcattcctctgtgagactccccattcctattcaaatatctccattacccttctaaggcagagaaactatagaacttattaagagtcaactctggagtctgttggatgcctagttaatgcaaatacaggatgtccagttaaatttgaattttagataaagaataaataatttttagtataagtatgcccccaaattgcagagaaattaaaagtactctctaattattgtattgctccactaaattgcaggggacatacttatattaagaaattactcattgtttattgaaatccaaatttmactgcgtgtcctgtatttttatttactaattttcaaaatcctgaattatgccattaatcatctaagcttgccaaatttctgagcccttttgttggatggctacaataatggtacctaccttcctaaggtacttagctatgtaacatgttaaaacagtgcctggcacatggtgagtgattagtaagtgttccctaattttattattctgatcatctagagcagggatgggcaaactttttgtaaagggcaagatagtaaatattttacactttgcaggtcatatggtctcttttgcaactatttgactctgagactgtagtgtggaagcagccatagacaatttctaaacaaatggccttgatcatgttgcaataccatttatttacaaaaataggcagtgggctgaatttaactggtaggctagagtttgccatgatctagattaaaactctatcctctttatatatcttatgacattcatctacttctatttaaatat

SEQ ID NO: 707386 - DNA, 641 bp, Homo sapiens
ttatttcgttctcatcatataatttttataattatcattttctggtcaatattttctcagttacatctaaatcttctttagctctacaggatttgtttaaaatatatctagaatattatataattccatccycaaatatttcagtatgtgtaagaaataattttttactttaacattatcatacctaaaaataacaatcattacttattatcatcctatcattggaatttcaacctgccattgaaggtatgttattattatgactatgtcaatactatttttaaaatattacaactatagcaacacaattactttttgttatggttcaactttttcctcaggtttaatattttaattttaatactttttattttcttatttcattcctctttcaaaatttaatcagggttcaaacttttcaattattctatattttatttttatattaaacctcttgaacctctttgtgtttgtttgctgtatccctatggtgatgtttaacctctttagtttcatcttttatgctttctctgtgtataccttgtaatgggctataatacctaatgacttgctcaatttggacaattatatttcataataaatgctatataatatttattcccctgacttagaagacagat

SEQ ID NO: 707387 - DNA, 1879 bp, Homo sapiens
aatggtgcaccccgccatgcggccttgggagaggaggcttggtcaataacaacagcttccctgtcaacaaattagccctagtgggattatggtgatacaactttaatggctggtaggacatattttgaaaatattttcaaggatgacaaaaaccaaagggttttaattatttaaaccccaaagaggaaagtggagccctatttttcaaaagaccactcaagaagctatcaaaaccaaattccaagggygcctaaaaggtacgacttgaacccatgcctcaaaccctaactgagaaatagaaaatattaatagggtcctgagtagcataatcacatcccctcccctcccctgccttccccttccctttcttttcttttctcccccctccctttctttttgagacagggtctcattctgtcacccaggctggagtgtagaggcacgatctcgactcactgcagcctcaacttcccagactcaagtgatcctcccaactcagcctcgcgagtaggtgagattacaggcatgtgccaccacgcctggctagcttttggttgtcttttgtggagacggggtttcgctatgttatccaggatggtcttgaactcctaggctcaagggatctgcttgccttggcctcccaaagtgctgggattgcaggtgtgagccaccgcgcctggcctaacatgtcccttttcttgccccacattatttcaactggataagtatcaaaaccgttaataaaccgagtatcatgtaacttccactggaaaaagttaagatagacttttcttggttctaattagagactgctgaaaatcactttcatttcatccaaattttaattaattttaaaatttttctatagaaatgcaactaaaggcattttaaaaaaagattacaacagtgcatggaaaagcaaagcaacatgttgcttcctgctattttctatttcccatattccagaaagaaagatctagttgggagactgtgcaagcctcctgtccacaggaaaggtagactttcctactgcccttccagtgaacactgccctctgatagccatccacttctgggcataaaacgagaaattctcaggataggatctagcagacacacagatggacctcatcagggtcatgggctcaggaggctggctctggagagctcccagatcactatgggggcgctaatggcttctgaatgggaagtggctttgctgtgagctctgccgcaggatgttgaatgtcccaggttcttatagtgatgctaaatcacccccatttgctgtgacacaaaaatatcctcatatatttctaaagccccttagggactgccctaaattgagaaccattgagaatcactgattccccagtactagaatttcaaatacacagcctgtgccttagacacccaggccctaggttacacagtacagacgccactagcccagcactgcactcttttcagtcaagcctagattcaacgcaaagctatgccaagcctattgctcctggaagctagaatccatcaacatagtgggtacttgaagggacaccttagggtcctctctgatcatttcactgaggaattaaatgagcttataaattaaattgtcctttaaatgtattggtgagcttattaattcctagtgaaaatctatagtgaattttaaaaggaaaataaaaaagtctccccagcaaacaaatgatgacctctcagtctattctttctagcaaatatatttttaattaccaagatatgcctcattcctacagaaacgggattataagaaatgatgtacaagacaaaaagaagcaacagagagacattttgagttttgcctcttttccccatgtctgtactaacatgtaatataa

SEQ ID NO: 707388 - DNA, 1879 bp, Homo sapiens
aatggtgcaccccgccatgcggccttgggagaggaggcttggtcaataacaacagcttccctgtcaacaaattagccctagtgggattatggtgatacaactttaatggctggtaggacatattttgaaaatattttcaaggatgacaaaaaccaaagggttttaattatttaaaccccaaagaggaaagtggagccctatttttcaaaagaccactcaagaagctatcaaaaccaaattccaagggtgcctaaaaggtacgacttgaacccatgcctcaaaccctaactgagaaatagaaaatattaatagggtcctgagtagcayaatcacatcccctcccctcccctgccttccccttccctttcttttcttttctcccccctccctttctttttgagacagggtctcattctgtcacccaggctggagtgtagaggcacgatctcgactcactgcagcctcaacttcccagactcaagtgatcctcccaactcagcctcgcgagtaggtgagattacaggcatgtgccaccacgcctggctagcttttggttgtcttttgtggagacggggtttcgctatgttatccaggatggtcttgaactcctaggctcaagggatctgcttgccttggcctcccaaagtgctgggattgcaggtgtgagccaccgcgcctggcctaacatgtcccttttcttgccccacattatttcaactggataagtatcaaaaccgttaataaaccgagtatcatgtaacttccactggaaaaagttaagatagacttttcttggttctaattagagactgctgaaaatcactttcatttcatccaaattttaattaattttaaaatttttctatagaaatgcaactaaaggcattttaaaaaaagattacaacagtgcatggaaaagcaaagcaacatgttgcttcctgctattttctatttcccatattccagaaagaaagatctagttgggagactgtgcaagcctcctgtccacaggaaaggtagactttcctactgcccttccagtgaacactgccctctgatagccatccacttctgggcataaaacgagaaattctcaggataggatctagcagacacacagatggacctcatcagggtcatgggctcaggaggctggctctggagagctcccagatcactatgggggcgctaatggcttctgaatgggaagtggctttgctgtgagctctgccgcaggatgttgaatgtcccaggttcttatagtgatgctaaatcacccccatttgctgtgacacaaaaatatcctcatatatttctaaagccccttagggactgccctaaattgagaaccattgagaatcactgattccccagtactagaatttcaaatacacagcctgtgccttagacacccaggccctaggttacacagtacagacgccactagcccagcactgcactcttttcagtcaagcctagattcaacgcaaagctatgccaagcctattgctcctggaagctagaatccatcaacatagtgggtacttgaagggacaccttagggtcctctctgatcatttcactgaggaattaaatgagcttataaattaaattgtcctttaaatgtattggtgagcttattaattcctagtgaaaatctatagtgaattttaaaaggaaaataaaaaagtctccccagcaaacaaatgatgacctctcagtctattctttctagcaaatatatttttaattaccaagatatgcctcattcctacagaaacgggattataagaaatgatgtacaagacaaaaagaagcaacagagagacattttgagttttgcctcttttccccatgtctgtactaacatgtaatataa

SEQ ID NO: 707389 - DNA, 1879 bp, Homo sapiens
aatggtgcaccccgccatgcggccttgggagaggaggcttggtcaataacaacagcttccctgtcaacaaattagccctagtgggattatggtgatacaactttaatggctggtaggacatattttgaaaatattttcaaggatgacaaaaaccaaagggttttaattatttaaaccccaaagaggaaagtggagccctatttttcaaaagaccactcaagaagctatcaaaaccaaattccaagggtgcctaaaaggtacgacttgaacccatgcctcaaaccctaactgagaaatagaaaatattaatagggtcctgagtagcataatcacatcccctcccctcccctgccttccccttccctttcttttcttttctcccccctccctttctttttgagacagggtctcattctrtcacccaggctggagtgtagaggcacgatctcgactcactgcagcctcaacttcccagactcaagtgatcctcccaactcagcctcgcgagtaggtgagattacaggcatgtgccaccacgcctggctagcttttggttgtcttttgtggagacggggtttcgctatgttatccaggatggtcttgaactcctaggctcaagggatctgcttgccttggcctcccaaagtgctgggattgcaggtgtgagccaccgcgcctggcctaacatgtcccttttcttgccccacattatttcaactggataagtatcaaaaccgttaataaaccgagtatcatgtaacttccactggaaaaagttaagatagacttttcttggttctaattagagactgctgaaaatcactttcatttcatccaaattttaattaattttaaaatttttctatagaaatgcaactaaaggcattttaaaaaaagattacaacagtgcatggaaaagcaaagcaacatgttgcttcctgctattttctatttcccatattccagaaagaaagatctagttgggagactgtgcaagcctcctgtccacaggaaaggtagactttcctactgcccttccagtgaacactgccctctgatagccatccacttctgggcataaaacgagaaattctcaggataggatctagcagacacacagatggacctcatcagggtcatgggctcaggaggctggctctggagagctcccagatcactatgggggcgctaatggcttctgaatgggaagtggctttgctgtgagctctgccgcaggatgttgaatgtcccaggttcttatagtgatgctaaatcacccccatttgctgtgacacaaaaatatcctcatatatttctaaagccccttagggactgccctaaattgagaaccattgagaatcactgattccccagtactagaatttcaaatacacagcctgtgccttagacacccaggccctaggttacacagtacagacgccactagcccagcactgcactcttttcagtcaagcctagattcaacgcaaagctatgccaagcctattgctcctggaagctagaatccatcaacatagtgggtacttgaagggacaccttagggtcctctctgatcatttcactgaggaattaaatgagcttataaattaaattgtcctttaaatgtattggtgagcttattaattcctagtgaaaatctatagtgaattttaaaaggaaaataaaaaagtctccccagcaaacaaatgatgacctctcagtctattctttctagcaaatatatttttaattaccaagatatgcctcattcctacagaaacgggattataagaaatgatgtacaagacaaaaagaagcaacagagagacattttgagttttgcctcttttccccatgtctgtactaacatgtaatataa

SEQ ID NO: 707390 - DNA, 1879 bp, Homo sapiens
aatggtgcaccccgccatgcggccttgggagaggaggcttggtcaataacaacagcttccctgtcaacaaattagccctagtgggattatggtgatacaactttaatggctggtaggacatattttgaaaatattttcaaggatgacaaaaaccaaagggttttaattatttaaaccccaaagaggaaagtggagccctatttttcaaaagaccactcaagaagctatcaaaaccaaattccaagggtgcctaaaaggtacgacttgaacccatgcctcaaaccctaactgagaaatagaaaatattaatagggtcctgagtagcataatcacatcccctcccctcccctgccttccccttccctttcttttcttttctcccccctccctttctttttgagacagggtctcattctgtcacccaggctggagtgtagaggcacgatctcgactcactgcagcctcaacttcccagactcaagtgatcctcccaactcagcctcgcgagtaggtgagattacaggcatgtgccaccacgcctggctagcttttgrttgtcttttgtggagacggggtttcgctatgttatccaggatggtcttgaactcctaggctcaagggatctgcttgccttggcctcccaaagtgctgggattgcaggtgtgagccaccgcgcctggcctaacatgtcccttttcttgccccacattatttcaactggataagtatcaaaaccgttaataaaccgagtatcatgtaacttccactggaaaaagttaagatagacttttcttggttctaattagagactgctgaaaatcactttcatttcatccaaattttaattaattttaaaatttttctatagaaatgcaactaaaggcattttaaaaaaagattacaacagtgcatggaaaagcaaagcaacatgttgcttcctgctattttctatttcccatattccagaaagaaagatctagttgggagactgtgcaagcctcctgtccacaggaaaggtagactttcctactgcccttccagtgaacactgccctctgatagccatccacttctgggcataaaacgagaaattctcaggataggatctagcagacacacagatggacctcatcagggtcatgggctcaggaggctggctctggagagctcccagatcactatgggggcgctaatggcttctgaatgggaagtggctttgctgtgagctctgccgcaggatgttgaatgtcccaggttcttatagtgatgctaaatcacccccatttgctgtgacacaaaaatatcctcatatatttctaaagccccttagggactgccctaaattgagaaccattgagaatcactgattccccagtactagaatttcaaatacacagcctgtgccttagacacccaggccctaggttacacagtacagacgccactagcccagcactgcactcttttcagtcaagcctagattcaacgcaaagctatgccaagcctattgctcctggaagctagaatccatcaacatagtgggtacttgaagggacaccttagggtcctctctgatcatttcactgaggaattaaatgagcttataaattaaattgtcctttaaatgtattggtgagcttattaattcctagtgaaaatctatagtgaattttaaaaggaaaataaaaaagtctccccagcaaacaaatgatgacctctcagtctattctttctagcaaatatatttttaattaccaagatatgcctcattcctacagaaacgggattataagaaatgatgtacaagacaaaaagaagcaacagagagacattttgagttttgcctcttttccccatgtctgtactaacatgtaatataa

SEQ ID NO: 707391 - DNA, 1879 bp, Homo sapiens
aatggtgcaccccgccatgcggccttgggagaggaggcttggtcaataacaacagcttccctgtcaacaaattagccctagtgggattatggtgatacaactttaatggctggtaggacatattttgaaaatattttcaaggatgacaaaaaccaaagggttttaattatttaaaccccaaagaggaaagtggagccctatttttcaaaagaccactcaagaagctatcaaaaccaaattccaagggtgcctaaaaggtacgacttgaacccatgcctcaaaccctaactgagaaatagaaaatattaatagggtcctgagtagcataatcacatcccctcccctcccctgccttccccttccctttcttttcttttctcccccctccctttctttttgagacagggtctcattctgtcacccaggctggagtgtagaggcacgatctcgactcactgcagcctcaacttcccagactcaagtgatcctcccaactcagcctcgcgagtaggtgagattacaggcatgtgccaccacgcctggctagcttttggttgtcttttgtggagacggggtttcgctatgttatccaggatggtcttgaactcctaggctcaagggatctgcttgccttggcctcccaaagtgctgggattgcaggtgtgagccaccgcgcctggcctaacatgtcccttttcttgccccacattatttcaactggataagtatcaaaaccgttaatawaccgagtatcatgtaacttccactggaaaaagttaagatagacttttcttggttctaattagagactgctgaaaatcactttcatttcatccaaattttaattaattttaaaatttttctatagaaatgcaactaaaggcattttaaaaaaagattacaacagtgcatggaaaagcaaagcaacatgttgcttcctgctattttctatttcccatattccagaaagaaagatctagttgggagactgtgcaagcctcctgtccacaggaaaggtagactttcctactgcccttccagtgaacactgccctctgatagccatccacttctgggcataaaacgagaaattctcaggataggatctagcagacacacagatggacctcatcagggtcatgggctcaggaggctggctctggagagctcccagatcactatgggggcgctaatggcttctgaatgggaagtggctttgctgtgagctctgccgcaggatgttgaatgtcccaggttcttatagtgatgctaaatcacccccatttgctgtgacacaaaaatatcctcatatatttctaaagccccttagggactgccctaaattgagaaccattgagaatcactgattccccagtactagaatttcaaatacacagcctgtgccttagacacccaggccctaggttacacagtacagacgccactagcccagcactgcactcttttcagtcaagcctagattcaacgcaaagctatgccaagcctattgctcctggaagctagaatccatcaacatagtgggtacttgaagggacaccttagggtcctctctgatcatttcactgaggaattaaatgagcttataaattaaattgtcctttaaatgtattggtgagcttattaattcctagtgaaaatctatagtgaattttaaaaggaaaataaaaaagtctccccagcaaacaaatgatgacctctcagtctattctttctagcaaatatatttttaattaccaagatatgcctcattcctacagaaacgggattataagaaatgatgtacaagacaaaaagaagcaacagagagacattttgagttttgcctcttttccccatgtctgtactaacatgtaatataa

SEQ ID NO: 707392 - DNA, 1879 bp, Homo sapiens
aatggtgcaccccgccatgcggccttgggagaggaggcttggtcaataacaacagcttccctgtcaacaaattagccctagtgggattatggtgatacaactttaatggctggtaggacatattttgaaaatattttcaaggatgacaaaaaccaaagggttttaattatttaaaccccaaagaggaaagtggagccctatttttcaaaagaccactcaagaagctatcaaaaccaaattccaagggtgcctaaaaggtacgacttgaacccatgcctcaaaccctaactgagaaatagaaaatattaatagggtcctgagtagcataatcacatcccctcccctcccctgccttccccttccctttcttttcttttctcccccctccctttctttttgagacagggtctcattctgtcacccaggctggagtgtagaggcacgatctcgactcactgcagcctcaacttcccagactcaagtgatcctcccaactcagcctcgcgagtaggtgagattacaggcatgtgccaccacgcctggctagcttttggttgtcttttgtggagacggggtttcgctatgttatccaggatggtcttgaactcctaggctcaagggatctgcttgccttggcctcccaaagtgctgggattgcaggtgtgagccaccgcgcctggcctaacatgtcccttttcttgccccacattatttcaactggataagtatcaaaaccgttaataaaccgagtatcatgtaacttccactggaaaaagttaagatagacttttcttggttctaattagagactgctgaaaatcactttcatttcatccaaattttaattaattttaaaawttttctatagaaatgcaactaaaggcattttaaaaaaagattacaacagtgcatggaaaagcaaagcaacatgttgcttcctgctattttctatttcccatattccagaaagaaagatctagttgggagactgtgcaagcctcctgtccacaggaaaggtagactttcctactgcccttccagtgaacactgccctctgatagccatccacttctgggcataaaacgagaaattctcaggataggatctagcagacacacagatggacctcatcagggtcatgggctcaggaggctggctctggagagctcccagatcactatgggggcgctaatggcttctgaatgggaagtggctttgctgtgagctctgccgcaggatgttgaatgtcccaggttcttatagtgatgctaaatcacccccatttgctgtgacacaaaaatatcctcatatatttctaaagccccttagggactgccctaaattgagaaccattgagaatcactgattccccagtactagaatttcaaatacacagcctgtgccttagacacccaggccctaggttacacagtacagacgccactagcccagcactgcactcttttcagtcaagcctagattcaacgcaaagctatgccaagcctattgctcctggaagctagaatccatcaacatagtgggtacttgaagggacaccttagggtcctctctgatcatttcactgaggaattaaatgagcttataaattaaattgtcctttaaatgtattggtgagcttattaattcctagtgaaaatctatagtgaattttaaaaggaaaataaaaaagtctccccagcaaacaaatgatgacctctcagtctattctttctagcaaatatatttttaattaccaagatatgcctcattcctacagaaacgggattataagaaatgatgtacaagacaaaaagaagcaacagagagacattttgagttttgcctcttttccccatgtctgtactaacatgtaatataa

SEQ ID NO: 707393 - DNA, 2543 bp, Homo sapiens
  misc_feature 1386, 1387, 1388, 1389, 1390, 1391, 1392, 1393, 1394, 1395,1396, 1397, 1398, 1399, 1400, 1401, 1402, 1403, 1404, 1405,1406, 1407, 1408, 1409, 1410, 1411, 1412, 1413, 1414, 1415,1416, 1417, 1418, 1419, 1420, 1421, 1422, 1423, 1424: n = A,T,C or G
  misc_feature 1425, 1426, 1427, 1428, 1429, 1430, 1431, 1432, 1433, 1434,1435, 1436, 1437, 1438, 1439, 1440, 1441, 1442, 1443, 1444,1445, 1446, 1447, 1448, 1449, 1450, 1451, 1452, 1453, 1454,1455, 1456, 1457, 1458, 1459, 1460, 1461, 1462, 1463: n = A,T,C or G
  misc_feature 1464, 1465, 1466, 1467, 1468, 1469, 1470, 1471, 1472, 1473,1474, 1475, 1476, 1477, 1478, 1479, 1480, 1481, 1482, 1483,1484, 1485: n = A,T,C or G
ctcccctctcttctttagttggagagaactgaggtccctgagtgtgtggagaaggtagaatgaacgggttgatgggaggaaaaggaaataaggatttagaagagagacaaggcagagctgaggaagggataatctatcgagctgtagcatgaaatataaaggtcaagagggataggaaggtcagggggaaggtcagtcagcccacactcttgggagtggtgctggatagtctccaggggcatagagaggaaatggtggcttcagccagaaacccaggtgcaggacaagccagcagctttgacgatggagagccaaggatgcactgacactggactgaatacatgcatggaatggggttgggggctataacagatcttataagagaaatgagccatctccaagaaagattagatggaacagtggagatagtgtctttaccttcctcccacaaggatgcttgtgatttaggaaggaggagtttttgaaaggtgcatgaaagacaaggatgttgaatatgcagaccctatgttaccgctttcactcttcatacccctagaagacatcgctgatcaatctcagcatctttcctgggaaactaatcatagcattagagttctcagcacagtttttcagcagcctctgccagtcaatcatccctggcatagaagctcttcctttaataggtggcttccagattactaaccaattaaatgacaactgccatttgataatagcaaatgtcatcatttactgttactgtcatcatgccggtgccacctggtcccatcgctttaggaactactgtgcagatggtctcccctggagagcagcatcatgccctagcatgygtgtatcactgaggagccctccattcatgttcctccacctccagggtgatggaggtcaccacagtaagcagagccatctgtcacggttctgctgactttaaagggcctggtgtagcccagctacaatttgaggggttgctgcgctggtaccgcagggtatgaaatctgaggatgaggggaagaaaaaaagccacggccaaagtgactgcagatgtgaagaccagagatcagatcttttggggtgaccaaggacactcactcaacctacttcctcctctcgattgacaatttctggaatgggctagtgccccaaggctttgaggttaaagggctatgttcaactcagataatatcacctgggctaaagtcctcagattaggacttgccttagagtttcttaagtagccacatgaaagatgtcaaaggaacctttaattagtaggttctgagggctggcttggaccaggctgaagcatggtaggcttggcaggagctctagggaggagagcgaagggaaaatctgaagtggaaagccacnnnnnnnnnnnnnnnnnnnnnnnnnnnnnnnnnnnnnnnnnnnnnnnnnnnnnnnnnnnnnnnnnnnnnnnnnnnnnnnnnnnnnnnnnnnnnnnnnnnnaatgggttcctgactcctgatgccagaaatcacacatcccacgggcaacccacactggcccagcagtgcagaccacgcgggctgggtggaataaagggggcagtgctcaaggcaggttgtgttttccttttgtcttggtaactgcatctgattcacccacctgctgcggctgcctcctggactttcccttgagcaggtgaggaaagggctggcttgccaaaggagtggacaggcctggagcctctgaaaaaatggcagctgctctggggtagcttctgattgccagcaataacaaaagacatctaaacagtggtcctcaagagcatctgcagaaaacactcattttcctaacctagcatctctggggtttctattttgtaaatgttctcatccaggacaaagtgcccacatgggctgttacagaaatccgtggacagacgcaggcactgagtttggaaagccgcctgggtcatggtggcatttctgcattttggagccagcttaggcatctggaggccagcaacgtttccattaaataagacagcacgctgtggctcctgctgccaggccaaactggatctattgagtcttttctattgattttagcccgtagatgtggcagcactgaaaaagcctggatgtctaattccaggctcaatatttggaccaatcctgggaatctgagtggaagaacgcgtgtgtctgaattctttgtaggttgactgacagctccctgaacggaaaggcagcagttttcttcagcttagaaagaggctccagatcggctgggcgcgatggctcatgcctgtaatcccagcactttgggaggctgaggtgggcggatcatgaggtcaggagattgagaccatcctggctaacacggtgaaacctcgtctctactaaaaatacaaaaaaattagccgggcgtggtggcgggcacctgtagtcccagctactggggaggctgaggcagaagaatggcgtgaacccgggaggcagagcttgcagtgagccgagatcgcgccactgcactccagcctgggtgacagagtgagact

SEQ ID NO: 707394 - DNA, 2543 bp, Homo sapiens
  misc_feature 1386, 1387, 1388, 1389, 1390, 1391, 1392, 1393, 1394, 1395,1396, 1397, 1398, 1399, 1400, 1401, 1402, 1403, 1404, 1405,1406, 1407, 1408, 1409, 1410, 1411, 1412, 1413, 1414, 1415,1416, 1417, 1418, 1419, 1420, 1421, 1422, 1423, 1424: n = A,T,C or G
  misc_feature 1425, 1426, 1427, 1428, 1429, 1430, 1431, 1432, 1433, 1434,1435, 1436, 1437, 1438, 1439, 1440, 1441, 1442, 1443, 1444,1445, 1446, 1447, 1448, 1449, 1450, 1451, 1452, 1453, 1454,1455, 1456, 1457, 1458, 1459, 1460, 1461, 1462, 1463: n = A,T,C or G
  misc_feature 1464, 1465, 1466, 1467, 1468, 1469, 1470, 1471, 1472, 1473,1474, 1475, 1476, 1477, 1478, 1479, 1480, 1481, 1482, 1483,1484, 1485: n = A,T,C or G
ctcccctctcttctttagttggagagaactgaggtccctgagtgtgtggagaaggtagaatgaacgggttgatgggaggaaaaggaaataaggatttagaagagagacaaggcagagctgaggaagggataatctatcgagctgtagcatgaaatataaaggtcaagagggataggaaggtcagggggaaggtcagtcagcccacactcttgggagtggtgctggatagtctccaggggcatagagaggaaatggtggcttcagccagaaacccaggtgcaggacaagccagcagctttgacgatggagagccaaggatgcactgacactggactgaatacatgcatggaatggggttgggggctataacagatcttataagagaaatgagccatctccaagaaagattagatggaacagtggagatagtgtctttaccttcctcccacaaggatgcttgtgatttaggaaggaggagtttttgaaaggtgcatgaaagacaaggatgttgaatatgcagaccctatgttaccgctttcactcttcatacccctagaagacatcgctgatcaatctcagcatctttcctgggaaactaatcatagcattagagttctcagcacagtttttcagcagcctctgccagtcaatcatccctggcatagaagctcttcctttaataggtggcttccagattactaaccaattaaatgacaactgccatttgataatagcaaatgtcatcatttactgttactgtcatcatgccggtgccacctggtcccatcgctttaggaactactgtgcagatggtctcccctggagagcagcatcatgccctagcatgtgtgtatcactgaggagccctccattcatgttcctccacctccagggtgatggaggtcaccacagtaagcagagccatctgtcacggttctgctgactttaaagggcctggtgtagcccagctacaatttgaggggttgctgcgctggtaccgcagggtatgaaatctgaggatgaggggaagaaaaaaagccacggccaaagtgactgcagatgtgaagaccagagatcagatcttttggggtgaccaaggacactcactcaacctacttcctcctctcgattgacaatttctggaatgggctagtgccccaaggctttgaggttaaagggctatgttcaactcagataatatcacctgggctaaagtcctcagattaggacttgccttagagtttcttaagtagccacatgaaagatgtcaaaggaacctttaattagtaggttctgagggctggcttggaccaggctgaagcatggtaggcttggcaggagctctagggaggagagcgaagggaaaatctgaagtggaaagccacnnnnnnnnnnnnnnnnnnnnnnnnnnnnnnnnnnnnnnnnnnnnnnnnnnnnnnnnnnnnnnnnnnnnnnnnnnnnnnnnnnnnnnnnnnnnnnnnnnnnaatgggttcctgactcctgatgccagaaatcacacatcccacgggcaacccacactggcccagcagtgcagaccacgcgggctgggtggaataaagggggcagtgctcaaggcaggttgtgttttccttttgtcttggtaactgcatctgattcacccacctgctgcggctgcctcctggactttcccttgagcaggtgaggaaagggctggcttgccaaaggagtggacaggcctggagcctctgaaaaaatggcagctgctctggggtagcttctgattgccagcaataacaaaagacatctaaacagtggtcctcaagagcatctgcagaaaacactcattttcctaacctagcatctctggggtttctattttgtaaatgttctcatccaggacaaagtgcccacatgggctgttacagaaatccgtggacagacgcaggcactgagtttggaaagccgcctgggtcatggtggcatttctgcattttggagccagcttaggcatctggaggccagcaacgtttccattaaataagacagcacgctgtggctcctgctgccaggccaaactggatctattgagtcttttctattgattttagcccgtagatgtggcagcactgaaaaagcctggatgtctaattccaggctcaatatttggaccaatcctgggaatctgagtggaagaacgcgtgtgtctgaattctttgtaggttgactgacagctccctgaacggaaaggcagcagttttcttcagcttagaaagaggctccagatcggctgggcgcgatggctcatgcctgtaatcccagcactttgggaggctgaggtgggcggatcatgaggtcaggagattgagaccatcctggctaacacggtgaaacctcgtctctactaaaaatacaaaaaaattagccgggcgtggtggcgggcacctgtagtcccagctactggggaggctgaggcagaagaatggcgtgaacccgggaggcagagcttgcagtgagccgagatcgcgccaytgcactccagcctgggtgacagagtgagact

SEQ ID NO: 707395 - DNA, 1048 bp, Homo sapiens
tacaaaaacaaaaaaaaattacaggaaaactaagttggactggtaagcctatgacagccccaaaacacacaagttcttgtgagacaggagaattgtagagtaagataaaaagacaactgcctcataaacacattgatgaagtgtctacaagttaggaaatttcaaaaaacaaatgaaggtttctagtaatagttgaccagatttctacagaccatctctcctgttgagaacaacagggattgyggtactgaattaaaacaaaaacaaaaacaaaaaaatcttttggacagaaagctcctaagaaaatggtaatgtaaagagcaaagaactggagaagaagagaacccaagaaatgtaaaaatttatgaaattgccaaaaatgaatgctaactctggctgtaaggatgagatactgagcagagcttctggcaattttaccgacagggggaaacaattcagccagatttctttgcttctatatcattttatctacagaggtttaaaggtattcaccaatgcctaaatatagatataaaggtattagtagtaagcagatgggaaattacttttaatgtgagatgggaaaactactcacattaaaagtaattgtttaacattgtatccttagcagcaaagataggtgactttaatttgattagaatcctgtcacctcacctaaaggcatttgctatcagttaccactaatactgtcttcatgttgtaaagttatagtgttataaaataacacaagaaaggtagtatgggtgagatggccatgtaattttccacactattttaaattttgaatgcaggagatagtatgctgataaacataatttctcacaaaatttctaaattcatgtgatttgggttacaaattcactccccaaaataaatagctgattctctactcttttataatgccttatcatctatacatacatgcaaggcccttcttaaactttttattactttcagactttaccacctgtatgagtccattttcatactgctataaaaaactaaggctgagtaatttataaaggaa

SEQ ID NO: 707396 - DNA, 1645 bp, Homo sapiens
tacttggtatacatgagaaaattaaaataatcatttggaagtataactcattttgtgtctctattttacaattgagtataataatgtcttcctaagccaaaaggcaagtgtccagagacatcaatttattgagttcccccacagggctaaaattttttatgtgcaaggtcaatttataactgtcttggatcactgataaattatggttcccaatgatcataagagttagtcttctcaaagtttcttggtgactgtattaataagatggcaaactctgtttagtttttattcatacaggtatttaaaaaactatacctagtactcagacatgagtttctggtaactcatctaaaataaatatttgaaggctggatgcaatggctcacgcctgcaatcccagcactttgggaggccaaggcaggcagaccacttcagatcaggagtttgagaccagcctggccaacgtagtgaaattccgtctccactacmaaacacaaaaattagctgggtgtggtggtgggcacttgtaaccccagctactcaggaggctgagacacgagaatctcttgaacacaggaggtggaggttgcagtgagcggagatcaagccactgcactccagcctggatgacagagcgaaactccatctcaaaaaaaaaaaaaaaaaaaaaaaagagtacgtcactcagaatcatgcctcctctgacatgagtctgttgtccttgtacttaaactacaccgctaacactctgctgtttcttgctttcttatgttacaaaggcattcctctgaggagactctagatgaagcctttctgtaaattctctggaaatgctcaaatttaggatgaacagagcaaaaatataatccaaggtgatcacagggaacacctgccatttaacacacttacataaaggtctaccatattatgcttacagaaaccctctaggactttgtctttcaaatgcaagacacagaaagtagtggaataagccttttaaatgtctgaagaagatgatttggacaacttgttttgtaaaagaggagcattcaagaacaaaaattacattttaagttggtgaaagtttaaatcatatgggaattactgaaaaatactttttgataaaggtaatcagctagaaattgacaccccagggaacaatgggagttatgatgaattaatatatgaaaatcaatttgaaaggggaaatcattatagactactacctttgctagtgtgctatcacataaaagtttttaggtttttttccttttaaattatatattgattataaatgttgcttcattgttttaaaaataaaatatatactgtcacaaaaaaattcagattaaaagacataacaaagaagtgtagatggttacaaatgtctccccaaataatatatgtaacaactgaattagtctctcctcttatttctgatattctcacaataaaagaaaaaagagacctggcacagtggctcacacctgtaatcccagcattttgggaggccgaggtgggcagatcacttgagtccaggagtttgagaccagcctggacaaaacagtgagtccaccccatctctatttaaaaaaaaaaagaaagaaagaaagaaaaaagaaagaaaatacagtagttttagttg

SEQ ID NO: 707397 - DNA, 587 bp, Homo sapiens
gtttatagggtgtctattcaaaagaactatgtgcttcatgtaactgagtaaataatttacacacttagccaatttccaaattttactagtttcaattgtatacaaaaagccaacactagaagtaaatttccttttctccattgagtgaacaaaagaaaaatatatacttataggcaagaagttagtttttcattatttttgtgacactagctttactacagaacctaaaacccttattacacagtttattagaaaaaatatctatgttttgataattaaatgttatttttttgaggtgactcactcatggtttcaaaacttagaaattctgtttgaataaggttggcataaatggcagctgaaggcaaggaggtaagctctggataagatggtaaatattttagattttgtggtcacatgttctctctgttgtatattcttcaatttttttttttttwaattctttaaggctgggcgtggtggctcatgcctgtaatcccagcactttgggaggccagatcacctgaagtcaagagttcgagaccagcctgaccaagatggtgaaaacctgtctctactaaaaatag

SEQ ID NO: 707398 - DNA, 1990 bp, Homo sapiens
cccaaaggaatataaatcatgctgatataaagacacatgcacacatatgtttattgaggcactattcacaatagcaaagacttggaaccaacccaaatgtccatcagtgatatactggattaagaaaatgtggcacatatacaccatggaatactatgcagccataaaaaaggatgagttcatgtcctttgtagggacatggatgaagctggaaaccatcattctgagcaaactattgcaaggacagaaaaccaaacaccgcatgttctcactcatacgtgagaggtgaacaatgacaacacttggacacaggatggggaacagcacacactggggcctgtctttgggtggscggtggggggagggatagcattaggagatatacctaatgtaaatgatgagttaatgggtgcagcacaccaacatggcacatgtatacatatgtaacaaacctgcacattgtgcacatgtactctagaacttaaagtataataaataaataaataaaaggtcttattttaagtgatgaatgatgcctcctaacagaacaaccagcagaacactaattaatgcataggcttcttggctggtctctcttataaacattagcccaagttctgctttcagccaccacacatctctctctcctgtggttccaaatcatgtaagtgatccttctgctaataaactctctttggccttgggctgggcacactgagtcctggcacccactccctggatgtccccatagggacatgttctatatgcaaaaatggtgacgatgaaaaagggctgggacttcatggattttggtttggtgagctgttaccactcctctggcttctcctgacagagccttcacttagcagatcatcacatttcacccttcagagcatgagacttgtactaatgctgcagcactacccagcagggagccagctttcccatggtcactggatgtgtgtggtgttccacagagccagggctgcgccaagatcttcagctccaagtaaaatcttggagacctttgccttaaatggtaattactctggcaaaggtcctttataccttgctctaaatgttatcccacccaaagtagaaaatgacttgtggaaagtctttcttgttttaaaaaatagctatagctatagtaagggcatagcagctttagaaatggaacacgtatattttttataggccattatgaaataaacttgcagtaactaattctttctcacacccatttgcctctttcagagaccctgcaggatttaacatcccaaaccaaatatactgttatgtgttcccaaactattttttctcagggctaaagggaaattcccatgaagtgctatttttccagaatgtagccccctgtcaatgccaaagagaatactttaaaaatgatatttctcaatattagggcacattatggatacaaaatcttagcccaaatccccttggtcatataaaacatgtcacataattgtattttcggttaggaaggagtgttacaaaataaatatttccccattagaacatactgggaaatgtttgctgacacctacactcaaacccagcaggttcccttggaagagtttggcaaagaacaggcccctccttaatgaggtgctggagttggttgaaaattcaatattaatttacaaaaaatggttgcatttaagaagtcaaaactgaggcctgcttgtgggcgtctgtgccttctgcattctgggtctgtgaaatatcctgggtcaaccgaggatcactgtccttgattggattgcatcagtctttctctttctaaagcagtctgtggaaaacatcaagaagggttttgttttgttttctcagaattttttttcctttctctatttctcctactggaaaattcttaccacaattgttgatggttgtttcatttgattttaagagatgcatggccgcaagggccgtgggagtacaaatcaatagctgtgatcactgctgg

SEQ ID NO: 707399 - DNA, 1990 bp, Homo sapiens
cccaaaggaatataaatcatgctgatataaagacacatgcacacatatgtttattgaggcactattcacaatagcaaagacttggaaccaacccaaatgtccatcagtgatatactggattaagaaaatgtggcacatatacaccatggaatactatgcagccataaaaaaggatgagttcatgtcctttgtagggacatggatgaagctggaaaccatcattctgagcaaactattgcaaggacagaaaaccaaacaccgcatgttctcactcatacgtgagaggtgaacaatgacaacacttggacacaggatggggaacagcacacactggggcctgtctttgggtggcsggtggggggagggatagcattaggagatatacctaatgtaaatgatgagttaatgggtgcagcacaccaacatggcacatgtatacatatgtaacaaacctgcacattgtgcacatgtactctagaacttaaagtataataaataaataaataaaaggtcttattttaagtgatgaatgatgcctcctaacagaacaaccagcagaacactaattaatgcataggcttcttggctggtctctcttataaacattagcccaagttctgctttcagccaccacacatctctctctcctgtggttccaaatcatgtaagtgatccttctgctaataaactctctttggccttgggctgggcacactgagtcctggcacccactccctggatgtccccatagggacatgttctatatgcaaaaatggtgacgatgaaaaagggctgggacttcatggattttggtttggtgagctgttaccactcctctggcttctcctgacagagccttcacttagcagatcatcacatttcacccttcagagcatgagacttgtactaatgctgcagcactacccagcagggagccagctttcccatggtcactggatgtgtgtggtgttccacagagccagggctgcgccaagatcttcagctccaagtaaaatcttggagacctttgccttaaatggtaattactctggcaaaggtcctttataccttgctctaaatgttatcccacccaaagtagaaaatgacttgtggaaagtctttcttgttttaaaaaatagctatagctatagtaagggcatagcagctttagaaatggaacacgtatattttttataggccattatgaaataaacttgcagtaactaattctttctcacacccatttgcctctttcagagaccctgcaggatttaacatcccaaaccaaatatactgttatgtgttcccaaactattttttctcagggctaaagggaaattcccatgaagtgctatttttccagaatgtagccccctgtcaatgccaaagagaatactttaaaaatgatatttctcaatattagggcacattatggatacaaaatcttagcccaaatccccttggtcatataaaacatgtcacataattgtattttcggttaggaaggagtgttacaaaataaatatttccccattagaacatactgggaaatgtttgctgacacctacactcaaacccagcaggttcccttggaagagtttggcaaagaacaggcccctccttaatgaggtgctggagttggttgaaaattcaatattaatttacaaaaaatggttgcatttaagaagtcaaaactgaggcctgcttgtgggcgtctgtgccttctgcattctgggtctgtgaaatatcctgggtcaaccgaggatcactgtccttgattggattgcatcagtctttctctttctaaagcagtctgtggaaaacatcaagaagggttttgttttgttttctcagaattttttttcctttctctatttctcctactggaaaattcttaccacaattgttgatggttgtttcatttgattttaagagatgcatggccgcaagggccgtgggagtacaaatcaatagctgtgatcactgctgg

SEQ ID NO: 707400 - DNA, 539 bp, Homo sapiens
ttttccctgcagagtttattcattcaacaaatatttattgaatatttaggttctcagtatgtgccagacactgttctaagtgctaagggcacagcaatgaaaaataacaggaaaaataattgtgcccccatgaagcttacttctggtaggagagacaaattaacaaaacaaataagttatattgaatattaggagataagtgctaaggaggaaaagataacggggttaaaaaaaagaaatgcatttgatttactrtgatactcagaacagtgattgttgattttatatttaaagatgatgatgtttttgatggtctttagctctgtaactataaagattggtagggaagtagtcatttctgtagttttttttttttttttttttttgagacagaatcttgccctatcaccaggctgtagtgcaatggcattatctcagctcactgcagcctctgcctcctggagactgaatgattctcctgcctcagcctgggtaactgggaatacaggcacccaccaccacgcctagctactttttgt

SEQ ID NO: 707401 - DNA, 624 bp, Homo sapiens
aaaggctccaaacaccgcaccctcagctggccctgcttggggctggcattgggggacagcgtgttccgggcgcctcttctcctctgtgctagggccttcgcctttgctggctgcccactcatagatgtcagagccgcaggaaggctccgcagaagccctgtgygggccctgcctggggctggctttggtgcacatgcgacaggccagcgtggtccccatgggacacctctgttcttctccagcagcttgggccttcgcttgcccccacgcctgcagagctgagcacctgccacctctccccaggaaaggcaaccaaatgccaccaactgaaggcacccactgaaggcactaactgaaggccagttgccctgccagccagatcgtgtcctgcttaggaggaaccaatcaggccttgagttccctccacgcgccgcccttccatttgtgatgtgggagtccaggcactggctcacaaggccccgcccccacagcggccctgccccacctttcattcattgatagcttcgagaaactttcaggtttcctcactgtgaattatgaatatgaactatattaaaattactgtaacccaatgtgcttcatgcactatctggcatccaaagg

SEQ ID NO: 707402 - DNA, 624 bp, Homo sapiens
aaaggctccaaacaccgcaccctcagctggccctgcttggggctggcattgggggacagcgtgttccgggcgcctcttctcctctgtgctagggccttcgcctttgctggctgcccactcatagatgtcagagccgcaggaaggctccgcagaagccctgtgcgggccctgcctggggctggctttggtgcacatgcgacaggccagcgtggtccccatgggacacctctgttcttctccagcagcttgggccttcgcttgcccccacgcctgcagagctgagcacctgccacctctccccaggaaaggcaaccaaatgccaccaactgaaggcacccactgaaggcactaactgaaggccagttgccctgccagccagatcgtgtcctgcttaggaggaaccaatcaggccytgagttccctccacgcgccgcccttccatttgtgatgtgggagtccaggcactggctcacaaggccccgcccccacagcggccctgccccacctttcattcattgatagcttcgagaaactttcaggtttcctcactgtgaattatgaatatgaactatattaaaattactgtaacccaatgtgcttcatgcactatctggcatccaaagg

SEQ ID NO: 707403 - DNA, 571 bp, Homo sapiens
aggctgatgcagaagaatcgcttgaacccgggaggcggaggttgtggtgagcagagatcactccattgcactctagcctaggcaacaagagtgaaactccgtctcaaaaaaaaaaaaaaagaaagaaagaaatcttagtgtcctctcagtgtcaggcacagggaacagggatgcacatgtcatgggtgtccaatgacatctgtctctctctggggaggggaggggtgactatatgcaaggaatgcccaaggagcccttgagaggtgttgctacaacagccctttccaaacatttaagtagtttggaacctctagtatcttaacctctctcaacctgcatttgaagccattggtttgcaatttaattaccctaagagttgagcaggttcttgttaaaggtgaattggggagaaactgaatggcaaagcgggcttcagaggcaatacaaaaattgatgattccaagtgrgaaaggttctcagagctaaggcaagtttggaccacacagtgttttccaacaaaatttaaatgtcaccaataattaaaaatcaggagatttccgaaaaaaagagg

SEQ ID NO: 707404 - DNA, 646 bp, Homo sapiens
acagtgtggtgagtcctcaaagacctagaagcacaaataccattcagcccagcaatcccattactggatgtatacccaaaggaatataaatcattctatcatgaaaatacatgcactcttacgttcatcacagcactcactattcatgatagcaaagacatggaatcaacctaaattcccatcaatgatagactggataaagaaaatgtggtacgtatacaccagggaatactatgcagccataaaaaggaacgagatcttgtcctttgcagggacatggatggaactggaagccattaccctcagcaaactaatgcaggaacacaaaaccaaataccacatattctcacttgtaagtgggagctgaatgatgagaacasatggacacatggtggagggacaagacacactagggcctgtcagatggtggggagtgggggaaggagaacatctggaagaatggctgatggatgctgggcttaatatctaggtgatgggatgatctgtgcagcaaaccaccatggcacgtcattacctatgtaacaaacctgtgcatcctacacatgtacccctgaacttaaatgttggaaatttaaaaataaataaagttcttagaaaagaaatccacatcacagatagaacaaaa

SEQ ID NO: 707405 - DNA, 646 bp, Homo sapiens
acagtgtggtgagtcctcaaagacctagaagcacaaataccattcagcccagcaatcccattactggatgtatacccaaaggaatataaatcattctatcatgaaaatacatgcactcttacgttcatcacagcactcactattcatgatagcaaagacatggaatcaacctaaattcccatcaatgatagactggataaagaaaatgtggtacgtatacaccagggaatactatgcagccataaaaaggaacgagatcttgtcctttgcagggacatggatggaactggaagccattaccctcagcaaactaatgcaggaacacaaaaccaaataccacatattctcacttgtaagtgggagctgaatgatgagaacagatggacacatggtggagggacaagacacactagggcctgtcagatggtggggagtgggggaaggagaacatctggaagaatggctgatggatgctgggcttaatatctaggtgatgggatgatctgtgcagcaaaccaccatggcacgtcattrcctatgtaacaaacctgtgcatcctacacatgtacccctgaacttaaatgttggaaatttaaaaataaataaagttcttagaaaagaaatccacatcacagatagaacaaaa

SEQ ID NO: 707406 - DNA, 611 bp, Homo sapiens
cctcatgaccttccctcctactcctggtgcttctcaaatgcccacgaggcgctgcccattcagactctctgttatttctctgacttcatcttccccactttccctcactccctcagctcctgccccactggccatcttgctggtgaatgctccaggcttgttcctgtctttgagcttattatttcctgcacatggactgctcgtcttccagatatctccatggattgctcattcaccttattcagtctttccttaaatcactttcccggagaagtcttctttcattactcttattgttggcatttgctttatttttgaccctgcttccatagaacataacagcatctgttgtaccatatatatatgtatatagttttatacacacacacacatatatacacacacacatatatatatagagagagttttttcttttcttttttttttwagaaaacattttatttgagccaggcatggtggcatgcacctgcagtcctacctgaggcaggaggatcacttgagcctaggaggttgaggctgcagatgcagtgagccaagattgtgccaatgcactccagcctgggtgacacagctagattctgtctctaata

SEQ ID NO: 707407 - DNA, 1591 bp, Homo sapiens
tctgaaaagggctgtataaagcaaacacttgcagaatctttattcttctctacttgtttcctttatactttgatggctgcgtacccatggaaaatatcgtcatcaaaaggaaataaaattgaaggccgggcacagtggcacctgcctattatcccagtactttgtgaagccaaagagggaggatgactggagctcaggagtttgagaccagcctggataccatactaaaaccccatctctacaacaattttttttttaaattagaagggcacggtgacacactcctgtagtcccagctagtggggaggctgaggcaggaggatcccttgatcccaggaggttgaggcagcagtgagctgtgattacaccactacactctagcctgagcaacaaagcaagacccagtcttaaaaaaaaattaagtttaagacttgttctaatttgtatgaatccttttaattctaagatctcactcattcagggctagttaattgggcaatttatacacacaatttttttgcatgcctgttagaagcacaggtcaattaaactacatactatacaatttcttttgtattacggactgctgtaaattggatttcctgggcaacacactctgggatacagatttgtatataggacacttattaggaagtgctctcaggaacaatgcccatgagggaaacaggactaagcagcaggagaagacagatagatcctaatgcagttgcaacagaggactcagccagttccacagggggcttgaggctggcatggcctttcccagttgtgttctaccccaggtaaggggctaggcatcagtcagtcatgacgtggctgcctctcaggagctgtgatatgttttggctctgtgtctccacccaaatctcttgtcaaattgtcatccccatgtatcaggggaggagcctggtgggatgtgattggatcatggggctggatttcccccttgctgttctcgcgatttcacccttgctgttctcgtgttctgttctcatgactgagttctcatgagatctgatggtttaaaagtgtgggcacttccccctttgctctctcctgctgccctgttagaagatgtgccagctttccctttgccttccgccacgactgtaagtttcctgaggcctccccactcaggtggaactgtgagtcaattaaacctctttcctttataaattacccagtctcaggcagttctttatagtagtgtgacacyaatacaaggtgtcaccttggaagagacagttcctttcacagaggacacctgtgtgggaaggatccagtgtgggccatcagcagacaaaactcccagtagctggcaggatgaaagtagagggcctgggtggcatgccacagcattctgtacaggtgttatcaactatctcatggtgcctaaatcagccccaggagatatgcatgagtatctagtctctagatgacccttatagagtttttgggtatgatcacatgtaatgcaaatattcacatgactttcaccataacaaaaatgtgcactagcttttattttattttatttatttttatttatttatttttttgacggagtctc

SEQ ID NO: 707408 - DNA, 627 bp, Homo sapiens
tggccacttgtatgtcttcttttgaaaatgtctattgatatctttgcccattttaagttagattaatttgattattaatattacttctggcagcagaagtttgttttacttgtcttttattttttcctatcgagttctttgagcttgtcaggaatattttataaagttagctgttttttttttaaagaaatcttagcaatttttgacttttcaaaaatatcatgtcattttctctttttttctttttgctgccagaagtaatatcccttaaaaatatgacactattctgtgattgtttccagatagtcttaaaggagagaaatcacaacatggctggctacctcctattgcagggaaagcatagagggaatcttctcagcaaaagatagtagcaagaaaaaaggaagaaatcgccaacagaaggctcctagaaagaacatcaagagtataatctagattccacagctcatagctgactctaaggtgatttgaagctagattagattctgctccaaatgyggtgtaaaatgaatccatgatccaatgtaaaggaggttattggaggaaaaatacttaagtgagttggaactttaaaggcacatccaacatcatggctcagttctgggg

SEQ ID NO: 707409 - DNA, 944 bp, Homo sapiens
ccagtttaatacatttagtaaaggaatgtcctaagtccaatcctagctgcagtatcctaggaaagcaagtgtgtgtgtgtacttgctatttcatagggttactgtgggactgaagccatggtgcacagaattttgggcagaggagaggaaaaaaaattggagctgtgtactttcaaaatctgaatacccacaaaaaccacgatgagcaaatsacagaatattatccctggtcacaaaaacctattaacttttctgacctaaactatagcctggcaaaccaaccagcaaaattatttttgcatttctattaaaaactatttatcccttaacaaaaatagactttaaaagaaatctttaggaataagtctgtcagttgagtacccatgaataagtctgaatatgaataaggaaaatctatatttatttgtatcaaattgagaattgtgcatattttgattacactcttctgaatttgaaactaatgttttataatttgttgatatttattcctgattatatgctttccatcaaaaatgtattaaatataaaatatattctatgctcactgcattactctttgtgctgaaaacacagtagaaaacatataaaacactacctcaaggtttagcagtaatttaacttgctgtcaagcaaacaagcgtgaaaaatgtatagaaaatatatcttagccctatactgtaatttagaaagcctaaagttagtagtcattggtctaggctactgaaagaaaaatattcaggaataaaaaattttagaagttgtttatttttaaaatcagcatcttaaattctgagtgagtatatgagcaaaagatttatatttgcccatagacttcattatggacgctgtcagaatttctgtaatggcttcatgtaagcttattcatggttgacaagaaattattttaattgtgacatgacatg

SEQ ID NO: 707410 - DNA, 1883 bp, Homo sapiens
tttcaggaaccccagatcctggtcctggtcctcctccaccagacggaaggaagtcagagcttgctccaaagagattcttgcaaagtggccccacaactgcttgtctgagtcaagcctcagcagaaaaaatccctgtatccatcatctatttctctattcctctaggaataatttatcttatagttcatcatattccataatatctgcttatgataactaaagcatctagcagcttgacctgctggaaaggatatggatttgggacattttgtctcagatctactacatacaaactttgtgactttggaaatagacacttccttggtatgagtcttagtaagctcacctgtaagatgggagttgtaagaattttatagtgccaggcacagtgattcacacctgtaatcctaacactttgggaggcagaggcaggagaaccacttaagcctatgagtttcagaccagccctgtcaacacagagagaccctgtttttccaaaaaacttaaaaaaatgtagccaggcatggtggtatgctcctgtcagctcttcaggaggctgagatgtgaggatcccttgagcccaggaggtcgaggctgcagtgagccatgatggtgccactgcaatccagcctgggccacaaagccagatcttgtctcaaaaataaataaataaataagagttttgtaggaatcaagtcaaataatgtatgacaaaagattctgtgaacctcacagcattatgtaatggtgtgtgtgtgtgtgtgtgtgtgtgtgtgtgtgtgtgttttactgcagcagattttggtggttagaagaatgagtttttggagtcagacttctgtttaaagcaaggcttcactaattactggctctgtgaccacagacaagtgactttaatttcttttatatcccggcatcatcatctgtaaattggaaataatagctatattttagggttgttgaaacgttaagtgagataatgtatgctaagcatttaatataattcttaatatgtcataatagtagttgctgctttcaggccctaaggatgctgttggcttgaaaaaaaaatgtacccttgagacttttaatctacctccttttgttaaccacatctgaatttttatctctagaaataaatgtatataaaattgccttacttaattccagtttttagaaaatattcctttttccacagttcgaaaatgcataaaaatctagtgcaccagcttcttatctcagcagttgaaattatttgactattgattcttgaattcaaccaagatttttccagaaacatcatgaaagaatcaatcttcagagactaatgttccaagggaaggcctgtcttctgggaataacagacctgatgtgtgtattctgccaaaacagttgagtaaatgaaacaaacttaacagctttttgcctaatttgctaatataccaacaggcctcacaattaggtatgcatgtcaggtgtattagtccattttcacactgccgataaagacatatccaagactgggtaaattataaagaaaaagaagtttaatggactcatagttccaagtgacyggggaggcctcataatcatggcagaaggtgaaaagcaaatcttacatggcagcaggcaagagagagaacttgtgcagggaaactcccctttataaaaccatcagatctcatgaggcttattcactgtcatgagaatagcacgggaaagaccgcctccatgattcgattatctcccactggatacctctcacaacacatgggaattatgggagctacaattcaagatgagatttgggtggggacacagccagaccatatcatcagggttgttcaggagactccttggggagttgtaagttgtagccctgt

SEQ ID NO: 707411 - DNA, 2152 bp, Homo sapiens
taattttaccaaaaaaggaatttggaatttgttaggcttgcaaggagggggacagttaaacatacaggctgcaaggaagaacaagaaccaaagcaattttgggaggttttatgagcaggaacaaatgaacaatttgttcaggcagtctccaatggcttttggaccctggctcagtcctacaaatgatggggtggtggggtgggggtggtgtcttgattgtcctggcctgagtcactcttagcccttagaatactttgattgacagtcttcccaaagattgcatgaaatgggggtaggctttacccaacaaagggaaatgagggatgctgtaaccagaagaggcaaggaaaagatgcagcaaaggcaaagatcaaacatatcttccacgatatcaccttaagttaaagatggagaaagagatccaatgtttagttatgttcaaatgccaaggcacatgtgtcagtgacaactctgagataggaacctctgtctgcccaatgcccaagaacctgttattcccctcctcccttcctctgtcaagccctctttatgctacagagtataatagcacagaggtgacatccaccttccagaagatccacaggcttgtgtttataaaccttttgaactcttctggggaaatgcttggttttcatagaaaggagtcagcaacactgcgtctgatctcctttcatgcatttctacttttttctttcgtgctacctcagttttaatttcctttgctgtacccatgcagcccttgtccccagtgtaaacaagttgggaggaactgatgagtgggccaggttgacaaggggagcacggtaagcacaggaggaacccatccaacaggacgcagcctggatctatttcagcggtctccgtgggaacagggaccaggcagctcagccgaccttctccacttgactcttctcttcttttattcctttctgctctagctgtctttctctctctgaaaataatagttccaaataatcaagctttaggtggtgtcagtagccagaaacatccaaggctgactagacaggaagcaaagtgttcattttgaatttaaaatgagaaatctaggcctatttcaggagttggtagttgtggggtggtgaccaagtgtacaagtttaagctgatttcttacccaataatgaacatcaaataggtgagcagtggcttcatcaactttaaaaatgtgcctggactaatgatccaagagaaaaatactattctgttattataaaacacaatatacacagatatatacaactctaaacattcctggttgatagttaatttcaatatggttaattctatttaaagattacacaaacgagttgtttgtttatactggtcattgagttaaaagtggtacagtttgggctatggctttagtttctattattagaagagataatgtttgtcatgtgcctagtgcagtgaccaggatgtggacggtgctcagtaaatgcttgtttcattacctttgtgaaatagagtaaactttaatcattgttcatatcctcatatacttcactgttcttatttttaaatgtttcttaactatcaggggccaaacacatgtcatttttctttctggaatccatcagtgcttttcattagctcctgatgtcttaccactcaatgtatggtccatggaccagctgcaacagcgtcacctgagagcttgctggagccagagaaactcaggtcctagcccagacctcctgaatcacaatcacatcttgaagtaatttgtttacatttgtatacatactggagttggagaagcactgacttgctggatgaggctcgagcctcttacactggaataagatttctctcctgactctcactccaactcctgccatttccttccttgggatttgaactgaaattccccagagacacaaagctgtttcctgtctctggscttctcctgtgctattctctttgtctggaatatatttcttcttttatgtctcattaatgcttgctctttaagacatgcattcatttttcactctatatgtatttattaagtacgtataatgttccaagcagtatgctcaggtaccctctctaagaaagaccccactgagaatggtgaccttcctttcttgactctaagggaccaggca

SEQ ID NO: 707412 - DNA, 602 bp, Homo sapiens
caataatttcgcagaaagtattattttttccagatgagaagactgaggctcagaaagattaagcaattgttccaactgcccatatttaaacagaggttgcattgtaattaaaatgaggtctggatcatagctaaacatcccttcagtttaactaaaattttgcatgaatcttttaatctttcattgataaccatctccaaatgactattcatgactaatcttggcttagcatagtactgctacagtgctttctcacttattctcatagcctgactacagattgcaaagtcaagtactctttccccactcttgacaatccattcatctcctgtgagtatggatttagtgacacctaatgtcttgagagcttggggggtcaaggagargtctgcccttcaattgtcttaagccagagtggcgaagaaagagatctggtgccgggccatactccccagtctctctcagcacgtcccatgactttttctaatatccactgctgtctttccattctagaaaagagaaagatgatccaagtatctgtatggaaaacctaaggcattgggggtctcctgggagtctgaagcaagaggactgagataccc

SEQ ID NO: 707413 - DNA, 909 bp, Homo sapiens
cattcaaattaagttcaaacatttttttgttttcatttctacaaagatttacattatatgaactcttttattgaaaaattacttgagctaaccaaaaagtcaaggtcaatggaaagaataagatgggttatctgtgtaggttataaagtcctatacaaaaataattctgcaatcacttttcagccttcctttcccacttagtagctggcttcttttttgaggcaagcacttatccaagaatgattgaatcagttagaggacaagtccttaaaaagatccaccttgcccgatgattttagaggagtctgtcctattttccttgctgtcttgtttacttgaccttctcagttactaaataagagtggatttaatgaagagaaggcttttatttatcattcaagtgccaagttccttgtcaagggacagatctttctcttagggaggaatactcaggcaactatcctgagaatttgaaactcaactctgtgatagtcaagatttcccaagagaagttattcttccatattatggtgttactttttctatgatgaattttacaaaggcaaagtgtataaaagaatcagagcacttaattatccttcagggaaaaaaaaagcagccttttccctttgttaattatctcagttttcaaattaatttcaacaatgagcacttggtctcatgaagaaattttaaataaaactggaagaaaaatttaactagaaaygtaaaaatgctcactactagggttagttattgtaaaagataattatttgggtgatagcttatacagcaatttgaaagttatgttttatttctgttcaatgaatacatgtacatgattttaaagacaaatgcactatagaatgtaatataaagaaataccagtaccccagtcttgtatctggt

SEQ ID NO: 707414 - DNA, 909 bp, Homo sapiens
cattcaaattaagttcaaacatttttttgttttcatttctacaaagatttacattatatgaactcttttattgaaaaattacttgagctaaccaaaaagtcaaggtcaatggaaagaataagatgggttatctgtgtaggttataaagtcctatacaaaaataattctgcaatcacttttcagccttcctttcccacttagtagctggcttcttttttgaggcaagcacttatccaagaatgattgaatcagttagaggacaagtccttaaaaagatccaccttgcccgatgattttagaggagtctgtcctattttccttgctgtcttgtttacttgaccttctcagttactaaataagagtggatttaatgaagagaaggcttttatttatcattcaagtgccaagttccttgtcaagggacagatctttctcttagggaggaatactcaggcaactatcctgagaatttgaaactcaactctgtgatagtcaagatttcccaagagaagttattcttccatattatggtgttactttttctatgatgaattttacaaaggcaaagtgtataaaagaatcagagcacttaattatccttcagggaaaaaaaaagcagccttttccctttgttaattatctcagttttcaaattaatttcaacaatgagcacttggtctcatgaagaaattttaaataaaactggaagaaaaatttaactagaaatgtaaaaatgctcactactagggttagttattgtaaaagataattatttgggtgatagcttatacagcaatttgaaagttatgttttatttctgttcaatgaatacatgtacatgattttaaagacaaatgcactatagaatgtaatataaagaaataccagtaccccagtcttgtatmtggt

SEQ ID NO: 707415 - DNA, 677 bp, Homo sapiens
tgaaaatatcaggttactatcttcgaaggcaagagatttctgtgttgttttcctcatttaacagtaaacactcaggggtgtatatgtgtatatttacaggtactacaaagaatacctcgttcccaattgctttaattttttccaaagcatcaagaaaccatttttcggctgttttccatctaaaatgaaaggaaaaaaggttgcagattattcgaaattagcaaatataaactttaaaaaaatttttgattacctttctagtagtactaaaatgcaatggggtaaactgctggaaataattataaaaattcaaagttaagtcacaaatgattaattttacggcattaatatcaagagttcaagatttcaagattttgggagatacagtatttatattccttttttttttttttttttttaagagtctcactctgtyacctaggctggagtgcagtggtgcgatctcagctcactgcagcctctgcctcccgggtttaagtgattcttgtgcctcagcctcctgacacagctgggattacaggtgtacaacaccatccctggctaatttctgtatttttagtagagatggggtttcgccatgttgcacatgctggtctcaaactcctggcctcaagcaatatgcccatctcggcctcccaaagtgctgggattacaga

SEQ ID NO: 707416 - DNA, 655 bp, Homo sapiens
agagtctcactctgtcggcgaggctggagtgcagtagtgcaatctcagctcactacaacctccacctcctggactcaaacaattctcctccctcagcctcccaagtagcggggattacaggtgcatgccaccatgyccagctgatttttttatttttagtagagacagactttcaccatgttggccaggctggtctcgaactcctgacctaaggtaatctgcctgtctcggcctcccaaagtgttgggattacaggcgtgagccaccacgcctggctgacatccccatttttaaagaaagagagagcaggagaaattaactttcccaaggaatttcagttggtaagtcacagaacttggattagaattcaaatttgactccaaagtttatgctgtttccgttagagaccaattctgttttatttgcacggaagaaaccacagaaattagaacatttacagagtttaagtaattaattcttcacatacttgacatttttctaaacttgaataatactggttaaatagcttcactaggctgcatggctttccttaagttaaaaccacagcaaatcattacatgaatcagttcaccctgctaagaattctgttttatagtcacatttagtgaccccaattttacataaagttttgtgt

SEQ ID NO: 707417 - DNA, 613 bp, Homo sapiens
tactgttctacctatgataaatataatattgtatattttaaaatccacatcttcctaaaatattgcagcccaacyttccttacattttcatttctagagaatattttgttcattcttgtaattgtagtttttctgaggcactgcattttaggtgtgtctcttcttgatagtatatagttccatttttgtttgggagccaatctgatatatgttttatcaaattaactttatgccatttataattattaccatgtcaagcatggttggcctcatttctgataatttgttttacgcgtttttatcttctaattactttttattttttgctttattttgcttctccactaatttgaaggttacatagtttgcttttatttttattggtgataacttttaaggttgtaaaaaacaaagtgtaagcctgtatttttctaagtactatatcaattgattttttaaaaattttctctttcctatatagggttaagaaatacacccatctgatgggcactgtggcccacacttgtaatcccagcactttgggaggctaaggcgggccgactgcttgaggccaggagttcgagaccagcctggccaacatggtaaaacccca

SEQ ID NO: 707418 - DNA, 682 bp, Homo sapiens
ctgaatttggcagccctttctcatatatggtggttcaaggccacagtaggctaccaattttgttgaagttagagcctgcatttgtttctaactcttactgttttttatagtgtcattgaaaggagaaaggagcaaaattgtcttgcctgcatacacctttattttttgtaattattttatttcagtagctttagggatacaagtggcttttggttacatgggtgaattggatagtggttaagtatggkattttaatgacctgttacctgagtagtgtactttgtaccctacagagagtttttcgtccctcaccaccctcccaccctcctcacttctgagtctccagtgtctattaaaccactctgtatgccttcccatgcccatagtttggctcccacttataagtgagaatgtgcagtatgtggttcttcattcctgagttacttcacttatgataatggcctccagttccatccaagttgctgcaaaagacattatttcattcttttttatttgtctgcatattttagattataagccctttgtcgcattgaaatgaatcatgtttgaatcagtcacgtagagtggattttcttcccctaagaattctattttgtgtcaggaatttatctttcattcattttaaggttttgatattatgctttctaagcgtatgaaaaca

SEQ ID NO: 707419 - DNA, 649 bp, Homo sapiens
attacccttccaaaacttgtacatctctgaggagacatttctagagatggaactcccattttgactaaagcttttgttaaaatcagaggggcagggctataactgcccagccaaattcttgattcgatgcaaaatacaagtaggttgggttcttatgcctaagcctatagaaaactctacataccctgtcttcatgtaatgaaattggtcttctccttgaatgcagttttcaagctgctgaattctgcacctgcagcaatttctggcttattttcaagaaagtcccagggaatcacaaattatagagctatatgccttgcacagaagtttaacaacatagccccatgtagtctttgcattaaacacatcagaaattaagggaaatgaagataaacagcaaatattaaaatttggttgcrctcagcatgtatgaaagtaggggttgtacagtcgtttgcttagtgtttctatggcccaaataagcctacttttagttatttcctgcacctttctaaaatcctaacactatgtgtcaggagtaatgagtctctatttttaaaaaattgtgtttaaccatattaaatccaataatgaagtctctgaaataattcagacagcagtgctgtcaatcagtagagctttttcaaga

SEQ ID NO: 707420 - DNA, 645 bp, Homo sapiens
gcaaatggctttgtagctatcacccaaattaagaaatagaactgtgttagtcaccttcgaagatggtgcaactttgtatttgcaattccccatgctctttccactttttctaaaagtaaccactatcctgactttaatcactgtttttcactcttctttgttttatcaccaaagtgtgcaaccttgaatactctggtttcctccctccctttcttcttttcatatacatattttatatatatgtatatatgtgtatatatgtatgtatgtatatatacatgtatatatacatatacacacacacaagcacacacacattttagtgctcgtgtagygaagaatagttcctttacagtctctttagtgtacagattttctttccatctcccctttctcgcttgcaatttatttgttgaaaaaaccgagatctttgatccatcgtgtttcccccggtctggattatattttgcattctcaacatatggcttagcatattcctctgtcccctttatttcctatatatttgtatctggatataaaaacttagacatgaattttttggcaaaaccatttcataggtggtgtgtgtcctttactgctgatgttagtagccattgccactgaaaggttagatccagtaattca

SEQ ID NO: 707421 - DNA, 617 bp, Homo sapiens
cgattctcacattgttcctctgaaatttccagtgaactcttactggctgttttggggctcttagggccgtaggatgcctccttgctcccccatcttttccctggcacacatgcggtgcctgtcttatagctagtgaaggtttgtccacgtctgcctgtattttggaatgggtgaggataccttgtcacctcagtttgttgaagatattgcgcatctgtttttgtcttttctagttgtctattttttttttcgtgggatttaaataaattcaaaaactatgctgccactgcttccatcttccttgtataaaattttgtgatgtttaagaatatttaatgaggccgggcatggtggttcatgtctgtaattccagcaatttgggaggccatggtgggtggatcacttgaggtcaggagtttgggaccagcctggccaayatggtgaaaccccatctccactaaaaatacaaaaattagttgggtgtggtggcacatgcctgtagtcccagctactcgggaggctgaggtaggaggatggcttgaatccaggaggcagaggttgcagtgagccgagatctcgccactgcactccagcctgggcgactgagcaagactcag

SEQ ID NO: 707422 - DNA, 1255 bp, Homo sapiens
aagctgactatcctgtcaccacagtcacctacatgttgaaaatgacaagtgaatcaggcttatataaaatgctacaaggtacacaaaaaaatagaaataatagtcacaagatatttttctctgctgttttccccattgtaaataatgtattagctagtccttgttttgcctgagacattaagaaacactaaaatttaacatttaagttgacacaccaaagattctatttctaataaagtacattatacgtagagttatatacatatccatcwgtgaatcagtagcatcatgataatatactttaacttgtatattactttataattaaaaagcatttcatgtataacatcacggtcttgtttcatccatagaaaacctgttgaataggcaaataaagtattattatcctcttttgtacaaattggaaaagtgagtcacaggagtaatatgtaaatatctcaaggtctcacggctaataagtggcagcaaaagaatactatttttgcttggatatattcagacatgagcattctggaagcccaaaagcatgggagaatattataatagaggcatactccaggcctggggcaaagggaggaactggagaactaaccaataagaatactctactgccacctaacaaattctgcaagtgattattattagaacatccagttaagtgggaagcaatgaatgtggttaataggtaatatttaagagttgtatctacagcaacaatgattctgagctctctttccgtatagctaagatccagacaaggaagtatggatagggtaaaatagcttctagaatgatagcgagaagcataaggaaaaacatgtgggcctctgctaaatgaactgcaagtttaaagttgatccaagcccataaagattttgtattaattggaaagatggtcaattaaggaatcagagcagaatctgagtcttacagcctgacaataatcagggaatgttgcaatactgttactacacacaggtaagagtttcaccttggtgcattagtccctgcttttaattgattaaaaggatgacttggttgggattaagaagaatcaatggcgttagattatctgttctcaaatgaaggggagtggcttagtttcagctgttacttgggcatctctcatcccttctcttaaataaggtcaagatttaaaaagtgtgatgctggtagaagatattttctggtcattggttcagctatagttaacctgatgctccattattccaaa

SEQ ID NO: 707423 - DNA, 1255 bp, Homo sapiens
aagctgactatcctgtcaccacagtcacctacatgttgaaaatgacaagtgaatcaggcttatataaaatgctacaaggtacacaaaaaaatagaaataatagtcacaagatatttttctctgctgttttccccattgtaaataatgtattagctagtccttgttttgcctgagacattaagaaacactaaaatttaacatttaagttgacacaccaaagattctatttctaataaagtacattatacgtagagttatatacatatccatcagtgaatcagtarcatcatgataatatactttaacttgtatattactttataattaaaaagcatttcatgtataacatcacggtcttgtttcatccatagaaaacctgttgaataggcaaataaagtattattatcctcttttgtacaaattggaaaagtgagtcacaggagtaatatgtaaatatctcaaggtctcacggctaataagtggcagcaaaagaatactatttttgcttggatatattcagacatgagcattctggaagcccaaaagcatgggagaatattataatagaggcatactccaggcctggggcaaagggaggaactggagaactaaccaataagaatactctactgccacctaacaaattctgcaagtgattattattagaacatccagttaagtgggaagcaatgaatgtggttaataggtaatatttaagagttgtatctacagcaacaatgattctgagctctctttccgtatagctaagatccagacaaggaagtatggatagggtaaaatagcttctagaatgatagcgagaagcataaggaaaaacatgtgggcctctgctaaatgaactgcaagtttaaagttgatccaagcccataaagattttgtattaattggaaagatggtcaattaaggaatcagagcagaatctgagtcttacagcctgacaataatcagggaatgttgcaatactgttactacacacaggtaagagtttcaccttggtgcattagtccctgcttttaattgattaaaaggatgacttggttgggattaagaagaatcaatggcgttagattatctgttctcaaatgaaggggagtggcttagtttcagctgttacttgggcatctctcatcccttctcttaaataaggtcaagatttaaaaagtgtgatgctggtagaagatattttctggtcattggttcagctatagttaacctgatgctccattattccaaa

SEQ ID NO: 707424 - DNA, 666 bp, Homo sapiens
atttaaatggcctgttcctgccttaactgatgacattccaccacaaaagaagtgaaaatggctggtccttgccttaactgatgacattaccttgtgaaattccttctcctggctcatcctggctcaaaargctcccccactgagcaccttgtgaccccccactcctgcccgccagacaacaatccccctttttcctttacttacccaaatcttataaaacggccccacccccatctcccttcgctgactctctcctcagactcagcccacttgcacccaagtgaaataaacagccttgttgctcacacacacaaaaaaaataaaataaaatttactaaacacaatttgaatgggtctaaacaatccatatcaatacactaaattaaattactgttattcatcttattatttgtattaacttgcttccaaatgtgtcattataaggaacattgcagtgaacatctttgcacatatatcttcatgagtactgtttacttagaataaatttatcaaagacaagttgttaatttaaaatatgtgatttgttcaagacactttatatatatttgtatctatatatatatatatatatatatatatatatagtattggaagaattgggaccagcatgcattctcaataattatatgagaattgtagtttccc

SEQ ID NO: 707425 - DNA, 666 bp, Homo sapiens
atttaaatggcctgttcctgccttaactgatgacattccaccacaaaagaagtgaaaatggctggtccttgccttaactgatgacattaccttgtgaaattccttctcctggctcatcctggctcaaaaagctcccccactgagcaccttgtgaccccccactcctgcccgccagacaacaatccccctttttcctttacttacccaaatcttataaaacggccccacccccatctcccttcgctgactctctcctcagactcagcccacttgcacccaagtgaaataaacagccttgttgctcacacacacaaaaaaaataaaataaaatttactaaacacaatttgaatgggtctaaacaatccatatcaatacactaaattaaattactgttattcatcttattatttgtattaacttgcttccaaatgtgtcattataaggaacattgcagtgaacatctttgcacatatatcttcatgagtactgtttacttagaataaatttatcaaagacaagttgttaatttaaaatatgtgatttgttcaagacactttatatatatttgtatmtatatatatatatatatatatatatatatatagtattggaagaattgggaccagcatgcattctcaataattatatgagaattgtagtttccc

SEQ ID NO: 707426 - DNA, 966 bp, Homo sapiens
cattttgactggggaatggttttatgccttgggcctcaaaaacgttccaggcgttttggtcacaggaaagtgaccgccagaaaagaggtggggacaactgagactcatgtgagtctgatggaaacttggggggaacaacgtgttagtacttggacctatttctgagcaatggagaggaagcacgcaaacacacttgtaaggcacctacaccatgccgggtctgtgcaaggcagggagctgagcagtggccactcacctgcttgggcctcccttctaaagctgcagcctgtccacttctctctgttggcggaaggcagaaaaacctctctctctccatttctttctgtctctccatctctgtctttcrgtctctgccttgctgtttctgcctttctctgtctctgttctctgtgtctctttgtctctgtctctgtctttctgtttttctctgtgtctctgtctctgtgtctatttcggtctttgtgtctgtctcttttttccatctctctttgtcatctgtccttctctctgtctctgtttctgtctttgtctctgtttctctgtctgtgtccatctctgcctctctatctcttttttatctctctttatctttctgcctctatctctttctctatttctctctctgtgtttttcttttatctctgtttttctgtctgtgtctgtctttctccctgtctctgtctctgtgtttcttctgtgtctctctgtctccgcctccttatttctgtctctgtctctttccatctctctcaatctctgtgtttcttttttatctctgtctctctttcacagcatgcacacacacacacacacacacacacaggtgggtctttaggcagaaatgattctttttatttaaccaagaatgaattgggctgaaacacacacatttttgccattttcagtttatcaaaaagtatatgtacatatgtgtgtgtgagtgtg

SEQ ID NO: 707427 - DNA, 522 bp, Homo sapiens
cccccaaatttctacattgaagttctgaaaccccgagtaccttagaaagtgaccttatttggaaatagaacctttgcagttgcaattaggcaagataaggtcatacctgagataaggcccctaatccatatgactggggtccttataaaagggggaaacttggacttagatgcatggagagaagatattgtgccgatccagagagaatgccatgggaacatggggatggctgccacaagccaggggacacctggggacaccagatgctggagaagctggaacggatccttcctcgaggcttcggaargtgccaactatgccgacaccttgattctacactgccagcttctggcactgtgggaccatggatttccactgttctatgccacctcattcatggtgctttgttacagcagctccggcaaactaacccaccttcagatccaagacagtgtgcacagcactccggaggaaaattcccaacaagtcacatatttttaaaaattcatatcaatgagaagt

SEQ ID NO: 707428 - DNA, 588 bp, Homo sapiens
ggctgcagtgagccatgattgtaccactgcactccagcctgggcagcagaggaggactctgtctcaaaaaacaaacaagaacacctttttaatctgttaactcatggtttgtttaagattttcttttggccatttttgatgccttttttttgagacagattctcactctatctcccaggcgggagtgcagtggtgtgatcatggctcattgcaccctcgacttcccagaatcagatgattctcctacctcagcctcccaagtagctgggactgcaggcacacaccaccatgtccagctaatttttgtattttttgtagagactgggttttgccatgttgcccagagtggtcttgaactcctgggctcaagtgatccacccaccttggcctgtcagagtgctgggattataggcatacgccagctgcacccagcccatttttgatatctaaaatctttcatcatagtttagtcagccrtatttttcctagaatttttttaaactattttgtcttgctatcaagctattactctgtagttttacatacattctttattttaactaaactgttatgagcaataatttgtga

SEQ ID NO: 707429 - DNA, 1000 bp, Homo sapiens
aggtaggatctcactctgtcacccaggctggagtgcagtgatgcaatcatggctccttgcagcctcaacctccctggctcaagtgatcctccctctactcagcctccacagtagctgggactacaagtgcataccaccacacccggctaaagtttaaatttctagtagagacaagatatcactatgttgccctttcttccttcaccaaagaaagctgataaactggcttattatataacaaggaattctcattttattctatttatattgtattcttattctttaatttcagtgatgcgaagcagtgttttttggaggttttgagtgtgagctttctcatcagacactgaagtttttgagccttaactccattacttaattagctgtgtgacccagaccacttcattgtacagctccgttcttgtgctggggagggcattcacacaaaatacaatgaaattgtgcttyctggtggttctgatgtggctttaggcaagttcattaaacactgcgctttcaataagataatgcatgtggaatgctgagcacagtgcctttaagacacttaactggatatgagaactgttccatagcccttcatttttaattttgattaagagttgtttactaataactaactgggtgagttataaatggagaagtagggtcactgtgaagtggctatgaaatagcacagaggatatatttaaaaagctgtatttttactacatattttcaaactacatatttcattttagtttggagaactttactgaagaataaagaagtagtagtatgtgagtttggatcatttctatggttaggtggtggctgcactaaggcctttccaatgcttagtcctgtgagaggtagatagcgttgtggggggtaggggagaacagataaatgagatacatttatatttttttgcatggtaacttataaggcattgccaagagagggaattcattggaggcaaagaaaaatataaaacatagtg

SEQ ID NO: 707430 - DNA, 625 bp, Homo sapiens
agtcagctgacaacctggtataacacattggcttataaaaggcttctcagttctccttgaagaggtccttcacttcccttgtaagttggattcctaggtattttattctctttgaagcaattgtgaatgggagttcactcatgatttggctctctgtctgttattggtgtataagaatgcttgtgatttttgcacattgatttttgtatcctgagactttgctgaagttgcttatcagcttaaggagattttgggctgagacaatggggttttctagatatacaatcatgtcatctgcacacagggacaatttgacttcctcttttcataattgaataccctttatttccttctcctgcctaattgccctggccagaacttccaacactatgttgaataggrgtggtgagagagggcatccctgtcttgtgccagttttcaaaggggatgcttccagtttttgcccattcagtatgatattggctgtgggtttgtcatagatagctctttattattttgagatatgtcccatcaatacctaatttattgagagtttttagcatgaagggttgttgaattttgtcaaaggccttatctgcatctattgagataatcatgtggtttt

SEQ ID NO: 707431 - DNA, 1384 bp, Homo sapiens
ttagactatctccacatcttctgagctacaaatctaggacaatgaatccactttttgaaaggttgacataaattttcagtagttaacttatgtaatgagcagcatgtcaggagcaaaccaagaaagcaagaacagacrttctggcgctaagatgccactctgctaatactaaactagttcactgaatcagaactattccaaaatggacagctcagcaggtttagtgatatgtctggaacagtggaataaatttggtttcctaacttcaatctgacagctttattttttaatataatagtaccgtctttacattcaaaaaccattgtgaactttctccgttcaaagcattgtgataggtagtacagcaaaaacatagatagatataatattcccttctttcctttcttccttcactcagcatgtatttattgagcacttattgggacaggcttgcaagggtgagtgtgagaaagcataatctccactcttacagggcttaaggtcctttgaatgtaacagatatgaatcaaacaaccacacaaacaaatataaaattgtcacagtgataagtgctatataagagcactacatagaattgtgagagtatatattaagattttgcttcattgagggagtcagaaaagcctgtttgaggaaaatatagcctgatctgagaaataaagaatgaatgacagttatcaggcaaaataggaaagaaagaatattcgaggcatagagaacagtatatgcaaagatcctgtcgtgggataaaccacattgaatataaaggtctgaagaaaagccagagactaaagagagcaagggggaatgtggtgggggaaagttcaagatggtaggagcatcccaggccacaaagagcattacatgacattgaagggcagtggggaaaacgtatgagaaagagaggaggtgggaagtaggagaggaggcagagtaggggtaacacaacaaacagttaagagactactgtgaccaagagagaaacaattgtaattgtaactggatttggtggtgataatagtacagagaaggaaaaatctatggatttgagagctatctatgaagtaaaatctaccagttaggtgatggattgattctccacgagggagaggcaatatgaaggacaactgttgggtttcttgtacagctgggtggattcaggtgatagggaagtggggaatgagatctaatttgggctggagaagtaattacatctcttacactttcttagtgtcctcatgactagtagtagttacaggatgatttgattatccatttagccaacaaatatatgctgactatcaattgtgtccaaagttatggtaaagtaatgttgacaagtgcaaaggcaaataaaatccgg

SEQ ID NO: 707432 - DNA, 1384 bp, Homo sapiens
ttagactatctccacatcttctgagctacaaatctaggacaatgaatccactttttgaaaggttgacataaattttcagtagttaacttatgtaatgagcagcatgtcaggagcaaaccaagaaagcaagaacagacattctggcgctaagatgccactctgctaatactaaactagttcactgaatcagaactattccaaaatggacagctcagcaggtttagtgatatgtctggaacagtggaataaatttggtttcctaacttcaatctgacagctttattttttaatataatagtaccgtcyttacattcaaaaaccattgtgaactttctccgttcaaagcattgtgataggtagtacagcaaaaacatagatagatataatattcccttctttcctttcttccttcactcagcatgtatttattgagcacttattgggacaggcttgcaagggtgagtgtgagaaagcataatctccactcttacagggcttaaggtcctttgaatgtaacagatatgaatcaaacaaccacacaaacaaatataaaattgtcacagtgataagtgctatataagagcactacatagaattgtgagagtatatattaagattttgcttcattgagggagtcagaaaagcctgtttgaggaaaatatagcctgatctgagaaataaagaatgaatgacagttatcaggcaaaataggaaagaaagaatattcgaggcatagagaacagtatatgcaaagatcctgtcgtgggataaaccacattgaatataaaggtctgaagaaaagccagagactaaagagagcaagggggaatgtggtgggggaaagttcaagatggtaggagcatcccaggccacaaagagcattacatgacattgaagggcagtggggaaaacgtatgagaaagagaggaggtgggaagtaggagaggaggcagagtaggggtaacacaacaaacagttaagagactactgtgaccaagagagaaacaattgtaattgtaactggatttggtggtgataatagtacagagaaggaaaaatctatggatttgagagctatctatgaagtaaaatctaccagttaggtgatggattgattctccacgagggagaggcaatatgaaggacaactgttgggtttcttgtacagctgggtggattcaggtgatagggaagtggggaatgagatctaatttgggctggagaagtaattacatctcttacactttcttagtgtcctcatgactagtagtagttacaggatgatttgattatccatttagccaacaaatatatgctgactatcaattgtgtccaaagttatggtaaagtaatgttgacaagtgcaaaggcaaataaaatccgg

SEQ ID NO: 707433 - DNA, 626 bp, Homo sapiens
aattttgtctgtatggatgacaccttgtactaagtagattattaatgcttacattttgtttcttggggggtactttaagactgcataattcaatcttggatccttagaatcctaaacttttagaattggaaacatccttaggtatcatctagtctttcatttcccaaaaggtgttctagagatgtttataaatgcaaagggacagaagaaatactttgagtgaatgtggcttaaacaaagtcaagcaggtttatttactgctggggtttttgtaacattcaatatactactttatactctaaatttctaaaagggggcaacaacttgttgcatttccctaattaattggagaatgaattctttttattaaaacatgtctcctagaaaatgttctgtagggttaggaaaacactgacctaattcagtatcattattttatctataaagagattgaagctcaggactgccagatttaacaaattacaatgcaagtcttctagcaaaatttgaatttcatgtaaataatgaataactttttatcatttgcataaggcatacttayactgtactaaaaatatattacttatatgaaatttacatttagctgagcattctgtatttttgtc

SEQ ID NO: 707434 - DNA, 2103 bp, Homo sapiens
  misc_feature 1459, 1462, 1464, 1476, 1495, 1496, 1497, 1498, 1499, 1500,1501, 1502, 1503, 1504, 1505, 1506, 1507, 1508, 1509, 1510,1511, 1512, 1513, 1514, 1515, 1516, 1517, 1518, 1519, 1520,1521, 1522, 1523, 1524, 1525, 1526, 1527, 1528, 1529: n = A,T,C or G
  misc_feature 1530, 1531, 1532, 1533, 1534, 1535, 1536, 1537, 1538, 1539,1540, 1541, 1542, 1543, 1544, 1545, 1546, 1547, 1548, 1549,1550, 1551, 1552, 1553, 1554, 1555, 1556, 1557, 1558, 1559,1560, 1561, 1562, 1563, 1564, 1565, 1566, 1567, 1568: n = A,T,C or G
  misc_feature 1569, 1570, 1571, 1572, 1573, 1574, 1575, 1576, 1577, 1578,1579, 1580, 1581, 1582, 1583, 1584, 1585, 1586, 1587, 1588,1589, 1590, 1591, 1592, 1593, 1594: n = A,T,C or G
tgaaatttattttcttatagttttggaggctgggagtccaagataagggtaggttcactgtctggagagagcccagtatccacttccaagatggcgccttgttgctgcatcttcttgaggagagaaacactgtgtcctgctatagtgaaggaacccaaaggatgagaaaggagcaaatttcctctgtcaagatcttttataattgcattaattccattcacaaaggtggagcactcatgattcaatcatttctcaatatcaatacctctcaatgctattgctttggggtttgaagtctaacacgaattcggggagtttggtgaggggggcacaagcattcgaacaatagcaaacatggaattgttgaaatgaaaaatgaaaataacgacaaagtttgaaaatagaattaattcacgactaaataatactaaacggcaagttactatgatggatgctgaatttaaaaattatcagagaacatagaaccgaaagacagcactaggtctatctacgttatatccttatacctaaaaatatgcacatactgtgcaggattgtgtaagggcagagaatttttcctccccctctgaaggtttgagtctgtgaaaatgaactgacaacaggcaggttaacaggagaaaaggcataaaatttactgatgggtagaagcacaggagccatactaaataaaagactccaagagggcccaggtgaccgaagttttcaaactgtcctgaggctacaggttatgggaggtgagaggaggtgagcatgtccttagaaatagtagatagtagtctgtggtaaaagcctctgtcagaccactaaaagaatcagacctttagtttctttttgctgtgacttacgtatctcctacatcaagataaacagataaggagtcctcagaggaagcctgtttgcatccccacaaatgcaaatctgctgcacaagaggcagcttttcagggctattcccctctctgcatcctctctaaatagttatatcaaaagatccccaaaaagtatattttagggtggcatattttgttattcctgaaattgttaaagttctaaagtgaaatccaacagatttttaatagtgtctaggaaagggggtggaataggaggctgtagaaacctgaatgcaatatttttattattaaagaaacgtgaatttctgtataaataatgtaactaaatgtaattttaaataatattaatcgatagacttattttcaaataaagtaatatgaagtaatataaaattattacgttatgtatctcaagcttaaacttaattggaagtcaaattaatatatatatatattctatctcaatataaatttttatatatataaatataggtatggtcggttattcccatctagtctaaccaaaaagagaaaagtgaaaagaaaaataaaagaaaaaagaaaggaagaataacacttttgggtttnctntnaccctcgatgtncgcttttgcacccagtctnnnnnnnnnnnnnnnnnnnnnnnnnnnnnnnnnnnnnnnnnnnnnnnnnnnnnnnnnnnnnnnnnnnnnnnnnnnnnnnnnnnnnnnnnnnnnnnnnnnnttacattttgagaagaaagatttcctgctaaagtagaatgtggtaaatttatatactaattatttttatatgaaatggtatgtaagtcctcacttaaccttgtggatagttttctgaaaactatgagcttacatgaaattatatacagaaggttctagattaaatttgtttctttcaatgacattttttataaygttgttgagaaaaacaattgctttgtaatacatcatttcacttaaagtcaatttcccacaaactacagatgatcttaactcagaacttactatatgtatatatatggcatatttttatgaaattttataaatcatactataatttctaaaaatgtaacaaattttattatagctttgctcagcattctaattatgttttgaacattcatacttattttaacagtaatctctatatcactgaattagaagcatacattttaaaaagcctaaatttttaatgctataacttctttattattattatgtaagttaaaa

SEQ ID NO: 707435 - DNA, 2296 bp, Homo sapiens
ggatcccttccttacaccttatacaaaaattaattcaagatggattaaagacttaaacgttagacctaaaaccataaaaaccctagaagaaaacctacgcattaccattcaggacacaggcgtgggcaaggacttcatgtctaaaacaccaaaagcaatggcaacaaaagccaaaattgacaaatgggatctaattaaactaaagagcttctgcacagcaaaagaaactaccatcacagtgaacaggcagcctacagaatgggagaaaattttcacaatctactcatctgacaaagggctaatatccagaatctacaatgaactcaaacaaatttacaagaaaaaaacaaacaaccccatcaaaaagtgggcgaaggacatgaacagacacttctcaaaagaagatatttatgcagccaaaaaacacatgaagaaatgctcaccatcactggccatcagagaaaaatgaacatttcaaagatgtgcttccaaatgccaaatcatcactaaaaagctctgtggcatagaggaaatttcacaaccttttagtgcctcaattttgtggaagaatggttaggaggctattgcaataacaaaagaaaatttgaatagctgtatccaacatgaaaagattgctagtagaattaaatgagttactataggtaaaacaatcagggaagtaattaaagagaatctgcactaacattgttttattaatttaaaatatctgtacacaatcctttgactcatttggaattagttttagtgtattttagaaaataaggtttattttttattttctcccaaaacaattcttcaagacaacttttcgaacagtaaattccttctttgtttataatatgtattttaataaagtcacttatcttcatgatttctaggacatcggttctatctaatctaytgttcagcattcgtctgagtattttctgagcagcaattaacccctctgtacctctgagtgcccacatttccttgatccatttcaccttgctgatcaatccttctttactcatagtctaaattttttttttagaacttctgagagtgccccaaaccttggtcttgggtcttccttcaatcttatttgtctttccacctgatcttaattatttacatcacattataccctatctttatggtgacaaatctcaaaattatctctctgacctaaacttatcattaaagatttggttgcaacttattaagaagtcaggttcaatgtaatacatgcattgttgatttaataagctcatcaaaatacttaaaattttatttgaatgcaaaaaaataaagcttttaattttatctcctatttaataattttgacaaaaacattataccaatcattactaattattgctggcttttaaaatattatctgattaaatatttttgacttggaaaaatggtaacaaatgcttctctctttcttgtccccttgaaccatacttgatattgctttttccaaatccgggccacaagttcagaatataacctgttaaaatatcttctgtgtataaactatctttaaattttcttgagagaatactgagtaaccaaaagcattgctccttcaccctacaaaagagagaaaaattaaaaaatcacattaatttgtaattttaaatggtaattaaagctattgtgagggctcttttatcggccaaacttgtgaacaaaaaacagctcaaatttatgtgtaaataaaatatattgagatgaagcctttcattcaatgtgtgattttcagttcaaaaaaacacactgatgttcaagaacaaagactggtacaataactatctacaaaatgcttttgttactagattttaattccttcatcaaacagacacagtcaaagttgatagtgtcactagatctagaggtctatcaatatccttcccaccatttaatatgttcttaatctcagggaaattctaaatcatattcttctaaactgtacagttgactcctgaaaaacacaaggtttagggccatcaaacctccctaacccctccccaccaccccagcacagtcaaaaattcacatataactttggactccccaaaactaaactaacagcctactgttgactggacaatccttaacacatatttcatacgctgtatgtattttacaccgtagttttacaatgaagctagttacagaaaagaaagtgttattaagaaaattatagggaagaaaaaatacgtttacagtactacagtatatttatttctctcataagtttacaatcctgtgtttacaagatggatcc

SEQ ID NO: 707436 - DNA, 1324 bp, Homo sapiens
aaactatgtttttttcctctcacttgttcttattttatatatcattttaattgaggaaatcattgagcataatgtaacaaatattttcataagttattataaagagggtttgaaggacttgttagaaagtgtctggcagtggaaaaaacatctgaatagaaaatgaaaatagcatgtgaatgctgaaatagcgtattaaatagctgcaactctaatataatttacatttggattttagtatagacagaatacttaaatttatttctgcagtcttttcagttgttaaacattttattgaactcttcatgtgcctttcagatgtattgtgcttcaagtgtgcttgtaccagctttttctgtttagaaatgcttgagtgtctccattgtcaaaacgatcagaaggcagtaattgtatttccaatgtgaggacaaacaatactagatatcctgcgatcctacattgtaaaaaatattcccatcaaatgccccaatggatagccacgtaagtgatcatctgtaattatttagtcaagaaatgaatattttacatgtaaatactttgaatggcttaatacaaactaaatttttcagaatgcaaccactayggaaattgaagagaaaaagtctttttattgtagaaacttcccagagtctttcaatatttacaaaaattatgttgccaatggcaataccttagttatttgaatcaccagtagaacacactataaaaacatgcattgtcacatctgtaccctgtcacatccaggataacgataatattgagatatataactatttagcccttattttaaaacatcaggtaacaagcatcaatcaatttctatcaaatgtttcaacttgggtattacagcataagcagaaatatactgttaccaatatcccagccaatttcttttcctaatgaaacaataaaactgagaatatagagaccatttagtaaagctgatatatatatatatgtttgcatatgtgtgtgtgtgtatatatacatataaatgtaattaatacagtagatgaggtcaaagaagcaagtgatacacaacttttaatttggatgggatgtccttgaagattcctgtattagtcctttctcacattcctatatgaaaatacctgagactgagtaatttattaaagaaagaggtttaattgactcacagttccctatgactggggaggcctcaggaaacttacaatcgtagtggaaggtgaaagggaggcaggcactttcttcacaaaatggcaggaaaaagaaggatggaaggaggaacttgccgaacagttgtaaaaccattagatctcga

SEQ ID NO: 707437 - DNA, 1324 bp, Homo sapiens
aaactatgtttttttcctctcacttgttcttattttatatatcattttaattgaggaaatcattgagcataatgtaacaaatattttcataagttattataaagagggtttgaaggacttgttagaaagtgtctggcagtggaaaaaacatctgaatagaaaatgaaaatagcatgtgaatgctgaaatagcgtattaaatagctgcaactctaatataatttacatttggattttagtatagacagaatacttaaatttatttctgcagtcttttcagttgttaaacattttattgaactcttcatgtgcctttcagatgtattgtgcttcaagtgtgcttgtaccagctttttctgtttagaaatgcttgagtgtctccattgtcaaaacgatcagaaggcagtaattgtatttccaatgtgaggacaaacaatactagatatcctgcgatcctacattgtaaaaaatattcccatcaaatgccccaatggatagccacgtaagtgatcatctgtaattatttagtcaagaaatgaatattttacatgtaaatactttgaatggcttaatacaaactaaatttttcagaatgcaaccactacggaaattgaagagaaaaagtctttttattgtagaaacttcccagagtctttcaatatttacaaaaattatgttgccaatggcaataccttagttatttgaatcaccagtagaacacactataaaaacatgcattgtcacatctgtaccctgtcacatccaggataacgataatattgagatatataactatttagcccttattttaaaacatcaggtaacaagcatcaatcaatttctatcaaatgtttcaacttgggtattacagcataagcagaaatatactgttaccaatatcccagccaatttcttttcctaatgaaacaataaaactgagaatatagagaccatttagtaaagctgatatatatatatatgtttgcatatgtgtgtgtgtgtatatatacatataaatgtaattaatacagtagrtgaggtcaaagaagcaagtgatacacaacttttaatttggatgggatgtccttgaagattcctgtattagtcctttctcacattcctatatgaaaatacctgagactgagtaatttattaaagaaagaggtttaattgactcacagttccctatgactggggaggcctcaggaaacttacaatcgtagtggaaggtgaaagggaggcaggcactttcttcacaaaatggcaggaaaaagaaggatggaaggaggaacttgccgaacagttgtaaaaccattagatctcga

SEQ ID NO: 707438 - DNA, 1324 bp, Homo sapiens
aaactatgtttttttcctctcacttgttcttattttatatatcattttaattgaggaaatcattgagcataatgtaacaaatattttcataagttattataaagagggtttgaaggacttgttagaaagtgtctggcagtggaaaaaacatctgaatagaaaatgaaaatagcatgtgaatgctgaaatagcgtattaaatagctgcaactctaatataatttacatttggattttagtatagacagaatacttaaatttatttctgcagtcttttcagttgttaaacattttattgaactcttcatgtgcctttcagatgtattgtgcttcaagtgtgcttgtaccagctttttctgtttagaaatgcttgagtgtctccattgtcaaaacgatcagaaggcagtaattgtatttccaatgtgaggacaaacaatactagatatcctgcgatcctacattgtaaaaaatattcccatcaaatgccccaatggatagccacgtaagtgatcatctgtaattatttagtcaagaaatgaatattttacatgtaaatactttgaatggcttaatacaaactaaatttttcagaatgcaaccactacggaaattgaagagaaaaagtctttttattgtagaaacttcccagagtctttcaatatttacaaaaattatgttgccaatggcaataccttagttatttgaatcaccagtagaacacactataaaaacatgcattgtcacatctgtaccctgtcacatccaggataacgataatattgagatatataactatttagcccttattttaaaacatcaggtaacaagcatcaatcaatttctatcaaatgtttcaacttgggtattacagcataagcagaaatatactgttaccaatatcccagccaatttcttttcctaatgaaacaataaaactgagaatatagagaccatttagtaaagctgatatatatatatatgtttgcatatgtgtgtgtgtgtatatatacatataaatgtaattaatacagtagatgaggtcaaagaagcaagtgatacacaacttttaatttggatgggatgtccttgaagattcctgtattagtcctttctcacattcctatatgaaaatacctgagactgagtaatttattaaagaaaraggtttaattgactcacagttccctatgactggggaggcctcaggaaacttacaatcgtagtggaaggtgaaagggaggcaggcactttcttcacaaaatggcaggaaaaagaaggatggaaggaggaacttgccgaacagttgtaaaaccattagatctcga

SEQ ID NO: 707439 - DNA, 2594 bp, Homo sapiens
cctggccatttttctctgtttctattagtatttcataattttttcaacatcaagaaaccaggattctatttgatatgttctagttaagacatgttaatgatctttattttctatgcttcagtaatgagcaattcacacttaaatgaataaaattagcttttaccttcagctggtaaagttgaccctcaagtctgagctgaagattttctcagaaactttcaaatcaagatctagatctccacagataagaataatggagtgactccaccagtagattttacctacagaaaaagcaataatttattagaactttgtatgaaggaaaggtgctgtgtagttattactgaatcatgtaaacataccaagtctccaaatagtactgaagttttttatttctactcattaggcaaatacatactagttaacattttttgaaagcttcctatgttgctgtatgtaactacatttgtctcttttttttgttttgtttttgagatgaagtctcgctctgtggcccaggctggagtacagtggtgtgatctcagctcactgcaacctccttctcccaggttcaagcgattctcctgtctcagcctcctgagtagctgggactacaggtgcgcaccaccatgcctaattaatttttatatttttagtagagatagggttttgtcatgttggtcaggctggtcttgaactcctgacctcaagtgatctgcccgccttagcctgccaaagttctgggattacaaaaatgagacaccgtgcctggcccatatttgtttcttatcattgatgtcattttgcggatgaagaaaatggaacacagctagtaaatgacagtcacaatttatacccaaggattctggctctaggttctgagttcttaatcacagaacaaccttaacacactgtcttgacataggtccatatactctaggaaaaagttttaaaacttagatggtatgaggaatcctatatggtttattcccatttgattgctagtgcttctcaaaaatatgtaaatgtcatctaaaattcaaaatactatagtcagggtgagatagtgacaagagactgaatcaagggtagacaacctgggtatttgagacagaggaccaagcaatgggctatgtgttcacgacatatctgaaactctcctgtgcctaaaaacttaggcttttgggctagatgaccagaaatgtgcttttagttgtaaaaaagaagcatacactgtgaaacccctgacctcctccatcaccaatctgttaccttctttctgagtagtcattcattacctattcttctaggctttagtcgaaatctctctcttttctctctctgccaactggtctcttgtttcactttacactttgttaatgcaggtctattctggacaatttagcatttcttaggataacagacaattcgatttgttcatttgaacccttttagaaacaaagcaaagcataaagaaataaaaatgcataatgctcaatattccctaggtcttatatataataatatagcatgagcttgactggaagccctttcaggaaaaggaacaggctggagagcccggagcaagtggtaggatgctgggtgcactgtggacaacactgatgagctgtacatctccctccttcagggatatcccatgtttgctaactcagtgtgctgcatacatttacttacacttgcaaataagtaaacatgttgagattcaatatgtgaacttgaaacaaggcctgcagtcactatattttctaggtatttctgccaaagtaaacatttttccttggatcttgattctctgattctccaatcttgttttctttgtattttgctttgatcctgtcttgtttctgctgttcttcttgaacgtttaaaatgtgtgcctttgcctgtataaagggtaaagaaactctaaggtgtgcttgggcgtggaagctggctttgcaaataagaaagcatcttaaaggatcagtacacagtgttagtatccaaaatcaatggcattacggcctttctatcatcagagcgtgagaaagaatcaaacttccaacaaattgccataggaaatttctcttagccagtttctctagcctttgctacacaatttttttttctttgctttggaaatgtcctttttatttattttttcttttttttaaattttactttaagttctgggatacatgtgctgaacatgcaggtttgtcacataggtatacatgtgctatggtggtttgctgcacctatcaacccgtcatctagggtttttttgttttttgttttttgttttgagacagagtctcgcactgtcacctgggctgaagtgcagtggtgcggtctyggctcactgcaacctctgcctcccaggttcaagcaattctcttgcctcagcctcccgaatagctgggattacaggcgcccaccaccacgcccggttaattttttgtaactttagtagagatggcatttcactatgttggccaagctggtctcgaacgcctgaccccgtgatccacccgcctcccaaagtgctggaattacaggcatgagccactgcacctgggctgtcatctaggttt

SEQ ID NO: 707440 - DNA, 2594 bp, Homo sapiens
cctggccatttttctctgtttctattagtatttcataattttttcaacatcaagaaaccaggattctatttgatatgttctagttaagacatgttaatgatctttattttctatgcttcagtaatgagcaattcacacttaaatgaataaaattagcttttaccttcagctggtaaagttgaccctcaagtctgagctgaagattttctcagaaactttcaaatcaagatctagatctccacagataagaataatggagtgactccaccagtagattttacctacagaaaaagcaataatttattagaactttgtatgaaggaaaggtgctgtgtagttattactgaatcatgtaaacataccaagtctccaaatagtactgaagttttttatttctactcattaggcaaatacatactagttaacattttttgaaagcttcctatgttgctgtatgtaactacatttgtctcttttttttgttttgtttttgagatgaagtctcgctctgtggcccaggctggagtacagtggtgtgatctcagctcactgcaacctccttctcccaggttcaagcgattctcctgtctcagcctcctgagtagctgggactacaggtgcgcaccaccatgcctaattaatttttatatttttagtagagatagggttttgtcatgttggtcaggctggtcttgaactcctgacctcaagtgatctgcccgccttagcctgccaaagttctgggattacaaaaatgagacaccgtgcctggcccatatttgtttcttatcattgatgtcattttgcggatgaagaaaatggaacacagctagtaaatgacagtcacaatttatacccaaggattctggctctaggttctgagttcttaatcacagaacaaccttaacacactgtcttgacataggtccatatactctaggaaaaagttttaaaacttagatggtatgaggaatcctatatggtttattcccatttgattgctagtgcttctcaaaaatatgtaaatgtcatctaaaattcaaaatactatagtcagggtgagatagtgacaagagactgaatcaagggtagacaacctgggtatttgagacagaggaccaagcaatgggctatgtgttcacgacatatctgaaactctcctgtgcctaaaaacttaggcttttgggctagatgaccagaaatgtgcttttagttgtaaaaaagaagcatacactgtgaaacccctgacctcctccatcaccaatctgttaccttctttctgagtagtcattcattacctattcttctaggctttagtcgaaatctctctcttttctctctctgccaactggtctcttgtttcactttacactttgttaatgcaggtctattctggacaatttagcatttcttaggataacagacaattcgatttgttcatttgaacccttttagaaacaaagcaaagcataaagaaataaaaatgcataatgctcaatattccctaggtcttatatataataatatagcatgagcttgactggaagccctttcaggaaaaggaacaggctggagagcccggagcaagtggtaggatgctgggtgcactgtggacaacactgatgagctgtacatctccctccttcagggatatcccatgtttgctaactcagtgtgctgcatacatttacttacacttgcaaataagtaaacatgttgagattcaatatgtgaacttgaaacaaggcctgcagtcactatattttctaggtatttctgccaaagtaaacatttttccttggatcttgattctctgattctccaatcttgttttctttgtattttgctttgatcctgtcttgtttctgctgttcttcttgaacgtttaaaatgtgtgcctttgcctgtataaagggtaaagaaactctaaggtgtgcttgggcgtggaagctggctttgcaaataagaaagcatcttaaaggatcagtacacagtgttagtatccaaaatcaatggcattacggcctttctatcatcagagcgtgagaaagaatcaaacttccaacaaattgccataggaaatttctcttagccagtttctctagcctttgctacacaatttttttttctttgctttggaaatgtcctttttatttattttttcttttttttaaattttactttaagttctgggatacatgtgctgaacatgcaggtttgtcacataggtatacatgtgctatggtggtttgctgcacctatcaacccgtcatctagggtttttttgttttttgttttttgttttgagacagagtctcgcactgtcacctgggctgaagtgcagtggtgcggtctcggctcactgcaacctctgcctcccaggttcaagcrattctcttgcctcagcctcccgaatagctgggattacaggcgcccaccaccacgcccggttaattttttgtaactttagtagagatggcatttcactatgttggccaagctggtctcgaacgcctgaccccgtgatccacccgcctcccaaagtgctggaattacaggcatgagccactgcacctgggctgtcatctaggttt

SEQ ID NO: 707441 - DNA, 648 bp, Homo sapiens
tttctcagaagcattttgcaaaaaaaaggcaaataagctgtttcctgaaaaaaaaaaatacgtrtgtgtgtgtgtgtgtgtgtgtgtgtgtgtgtgtgttatggttccacacaccttaaattctagggttgggggctttgcttatcctataattgaggtgtcagcaaatgtttctgttaagggcaggatggcaaatactttcagttttgtgggccgtacagtctctgtttcagctgctcagtcacacacttacagctcaaaagcagccatagacagtacagaaaaggctggacctggctgtgttccaacaaaactttatttacaaaaacagatgatataagcaggagttgaattcatcaacattaccaatattattaaattgtggaaggtccaggtttcaataatcctgtcttaagcatagttttgtctgctagcactgaagttgagctaaaaacaactcaattgccatgggctagtgtctcagcaaaggagcacatgtaacaatgatcttttgtgtcttgaagaccatgcctcagaactgcttgaaaagtttccagcatcaatagaaggaaatgcatgctttctctttaaagtgagcttgagtcttaggaaacggcatatgtatgtaagccagtcaaacaggctgga

SEQ ID NO: 707442 - DNA, 648 bp, Homo sapiens
tttctcagaagcattttgcaaaaaaaaggcaaataagctgtttcctgaaaaaaaaaaatacgtgtgtgygtgtgtgtgtgtgtgtgtgtgtgtgtgtgttatggttccacacaccttaaattctagggttgggggctttgcttatcctataattgaggtgtcagcaaatgtttctgttaagggcaggatggcaaatactttcagttttgtgggccgtacagtctctgtttcagctgctcagtcacacacttacagctcaaaagcagccatagacagtacagaaaaggctggacctggctgtgttccaacaaaactttatttacaaaaacagatgatataagcaggagttgaattcatcaacattaccaatattattaaattgtggaaggtccaggtttcaataatcctgtcttaagcatagttttgtctgctagcactgaagttgagctaaaaacaactcaattgccatgggctagtgtctcagcaaaggagcacatgtaacaatgatcttttgtgtcttgaagaccatgcctcagaactgcttgaaaagtttccagcatcaatagaaggaaatgcatgctttctctttaaagtgagcttgagtcttaggaaacggcatatgtatgtaagccagtcaaacaggctgga

SEQ ID NO: 707443 - DNA, 1485 bp, Homo sapiens
atactttttgagtgtcagtatgctgaacagaaagatattttgaaatcagaaacccttaggctcaaatcttggctctgcctcttattgctatgcaacacaggggagctttcttagcgtcgatgatggtctgtttcttcatttgtaaaaggtgctatcacttaccttgcagagttggcataaggattagcaattgtgtattgtcaagagccttttcaataaatgatggcttttggaataactgttctcttgctatgttttcatcaaaaattgaaaagagctggccattatctttaacatagcatgtgtactttgtggacacctatcatttcaggaccactaactggtaaatatgctaaaacaacttcatggttcctgtagccccctgcttgttttgctccctggtcacccactttatctgcacctttttttctggcctrtagaccaaaagccactcctctctgtgtatagattatatttcttctgccttttgttatatgaattctaggaaatgtagttctttttagttttttgtttgttttcttttatataacctcttccaacttagttctgttttacaagcagttgatgatagccctaggtagatgcctgcttcaaactcaggctgatacggctggctcttgagtatccctgtacaaacgctgcccttcagggaacatcgtgtccagggctgctgcctccctccgtttgcagacctggtgctctgcgtctaaaactggtcactccttctcatctctccacttgagcacagccgcaaaggtagaaacagagttctgcaccccactttttgctgcacctcagttagcccaggaacatctacccctatttagctcagaagtgtgtagtcctgtttaaatacttaaaatttgctatgttctgtattggccaagaaatgttttctggtaagagcttctggtaggaagaggacctaaagctgccctcacaagacgatatttggttcatttgaaatagaaagttttgtttgcttttaatttttatttactgaactgaaaattggaaacagcccattgacttttctatcttatacagcatctcctcctacacatatttagtttcctgctcccttgaaatctgggcgacctactcctgttttcaagttttttctattttattattttggtccttagcatttctgccttttttgtatcttccaactttccatttcaaaagagaaggatcatatttttatatatttacatcccgtttgaatgtgtttaaggaacgcttagaaatgttcctttatgttttaaaatatcccttctgctaaagcaagtagcatatcatttcctgctttagttgcggcctcagtctgacaggccagggctaagtaagggtgaaaagttcaccgtccggaagtgctgttgaggtcagaatcacgtgatgaggagccgacccagactcccggtaattccctgagaatgtgaatctttgggagaaggagcacaa

SEQ ID NO: 707444 - DNA, 1486 bp, Homo sapiens
tgtgcgtgagggctgagaaactcagtgaggtgggaaacccaggatgctatggtttcctggacagcaagggaagagcatgtttcaagaagaagcagtggtcaaagcaaaaagaaaacgttaccaactccaaggaagattatgtaattgggagaaaggagtgcagaaccccacacgcagtccagcaacacaatgctgggaggtggggagggaagcctcgtcctgggtcacttgctgccaccaagtgtggaggggaatcccagacttcctgtttggtctttactgacactgtggaagcaggggccatgccttgcgtttgataggggtaggaggagtattgtcaacgtttttgttttgcgagattgcgcctttccctgttctttgactagacagaatagacttttcctagggctttttttctttttaagttgtgtttgcttgttggtagttgccatttacaggattttccggttccaagtccaggaaatatgggagataaaaggaaaacgcagagaactgaaccctgttcacacagattccttaaatcctgaagtccttgttagtctgctttcctccttcaacactttgtagttctcttaagtttatttgttgtactatgtctaggattttaaattatacttagccagggagaaacaagcccagaacaagaagtcctcatttttctttttttgttttctttgttgttgttgttttgagatggagtctgggtctatcgcccaggctggagtgcagtggtgtgatcagctcactgcaacctctgcctcctgggttcaagcgattctcctgtctcagcctctcgagtagctgggactacaggcatgcaccaccatgcttgactaatttttgtattttagtagagacagggtttcaccatgttggccaggctggtctcgaacccctgacctcaactgatccgcccacctcagcctcccaaagtgctggtattacaggattgagccactgcacccggccactttttctttttgataggagaaaatatttatttctgagggaaaggatctagttgaagggcagagatggagaatctaaacaataatttctggagaaatcccaaagggagggaaagggattaggagcagagatggagttgcaggttttacacaggaaaggggagattttatccgagaagaccaatttcctgattataagaacagagaaggcagattatagaattgttccagaagggggtatccaggtgggtttgatgtaaagaaaagagtgtgagagaattgaagatgctggaaagagaacagtttctttcaactcatttttgggttgaataagaaaggtagttgatgtcaagaggggactcactgggaggaragagaagaatctctagggagtggaaggccgtgggagactggatcatggctcctaaagatgtccacagcctcatcccagaacttgtgaatgttaccttacatggcaaagagagactttgtagatg

SEQ ID NO: 707445 - DNA, 1486 bp, Homo sapiens
tgtgcgtgagggctgagaaactcagtgaggtgggaaacccaggatgctatggtttcctggacagcaagggaagagcatgtttcaagaagaagcagtggtcaaagcaaaaagaaaacgttaccaactccaaggaagattatgtaattgggagaaaggagtgcagaaccccacacgcagtccagcaacacaatgctgggaggtggggagggaagcctcgtcctgggtcacttgctgccaccaagtgtggaggggaatcccagacttcctgtttggtctttactgacactgtggaagcaggggccatgccttgcgtttgataggggtaggaggagtattgtcaacgtttttgttttgcgagattgcgcctttccctgttctttgactagacagaatagacttttcctagggctttttttctttttaagttgtgtttgcttgttggtagttgccatttacaggattttccggttccaagtccaggaaatatgggagataaaaggaaaacgcagagaactgaaccctgttcacacagattccttaaatcctgaagtccttgttagtctgctttcctccttcaacactttgtagttctcttaagtttatttgttgtactatgtctaggattttaaattatacttagccagggagaaacaagcccagaacaagaagtcctcatttttctttttttgttttctttgttgttgttgttttgagatggagtctgggtctatcgcccaggctggagtgcagtggtgtgatcagctcactgcaacctctgcctcctgggttcaagcgattctcctgtctcagcctctcgagtagctgggactacaggcatgcaccaccatgcttgactaatttttgtattttagtagagacagggtttcaccatgttggccaggctggtctcgaacccctgacctcaactgatccgcccacctcagcctcccaaagtgctggtattacaggattgagccactgcacccggccactttttctttttgataggagaaaatatttatttctgagggaaaggatctagttgaagggcagagatggagaatctaaacaataatttctggagaaatcccaaagggagggaaagggattaggagcagagatggagttgcaggttttacacaggaaaggggagattttatccgagaagaccaatttcctgattataagaacagagaaggcagattatagaattgttccagaagggggtatccaggtgggtttgatgtaaagaaaagagtgtgagagaattgaagatgctggaaagagaacagtttctttcaactcatttttgggttgaataagaaaggtagttgatgtcaagaggggactcactgggaggagaragaagaatctctagggagtggaaggccgtgggagactggatcatggctcctaaagatgtccacagcctcatcccagaacttgtgaatgttaccttacatggcaaagagagactttgtagatg

SEQ ID NO: 707446 - DNA, 1486 bp, Homo sapiens
tgtgcgtgagggctgagaaactcagtgaggtgggaaacccaggatgctatggtttcctggacagcaagggaagagcatgtttcaagaagaagcagtggtcaaagcaaaaagaaaacgttaccaactccaaggaagattatgtaattgggagaaaggagtgcagaaccccacacgcagtccagcaacacaatgctgggaggtggggagggaagcctcgtcctgggtcacttgctgccaccaagtgtggaggggaatcccagacttcctgtttggtctttactgacactgtggaagcaggggccatgccttgcgtttgataggggtaggaggagtattgtcaacgtttttgttttgcgagattgcgcctttccctgttctttgactagacagaatagacttttcctagggctttttttctttttaagttgtgtttgcttgttggtagttgccatttacaggattttccggttccaagtccaggaaatatgggagataaaaggaaaacgcagagaactgaaccctgttcacacagattccttaaatcctgaagtccttgttagtctgctttcctccttcaacactttgtagttctcttaagtttatttgttgtactatgtctaggattttaaattatacttagccagggagaaacaagcccagaacaagaagtcctcatttttctttttttgttttctttgttgttgttgttttgagatggagtctgggtctatcgcccaggctggagtgcagtggtgtgatcagctcactgcaacctctgcctcctgggttcaagcgattctcctgtctcagcctctcgagtagctgggactacaggcatgcaccaccatgcttgactaatttttgtattttagtagagacagggtttcaccatgttggccaggctggtctcgaacccctgacctcaactgatccgcccacctcagcctcccaaagtgctggtattacaggattgagccactgcacccggccactttttctttttgataggagaaaatatttatttctgagggaaaggatctagttgaagggcagagatggagaatctaaacaataatttctggagaaatcccaaagggagggaaagggattaggagcagagatggagttgcaggttttacacaggaaaggggagattttatccgagaagaccaatttcctgattataagaacagagaaggcagattatagaattgttccagaagggggtatccaggtgggtttgatgtaaagaaaagagtgtgagagaattgaagatgctggaaagagaacagtttctttcaactcatttttgggttgaataagaaaggtagttgatgtcaagaggggactcactgggaggagagaraagaatctctagggagtggaaggccgtgggagactggatcatggctcctaaagatgtccacagcctcatcccagaacttgtgaatgttaccttacatggcaaagagagactttgtagatg

SEQ ID NO: 707447 - DNA, 588 bp, Homo sapiens
gagttatttcttaaggagcccccatacagcagttctggtttcccttccaaagcagtactgctacttctatcctaagggcgatctcatcgtccttcataacagagccagcatagtcatttcttgctgaagttagtctgactttgatttctgtcacttgttaccaatgttctgacctaaatatatttgtctgtatagattgcattctagatggggatagaaagataagtatagataagcaaggcttaaaaaggaagattgctgtgtcctagttaatcagctgagtcagggacagtgctgggcagaatttttttggttgtcagttttgtggtctttccactttcttgaagccatttttgtgaaattttcttctccagccagcctcagtctttatttaaaattacttaagtcagtgtcaccaggctttccctagggaaacaggcaatggcaaagtccactcttgcacaaaactcttgcaactctagagtcatgctgtgctgagtctccaaaccagaaatcccctttaactggaccctgtgtctgacttgatrcaaagtcaggtaaatagctactcaattggagagattcaag

SEQ ID NO: 707448 - DNA, 1023 bp, Homo sapiens
tttgttttctatcttcttgaattttttttttttttaacagaatctcactctgtcrccaggctggagtgcagtggcacaatcttggctcattgcaacctccaactcctgggttcaagcgattctcctgcctcagcctcccaagtagctgggactacaggcatgtgccaccacacccagctaatttttatatttttagtagagatagggtttttccatgttggccaggctagtctcaaactcctgaccttaggtgatccacctgccttggcctcccaaattgctgggattacaggcatgagccaccatgcccagcctcctctttgcttttatactgctttgatggttttgttaccccattcaggaacccataatggcttcctgttgtctgtggtcaaaactccagacctcaaactctggtatttgaggctttccacatcatggcttcactttccagctgtatttcccaacagtcttatatcacttccaaagtgcaacatttgtttttccatttgattaaaaaaaaaaacaatctggttgcttccaagatggcccaataggaacagctctggtctgcagctcccagcagcaagattgatgcagaagacgggtgatttctgcatttccaactgaggtacctgattcatctcattggtactggttggacagtgggtgcagccaacagagggtgagccgaagcagggcggggtgttgcctcacccaggaagtgtaaggggtcaggggatttccctttcctagccaagggaagccatgagtcactgtacctggaggagcagtacactgctgcccaaatgttgctcttttcccatggtctttgcaatgggcagaccaggagattccctctggtgcctggctcagcaggtcccatacccacggagccttgctcgctgctagagcagcagtctgagaaagaccttggatgctggagcttggcaggaggaggggcgtccaccattgctgaggcttgagtaggcagttctgtgctcacagtgtaaacaaagaggc

SEQ ID NO: 707449 - DNA, 1023 bp, Homo sapiens
tttgttttctatcttcttgaattttttttttttttaacagaatctcactctgtcaccaggctggagtgcagtggcacaatcttggctcattgcaacctccaactcctgggttcaagcgattctcctgcctcagcctcccaagtagctgggactacaggcatgtgccaccacacccagctaatttttatatttttagtagagatagggtttttccatgttggccaggctagtctcaaactcctgaccttaggtgatccacctgccttggcctcccaaattgctgggattacaggcatgagccaccatgcccagcctcctctttgcttttatactgctttgatggttttgttaccccattcaggaacccataatggcttcctgttgtctgtggtcaaaactccagacctcaaactctggtatttgaggctttccacatcatggcttcactttccagctrtatttcccaacagtcttatatcacttccaaagtgcaacatttgtttttccatttgattaaaaaaaaaaacaatctggttgcttccaagatggcccaataggaacagctctggtctgcagctcccagcagcaagattgatgcagaagacgggtgatttctgcatttccaactgaggtacctgattcatctcattggtactggttggacagtgggtgcagccaacagagggtgagccgaagcagggcggggtgttgcctcacccaggaagtgtaaggggtcaggggatttccctttcctagccaagggaagccatgagtcactgtacctggaggagcagtacactgctgcccaaatgttgctcttttcccatggtctttgcaatgggcagaccaggagattccctctggtgcctggctcagcaggtcccatacccacggagccttgctcgctgctagagcagcagtctgagaaagaccttggatgctggagcttggcaggaggaggggcgtccaccattgctgaggcttgagtaggcagttctgtgctcacagtgtaaacaaagaggc

SEQ ID NO: 707450 - DNA, 2484 bp, Homo sapiens
  misc_feature 1307: n = A,T,C or G
ctaccaatatatatgcacacatacaaacacacacatacaaccaaaaatgtatctataaatcaatcaacctcttttgcttataaggatcttaaatgagctcagaaaagttgtcaaaacatatactgctgaggttcttaaactgttttaatcagaggtgtctcagcacatctgactataatgaaccttctgttcaaaaaaatatacagaattttaccttcaattttacagggttcctggtgatgttgaagacagcaatgaaacccaggttaagaaaacctagttgggtyaggggcagtggcttatgcctgtaatcccagcattttaggaggttgaggcaggaggatcatttgaggccaggagttcaagaccagcttacccgcacagagcggcggggtcccctggcttacctgcacagagtggcggggagcactggcttacttgcacaaagcagtggggtcccctggcttacctgtacagagtggtggggtgccttggcttacctgcacagagtggtggggtgccctggtttacctgcacagagtggtggggtgccctggcttacctgcacagagaagtggatgcgctggtttacatgtacagtccagtgggctgcactgagttagcatctacagtcaactgtaggatttaaaggcaaggcaagctgaagtgatctgaaattccagctcttcccttatttatgctgggcattcttagatatgcttcttaacttctgacttccagtttctttatatatagtaagaacaccactattctatcctcacacaggagttgagaatattggatgagacaatacatacacgtttcttgccatagaaaggacattcagtgaagtgttagttcccttcctgttccatggatagtggcatagaggtatctttccacctaaagtgagcttgcctaagctctggggagctcaccctgcccctctgctcctcttcccacaggagaccttttgtttcaaacactcctttttacttccctggtgcaccagggtcgttgcaatgctaccctgaaccttctcccttggaggtgagccccatacctcccatggcacagatcagatgggactcagccattcagcctaggcgggcttctatgcctgaatgaattccccggcagggcagagaatgggggttgtagactcagagcagtgcagcaggatggtgcatttaaagttgaatcatgacattgctccaaactggcaatatgtgttgcccatttggtccaaagagaagttacgtcttctgacagccaccagagtagaatcttgaaagaaaggaactagncttttccagaaagcagagattactcacacatgaggatccccaggaaccatggagagctcaggccacaacgctccactcatgtgtcatgccctatttcagcaatattgcttgttgacttaaatgcaaaaccaatgtttcctctcctcatgtgaatagctcttgttgttgttgttgttgttgtcgtccatttttttgtttgtttgttgagatgaggtctcactctgtcacccaggctgcagtgccatcacacaatcatagctcactgtagcctagatctcccaggctcaagcaatcctcccacctcagcctccaagtagttagacttgaggtatgtgccaccaagcccaggtatttgttttttgtagagacggggttttgtcatgttgcccattgctggtctggaactcctgggctcaagggatctgcccacctcagcctcccaaagtgctggaattacaggcatgagccactgtacccagctctttagctagatgcaaagacttcacatccactagcatctgtgacatctctcagaagacaagcccatgaaggtggcttgcagtggtgaaaggcttggattctagtgctagactaccctagcagcctgcctctctctagcaaggcgaccttgggcaagtcatttaacctttctatgcctcagttgcctcatctatagtgtagaaataataccaacaatacctgcctcatagcgttattgtcaggattaagtatgagtgaaacactcaacaatacacacatagttcttgccataaaaaggacattcttagtgctcagcatctgagaaagcactatacacatagtagccttactactattatcgtatttactactaggagctggatgcccataagagcaaataactacaaaatgcgaacaggaccaggctctccatggcccctacaactgttccccatgcttctacagctgctggtccagtttcatcttcttccaagccagccattctgaagagtcttggaaaattatctcctctccccagccaactaatccaaggaaactatcttcagtaagcagagagtttaggggcagaatcatttctgcagagccagcaagcccttatctacatccttcttctgagtcaaaaaaccaaaggctgcagcagttgtcttcagtcagttcagctaaactttccaggtgc

SEQ ID NO: 707451 - DNA, 636 bp, Homo sapiens
ggcctggcatatttcataacattttaattcctttttgtgtgtttgaaatgagaacaatgtgattcttgtcagttarcttttattaaaggacttttttttttttttttagttcaactagagagaaattgagaagaagcatccactgaagtatcacatggcttcttagaatttattacacattgttattgggtcacagtatgtgaaaacatggagaccgagaatacagaactgtgtagaagtgaatgagtctgccacctctccttgtacctatccactgtgaaacaagggcgttcatgcacacgttactgtaaatgccctggaggccttatgaataatcattggagcagtatttgctgcaagataacattgtgctttatttttgcctttaagtaaaaggaatctgaaatgaaacaatcttcatttcagatataaatcagccccataaacttgaagctaaccagagatcctgaggcattctcattacatgaagtaattggttggttgcaagactcaattgtactgcaaagtcttcctgagaattcagatgagcagttatctgaagagttacacatcctctcacccgacatgttgtgggaacacatagcattggccagtggggcgaatgatttctagtct

SEQ ID NO: 707452 - DNA, 636 bp, Homo sapiens
ggcctggcatatttcataacattttaattcctttttgtgtgtttgaaatgagaacaatgtgattcttgtcagttaacttttattaaaggacttttttttttttttttagttcaactagagagaaattgagaagaagcatccactgaagtatcacatggcttcttagaatttattacacattgttattgggtcacagtatgtgaaaacatggagaccgagaatacagaactgtgtagaagtgaatgagtctgccacctctccttgtacctatccactgtgaaacaaggscgttcatgcacacgttactgtaaatgccctggaggccttatgaataatcattggagcagtatttgctgcaagataacattgtgctttatttttgcctttaagtaaaaggaatctgaaatgaaacaatcttcatttcagatataaatcagccccataaacttgaagctaaccagagatcctgaggcattctcattacatgaagtaattggttggttgcaagactcaattgtactgcaaagtcttcctgagaattcagatgagcagttatctgaagagttacacatcctctcacccgacatgttgtgggaacacatagcattggccagtggggcgaatgatttctagtct

SEQ ID NO: 707453 - DNA, 1670 bp, Homo sapiens
ttttaacacagcagtcattctgactccataggattcatatgagcaaacctaacagtagcagcttggcaagtctgaaaaaaaatgaagtaggttcattgagatgaaaactaacttgagtagaaacctctataagtaaaatgaaaacaaaaacaattctgaggtgaatagaacaagagggaaaggcattaaagatttcagaaatctcatgcaagtatcccagggaattgagtattcttgctttattggttatataaatcattatattttatgttaagaagagaaaagcatcttaattagtgctatttatcatcaatgagaacatttgtaattccgtggtatctatgagaggctaaggtctccgtgtaaattattatcatmtcattattaaacatgtgttccctatgtaaccctaaagtagcacaaggttttactgagaaaattggacagcactttcctatgtgagtcaacatagtcccttcaacttagaacagaatttctcagggaaaaggcaccggacttgcccttttgtgtaatctcccagggtagatacactaccctagataaaaggtatgtgaatctcttatttatacctctaccttctctctatttttctgggaaggcaaggcttttagagatgagtaaattttcgtatgagtaaaataggaatgggataaagattgggatcatttcctttgggaaatgtaattttattattacccattctgatggttggtccatcaccaaataaacaagagtgaaggagggagactggttgggagactactgcagtagcttaagcaacagatgatggtgctttacactatgcttttagtagtggagatggtgagacgtggtctgatttgggatagattttgttccaagaactaagatttactgatagaatgaatatgcaccattgaatctttagcacctagcacaatatacatgacataaatagtcaatgggtatagaaagatggttcaaaatgaggaaatctatcaagtcaaagggtaaaaaaatccacacaatcatcttgatcaataaaactgacagtttgcatatatgaaatgcaaaaggactataaataattgaaaagagtgaagcttcactagcaggtgagataaatttaattatcacccataaactagaaaacaactgtgttgctttttggatttattatccaaaatggcgaattgttggctagaatgtagagaagtctcttccttatcttttataaatctgtccttgaccttaattttttcacagtaaacatataaaaatctctttaatataaatgaagttattttgtaaaaggtggacaaacaatattagtattgagattttgaaaagttacaaatatctgaatatgtttgataagttttcgtttaagagtttatagggatggacaatctaaatcaatgaagtatttaatggggttatgagatgctaaaacacacatgtaatttctccctctgtattattttctctaatgttactactttcttttacctttacaggtgtatttccttagagttcttgggaaaccatatggctaaaaccttgatcaatacgctacatactcggaaacactgaatctttctaacgggaaaaaagaggttgggggcagaatttataaacatttcttcttcagatttatgatatagtaaata

SEQ ID NO: 707454 - DNA, 627 bp, Homo sapiens
gggtatgtctctctaacaaaaccctgccacctttctttcctgagggtaagaggctgtttcccttcagggagttttaaactgccctaatcaggctggtcaaaatcccacacttccctcttttctctctctcagggtttgaaatcgcccttatctcttcctttataatgttaaaaattttgctacaggctatgacaaagttactaagtaaaaagagcattttgcggccgggcgcggtggctcacgcctgtaatcccagcactttgggaggccaaggcgggcggatcaggaggtcaggagattgagaccatcctgtgaatggtgaaaccccatctctactaaaaatacaaaaaaattagccgggcatggtggcgggcgcctgtagtcccagctacaggggaggctgaggcaggagaatggcgtgaacccgggaggcagagcttgcagtgaggcgacatcgcgccgctgcactccagcctgggsgacagagtgagactccatctcaaaaaaaaaaaaaaaaaaaaaaaatttggctcagccaccaaagatgcaaatcagaccaattatgcccacctctaactttaccatccacctaggtaagggtactcttgccaaatcccaaaaacaaga

SEQ ID NO: 707455 - DNA, 641 bp, Homo sapiens
gaaatgtttgcaccatcctctggacactaagtatggtcctgatcaattaacaggggatcagtgttctctctggggatggtttccttcacatggacatacaggcagagacacacctcaactgtacaatggacatatggatctcattggaccattatgacatctctatgagctaggaagactcaggatcattcactatatacagatgagagaatgaaaccaaaagaagttatccaagatggaataatccatacaagttatccaggatggaataattcgtaagtggcaacagaatcagtgttgagcataagccacctcttycaaactgtgctaatttcacctcatcacacaccttctgactttgagagcttagctatttggttgacctaaattgtaacttagtagaaaatacatacctgagtctcttctgttcatatccagagaaagaactcttcaaggaatggtttggtgcttttgattacatctcaaatttcaagatcagaaacacaaaagctgaaccaaagtccccaacttaaaattaaaggcttcacagggcaccacatcacctatgaattattcttactcacaatttgaattcttacctagtcacaatttgaatatggcacattcttcaaaacagctgg

SEQ ID NO: 707456 - DNA, 1740 bp, Homo sapiens
ataaaatgtatatatacatatattaaataaaataattatatacatataattttatatagtataaaatacatagagaagcaattgtggtgaaattaacaactagcaagtctaggatgatacatgggtgttctttgtaatattctcttaacttttccattggtttgagatctctcaacagagagtagggcaaaaatggaaataacacaataagatttttttctgaactgtttaattaattttatttggattatagtaactttacataagctattattaatgctacttgaacatctggtgaagacattacacagtattgggtttctgtatgactgggcaaaacttactttaagccttgagatagttttgctttgtagtattatttctagcatgagtattaaccttttcctttagtagtaatgaaataaataaaaatatgagaagaatggggaatgagagaaaaaagaaaaatagggaggaaagaaagaaaagtgtctttctatattttcattgattagttccttctttagctaaattcaaggcacttttcaagtgtcatctccaacaccatctactacagaaggccatagataaagccccatatctccttgtctttccttcttcttttctgctcttgggatcctcatcatctcatgatgtagttcatatgacattgggcaggaagtgaagtggttaaaaactgtctcaagctactgtgactggggaaacttcagaggatataaccagacatttctggccaggtgctggtggtgttagtctatacttcctcttccagtaatcccacaacattttttacctccattcatattcctggatgtttttgttttggaactgaggaatgacaaaaaggaaaagcctagaaaaaaaggaggggaagaatgggcaagcctctgacatctattttgttttcatccctctggtcacagtttgacatctattattaagtgctgaaactmataagttttgcactcttcaatgaagaatatttgggcatttgggggaaaaggagggcacagaaaaggaagtggcaccgaacaggaaaaagaatgttctttctgcctctgagtagaacccagcacccttctggcatcatgaagaaagtcagggagcacccaggggtggcactgtgatcagaacatggacattttcaagatgattaaagtttttccaaataatttcataggtaaaggacaaggacagatggaaatcagagcaaaagataaaaaggaggaaagacatgaggacgtggctccatctaacaaaatggtctgtaggcacatgtaagggctccttgtggcctcctctgcgaaggtcctgccttcattttggagagggctagctacagaacaaaccttgatgttatgagtaagacccatgatcttgtataatggctgggttttatttttagctcatgctccaacagatatttgctcttcctaccaaaataaacttccaatgcccttctatcaacagatagtgcagggaacaaaccctgctgggaaatgtctccatctaagagctgaaacacactcaaagaactctaatagggtcagtaggccagtgagctgcagcccccacatacattattattaacaaatttaacaagcattcattactcagcagagcatatgaaaaggaagaaaaccccccacagaaattgctgaaaaagactccttaattaaagactgtacttacagcagttgcaaagtcaaaaaagaaagg

SEQ ID NO: 707457 - DNA, 1740 bp, Homo sapiens
ataaaatgtatatatacatatattaaataaaataattatatacatataattttatatagtataaaatacatagagaagcaattgtggtgaaattaacaactagcaagtctaggatgatacatgggtgttctttgtaatattctcttaacttttccattggtttgagatctctcaacagagagtagggcaaaaatggaaataacacaataagatttttttctgaactgtttaattaattttatttggattatagtaactttacataagctattattaatgctacttgaacatctggtgaagacattacacagtattgggtttctgtatgactgggcaaaacttactttaagccttgagatagttttgctttgtagtattatttctagcatgagtattaaccttttcctttagtagtaatgaaataaataaaaatatgagaagaatggggaatgagagaaaaaagaaaaatagggaggaaagaaagaaaagtgtctttctatattttcattgattagttccttctttagctaaattcaaggcacttttcaagtgtcatctccaacaccatctactacagaaggccatagataaagccccatatctccttgtctttccttcttcttttctgctcttgggatcctcatcatctcatgatgtagttcatatgacattgggcaggaagtgaagtggttaaaaactgtctcaagctactgtgactggggaaacttcagaggatataaccagacatttctggccaggtgctggtggtgttagtctatacttcctcttccagtaatcccacaacattttttacctccattcatattcctggatgtttttgttttggaactgaggaatgacaaaaaggaaaagcctagaaaaaaaggaggggaagaatgggcaagcctctgacatctattttgttttcatccctctggtcacagtttgacatctattattaagtgctgaaactaataagttttgcactcttcaatgaagaatatttgggcatttgggggaaaaggagggcacagaaaaggaagtggcaccgaacaggaaaaagaatgttctttctgcctctgagtagaacccagcacccttctggcatcatgaagaaagtcagggagcacccaggggtggcactgtgatcagaacatggacattttcaagatgattaaagtttttccaaataatttcataggtaaaggacaaggacagatggaaatcagagcaaaagataaaaaggaggaaagacatgaggacgtggctccatctaacaaaatggtctgtaggcacatgtaagggctccttgtggcctcctctgcgaaggtcctgccttcattttggagagggctagctacagaacaaaccttgatgttatgagtaagacccatgatcttgtataatggctgggttttatttttagctcatgctccaacagatatttgctcttcctaccaaaataaacttccaatgcccttctatcaacagatagtgcagggaacaaaccctgctgggaaatgtctccatctaagagctgaaacacactcaaagaactctaatagggtcagtaggccagtgagctgcagcccccacatacattattattaacaaatttaacaagcattcattactcagcagagcatatgaaaaggaagaaaaccccccacagaaattgctgaaaaagactccttaattaaasactgtacttacagcagttgcaaagtcaaaaaagaaagg

SEQ ID NO: 707458 - DNA, 606 bp, Homo sapiens
aatgtcttgggtttggatgtaaatgtcttcttggtgtcaaaattctattgattttatagctcatctttatcctatttgagttttctaataaatttaaagttgacaaaagacagaaattctttacatttttgcttctacaagactatgaacctgttaaaaaccaattatgtcccttttttctaagtagctaatgtagggtcttgaatatgttgtgtactgattaaatgtgtgactcgttgaggtataggtggattctgccttctagcataggrctgaggtgtggtctgaagcaagccattgcctagcagcttgttagaagtgtaaagtcatgggcctcaccctggacctgctgaatcaggatctggggaagaaggagcaggacatattaacaagccattcaggtgattctgatgcactcttgggtttgaaaagctctgctttcatggctcctagtccagtagacccatggaaaaattaatttataaacaaatattcactatttaatctaaaagccatagtaataagtaatgcctctttactaaaatgtaagaggtatgagttcaccttaaaactgtgatgtctttctcatcttctcctgccctaagc

SEQ ID NO: 707459 - DNA, 645 bp, Homo sapiens
ttgcccattctttgacacttacccactttgaaatcaacatatgactggttagctgcaacttatgagatactattgctagcagctctttgggccttgtgggtggccacaaatccctccaatggtaccaggttggccataaaatatgctgccctccagaccttctgcttctgggactattccaggagtttgagttctaaccargaatgtttcttgcctctctgagctggaatcccaagccctctgagagcttaattttttaaaaaaatgttgtattgcagcttcagttaaatgatttttagtaaatttacaaagttgtaaagctatcactactccagaaacatccctcatgaccccttacaatcactccccattcgcactcctgaccatgctcaaattctattttttttttttttttttttttggagacagggtctttccctgttgcccaggctggagttcagtggcacgatcatggctcaccgctgcctcaacattttgggctcaagcagtcctccccactcagcttcccaaagtgttgggactgtacgcatgagccaccgcacctggtcaaattcttttttaaaagagctatattgagatataactcacataccatgcaattaatctattgaaggtgtacagttc

SEQ ID NO: 707460 - DNA, 645 bp, Homo sapiens
ttgcccattctttgacacttacccactttgaaatcaacatatgactggttagctgcaacttatgagatactattgctagcagctctttgggccttgtgggtggccacaaatccctccaatggtaccaggttggccataaaatatgctgccctccagaccttctgcttctgggactattccaggagtttgagttctaaccaagaatgtttcttgcctctctgagctggaatcccaagccctctgagagcttaattttttaaaaaaatgttgtattgcagcttcagttaaatgatttttagtaaatttacaaagttgtaaagctatcactacyccagaaacatccctcatgaccccttacaatcactccccattcgcactcctgaccatgctcaaattctattttttttttttttttttttttggagacagggtctttccctgttgcccaggctggagttcagtggcacgatcatggctcaccgctgcctcaacattttgggctcaagcagtcctccccactcagcttcccaaagtgttgggactgtacgcatgagccaccgcacctggtcaaattcttttttaaaagagctatattgagatataactcacataccatgcaattaatctattgaaggtgtacagttc

SEQ ID NO: 707461 - DNA, 1399 bp, Homo sapiens
atataatatataagcatttttaattttagtaataagatatagaaacgaatctctaagaccaagcatgtgtgtgtgtgtaagaaaggtagaaattgagagagattggaagagaatgagtgtggtgtttaatttttagttttatacttttgtttttgtcattgtttttaaaacaaacttgttttactgataaacaataaacaaacctactttaaaaatctatgtccattccagagagaatttggatggagaatataaattaacgataaaaaattaaaaagagctagcatcttgttctctaaggaactttcttttaacgtagttttgaacttccatcaatatgaatgcatttttgttgatgtgcttttctgtatcatgggcaagtaaattgcataagaataggccatttaggccctgctggatttcccatagccttttctgaaaagtttgcctgaatgaatagtaagtcaaacagcgggggctgcagaacccaggaaaatcacataaaggttaaggaaaatgacattttcttccttttatttatgatcttgaatcatcttttcaggaggtaaatcagtcttacaaagcatcgaagataagcaatgattaggtatttagaatttttgcaatagccatagaaaaggtacatatttacataaaatagtacagcatgtagagtctttggtgtttgcaaaaaaaatccctcatatgaaagtgtccaataccaagttgctttcccatctctctactcctcataaaatacacaaaatatattaaaatatattgtgagatttagttttatatatttcctgacctcatatttagtatgtcacattcccatattaaagttgatgattttattaccaatacagcacatacataatatttgaatttcagacttgagatcctcaataagaagcatcatgmgtaagatgatgtaagtgaggtgacaggattctaaatgacctttagtgtgtaaatagagagaaataaaaattctgcaaaatatctcagcttatgatttgagcatgttagacatgtccaattttcctatttttgtggaatttgtctcatagtgattttccattaggcatttcaagctgaaataaacaacaggctcatgtgctatcccactttatgtcaaacttttaccgtagtgaaacatcattctgtgctcaggaaataggaacgcatcttcctcaattcagtctacaagtgatggcaaatgctgtaagaatccatattcagtgaacatccaattacaacaaatgattgacatagtaggctattgagaaaacatttctgcctcgtgcttgcaaaaagtcttcaaaaataacagggcaaatagttccaggtctctgtgacctaaaaagtctaacgaagccaaagaattactagagca

SEQ ID NO: 707462 - DNA, 1399 bp, Homo sapiens
atataatatataagcatttttaattttagtaataagatatagaaacgaatctctaagaccaagcatgtgtgtgtgtgtaagaaaggtagaaattgagagagattggaagagaatgagtgtggtgtttaatttttagttttatacttttgtttttgtcattgtttttaaaacaaacttgttttactgataaacaataaacaaacctactttaaaaatctatgtccattccagagagaatttggatggagaatataaattaacgataaaaaattaaaaagagctagcatcttgttctctaaggaactttcttttaacgtagttttgaacttccatcaatatgaatgcatttttgttgatgtgcttttctgtatcatgggcaagtaaattgcataagaataggccatttaggccctgctggatttcccatagccttttctgaaaagtttgcctgaatgaatagtaagtcaaacagcgggggctgcagaacccaggaaaatcacataaaggttaaggaaaatgacattttcttccttttatttatgatcttgaatcatcttttcaggaggtaaatcagtcttacaaagcatcgaagataagcaatgattaggtatttagaatttttgcaatagccatagaaaaggtacatatttacataaaatagtacagcatgtagagtctttggtgtttgcaaaaaaaatccctcatatgaaagtgtccaataccaagttgctttcccatctctctactcctcataaaatacacaaaatatattaaaatatattgtgagatttagttttatatatttcctgacctcatatttagtatgtcacattcccatattaaagttgatgattttattaccaatacagcacatacataatatttgaatttcagacttgagatcctcaataagaagcatcatgartaagatgatgtaagtgaggtgacaggattctaaatgacctttagtgtgtaaatagagagaaataaaaattctgcaaaatatctcagcttatgatttgagcatgttagacatgtccaattttcctatttttgtggaatttgtctcatagtgattttccattaggcatttcaagctgaaataaacaacaggctcatgtgctatcccactttatgtcaaacttttaccgtagtgaaacatcattctgtgctcaggaaataggaacgcatcttcctcaattcagtctacaagtgatggcaaatgctgtaagaatccatattcagtgaacatccaattacaacaaatgattgacatagtaggctattgagaaaacatttctgcctcgtgcttgcaaaaagtcttcaaaaataacagggcaaatagttccaggtctctgtgacctaaaaagtctaacgaagccaaagaattactagagca

SEQ ID NO: 707463 - DNA, 1399 bp, Homo sapiens
atataatatataagcatttttaattttagtaataagatatagaaacgaatctctaagaccaagcatgtgtgtgtgtgtaagaaaggtagaaattgagagagattggaagagaatgagtgtggtgtttaatttttagttttatacttttgtttttgtcattgtttttaaaacaaacttgttttactgataaacaataaacaaacctactttaaaaatctatgtccattccagagagaatttggatggagaatataaattaacgataaaaaattaaaaagagctagcatcttgttctctaaggaactttcttttaacgtagttttgaacttccatcaatatgaatgcatttttgttgatgtgcttttctgtatcatgggcaagtaaattgcataagaataggccatttaggccctgctggatttcccatagccttttctgaaaagtttgcctgaatgaatagtaagtcaaacagcgggggctgcagaacccaggaaaatcacataaaggttaaggaaaatgacattttcttccttttatttatgatcttgaatcatcttttcaggaggtaaatcagtcttacaaagcatcgaagataagcaatgattaggtatttagaatttttgcaatagccatagaaaaggtacatatttacataaaatagtacagcatgtagagtctttggtgtttgcaaaaaaaatccctcatatgaaagtgtccaataccaagttgctttcccatctctctactcctcataaaatacacaaaatatattaaaatatattgtgagatttagttttatatatttcctgacctcatatttagtatgtcacattcccatattaaagttgatgattttattaccaatacagcacatacataatatttgaatttcagacttgagatcctcaataagaagcatcatgagtaagatgatgtaagtgaggtgacaggattctaaatgacctttagtgtgtaaatagagagaaataaaaattctgcaaaatatctcagcttatgatttgagcatgttagacatgtccaattttcctatttttgtggaatttgtctcatagtgattttccattaggcatttcaagctgaaataaacaacaggctcatgtgctatcccactttatgtcaaacttttaccgtagtgaaacatcattctgtgctcaggaaataggaacgcatcttcctcaattcagtctacaagtgatggcaaatgctgtaagaatccatattcagtgaacatccaattacaacaaatgattgacatagtaggctattgrgaaaacatttctgcctcgtgcttgcaaaaagtcttcaaaaataacagggcaaatagttccaggtctctgtgacctaaaaagtctaacgaagccaaagaattactagagca

SEQ ID NO: 707464 - DNA, 1066 bp, Homo sapiens
ccatactgttttctgtaatggctgtactagtttacattctcactagcagtgttcaagagttgcctcttctccacacacctgactccttagcagtttgaaataatcattcctgctcatgcctcttctgcagctgtctcacctccacatgaatagacctggcactacctctcaccaacacttgttatctcttgtccaaatagtagccaatctaagaagtgtgagatgacatgtcattgtggttttgatttgcatttccctgatgattagtgatgttgagcatttttttttcttttttttttgaggcagtttcgctcttgttgcccaggctagagagcaatggtgcgatcttggctcaccgcaacctccacctcctggtttcaagccattctcctgcctcagcctcactagtagctgggattacaggcatgcaccaccatgcctggctaattttgtattttttgtagaggcagggtttctccatgttggtcaggctggtcttgaactcccgacctcaggtgatctgcctgcctcggcctcccaaagygttgggattacaggcgtgaaccactacacctggccgagcatttttcttaaaaatatatctgttggcgagaattcgtctatttcttatgttcgcatattcttttttggtctccattccaaaatgtcttcttttatcattagtaattttttctccttccttatatcttcttcctgaaattgagtttctagaagacagggcttaaatgttatttgcatttccttctcactcagagctcaagaataggctttgcccactgaacatgtgcaacaaaaaactggttatttatactgatacatcacacagttatgcgtcaaagaagggaatggttctttctccatgcgtgaaagtgtgcagttccatctgccttcacaaattcataccatttggccatttctttctgacaaatctcattttaaacccaaaatgtagagttgtatctgtcacgtagtaaacttgtaataaatgactgttaaatatttggaaaaataaactctggaacggtcatgtgtcacttaatgagga

SEQ ID NO: 707465 - DNA, 616 bp, Homo sapiens
caggtcatacctcacaggcttctgggtgccaatctagaaagtattaccacagctcatgcctgagtgttaaaaactgtgtcacatagaatgctccctattgacaaactttcctttgtttagcagaagccctcaagacagtgtcatccaacacaaggtaaccatattctgcacttcctttgtcctacaatatttcctcctttgacagccccatcacatccctcatcaagataagctgagatttgacttgctatggttttgttggtcagtggtgaatatgagggcygattgctttttgacaagcattgtttttgagacttctattctggaacatgagagaatttaccactctgcaaaagattcaagggaagctggattcaaggttctcaaatgcatcaccttaggtctcaagtttcagggtttcactccttccctagcagtgtcctcgcttcagcatgggagacttaccaacactgaaaattcagcctcccttgaagcctcttccacttctacaattaagtcctgggcctaaatcatcagctctgttggccctctggctgtggaagatgagagtttcgtgaaacactttcaaaaagtcctttgaatgtcactctaaact

SEQ ID NO: 707466 - DNA, 1743 bp, Homo sapiens
aataagttagaatggaatttgtccaggagtttccaagtcacccgagaggctgtgcacctcttttgagaaggttagggaggggtgcagacaggagccttgccgagactaccccccagctcaaactgtgagttgtgctgtttcctcctcctagctttgcccaggcccaaggcacagggcagggggcattcaagtatcgaaccttgcagagggccagtgacgatggcagggctgggggagggaaaggagagccccaccccgggggccagaccttctccaagaccaaggccactgcactggcaggagggaggaggaggaggaagtacagggttctttttggtaccaagggagaaagacattttgggaagacgtagttgcaagggatgatgccttctgctcagcagaagaaaatgtcttgtacagtgacggggtcactgccacctgagggtcatcatgacgggcacctgggaggccatggggcctcggggtctgggagccacacttgggccaccttgtccacccctcagtcctgatcacagtcaccctgaagcctggcttggtccttcacttaaggattcagccttgagggtggctgcactgcagatcagttcctcccaccccaggctgttcccctctccgggtttctgggctgaaactagtggctccatctgtgcctttggggccggcccctgcctgctcctccccactgaggcctcaggaggcaagtgggtgggggtctgggttccctagagttcctgagtgtgctatttcactgccctgggcctgtcctctctggttccaggggcaggagctggtgtgggaacagcggagaagagagcaggygagcaagggagcgagctgttggctaagcagtcagcagccctggcggtggcggatgggaaatgggacgaagcaagtcagcaactccaggggccaggcaggggtggagggcttcccagctctgctttctcctgcctcccaccccagcctgctgaggctgctgccagcagctgcaactccagggccagggtgacagtccccatggagacccagtcctgcccagccaggctgctgagggggggtgggtaggaagcatgcacagcacacaaggaagcttaggcttggaaaaagaaaatatatctccatcagaaaaggtcataggtgacacagagttggaaagaaaaaaaataataagttaccttcagaagacccactttgctcaaaaaaacccttgttttccctctgtgtgcttcactttccttttttaaatacattgctctttccggggagctgctgactcatggctatccctgttgcaaggtggacactgaggactaagaaatgactgcagtccccctccccaacaggtggtcctgggccttccctgaggacagcccttcttggtcccctgtggtgccctaactctgctctgccctgccccctgcttctggttttgttagtgtgtgcctgacgcagggcctgtcccagctttgttcctggtgggggctccctggtgtggagctccagctggggccgaagtggatgacatgtgttgcaactcactttagggacacctagacagaagttggggaatctttaaaaacaaatcaacttaattgtacttggcctacaattaaaggtcaaaaatgaactgagtttattatatatgcatggtgatttatttaaaaataattttaaaattacaaatgtattgtttcttatatagtttttctatatatatatata

SEQ ID NO: 707467 - DNA, 1743 bp, Homo sapiens
aataagttagaatggaatttgtccaggagtttccaagtcacccgagaggctgtgcacctcttttgagaaggttagggaggggtgcagacaggagccttgccgagactaccccccagctcaaactgtgagttgtgctgtttcctcctcctagctttgcccaggcccaaggcacagggcagggggcattcaagtatcgaaccttgcagagggccagtgacgatggcagggctgggggagggaaaggagagccccaccccgggggccagaccttctccaagaccaaggccactgcactggcaggagggaggaggaggaggaagtacagggttctttttggtaccaagggagaaagacattttgggaagacgtagttgcaagggatgatgccttctgctcagcagaagaaaatgtcttgtacagtgacggggtcactgccacctgagggtcatcatgacgggcacctgggaggccatggggcctcggggtctgggagccacacttgggccaccttgtccacccctcagtcctgatcacagtcaccctgaagcctggcttggtccttcacttaaggattcagccttgagggtggctgcactgcagatcagttcctcccaccccaggctgttcccctctccgggtttctgggctgaaactagtggctccatctgtgcctttggggccggcccctgcctgctcctccccactgaggcctcaggaggcaagtgggtgggggtctgggttccctagagttcctgagtgtgctatttcactgccctgggcctgtcctctctggttccaggggcaggagctggtgtgggaacagcggagaagagagcaggcgagcaagggagcgagctgttggctaagcagtcagcagccctggcggtggcggatgggaaatgggacgaagcaagtcagcaactccaggggccaggcaggggtggagggcttcccagctctgctttctcctgcctcccaccccagcctgctgaggctgctgccagcagctgcaactccagggccagggtgacagtccccatggagacccagtcctgcccagccaggctgctgagsgggggtgggtaggaagcatgcacagcacacaaggaagcttaggcttggaaaaagaaaatatatctccatcagaaaaggtcataggtgacacagagttggaaagaaaaaaaataataagttaccttcagaagacccactttgctcaaaaaaacccttgttttccctctgtgtgcttcactttccttttttaaatacattgctctttccggggagctgctgactcatggctatccctgttgcaaggtggacactgaggactaagaaatgactgcagtccccctccccaacaggtggtcctgggccttccctgaggacagcccttcttggtcccctgtggtgccctaactctgctctgccctgccccctgcttctggttttgttagtgtgtgcctgacgcagggcctgtcccagctttgttcctggtgggggctccctggtgtggagctccagctggggccgaagtggatgacatgtgttgcaactcactttagggacacctagacagaagttggggaatctttaaaaacaaatcaacttaattgtacttggcctacaattaaaggtcaaaaatgaactgagtttattatatatgcatggtgatttatttaaaaataattttaaaattacaaatgtattgtttcttatatagtttttctatatatatatata

SEQ ID NO: 707468 - DNA, 531 bp, Homo sapiens
ggtatttatacccttatataatctctttcctatagtgtaagctggtcccaggtacttgtttctattgaatagaatagaacaaaagaaatgagatgccacttctgagattagattataagatactgtgaatttcttcttgtgccctctccctctctctctttctcttgccctctcatttgaatgaagccaacyggcatgctgtcagtggcccagtgtaagtcctgttacaagaaattgatgattacctgtagccaaccctaagtgaagaactgaggtcctcagtcctacaaatggagagaaactgaatctagctaagaaccatgtgagtgagctgggaagaagatccaccctcagttgaaatttaagatgacatattgagcagacatactgagacacactgaaagtaagagagcaggaggaaacaaaaccagggtcatacaaagaacacaactgattttgagattctcacataagtattacaccttcagtgagcacgtgtactagaaatttaaaaaataaataaaataaacc

SEQ ID NO: 707469 - DNA, 2071 bp, Homo sapiens
  misc_feature 1382, 1383, 1384, 1385, 1386, 1387, 1388, 1389, 1390, 1391,1392, 1393, 1394, 1395, 1396, 1397, 1398, 1399, 1400, 1401,1402, 1403, 1404, 1405, 1406, 1407, 1408, 1409, 1410, 1411,1412, 1413, 1414, 1415, 1416, 1417, 1418, 1419, 1420: n = A,T,C or G
  misc_feature 1421, 1422, 1423, 1424, 1425, 1426, 1427, 1428, 1429, 1430,1431, 1432, 1433, 1434, 1435, 1436, 1437, 1438, 1439, 1440,1441, 1442, 1443, 1444, 1445, 1446, 1447, 1448, 1449, 1450,1451, 1452, 1453, 1454, 1455, 1456, 1457, 1458, 1459: n = A,T,C or G
  misc_feature 1460, 1461, 1462, 1463, 1464, 1465, 1466, 1467, 1468, 1469,1470, 1471, 1472, 1473, 1474, 1475, 1476, 1477, 1478, 1479,1480, 1481: n = A,T,C or G
gggtcaattatttttccctagaatgtttgggctcratgtaagaaaaacaatgaaactactgttggaatatagcatctatgtagtggcatgatgaggccaaactgtttgtctgggtcaggtcaggaatcatatactgtgaactgtgatagattttggctgtaatctgtaggccacagaagattttttggggagagtataaaagaaagaactgatctagtgagacgtgtgctgtatacaagtcactctggttgttctttaggggatgaattggagaagagaagtgattaaaagtgtacatttaaaacactattggctgggcgcagtggctcacgcctgtaaccccagcactttgggaggccgaggcgggtggatcacctgaggtcaggagttcaagaccagtctggtcaaaatggtgaaacctcgtctctactgaaaaatacaaaattagccaggtgtggtggcaggtgcctgtaatcccagctactcgggaggctgaggcaggagagtcgcttgaatgcaggaggcagaagttgcagtgagctgagattgtggcactgcactccagcatgggcaacaagagcaagactccatctcaaacaaaacaaaacaaaacaacaacaaaaaaaaaaaacactatgataatcatgtgagaggtaataaagaactgaacttgagtgatgatagaggcagaaacagagagaaagaaataggtcaataaaatgttaaggagaaagaaataccagagcttagtgaagagaggtttgactcaagaataactcccttgtttgtggttcagctctatgagatttcgttctctacatttttaattttttattgaaagaatgatagattcactggaatctacaaaaatttgatttctttcatgttaagttcattgattttaagatgtccatgggacattcaagtgtaaacatccagtaggtacttggaattatagacctagaactaaaagctaagattttacagtgataacagaagccatgcgagtaagagtaccctacgtaaaaagaacataaaataagaaagccaggaaaagagctctggtaaccaccacctaaaaaatatgcagaggaagagaaataaaacacaaaaatgacaaatgcaagtccagaaaagtggaaggacacttcagagctaagtgcagccccagaataaataacaaaaagagtaaagaaatcaatttttaaaatggcaaaatgtgaatagtcctctcaagctgtgtgcaccgtgaagattaggactgtgtctatcttagtctctgctatctctctagaataggcttaaatcactcactgacggaatgaatgtttgtgagtatttctcgcctttcctcttggtactgcttttcttcacttctttgnnnnnnnnnnnnnnnnnnnnnnnnnnnnnnnnnnnnnnnnnnnnnnnnnnnnnnnnnnnnnnnnnnnnnnnnnnnnnnnnnnnnnnnnnnnnnnnnnnnntgcttttacaatcagtgctgcaacacaatttttttaacctttatacaataaattactaaatgtggaattggtgctaatgtgtacgtgcatttataatttaaatgtatactttcaaattgtcccctagagagtttttaccaaattagaatcctaccagcaatgtgcaagattgcctctttccatacatcctcatcaataaagtatatagtcagacttctggatcttagataatctgaaaagtggaactattgtctcagtatagttttaagtagactttcaacagatccaaaaagctgagcagattccaaacaggataaaagccaagaaatccacccaaagaagtatatagtaaaacttctgggtgggggcgggggggtgggaattgtattgtaaaactttctcataacaataaaagtaacatcaccttacctgtagaggagaaataacttgaattgcagcagatttctcatcacagactatgaaggcgaggaataagtgccacaatatttttgaaattctgaaagaaaaaattgccagccggtgttctatatccagaaaaatatcctttaaaaattgaggtaaaatcaagc

SEQ ID NO: 707470 - DNA, 1015 bp, Homo sapiens
gtttaacttgcagccttttattttgtttctagtgataaataaaataatgatgtgtcttgcaataatgcattttagatgttgtggcttgtggtattatggagtacaatctacaattcacataaaattttaggataaaaatgggagactttgcagctgttcaggcctagctgtggtttctgcagggtttcttgaccactcttgtcccctggggctgtggtatacrgtaggacaggctgtgctcagcacactagcgtgcctcaaggcctcatgtgcccattccaggatgttcctaccatcactacaggccccctgtaatactcatatcccctgcaatactttactcccatgttggataatcatccccttccttatagcccctcagtgtagatgagacagactcacattttcaaggagaattttattttaaaagccaagggaaaagtaaaagggggagaaaaggaaatataaacagtatagaaattgtcacattttcatttattgtgtttctaatatttccatcctataaaagtaaaaaggaattttagtgagacctcagtttcaggagaagttaactgatggccattaggaagccttggctcacgttccaacctagtcctgggtcagctgtacccaccatttaccttctcctcaccttgaagtgagtcttggttttatgatttttttggattcctctattgctgacttcctacagcttggctctttcaaaaaagttctggcccatgtaaaatgtcatgtcttttgtccgtaaaaatggttggggaatcacttgactagctatgagattaaaatctcttcccaaatttataaagaaaaagataaaacacaagctctatggttttcagatcaagaaaattagctcttcattttcgaagtattgtattaactgagaaggggttggattgggggagaatggtgtgttagcagagcatggctgaaggataatcatcttcactacaaccattcatatttctcttttgtttttctccagaacagc

SEQ ID NO: 707471 - DNA, 1015 bp, Homo sapiens
gtttaacttgcagccttttattttgtttctagtgataaataaaataatgatgtgtcttgcaataatgcattttagatgttgtggcttgtggtattatggagtacaatctacaattcacataaaattttaggataaaaatgggagactttgcagctgttcaggcctagctgtggtttctgcagggtttcttgaccactcttgtcccctggggctgtggtatacggtaggacaggctgtgctcagcacactagcgtgcctcaaggcctcatgtgcccattccaggatgttcctaccatcactacaggccccctgtaatactcatatcccctgcaatactttactcccaygttggataatcatccccttccttatagcccctcagtgtagatgagacagactcacattttcaaggagaattttattttaaaagccaagggaaaagtaaaagggggagaaaaggaaatataaacagtatagaaattgtcacattttcatttattgtgtttctaatatttccatcctataaaagtaaaaaggaattttagtgagacctcagtttcaggagaagttaactgatggccattaggaagccttggctcacgttccaacctagtcctgggtcagctgtacccaccatttaccttctcctcaccttgaagtgagtcttggttttatgatttttttggattcctctattgctgacttcctacagcttggctctttcaaaaaagttctggcccatgtaaaatgtcatgtcttttgtccgtaaaaatggttggggaatcacttgactagctatgagattaaaatctcttcccaaatttataaagaaaaagataaaacacaagctctatggttttcagatcaagaaaattagctcttcattttcgaagtattgtattaactgagaaggggttggattgggggagaatggtgtgttagcagagcatggctgaaggataatcatcttcactacaaccattcatatttctcttttgtttttctccagaacagc

SEQ ID NO: 707472 - DNA, 1015 bp, Homo sapiens
gtttaacttgcagccttttattttgtttctagtgataaataaaataatgatgtgtcttgcaataatgcattttagatgttgtggcttgtggtattatggagtacaatctacaattcacataaaattttaggataaaaatgggagactttgcagctgttcaggcctagctgtggtttctgcagggtttcttgaccactcttgtcccctggggctgtggtatacggtaggacaggctgtgctcagcacactagcgtgcctcaaggcctcatgtgcccattccaggatgttcctaccatcactacaggccccctgtaatactcatatcccctgcaatactttactcccatgttggatawtcatccccttccttatagcccctcagtgtagatgagacagactcacattttcaaggagaattttattttaaaagccaagggaaaagtaaaagggggagaaaaggaaatataaacagtatagaaattgtcacattttcatttattgtgtttctaatatttccatcctataaaagtaaaaaggaattttagtgagacctcagtttcaggagaagttaactgatggccattaggaagccttggctcacgttccaacctagtcctgggtcagctgtacccaccatttaccttctcctcaccttgaagtgagtcttggttttatgatttttttggattcctctattgctgacttcctacagcttggctctttcaaaaaagttctggcccatgtaaaatgtcatgtcttttgtccgtaaaaatggttggggaatcacttgactagctatgagattaaaatctcttcccaaatttataaagaaaaagataaaacacaagctctatggttttcagatcaagaaaattagctcttcattttcgaagtattgtattaactgagaaggggttggattgggggagaatggtgtgttagcagagcatggctgaaggataatcatcttcactacaaccattcatatttctcttttgtttttctccagaacagc

SEQ ID NO: 707473 - DNA, 1428 bp, Homo sapiens
cccggaccggctgctcttctgcctttatgtggtttcagctcccgctgagggaccaagcacttgctgctcattgagtttgtcagcatttcccccatggatctcagactgactaattagccttgcctgccggattgctgaagccacagggcactgccaggccagcactgttccacatggcatcagctgagacaagcagggctgggtctttaaccctatccttgtcaactctgtgatctgtgggtgggtccctgttgcgtgggtgtgtttgggttcacatgtagggtacacgcctgtgtgagcttgtgggatgtgggctgtgagctctgttcatggagttagcagctgtttacctggatggtcagagctggtcaggacacttagaaaaactgaagccaaagattcttatcaatattgaatacaatttaggggatgtggctggggaactgaaactattgccctgattctgatgcaaaaaaaaaaataaattttaatgtctaacttggccttttggtttgaaagaatcaggataactttttaaaagtcaggctgggcagaagattgttctttctgtctctctcacatgcatttaacataagtttcttcaagctgtggcagtgtgaggttaaaaacggatcatgccatcagtaatctcctgtttccctatctctcaacccctcctgctactgcagggctgcaatcgttgcccaaagcccatcaagtgttcttggacatacccagagagtatgccgtgtgagcttacaagcaagcctggtcggctgctgcaggtttctgccaggcactgctgccctggcctgccaccgggccatctgtgtatttctgcctctgctggatatcaccacatctgcagggcactgctgcttccccatacttcactgccatctcccacagaacaccaagaactccctccaacaatgccagccctcccactgaggcatcatgaatgcccacgaactttccaggtgccaggcatggtggtctgtggcaatgttgggagggaatggctgtctccagtgtgtgcttccccaaagcagtactggctgcagctgctgcccgaagtagtattcaggtgtagagctctttcagcttccactttaggtcctctctccctggaggatcagggtagtgtgaggttagatctgagtaatgaattcaaactgacttggatttgaagcccgaatctcccaattggtagcatctgtgctagggaaagttcttcaaaaccttcatttgtgaaacagtactaaaacagtagtacctaactcagggtttcatggaggcaaaatgagctgatgcatacaaaactcggtgtacttggtaaatgccctgtaatgctggctgatattaattagctaatagagtycaatgatacagcacagaggctggggacagacagggacaagtgacaga

SEQ ID NO: 707474 - DNA, 631 bp, Homo sapiens
tagagacggggtttcaccatgttggccaggatggtcttgatctcttgaccttgtgatccgcccgcctcggcctcccaaagtgctgggattacaggcgtgagccaccgcacccggccaacattttttatcttaaaaattattgaatttgtttttgaagaggtaatgcattccataatttaatactgaaatgttcaaatacaaaagggcgttctctgcatcctcctctaccccatgcctagccatcggtcccctccccagaggcaatccaggtctttcatttgaccctcctccagagacgtatcacacatacacaagcccacatacaccaagccgagtgcatctgtcattcccctcccggcctggttttgggtgtattttgggggggttttgttttgttttggtaatgaggactgattgggatttttttccactttcttttttatacaaacgctaatatgctctacaaccgccacccccaccccatgactggagatgactctacgtyggaacaacagcacctgattttacagctgcctgatcctctattacagggcaaaccctaacttatttaacccatgccctgttgacggtcttgtgggccatttaaaggatttttgtcttaatctcaaga

SEQ ID NO: 707475 - DNA, 578 bp, Homo sapiens
tgctgcattcacattgccaccattcactaagctatatattaatgacattccatttgtttttgttgtcattgtattttgtttttgtttttgagatggagtctctctctgtcacccagactggagtgcaggggcgcaatctcagctcatgagaatttattttttggagagagatgaaggaaggatccaatgtcctatttttccatgtggataacaaatgatcccrgcaccctaggttgaatagtctagcctttcctggcaatctgaaataccaatcccgtgatatgtcaggtttccatcagtgtgtttattactgtcacattgttctgttgatctattcctgtgccagtctcacatagtcttaactactaatattttataatgtctctattgcacttagaaccagttcttccaccatttcttcttcaggagtgtacagctactcttgagctttttctcttccgtataggttttagaaagtttgtaaagtaccttgaaaaattcgattgggattttgattgaaattgtaatcactcttttgatcaatatggggataattgataaaattatggacaatttta

SEQ ID NO: 707476 - DNA, 578 bp, Homo sapiens
tgctgcattcacattgccaccattcactaagctatatattaatgacattccatttgtttttgttgtcattgtattttgtttttgtttttgagatggagtctctctctgtcacccagactggagtgcaggggcgcaatctcagctcatgagaatttattttttggagagagatgaaggaaggatccaatgtcctatttttccatgtggataacaaatgatcccagcaccctaggttgaatagtctagcctttcctggcaatctgaaataccaatcccgtgatatgtcaggtttccatcagtgtgtttattactgtcacattgttctgttgatctattcctgtgccagtcycacatagtcttaactactaatattttataatgtctctattgcacttagaaccagttcttccaccatttcttcttcaggagtgtacagctactcttgagctttttctcttccgtataggttttagaaagtttgtaaagtaccttgaaaaattcgattgggattttgattgaaattgtaatcactcttttgatcaatatggggataattgataaaattatggacaatttta

SEQ ID NO: 707477 - DNA, 1674 bp, Homo sapiens
ttttttaaaaaaagaaaaagtaattctgagaaggctacatactatacgattccatctatatgacattctgtaaaaagcaaaaatatagacagtagaaagatccatggttgccaagggtttcagggaagatggaggaggattaatgggtagaaaatagagatttttagggcagtgaagttgtttttgtgtgattcacacttgtgggtatatgacactgtgcatttgtcgaaacccgtaaaactgaacaacacaaagagtgaaccctaatgtaaactatagatattagttaataatagtgtatcaatattgattcatcaattgtaactaatgtatcacactaatgccagatattaatggggaaaactagcggggaagagaaagggggtaagagaggatggaaactgtattttctgaccaatttttctataaatctaaaattgttcaaaaaaataaagtctattaattaaaaaaaatctttactatgacataaaagactcttcactgtcaagatggtatcattcgccctaaacttagctccacaaattcttgcctatatcctttgcattttttaacttctcatttttcctaaccacgcagtgccattttttttgggtccagaacattgcactttgcttagaatactgctgtctttattcactgactgacaaacttctatgcatcaaggtaagcactgcttgcatgcctactatgtgccaggcctatcaaagtccctaccctagagaagcccacagtctattggaaagaaaacaactcaaacaaccattataattttttttttttttagaaaatctcgcaccctcacccgggctggagtgcagtggcgtgatcttggctcactgcaacctctgcctcctgagtagctgtgattacaggcatctgccagcactcccagctaatttttatatttttagtagagacagggtttcaccatgttggccaagctggtcttgaactcctaacctcgtgattcgcctgccttggcctcccaaagtgctgggattacaggcgtaagccactgcgcccgccccatcatgaattttttactgcagtaattagtttcatccagttttcttgtttataatccacagtatcaaaattaccctcctgttttaaaatagcttctggaagcatctctgtttcttcagatggtaattctaccattatacaatggtgaaggaatgaaatagatggagtatcaactgtcatgtttattaccaaagtatattgccacatagggaatgtgcccattctacagggtagcaatgaggctcagggaagttccggaatttgggtaaggttgctraactagaaggttgcacagttcttgcaaactcagtgctttgcaagaacagaattaccatctgctgatggcttcaccccacacaacccagaaagtagccctagcaggtaacttatttcagattagaggttggttggcctgaaaagccaagctgaaatctagctgggcctatccataaaaagaaggcttgaaaacatcctccaaccccatgaataaatggagacactagccctagcctccttacagtcacgatgtggcagaggatgggttgtggttagtttttacactactgtatccactctgcctagcacagtgcctgacccacagcaaatgcacttgaaatatcagctaag

SEQ ID NO: 707478 - DNA, 599 bp, Homo sapiens
tcacatctatgtatgtatacaactagattgtgttctatttggatttggaactgagtcccattcatctttctactgctggagcctaatacaagctgtaacayagtagacattcagtaaatgcttgtgggattgaattctcgaaaattcacaaaaatgccaacttggggatgttaatggttcctaatattttatctagaatagaataattaaatgttactctcacagcgcatttataaccattactgtcgtttactccacgagccatataaacttcaggctctaaacacccaaaataccacattattatgttcttagcaagggataatttaactttgggatttacaaagacattctgaagtcttctttataagaaaaaataaatcatgaaataagtgtttcttcttcaagctctggacaatctcaagcacttcatggcagaagaaatgttcaacactgtgccatcggaggaattatttattcttgacctaactacaaataattttatgttctcaagtatagaattcacaattctcatattttatctcagctagcataaactgtaggtgtttttcttatttattattttgtcttatccttta

SEQ ID NO: 707479 - DNA, 599 bp, Homo sapiens
tcacatctatgtatgtatacaactagattgtgttctatttggatttggaactgagtcccattcatctttctactgctggagcctaatacaagctgtaacatagtagacattcagtaaatgcttgtgggattgaattctcgaaaattcacaaaaatgccaacttggggatgttaatggttcctaatattttatctagaatagaataattaaatgttactctcacagcgcatttataaccattactgtcgtttactccacgagccatataaacttcaggctctaaacacccaaaataccacattattatgttcttagcaagggataatttaactttgggatttacaaagacattctgaagtcttctttataagaaaaaataaatcatgaaataagtgtttcttcttcaagctctggacaatctcaagcacttcatggcagaagaaatgttcaacactgtgccatcggaggaattatttattcttgacctaactacaaataattttatgttctcaagtatagaattcacaattctcatattttatctcagctagcataaactgtaggtgtttttcttatttatwattttgtcttatccttta

SEQ ID NO: 707480 - DNA, 599 bp, Homo sapiens
tcacatctatgtatgtatacaactagattgtgttctatttggatttggaactgagtcccattcatctttctactgctggagcctaatacaagctgtaacatagtagacattcagtaaatgcttgtgggattgaattctcgaaaattcacaaaaatgccaacttggggatgttaatggttcctaatattttatctagaatagaataattaaatgttactctcacagcgcatttataaccattactgtcgtttactccacgagccatataaacttcaggctctaaacacccaaaataccacattattatgttcttagcaagggataatttaactttgggatttacaaagacattctgaagtcttctttataagaaaaaataaatcatgaaataagtgtttcttcttcaagctctggacaatctcaagcacttcatggcagaagaaatgttcaacactgtgccatcggaggaattatttattcttgacctaactacaaataattttatgttctcaagtatagaattcacaattctcatattttatctcagctagcataaactgtaggtgtttttcttatttattawtttgtcttatccttta

SEQ ID NO: 707481 - DNA, 599 bp, Homo sapiens
tcacatctatgtatgtatacaactagattgtgttctatttggatttggaactgagtcccattcatctttctactgctggagcctaatacaagctgtaacatagtagacattcagtaaatgcttgtgggattgaattctcgaaaattcacaaaaatgccaacttggggatgttaatggttcctaatattttatctagaatagaataattaaatgttactctcacagcgcatttataaccattactgtcgtttactccacgagccatataaacttcaggctctaaacacccaaaataccacattattatgttcttagcaagggataatttaactttgggatttacaaagacattctgaagtcttctttataagaaaaaataaatcatgaaataagtgtttcttcttcaagctctggacaatctcaagcacttcatggcagaagaaatgttcaacactgtgccatcggaggaattatttattcttgacctaactacaaataattttatgttctcaagtatagaattcacaattctcatattttatctcagctagcataaactgtaggtgtttttcttatttattatwttgtcttatccttta

SEQ ID NO: 707482 - DNA, 599 bp, Homo sapiens
tcacatctatgtatgtatacaactagattgtgttctatttggatttggaactgagtcccattcatctttctactgctggagcctaatacaagctgtaacatagtagacattcagtaaatgcttgtgggattgaattctcgaaaattcacaaaaatgccaacttggggatgttaatggttcctaatattttatctagaatagaataattaaatgttactctcacagcgcatttataaccattactgtcgtttactccacgagccatataaacttcaggctctaaacacccaaaataccacattattatgttcttagcaagggataatttaactttgggatttacaaagacattctgaagtcttctttataagaaaaaataaatcatgaaataagtgtttcttcttcaagctctggacaatctcaagcacttcatggcagaagaaatgttcaacactgtgccatcggaggaattatttattcttgacctaactacaaataattttatgttctcaagtatagaattcacaattctcatattttatctcagctagcataaactgtaggtgtttttcttatttattattwtgtcttatccttta

SEQ ID NO: 707483 - DNA, 599 bp, Homo sapiens
aggtcttgtccagggctctccagggcaccatgctcctccctcaagaggactcctgtgggttatgaatgacagaagcccaggctgccatcctcaagcaaggcaccccccaatcctcctggccgggaggggctgctgggagcccctggcaccagcgggcttctgtgggcggtggaaggaggagagggctgtgcgggctgattccaaaactcactgggtgacaccacctgcccagggagggcccagcactgccgtccagggggtctgcctgtcgtccagtctccttgagagcayctccagctccctccagtctccacggctcttcagagggcacgggaggttctgctgaggggcgggtgaccaggcccagatgttaaaccctcccaaataacgggcatattcaatgtaattgaaacttccaccacagggagaatgagtctatggtgacggggtggcaggaggggtcctagaaggcgcccactgtgcttactggaggcctgaccccgacaacggctgaaacaggggtctcccccaggggccactgaaacaggggtctcccccaggggccacctcccagggcacgcttggatttcactatgggc

SEQ ID NO: 707484 - DNA, 603 bp, Homo sapiens
gactacagaaaaggaggtcaaaatgactcagtgtgagaaagactcagtgcatccttgctggctttgaagatggcagagcagtgccaagacatgtgggctgcctctggaagccggacaaggcaagcaagtgtatgctgccctagaagctccagaaaggaacacagccctgctgacatagccctgctgacacttggattttagcccagggagacccattttaaacttttgacctccagaactgtaatataataaatatgtgttgctctaagctactaaatttgtgacaattttttatagcgctataggaaactaataagcatgtgtgttcagtacaacctatgcctcacccccactttgccctgctcctaatggtaaccacatttaccaytttctgctttattctccctgtggatatatttttaataaacaagtacatgtgtgtttactctagcttttttctttcttatgcaaatattctatgctatatacaacaactctgctccttgtttttttttttttttacttaacaatgcacattcttgttctttctttgccccacaaagtagccccacccatgacacaagtttttgcaatcaaaatgtc

SEQ ID NO: 707485 - DNA, 814 bp, Homo sapiens
  misc_feature 594, 595, 596, 597, 598, 599, 600, 601, 602, 603, 604, 605,606, 607, 608, 609, 610, 611, 612, 613, 614, 615, 616, 617,618, 619, 620, 621, 622, 623, 624, 625, 626, 627, 628, 629,630, 631, 632, 633, 634, 635, 636, 637, 638, 639, 640: n = A,T,C or G
  misc_feature 641, 642, 643, 644, 645, 646, 647, 648, 649, 650, 651, 652,653, 654, 655, 656, 657, 658, 659, 660, 661, 662, 663, 664,665, 666, 667, 668, 669, 670, 671, 672, 673, 674, 675, 676,677, 678, 679, 680, 681, 682, 683, 684, 685, 686, 687: n = A,T,C or G
  misc_feature 688, 689, 690, 691, 692, 693: n = A,T,C or G
gctctggagaccgtctgaaggaggctcacagatgttgaccctgttcaaatgccacagccttcaacctgcctgttcagtgggcagggacgttcgtggcgcctcagccagaggcctctgtggtcattagaagaggggattcaccatccttcattctgtcctgtgcatgctccactacyctgcattttattttattatggtaataaacacacattgtaaaatttattgtcttacccatgtttaagtgtatagttcagtagtcttaagcatatttacattattttgaaagagatctccacaactttttcatcttttagtgctggaactatatatccattcaacaattctcttttccccccttctctggaaaccaccattctatgaatctaactactttctagacctcatataagtgatattatgtagtatttgtgttttgtgattggctcaatttacttgggataattttcacaagtttcatctatgttgcagcatgtgacaggttttccttgcttttaggattaaataatattccatatttacatatgcatacatatgtatatataaaatattccatacgtgtgtgttgctttctannnnnnnnnnnnnnnnnnnnnnnnnnnnnnnnnnnnnnnnnnnnnnnnnnnnnnnnnnnnnnnnnnnnnnnnnnnnnnnnnnnnnnnnnnnnnnnnnnnnttacagttttgcaggttagaaatcaaaagtgggcctcactggactaaaaccaaggtgtcagctgggctgcattccttctggatgctccagggaagaatgcttttcctttccttttccagtt

SEQ ID NO: 707486 - DNA, 814 bp, Homo sapiens
  misc_feature 594, 595, 596, 597, 598, 599, 600, 601, 602, 603, 604, 605,606, 607, 608, 609, 610, 611, 612, 613, 614, 615, 616, 617,618, 619, 620, 621, 622, 623, 624, 625, 626, 627, 628, 629,630, 631, 632, 633, 634, 635, 636, 637, 638, 639, 640: n = A,T,C or G
  misc_feature 641, 642, 643, 644, 645, 646, 647, 648, 649, 650, 651, 652,653, 654, 655, 656, 657, 658, 659, 660, 661, 662, 663, 664,665, 666, 667, 668, 669, 670, 671, 672, 673, 674, 675, 676,677, 678, 679, 680, 681, 682, 683, 684, 685, 686, 687: n = A,T,C or G
  misc_feature 688, 689, 690, 691, 692, 693: n = A,T,C or G
gctctggagaccgtctgaaggaggctcacagatgttgaccctgttcaaatgccacagccttcaacctgcctgttcagtgggcagggacgttcgtggcgcctcagccagaggcctctgtggtcattagaagaggggattcaccatccttcattctgtcctgtgcatgctccactactctgcattttattttattatggtaataaacacacattgtaaaatttattgtcttacccatgtttaagtgtatagttcagtagtsttaagcatatttacattattttgaaagagatctccacaactttttcatcttttagtgctggaactatatatccattcaacaattctcttttccccccttctctggaaaccaccattctatgaatctaactactttctagacctcatataagtgatattatgtagtatttgtgttttgtgattggctcaatttacttgggataattttcacaagtttcatctatgttgcagcatgtgacaggttttccttgcttttaggattaaataatattccatatttacatatgcatacatatgtatatataaaatattccatacgtgtgtgttgctttctannnnnnnnnnnnnnnnnnnnnnnnnnnnnnnnnnnnnnnnnnnnnnnnnnnnnnnnnnnnnnnnnnnnnnnnnnnnnnnnnnnnnnnnnnnnnnnnnnnnttacagttttgcaggttagaaatcaaaagtgggcctcactggactaaaaccaaggtgtcagctgggctgcattccttctggatgctccagggaagaatgcttttcctttccttttccagtt

SEQ ID NO: 707487 - DNA, 814 bp, Homo sapiens
  misc_feature 594, 595, 596, 597, 598, 599, 600, 601, 602, 603, 604, 605,606, 607, 608, 609, 610, 611, 612, 613, 614, 615, 616, 617,618, 619, 620, 621, 622, 623, 624, 625, 626, 627, 628, 629,630, 631, 632, 633, 634, 635, 636, 637, 638, 639, 640: n = A,T,C or G
  misc_feature 641, 642, 643, 644, 645, 646, 647, 648, 649, 650, 651, 652,653, 654, 655, 656, 657, 658, 659, 660, 661, 662, 663, 664,665, 666, 667, 668, 669, 670, 671, 672, 673, 674, 675, 676,677, 678, 679, 680, 681, 682, 683, 684, 685, 686, 687: n = A,T,C or G
  misc_feature 688, 689, 690, 691, 692, 693: n = A,T,C or G
gctctggagaccgtctgaaggaggctcacagatgttgaccctgttcaaatgccacagccttcaacctgcctgttcagtgggcagggacgttcgtggcgcctcagccagaggcctctgtggtcattagaagaggggattcaccatccttcattctgtcctgtgcatgctccactactctgcattttattttattatggtaataaacacacattgtaaaatttattgtcttacccatgtttaagtgtatagttcagtagtcttaagcatatttacattattttgaaagagatctccacaactttttcatcttttagtgctggaactatatatccattcaacaattctcttttccccccttctctggaaaccaccattctatgaatctaactactttctagacctcatataagtgatattatgtagtatttgtgttttgtgattggctcaatttacttgggataattttcacaagtttcatctatgttgcagcatgtgacaggttttccttgcttttaggattraataatattccatatttacatatgcatacatatgtatatataaaatattccatacgtgtgtgttgctttctannnnnnnnnnnnnnnnnnnnnnnnnnnnnnnnnnnnnnnnnnnnnnnnnnnnnnnnnnnnnnnnnnnnnnnnnnnnnnnnnnnnnnnnnnnnnnnnnnnnttacagttttgcaggttagaaatcaaaagtgggcctcactggactaaaaccaaggtgtcagctgggctgcattccttctggatgctccagggaagaatgcttttcctttccttttccagtt

SEQ ID NO: 707488 - DNA, 644 bp, Homo sapiens
aataagctctatgaactgtatgaatgtcaatttcctggtattgataatatactatattcatgaaacatgtcagctttgggggaggctggatgatgcgtacaccgagttacccatataattctctgtaacctcttgtgaatctatattacaacattttaaaaatatttaagtgggtccggcctgaaatattagcagtgtaggcatagaaaagattagtgaggtttatgtcagaaagactaaataagctgctaaataatagttaaggtctgatagcaggagattttcatggcaccagcacaaataacaccgagcaattttggttttaatccctggagtttaaaaaaagaaatctctaaaacaaaattcccaggtatttgtgtaatgacaagaccactagattcgagatatggcttcctaaaatgaagatttcaaaagcaaacatactaattcaatgtatatgtgagcttttaatagatcagtgatattatttaaatcagcagtcmccaacctttttggcactgggaaccagtttcatagaagacaatttttctatgaaccaccgtcggagaggatggtttccggatgattcaagcacatttcatttactgtgcactttatttctattattattacactgtaatata

SEQ ID NO: 707489 - DNA, 644 bp, Homo sapiens
aataagctctatgaactgtatgaatgtcaatttcctggtattgataatatactatattcatgaaacatgtcagctttgggggaggctggatgatgcgtacaccgagttacccatataattctctgtaacctcttgtgaatctatattacaacattttaaaaatatttaagtgggtccggcctgaaatattagcagtgtaggcatagaaaagattagtgaggtttatgtcagaaagactaaataagctgctaaataatagttaaggtctgatagcaggagattttcatggcaccagcacaaataacaccgagcaattttggttttaatccctggagtttaaaaaaagaaatctctaaaacaaaattcccaggtatttgtgtaatgacaagaccactagattcgagatatggcttcctaaaatgaagatttcaaaagcaaacatactaattcaatgtatatgtgagcttttaatagatcagtgatattatttaaatcagcagtccccaacctttttggcactgggaaccrgtttcatagaagacaatttttctatgaaccaccgtcggagaggatggtttccggatgattcaagcacatttcatttactgtgcactttatttctattattattacactgtaatata

SEQ ID NO: 707490 - DNA, 845 bp, Homo sapiens
gagtaataggcagcccctgtgggattgagagttcacagatctctgatccctggagagccccaaataaggtgttgagtcaaaggcacaggctcatgggcagggatgaaatggtttgaggacttcttgtagcgagttacttaatctctctgcacctccattttgttatctggcgaatagagttgacgcaagccttgtgggttacagtgagaataaaatgaagtgaagtgacagctgccaagggcgtggccccagggcctggctgtagtcaatgctgagtagatggccacggagaggcctatgtttgaggacgtgaggcccgtcatggcagagggcagcaggctttagccacggtcctgttggcagctggaactggctggttcgcccaccaccaccttcctgtttggagctgtggagccacggagcgattccatagtactgaagaagccgattgcctgcagccgggagcccggggcatccaggctgaacaacagtgcccccaggtgtcggctgcagaatgaarggccactcactttcctcctcctttgcctttaggaagctgagtctcccagcctgcttcatggcagaagaaaagggtcaggccccagttttccctgaagagaggcacagggagcacaggggggtggaggcctccagggtgggggcagagggtagcaccctgggcctgggagggctgggcgtctgaggggttgttggggccaccagcctggacctcgagactcccccatgggagctggaagggccttggagagcacctgagacgccccgctccgtcattcgcatgggaaaacaggctcagagaagagaggcggtctgcccagatcaca

SEQ ID NO: 707491 - DNA, 574 bp, Homo sapiens
tggaatgggatctatcaaaattttaaacgcacatgtttacttgcttgactcagaacttttatacgtacttttaggaatttatgtcataggtatattcacatagatgcacaatgatatctatatatgtatgatccttgcagaattatttataatggtaaataaaaacagacaacgcaacatccatcaataggagctggttaaataaattatgtctcttgcacacaataaaatactatgcagccactaaaaagaattaaatagaactatctgtaccgatgtaaataagtgtctaagatatactttgaagtaaatattaagtatttaagtatttcattgatatgaacaatgaaagtttttcatttctatgaaaaaatataaaggatagacacacagatgcatgtgcgtgtgcacacamacacatcagatgcttgtatgtgaagatccggtgggagagctttgagccctttcctctgctttttggggcattatggtgctgtagcagggatgcattgcagtcgagttctccacccagttccacccagcatccccttgggatagcatatattcacagtgc

SEQ ID NO: 707492 - DNA, 654 bp, Homo sapiens
tgaggagtctggatgattcactctgaaggaaaaggggagagaagagagaatcactgctctgatttgaagtgtgcaaagttcttatctatgtcacttaacactggtataattaatacagaaaggaaaatgaccctcaagaggaaggtttcattgagcagagcgtaagaggaacaataagagggtaggagacacctcctgagaaggtttgcttgtgttcagctgaagattaataggaaacagtgaaaaagcaacgtcctgtgatcagtaactttaaagacaagcttggttctctctttctggcactactgacattcccaccattctagcttccaaattctggaaaaagagaagatgattaacaaaaatagagaatgtagaaacttctggttttgtgcctacaggattggcaccagaccctcagtgctcacttgctccatctacaaggcagcacccctcccagaggcagccrgggaggcctctccaccagggcctgcgctggctggtggtgcggcttcctccctgggcgcagcaccaagtgcacgtctcctacttggccatcttgcggatcatgtagttgaggatgcccccgttgaggaaataagtgagctccacatcagtgtcaaacctcatgacagcctggaaggtcttgccagt

SEQ ID NO: 707493 - DNA, 1096 bp, Homo sapiens
tgcttctgttcattcttccaagcataattattgagtgcctgctaggtgcaaagtgattctctaggcactggaaaaacagcagtgacaaaactgacaaacatacctctcggaaacttgtggtcatgtaaattcatgttactgagatgtaatagaatcacagtgaattaaagtgcatgccccaaaacagcatatatggaagaacactcaccccaaccaagaatgcccaagccatcaatcatggtagtgtgcgagtctgtgcccacgaggctgtctgggtaataatatccatcctgatcaaataccactcttgccaaatattccaaattcacctggtggatgattcctgagccagggggaataatccgcatgttgtgaaaagcctgggaaccccactgggattgacaaatggaaagaacactatgaacgcgtgaagtacttctactcagcccatctccttggcatctctccctcgtaccctgcmtacaaagaaaaccaaacaatggaaccagaccctgcccatacctttaaaaattcaaatcgctctctatttctttcaaattccaggtcttgattcttctgtaaactgtctgccctgtcagagagaaaaattaaatgtatacaatttgagacttaacatattagtggtcaaatttattggtgatgaagaaacaaaatggaattgcatctccttgcttgctgagtgataatatgaatttcattcatgactatttacaatgcagaataggagaggtaactagtgaaagtaaagagagtaattattgtttggttcaagtgattcctacaatgcctttaactatggtaggcagaaaacatgaactgaattgaagttaaaactaatctaatcataaagtctgactcttaggaacagactcaagacattcatatgacaacagcagcctggacatttaaagaactcttgtttctatactcctcatccatgacctcattataacatctctctgacctggaatgtgtctgggctggtattttcatctctttatgttgggagacagaaaactagcaatgcttagaggatcagtaccttatagaatcacaatctcctgtgtgtaggacc

SEQ ID NO: 707494 - DNA, 619 bp, Homo sapiens
tgctgaaaatgcaatggtgcaaaagctgtgtgctcactgcccactggcactctgagtctggtgaaagggcaatggcaaaagaatgcaatcatcactgcctggtacgggagcacttggaatgggccatgaacccacctgggggtgggggttggggggattggaatgctttccagaaggacatggtatcaatgtggtctgaaggatgacggtgagtcagcccgagcaagatgggcagacactccttgggaaaaaagggaccggaagcatgtgttatttacctcatagaaaacacatctggagccgggcacagtagctcgcacctgtaatcccagcactttgggaggctgaggcgggcagatcacgaggtcaggagttcaagaccagactggccaacatggtgaaaccccatctctgctaaaaatataaaaattagccgggcatggtggcaggcgcctgtaatcccagctactcgagaggctgaggcaggagaatcacttgaacctgggaggtggaggttgcagtgagccaagatcgcgccactgcactccaacttgggcracaaagcaagacgccatctcaaaaaaaaaaaaaaagaaaacatatttggttaccacacaga

SEQ ID NO: 707495 - DNA, 1369 bp, Homo sapiens
  misc_feature 651, 652, 653, 654, 655, 656, 657, 658, 659, 660, 661, 662,663, 664, 665, 666, 667, 668, 669, 670, 671, 672, 673, 674,675, 676, 677, 678, 679, 680, 681, 682, 683, 684, 685, 686,687, 688, 689, 690, 691, 692, 693, 694, 695, 696, 697: n = A,T,C or G
  misc_feature 698, 699, 700, 701, 702, 703, 704, 705, 706, 707, 708, 709,710, 711, 712, 713, 714, 715, 716, 717, 718, 719, 720, 721,722, 723, 724, 725, 726, 727, 728, 729, 730, 731, 732, 733,734, 735, 736, 737, 738, 739, 740, 741, 742, 743, 744: n = A,T,C or G
  misc_feature 745, 746, 747, 748, 749, 750: n = A,T,C or G
gggtcctcaccagaagtcaaggcttctgtcttttcttcttcttgagaatcctttccaacccagacaaagacctggaggtgagatgcaacaggaaaggtacatgaggagtgctgatcaaattcacggctggaggaagactggggaggggccaggtatcagaccagacaaagccctcccctttctaacagagcccatgaactaagactggaaggatttggaacagaggttgaaaactggcaacctacaaacatgttttgtttgctcacccaccaccttgtgttagccaacaatgtctttttaaaccgttatgacataaaaatctagatttccaacttctctttaaaaattggaggatctagcagcctgggccttcaaacctcacttgagtcaagctgcgcaggagctgcccctttgagatgagcagttctagtttgcctcagactccactgctccttcacgtctccccagcccagcctgcttcattcgctaacattgccaaccaggtaccatcaggcattgagtttgagattcttctctaaaggtccatgagttatctcttgaacagcattcactcgttcaacaaatgagtggccaaacatattctcacccatttatttatccaacaaatatgcaccgagagtctactatgtnnnnnnnnnnnnnnnnnnnnnnnnnnnnnnnnnnnnnnnnnnnnnnnnnnnnnnnnnnnnnnnnnnnnnnnnnnnnnnnnnnnnnnnnnnnnnnnnnnnnmtttttatgcatatctaaaatattacttcaaagagcacctatcattgataaaatggcattagacaataaaatgtcagacttcatttttctcacttttttttgagacggagtctcactctgtcacccaggctggagtgcagtggcatgatctcagctcactgcaacctccgcctcctgggttcaagtgattcttctgcctcgacctcccaagtaggtgggattataagcacccaccaccaagcctggctaattgttttgtatttttagtagagatggggtttcaccatgttggccaggctggtcttgaactcctgacctcaagtgatctgcccacctcagcctctcaaagtgctgggtttacaagtgtgagccaacatgtctggccctctcttacttatttataaatgtgttcccaactaaagtggaagcccctcgaaggcaggcattctattttgctcatcataggattctcagcactcagcattttgcctgcaagaccatggtgctgaataaatgttggctgactgaatccctaacagatgaacaaacagattaagtagccaatggatcaatcaatgacaactgctgaatggctcaagctgcaatcatttttggtccc

SEQ ID NO: 707496 - DNA, 1369 bp, Homo sapiens
  misc_feature 651, 652, 653, 654, 655, 656, 657, 658, 659, 660, 661, 662,663, 664, 665, 666, 667, 668, 669, 670, 671, 672, 673, 674,675, 676, 677, 678, 679, 680, 681, 682, 683, 684, 685, 686,687, 688, 689, 690, 691, 692, 693, 694, 695, 696, 697: n = A,T,C or G
  misc_feature 698, 699, 700, 701, 702, 703, 704, 705, 706, 707, 708, 709,710, 711, 712, 713, 714, 715, 716, 717, 718, 719, 720, 721,722, 723, 724, 725, 726, 727, 728, 729, 730, 731, 732, 733,734, 735, 736, 737, 738, 739, 740, 741, 742, 743, 744: n = A,T,C or G
  misc_feature 745, 746, 747, 748, 749, 750: n = A,T,C or G
gggtcctcaccagaagtcaaggcttctgtcttttcttcttcttgagaatcctttccaacccagacaaagacctggaggtgagatgcaacaggaaaggtacatgaggagtgctgatcaaattcacggctggaggaagactggggaggggccaggtatcagaccagacaaagccctcccctttctaacagagcccatgaactaagactggaaggatttggaacagaggttgaaaactggcaacctacaaacatgttttgtttgctcacccaccaccttgtgttagccaacaatgtctttttaaaccgttatgacataaaaatctagatttccaacttctctttaaaaattggaggatctagcagcctgggccttcaaacctcacttgagtcaagctgcgcaggagctgcccctttgagatgagcagttctagtttgcctcagactccactgctccttcacgtctccccagcccagcctgcttcattcgctaacattgccaaccaggtaccatcaggcattgagtttgagattcttctctaaaggtccatgagttatctcttgaacagcattcactcgttcaacaaatgagtggccaaacatattctcacccatttatttatccaacaaatatgcaccgagagtctactatgtnnnnnnnnnnnnnnnnnnnnnnnnnnnnnnnnnnnnnnnnnnnnnnnnnnnnnnnnnnnnnnnnnnnnnnnnnnnnnnnnnnnnnnnnnnnnnnnnnnnnctttttatgcatatctaaaatattacttcaaagagcacctatcattgataaaatggcattagacaataaaatgtcagacttcrtttttctcacttttttttgagacggagtctcactctgtcacccaggctggagtgcagtggcatgatctcagctcactgcaacctccgcctcctgggttcaagtgattcttctgcctcgacctcccaagtaggtgggattataagcacccaccaccaagcctggctaattgttttgtatttttagtagagatggggtttcaccatgttggccaggctggtcttgaactcctgacctcaagtgatctgcccacctcagcctctcaaagtgctgggtttacaagtgtgagccaacatgtctggccctctcttacttatttataaatgtgttcccaactaaagtggaagcccctcgaaggcaggcattctattttgctcatcataggattctcagcactcagcattttgcctgcaagaccatggtgctgaataaatgttggctgactgaatccctaacagatgaacaaacagattaagtagccaatggatcaatcaatgacaactgctgaatggctcaagctgcaatcatttttggtccc

SEQ ID NO: 707497 - DNA, 1369 bp, Homo sapiens
  misc_feature 651, 652, 653, 654, 655, 656, 657, 658, 659, 660, 661, 662,663, 664, 665, 666, 667, 668, 669, 670, 671, 672, 673, 674,675, 676, 677, 678, 679, 680, 681, 682, 683, 684, 685, 686,687, 688, 689, 690, 691, 692, 693, 694, 695, 696, 697: n = A,T,C or G
  misc_feature 698, 699, 700, 701, 702, 703, 704, 705, 706, 707, 708, 709,710, 711, 712, 713, 714, 715, 716, 717, 718, 719, 720, 721,722, 723, 724, 725, 726, 727, 728, 729, 730, 731, 732, 733,734, 735, 736, 737, 738, 739, 740, 741, 742, 743, 744: n = A,T,C or G
  misc_feature 745, 746, 747, 748, 749, 750: n = A,T,C or G
gggtcctcaccagaagtcaaggcttctgtcttttcttcttcttgagaatcctttccaacccagacaaagacctggaggtgagatgcaacaggaaaggtacatgaggagtgctgatcaaattcacggctggaggaagactggggaggggccaggtatcagaccagacaaagccctcccctttctaacagagcccatgaactaagactggaaggatttggaacagaggttgaaaactggcaacctacaaacatgttttgtttgctcacccaccaccttgtgttagccaacaatgtctttttaaaccgttatgacataaaaatctagatttccaacttctctttaaaaattggaggatctagcagcctgggccttcaaacctcacttgagtcaagctgcgcaggagctgcccctttgagatgagcagttctagtttgcctcagactccactgctccttcacgtctccccagcccagcctgcttcattcgctaacattgccaaccaggtaccatcaggcattgagtttgagattcttctctaaaggtccatgagttatctcttgaacagcattcactcgttcaacaaatgagtggccaaacatattctcacccatttatttatccaacaaatatgcaccgagagtctactatgtnnnnnnnnnnnnnnnnnnnnnnnnnnnnnnnnnnnnnnnnnnnnnnnnnnnnnnnnnnnnnnnnnnnnnnnnnnnnnnnnnnnnnnnnnnnnnnnnnnnnctttttatgcatatctaaaatattacttcaaagagcacctatcattgataaaatggcattagacaataaaatgtcagacttcatttttctcacttttttttgagacggagtctcactctgtcacccaggctggagtgcagtggcatgatctcagctcactgcaacctccgcctcctgggttcaagtgattcttctgcctcgacctcccragtaggtgggattataagcacccaccaccaagcctggctaattgttttgtatttttagtagagatggggtttcaccatgttggccaggctggtcttgaactcctgacctcaagtgatctgcccacctcagcctctcaaagtgctgggtttacaagtgtgagccaacatgtctggccctctcttacttatttataaatgtgttcccaactaaagtggaagcccctcgaaggcaggcattctattttgctcatcataggattctcagcactcagcattttgcctgcaagaccatggtgctgaataaatgttggctgactgaatccctaacagatgaacaaacagattaagtagccaatggatcaatcaatgacaactgctgaatggctcaagctgcaatcatttttggtccc

SEQ ID NO: 707498 - DNA, 596 bp, Homo sapiens
gggatgtggagagaaaagatagtgccttrtgggtttggcctgggggagggaatttggagtttttgacaattgagagtcttgctgagcgtggtggctcacgcctgtaagtccagcactttgggaggctgaggcaggcgaatcacctgaggtcaggagttcgagaccagcctggccaatatgatgaaaccccgtctctactaaaaatacaaaaattatctgggcatggtagcgggtgcctgtaatctcagctactcaggaggctaagacaggagaatcgcttgaacccgggaggcggaggttgcagtgagccaagatcgcgccattgtactacagcctgggcaacagagtgaaactccatctcaaaaaaaaaaaaaaaaaaaaaaagaaagaaagaaggaaaattgagagtctctgtagaatctcaaggctatgagaaaatttgaattggctaaagagcttttggggagtgttactgtggtttagaccgtaggctctctttaatgtttcttgaaaactaataatgaagatttgaatttcttttcaagtatttttgctactgacctgtttctctttaaaaatgtgtctgagccctgctg

SEQ ID NO: 707499 - DNA, 2082 bp, Homo sapiens
  misc_feature 1278, 1279, 1280, 1281, 1282, 1283, 1284, 1285, 1286, 1287,1288, 1289, 1290, 1291, 1292, 1293, 1294, 1295, 1296, 1297,1298, 1299, 1300, 1301, 1302, 1303, 1304, 1305, 1306, 1307,1308, 1309, 1310, 1311, 1312, 1313, 1314, 1315, 1316: n = A,T,C or G
  misc_feature 1317, 1318, 1319, 1320, 1321, 1322, 1323, 1324, 1325, 1326,1327, 1328, 1329, 1330, 1331, 1332, 1333, 1334, 1335, 1336,1337, 1338, 1339, 1340, 1341, 1342, 1343, 1344, 1345, 1346,1347, 1348, 1349, 1350, 1351, 1352, 1353, 1354, 1355: n = A,T,C or G
  misc_feature 1356, 1357, 1358, 1359, 1360, 1361, 1362, 1363, 1364, 1365,1366, 1367, 1368, 1369, 1370, 1371, 1372, 1373, 1374, 1375,1376, 1377, 1407, 1408: n = A,T,C or G
caggtttcacagttaataagtggtagagtgagtgtttgagtttaggattatacatcaaagtccctgtggaccaaataaactctggactctattagtcctctagtcaccactgcaaacaggttattttgtgcaaaattcaattctaaatgataaatggccagcctgcagacgtaattctagctactatttagttgagcatctatcatgtaccatgagtgttcttcattatagcctcgtcttgctgaaaagcctttaaggaagggggaaactaaggcccagagagggtcagtggcttccataaggcaagacattaaggaacaactggtgtcacaaaataacaatagtattggattataacccatagaatgaaataaatatccatgagtccatcctaatctaaataattaattaaacaaaaaataaagggaaaacttgggtcagctcttccatacagaagaattttaattaataaatgtagaaggaatgacggaaatagaaaatcagcatacacaataataattattgcaggcaagagctaaaattagtgtgcaaaagtttaaggagaaacaggaaatttgcaaagtaacccctcctttccaaggcattttttttattacaaagggaaaaataataactctatagtggagaaacatgacagatagcactttaaccaagataccaagattaacatcaccagtaaaaacacatgttaacatcaggtacctcctgataccatgcactgagaagtacacatcatctctgtggcattcttcccaataatgcataaccttaatcaaatattgagaaaacatcaggcaaattcaatgtgaggaacattctccaaaataactgaccttcaaaagtgtgaggtcatgaaagacaaggacagactggattcacagtcagagattggagagacacgtcaactcaaggcaatgtgggatcctgaaacatagacaagtatagtagtgggaaaactgggtgaacacagaaagtctgtagtttagttaatgctatggtagaatagcattaactaaattggctaatattggcttctcattttgatagttgtactgtgattacacaggatgctaacattaggggaagatgagtgaaggttatactttatcatttttgcaacttttttcatatgtctaaaattattaaaattttaaactaaagttataaaagagaagtctttaggttgtttattgttctttatattttgactctatttaacgtaacttttaatgcccattcttgggtagtaaagtaaannnnnnnnnnnnnnnnnnnnnnnnnnnnnnnnnnnnnnnnnnnnnnnnnnnnnnnnnnnnnnnnnnnnnnnnnnnnnnnnnnnnnnnnnnnnnnnnnnnntgggtagtagagtaaaggaaaggatggggnngccaccctcaaaacaaaactgtcttatctcatgtagccactaaattgctcagaggtgtttctgaatacttctctctgcattatacagctgttatagccttttgattttgaggatacgatgtgagtgtagctttcacttgggttgcagggtagttgctgtgcacaactgcaaggactttggactcagaaagatatgaattaaaaatcccatctctcctgattagtaagctgtgtgatcttgaccaagctatgcagcctmtctgagtctctgtcctgatggataaagcaaataacaataccaacctgtagggttgatatgagaatgaaagataaggtatatcaatgcttagcacatggtacaccttgagtatctggtatgtgttattttcactcttggttgttattattattcttacaattattatgcattggctaggtccaggtgagacatgaggaaacacactcatgattagtacctctaaaacctagaaatgtttataagaacatcttttaaaggcagggggcactactattaagatcattggagagagaaggcggaaaatgggccttggataattagaaaaatggactcaaagacataaacagagacatgctggtatggacattttaaacagatattaattgaccaacatttttttttttcaccagctcctg

SEQ ID NO: 707500 - DNA, 661 bp, Homo sapiens
tgctaacttctctaggcagcaataatgcagcacaaagagtaaggcttgcctgaggtcacacagccagcaaatcaggattcactctccagcttggtggcagaggctgtgtgcttcaccattacctttcgcaaggcccccttggcttggaggggcaaagctgtttcctaaacatcaatctttttttctcaccaggaccaaagtcagaaggcctgcgttagacccctggttttccccctaaatagctatgtgacrtggaacactgaacctcagtatcaccatctgtaaaatgggaatgatgattctctcctatattttctctctctctttttcaccactttgtggactacatttctcctgttcctgggtctgttctcttgcaacatataagtttggtaaggtagtcaatagaaaacatttggttactgaaaagtggaattgattgatactcttttctttgagctaatgctgaaacactggattccccaacaacaactaaattttgtgttcagagtttcttccctcactcaaagaggaaagcatggcactgttattattttgtatcttttctttgggataaccatttctgaaccagtgttgcatggatttggctgctgtcttgggaacacagtactgatgttgctcctggtgagcgtgcactgaa

SEQ ID NO: 707501 - DNA, 642 bp, Homo sapiens
tcccatgctccatgtgggcggactcctgttaggcaggtgggaaaggagaaaccagactgcctggaacctgcccacagggcctctacccagtggggcatcagggaggtaccacccattccagtcacttgttgaaaactgttcccactctgggggaggggagggtaagtcatggtctctctctgtaagaaatcacaggtgcatgtgtgtgcacatgcatgcaccagctatctcctccttctccccaacaaaatgacagttggcattcgtagagcctgtactctgagacggggattttgtgcttgacgtgtattatctaatttaatctacttaaccctataagttagatgaaatattatccttgttttacaaatgaagaaattaaggtagaggtaatgtgtcatctctagtactctagagtttctaatgccccaggtatgcttctttttattacaggataggctagggtaggctagggtaggctaggctagggtagggtagggcagggcagggtagtgtagggtagggtagcatctacaccaatgctgtgcatagacctttctgcaattatgggaatgttctgtgccgcccagtgtggtaacakctagccacatgtgactgttgagcatgtgaaatgggactagt

SEQ ID NO: 707502 - DNA, 1720 bp, Homo sapiens
ttcaatagaacatctttttagtaaacattggatattggttcctacttttattccactggtgggaaaggcttatgtgttcctatgtagtttatgtccaaaccgactgtaagtggttcttctgtcagcactttaaagaatgatggagggcctggcatggcggctcacacctgtaacaccagcactttgggaggccaaggygggcagatcccttgagaccaggagtttgagaccagcctcgccaacatgatgaaaccctgtctctactgaaaatacaaaaaattagctggatgtggtggtgtgtgcctgtaatcccagttgttcggtaggctgaggcatgagaattgcttgaaccagggaggcaaagattgcggtgagtggagatggtgccattccactccagcttgggcaacagagcaagactctgtctggaaaaaaaaaaaaaaaaaagatggagaaagactttataggctgttgtagtttagactctgtccaactagaagcatcatgtggctttcagagaaaaacactctagtcaaccaatggagaaatgcagaggaggaaatgtgagacttattttcaaactgaagacaacaattaagaagaggtagaacttctcaaagatacgttttcatgaaccactatttatgtattatatagcaacagatattatggtgacttgtacagccattaccattacccaatgtgatgcatgttttcctgttctgtgtctatcacatgtctatataggccatgcctatttatgtttttcctgtttgtttgggtctcagatcagtgagtgcctttgttcatcttgaaaatggtattgatagcaacacagaatcaaaatacagttttcaagaaatagaaatcctcagattgttttagaccctgaatttaatgacagcagcaggaattataaaccctcggttctgatgagaaaaagtcagggacttatttagataaaaatagcttacagggtttttcctaagggtcagcaaagtttcctactcatctgtacctttaggacttcataatgatttagctcaatttaatcccagattagcagtgaaagattaatactgagttttctaaggtgggaaattccgtatgaacaataataggtaacatttcctgagtactgaagacaggtcagacagtgtcagtgtttagcactgcttcttatagatcatctctgaatcatcacaacatccctaagaggctgatgccatcatgcccattttacagatgaggaaattgagggatttgctgacagtgacacagagtaaggaataaagtcatgctgtgagccaggcatccctgaccctgtggtcagcatttcagtgtgacactgtaaccagcatgcacatcattccttaccttaccagagctgtcctgtgccatagggattctggctcgcttttcctatgtatggtctctgctttgtaagagaaatcagtatttaccaagtacctatggtactggttggcttacactcagtgacttccggaaggctcaccaaaccctctgaggtaggaaagatcattcccattttaaggatgaagaaactgtggctgagtggctcaattacctaaagacaacgggcagtgagaaggggaaactcaagtctggctgagtcccaaaattatggcttttgccattgcccaaaaaattgtttggctttggagtcaaataggaaccccttacttggccctttacaatg

SEQ ID NO: 707503 - DNA, 706 bp, Homo sapiens
tggcaactgtttcctaacataccctttactgccctccttgccttcccagcttcacttctttactcctctaccaatattcttggggatctccttccaaatagaccacttgcacttgaaccccagtctcaggaaaggcctctaggggaacccaaaccaaaatagtgtctattttccaagtttctgctttgtctgtagaataatactttgcgtgactgggttgtcatatgtctgtgttcattcatttattcattgactcattttctttccccaaaagaaacaaatatatattgattgagtgcctacttgatgcaaaatcactgagccagctgctggaaagacagcggagaacagacataggccccgcctccagagcagcctgtcctgtaggaatacaatgtgagctacatatgtgatttaaagaaaaagaagaaactctagtatgtccaacagactgccatttcaatgtgtgctaggcctttgaaatcctgggctcattctccatttgcagctgtgctctstttgaactagccatggttcaagtgcttaatagtcacatgtgatgagaggctactggatagaacagcctagttcttaaagtttactctagtgaggatgggggcatcaggttctttaagaggtgatcaaacagtcggcgatcggtcacctaaactgttggttctccaacttggtgagcatgcaaatggcc

SEQ ID NO: 707504 - DNA, 595 bp, Homo sapiens
gcattgactcattaaatgtcctttcgttggtaaataaaggagagagaaaaaaactgaaagatgaatggaggaaaaaggaatgaaagaaataaagtaagagaggaagtaatccttataaaaagaaaatagaccaggagaatttgggaaaatagaaacctaaataaaaaactgtagcatcagtagattactttaaaygcttgttttctctagtagttaaatgtaaaataatataacaaggatacaaaattttggggtcacccattagcaaagattaaaaagaaatttaatatccagtttgggcaagtatgtggaaaaacagtcttgtacactgctagtggaaatataaataaataaactgtgtgtggaactaatgggtaaaactttattaaaatattcatacccattgactcaacaattccccttggctgtgcatggcagctcacgcctgtaatcccagtactttgggaggctgagggaggaggactgtttgagcccaggagtttgagaccagcctgggcaacatagggagatctgcctctccaaaaattaaaaaattaaaaaataggtggttgcagtggcacatgcctgtggtcct

SEQ ID NO: 707505 - DNA, 640 bp, Homo sapiens
tcgtgtgtgtctattatttctcaacctgccgatccacctgggaacaaagagagagccccgttgcattgcgggctgctggccagatcccgcaataagactgtgttcaaaagttgactgctgcttcctagctctgactttgggcagcttgtttgacctctctgcgcccccacttggttcccatgcagagatgctagtgtccctgactgatggcatggttaagatgagaggcaccggcacctggcgacggtctggctttcttctcatccgcgcttcctgtccccacccccagtttgagtttttcttgcctttcttcattcccctagttgccttgatcctttgggggaccgggcactgtccagcgagctgggctccaattctttccttgggaacagtgagcttcaggaaggcccttgagtccacgccagcccttttggaagaggccttgccaccaggagggcagcattgtccttcaagaggaaactgtgccgtcccagctcctgcctggagcctggtrctcggggcattttggttactaaggggaccctggcctgctaagttagaaaaaggggccaggttttttcctattcttcagcctgctgccattgttgaaaaagtaaacactccacagagcttaaccggc

SEQ ID NO: 707506 - DNA, 597 bp, Homo sapiens
ttgatgctgtttttgtaccttcctgctagcacactgctgggcatttaacctgttgggttgcagagtgagccagctagagagtcctggacaatcccctgtgaatctcagcattctcatgtgtaaaatggagattgtgcttcatataacaaaagcgctgtaaaatatgaactcgttttttgtatcattaggttggtgcaaaagtacattctttgccattactttggtaaaaactgcaattacttttgcactaacctaatacaatcaaagttgtccattcgctgatatctttttaccctataaataaggcagcaggtaataatgggtgttggggtttggaggaaagaataaactcctacatcggcaattgtgtccctcctctgtggttctcagcccatagtaagcacttagtaaactatgtttaggaattgatggataggtttatggacaagccccagaggcgtggagaagttagtggatagcagaaggagttggaggctctgatggtgttaagtggaaaggttccgggattctgctgcctgggagtgttttttcaatcctagygaggcttgtgaccagtgtggctccaccctcctgctg

SEQ ID NO: 707507 - DNA, 615 bp, Homo sapiens
ttcctgttttgggttctgagttaggtctgttgtggtatccataggttggacaaagtagggggcagcaaaaagtgtagtagatgttcatagtatgcctgcagttgcaaaatgagtggattgacaatttttacattgtgaatttgagtttgaatatatcagtttgcatatttagctatggataatgctttgtaacagaaagcaaatcagaaggccaagatagttttcagtgtggttcctttccactgattttgtctaaaatccagggaacaccttggatttgccttagcagtatttttctctctgtttagaaaattaattatgtcgctgstttttgctctcgttagaattgtgctaaattcacaaggttagatcatgagtccacatccacattaaaaaaaaatttctcacaccgcttttctcctgactgatgattgtttgaggatcttctaattttccagtcaaatcagatttgttaggaagacagagtttaaagtcaaatacttttctcaatccagttgtagaagtgcctttccagcttcttttcttgattccatttacacaatctataacccaggcatatagaaatgtttgtagtctccaacatttaatgtttca

SEQ ID NO: 707508 - DNA, 615 bp, Homo sapiens
ttcctgttttgggttctgagttaggtctgttgtggtatccataggttggacaaagtagggggcagcaaaaagtgtagtagatgttcatagtatgcctgcagttgcaaaatgagtggattgacaatttttacattgtgaatttgagtttgaatatatcagtttgcatatttagctatggataatgctttgtaacagaaagcaaatcagaaggccaagatagttttcagtgtggttcctttccactgattttgtctaaaatccagggaacaccttggatttgccttagcagtatttttctctctgtttagaaaattaattatgtcgctggtttttgctctcgttagaattgtgctaaattcacaaggttagatcatgagtccacatccacattaaaaaaaaatttctcacaccgcttttctcctgactgatsattgtttgaggatcttctaattttccagtcaaatcagatttgttaggaagacagagtttaaagtcaaatacttttctcaatccagttgtagaagtgcctttccagcttcttttcttgattccatttacacaatctataacccaggcatatagaaatgtttgtagtctccaacatttaatgtttca

SEQ ID NO: 707509 - DNA, 1741 bp, Homo sapiens
aataagagttctgttgtttaacatttcagtatatgtaagtctggtccccactgctcctatattttttacactgatgaaattgtggttaagaagttaagaattgactataggagtagtatgttgctgctttcgagcagcctgttacatgacaggcagttgtttagagcatagtctgacacttgggcaggtacttgccacaggttccgttttcaggttgtgaggaaagtgctggattatcttgtggttctaccttttacatcactgaaggtgactggcctataatttgatttcaaaacttggcatcagaatcattgagtaacataatgcagagcctcaggtaagtttaggtgaaattttaaaagtcaacgataaatttctaaaattataccaccaaaattgaaaaaaggataaatatgtttagtgaatgttatttataactgaactttttaaaagaaactttcccagtaatgtgaaataactcgamtacttttagctacttttttttttgccagtttctaatgatgttttgtattcattataaatggattgaatattttagaattctccaaactcatttgaaatgtattgaaagctccctgtttacatttttcagctttagcagtgtgaataaaatgattttaagctcaactcttgagcatttctcccaaaccagaaactaagaaataattctacatgttaaataatttcacagatgaattacttcccagcaaatactaatcctaaacaacaaaaatgcccatgttggcaaagctttaaaacatttctatatataaatattaatgtcttatttttttctcatgtacatcttcatgctttaaaatattttatcttcatctacaaaaatactgtactcaagctttctgacttaaaaataatccttaattttcttataacatgagaactagcacttaatagggggcatactaaaaagttaacaagatggaccactaattattcatttgataaatgtataaaataactttcttaatagagctatcaagaaaaccacaccaaaaaatacttttcatgagtagcagcaacacattttggctgctaattttttttttttttttttttttggagatggagtcttgctctgtcccccaggctggagtgcagtggcacgatcccgggttcatgccattctcctgcctcagcctcccctagcagctgggactacaggcgcctgccaccacgcccggctaatttttttgtatttttagtagagatgaggtttcaccgtgttagccaggatggtctcgatctcctgaccttgtgatccgcccgcctcggcctcccaaaatgcggggattacaggcgtgagctaccatgcctggccagctgctaactattatatgagaagttacatgttgtgtttgtgggaatattcatttccttaaatttatcctctctacctttgcttatggacactgagcaaggcattgattatacagattatatatattatatatattcagcaatatacatatacacacatgttttagtataacaggcacatcaggtctagatttctctctgattttggtattaagaatgcatgagactctctactttttatattgtttatcattactttggattcctttctgacagcaatgaacaggacttcagagaagagtttgggagtgtggcaaacaagatcctattacacatgatggcttcctgcttatcagagattcacctgtaacaatattacttc

SEQ ID NO: 707510 - DNA, 1515 bp, Homo sapiens
tgtgttcatgtctctctgtggaatgacagttaatgaagagaaagtgaacgtgttatcacggccaacactgagattgcaggaggaaagatatgaaagccacaggaaagatatgaaagcctcaccaaagaggaaataaaccacctaaaataaaaggcaattttgtttgtgaaatgtgaaaaatgtgataatctactttatttatgatggactacatgttaaagtgtggggtgatgaaaagagccaccttctgtcctctgccctccgccttcaagctggtcttgaccatcattgtcgtccttcaaatgatgaaatcgctgcagtaacttcagggctgtttgctctgctgctgacctcactgtacacaaattagcccttcttctgaggctcaactatgctatgtccattaccctagttactgctcacaatctacataatgtgacagatcatgaaacatgaactagtaaaatgtgtatttataaaggaggcaataccgttattgttttcagaggaaatgacagtatgtctagagagctcatgaaaaatagaagagatagaaaatgggtattccaaagcctagactttttaaaagcaattatcaatcataagctataatgaaaagaatgtgattcacaacagtggttcttctgtgagccagatgggtgtggattccattcagaagtagtgcatagtccccaagcttgcacctcacttgagccctggatccccaaatcattctgtttttgtccagagtttcacaaggttgattttgaaaatgttcccaccagctctggctatgggaatcacagtgggaaataaacgccatagcatcttccccatcatccccgtctcctcctgagacaaaacacattttcccctaaatgctaactgggctgtctgcctccagcatagacaatcttttacatttttaccacaaagtagttttagctgcctggaccacatcaccaattgaatagtatgatgttctgggtaagggcagaatagtgggttgaatggtgacccccaaaaatataggtctatgtccacttctctagaaactctgaatgtcacttcatttggaaaaaggatatttgcaaatataactaagttaaaggtcttcagataagatcaccctggcttatacaggtggtctctatgtccaacataatgtgttattttaagaaacacaaagaggacagacaacgaggagggagtgtaaacctggaggcagagattagagtgatgtggccacaagccaagggatgccacagaagttggaaaagttggaagagacaagaaacaatctcccctagagtctctgggggraagtctggccctgttgacaccttgaatttgaacttctggtctctagaattatgagtcaatttctcttgttttaaggcatctagtttaagataatttgtcaaagctacttcaggaaactcagagaagcaggttctagagttagcaaatgaggactatagtcccaaattcgatatgaccttgggcaagttgata

SEQ ID NO: 707511 - DNA, 1920 bp, Homo sapiens
catctcaaaaaaaaaaaaaaaaaaaaaaaaaggagagagagaccatctcgctctgtcgcccaggctggagtgcagtggttcaatcactgcttactgcatccttgaactcctcttctgcctcggcctcccaaagtgctaagattacaagtgtgagccaccatacctgcccaatgtctacctttttaaaacaccgctttgaccgaatgaaacgtctgtgggtcagataaggccagagaggggccagtttacgctgtcagtcctaacccttcatggctgggcatactcattacggtcacccccggctctccagaaaagcctcccacggtatccctataaaagcgcttgtttaaaattactataatattttgcagcaaaaatatactttaagcacagaatatgtaactccaataatagatgaaaattctacctaatgaagaggaccatctttttcacaaggtgttaaacaccatgaacagcaggaaagaaataggcaaagttggcgagggagtgttccattgttcctgtctttagttaaccaaaaccactcgtaagacatttattgctttttaaaaaatagctttatcaaaatatgattcatacaccatgtaatttacccacttacagtgtacaattcaatggttttgggcatatttaccaggtcatgctgccattactataatctaatctgcaacatttttgtacccctaaaagaaactccatacccattagcaggcactctctttttccccaaaccctggaagccactaatctacttccctgtctataatatttcctgttctggatattttatataaatggaatcatacaatatgtggccttcttatgtctgggctctttcacttagcataatgtcaaatatatatgtatgtgtatggatataccacattcgatttatccactcatcagttgatgggcatttgggtgttttccactttttgactgttacaaatgctgctgctatgaagattcatgtacaagtgtgtgtggacatgtttttgtttcttttgggtatatacctaggagtggaattgctgggtcaactgctatctatctgtgtttaaccttttgaggaactgtcagcttgttttccaaaacacctgcccgtttacatttccacaagtgtgcataagggttccagtttctttctccacatgctcacccatgcttgctactgtctatctccttgattgtagccatctgcgtgggtgtgtgataagcatttattctgaaggtgtaaggcagttttaatagagcagctgaatttgatgtttgatgtgattattgagatcaagacctaatatagggatcttttctgaacttagatcacctttctgtaagaacttttactattgcgttttccactcgtcatgtgtaccattctttgactaaccagaggacaggcctcttaaggaaaggtctgatattttccccttactaaccagtaaaatcatccaattctagagaacttattgatataaattagctttggtacaattttctgtgccatagcattgatggctatcatcaatgctgcccacggagaagctgctgatttccccccggaaaactcgggctgaggcaggaggtacttaagcagctggggaagaggttctccttctccatacatgaacacatatagcaccatctccctctctttygcctctggtctttcttcttgcctctccatttagtcatgaaacatcctttcaagttagactaaggtagtgacagccctaaggaaatgttgaggaaactgagcatagacctcggtgactatgagaggtccgtgcatagtgaattgaggggattggatgtcagtatccttgcttctagtctggagttcacaaacctgtgctctcttcttttcctaaatgcctcattcctttattttcactgccc

SEQ ID NO: 707512 - DNA, 1446 bp, Homo sapiens
tggctcacacctgtagtcgggaggcagaggtgggaagattgcctgagaccaggagctcaaggctgtagtgagctgagttcataccactgtactctagcctgggcaacagagcaagamcctgtctcaaaaaaaaaaaaaaaaaaaaaaaaaaaagccaggtgctgtggctcatgtctgtagtcccagaactttgggaggccaaggcagattgatcgcttgagcccacaagttcaagaccatcctgagcaacatgccaaaacctcatctctacaaaacataaaaaaaaaaaacattagccaggcgtggtggtgtgcctatagtcccagctactcaggaggcttaggtgggagaatcctttgagcctgaggtgaaggctgcagtgaactgagatcgtgccactgcactccagcctgggcaacacagtgacaccctgtctcaaacaataaaaaataaatggtgctttaggcagcgtgttctgtggtttcccggccattggaggtaaaacactcactggggctgggtcaccatggggcaggcaaaatggacattaaggtcagggtccaagaagattccacaggaatcaagaggatgatggtagtgtcaccaattccagaacaattgaaaagatgtggtgctcatttgagaaaatggtttgcatctttagcctgtgcacatgtgattttaggctaattttcacacggccgtcgagagacttgaaaacctctaggtattttcatgctcctagagtgaggatgttctatgggtgggtagaggtgggttatctgtgtgggttttatgcactcttctttacagagaggtggtagctgaaccaggtaaggagctttctgtcctttctgacatctgtttgcttaatgatctctgcctacaccctgtagagtttgaaaagcaacgtactagaaccatgtttcttctgacatacgctggctgtacaatgcacacgctttccgacaatatccacatcagacacctctctgctgattctaggctcccagactgtggcttttgatttatcctgtgaattgcctgaattgccagctctggctaggctggcttctgagcacagctatcatcactcaggctgctgttctgtcgcggctcagtctgttttgtccgtaccacactggttgtcgaactgttgattggtaagcttgcacttgacttatgagaaccagctcaaactgcttatgaccctaaaagagattcacttaaagaaggtgctatgacaattaagaatacatcaacacacacttagattaaatatttagataatgcatgcattaagcaaagcactgttttagtttgatgataaaatcaggatcagctagtcacctgataacatttcatagctgcttaatttatcaatgaaactcactgacttcaattttccaaccctacacttgtaagaaagacattaatattaaagat

SEQ ID NO: 707513 - DNA, 675 bp, Homo sapiens
tgaaaccccgtctctactgaaaatacaaaaaattagctggatggtggcacgcgcttgtagtcccagctactcaggaggctgargcaggagaatcgcttgaacccaggaggcagaggttgcagtgagctgagatcgcaccactgcactccagcctgggtgacagagcaagaatccgtctcaagaaaaaaaaaaaaaaacttaaatgtaagagaaaataaaaaataatattttgggttgtgtggctcacgcctgtaatcccaacactttgggaggctaaggcaggtggatcacttgagctcaggagtttgagaccagtctgagcaacatggcaaaaccccatctctataaaaaatgcaaaacttggctggttaggtataagttgacagacaataacaaaattaaaaaaaaaaaaaaaaaaaaggccaggcacagtggtttgtgcctgtaatcccagcattttgggaggccaagacaggtggatcacctgaggtcaagagttcaagcccagcctggccaacatggcgaaaccccgtctctactacaaatacaaaaaaaattagccgggcatggtggcaggcgcctgtaatcccagctactcaggaggctgaggtaggagaattgctagaaccctgggggcagaggttgcagtgagccgagattgcgccactgcattcc

SEQ ID NO: 707514 - DNA, 2461 bp, Homo sapiens
tcaagtcaaaattgagaaaaaacttaagcacaagacctagaactataaaacttctagaagaaaacacaaggaacagcatcatgagattgggcttggcaataatttcttggatgtgatgccaaaagaacaagcaacaaaggcaaaattaggcaagtgggatgactacaaactaaaaagctctgcatagcaaaggatactcaaacacttttaarcccactctcttcatctataaaatgggaataatggtacctacctcacatatctttggctccaaaataagtaaaatatatgataaatgacttagcacaatggctggcaaataggaactcaataaaaggtgtctattattactagtgaaattgattttttaccccagtgtaattactggacatttcaggaatgtgggagttatccacagcaagttgaaaagagaaataaaatgaaaaaacccaaactgtgatatttttcactcaaccattacttcctgagagtgatactatgaagaaagggaagattcaagttaaaccagggaattccttcctattttcaatttttataaagatagaaagaatgaagaacatttgcttctttctggatatagattcagaacactggaaataacaaagagatcacaaattcatacatttgtaataccatctaaaatttgtaatgactttccaattatcttaccaaagagaaaactgaaaataagggattgacaaataagaaaattagtgctatttcaattaaaatcaggtagcctgacaacagcacatgggttttattttgaaaagtgtaagcaggaggaagacttaaatatagatattctgacccagggtccagatctttctactacactaccatgtataaaaatggctagtcatcatgttttcttggtttgatgccaagaatgcaaggttggcttaatagagtaatgtaatttacctcattaacagcttaaaggataaataccatctgatcatttctgcagatgtcaaaataataattcaacaaaatataacatgtattcacgataaaaataaacaaattagaaatagaaaaaaacttcattttccagatatctttaaaaagtatatttatacaaaaacctttagaaagtaacacatttaatggcaaaatgttaaaagcattacatctaagagtaggaacaagctaaaaattcccaccattactactcctactggagtagcatagtaagataaaaaactatatacatatataggaattggaattatattattattaatataaaactcaaaagaattagcgaataaattattaataggtgagcttaaaagattaaataatttgttaaatttagtcattttaaaatgtgatgtattaaagctaccatcataatagttatacatacatatatatttcttaggaataaatctaagtacatataggtgctttataaagaaaatgagaaaactttaatgaaagactacagagacctaaatagatatctaaataattcatggataagaagatttgaagtgttaatttcccccaaagtaatccatgtattcaatgcaattccattgaaaattccaaaaggaatatttacgaaactggatgagatgattctgcagtttatacggaaacataacttggaaggaggattcgtcttgcagatctcatgcattttatgaagctatagtagttaagacagtgagatactggcatgtgtatgagaaataagccaatggaatagaacagaatgctcagaaataagcccatgcttatatggagatttgtcacagaaggatattgaagaccatcaggaaaatgacagacaattcaatcaatgatgcagagacatcattccaaatgcaaaaaccttaaatggcatatcctcctcacatgctacacaaaatacatccctggtgaattttattatatttaacaagaaaaatgggctgggcatggtggctcacgcctgtaatcccagcactttgggaggccaaggccagtggatcatgaggtcaggagattgagatcatcctggctaacatggtgaaaccctgtctctactaaaaaatacaaaaaattagctgggcgtggtggtgggcacctgtagtcccagctactcaggaggctgacgcagaagaatggtatgaactcgggaggtggagcttgcagtgagctgagatcacaccactgcactctagcctgggcgacagagcgagactctgcctcaaaaaaaaaaccaaaacattttttaggagaaataggagtttatgatcttcaggtagaagttcttaaacaaaacattaatacataatccattaaagaagatttgtaagtatggttacattaaaataaaaaatttctgttcaccaaaaggtattaagaagagtgaatacataagccaccaaatggagatattacatttataaatgacaaaggataagtatcatgaacacataactgataa

SEQ ID NO: 707515 - DNA, 2461 bp, Homo sapiens
tcaagtcaaaattgagaaaaaacttaagcacaagacctagaactataaaacttctagaagaaaacacaaggaacagcatcatgagattgggcttggcaataatttcttggatgtgatgccaaaagaacaagcaacaaaggcaaaattaggcaagtgggatgactacaaactaaaaagctctgcatagcaaaggatactcaaacacttttaagcccactctcttcatctataaaatgggaataatggtacctacctcacatatctttggctccaaaataagtaaaatatatgataaatgacttagcacaatggctggcaaataggaactcaataaaaggtgtctattattactagtgaaattgattttttaccccagtgtaattactggacatttcaggaatgtgggagttatccacagcaagttgaaaagagaaataaaatgaaaaaacccaaactgtgatatttttcactcaaccattacttcctgagagtgatactatgaagaaagggaagattcaagttaaaccagggaattccttcctattttcaatttttataaagatagaaagaatgaagaacatttgcttctttctggatatagattcagaacactggaaataacaaagagatcacaaattcatacatttgtaataccatctaaaatttgtaatgactttccaattatcttaccaaagagaaaactgaaaataagggattgacaaataagaaaattagtgctatttcaattaaaatcaggtagcctgacaacagcacatgggttttattttgaaaagtgtaagcaggaggaagacttaaatatagatattctgacccagggtccagatctttctactacactaccatgtataaaaatggctagtcatcatgttttcttggtttgatgccaagaatgcaaggttggcttaatagagtaatgtaatttacctcattaacagcttaaaggataaataccatctgatcatttctgcagatgtcaaaataataattcaacaaaatataacatgtattcacgataaaaataaacaaattagaaatagaaaaaaacttcattttccagatatctttaaaaagtatatttatacaaaaacctttagaaagtaacacatttaatggcaaaatgttaaaagcattacatctaagagtaggaacaagctaaaaattcccaccattactactcctactggagtagcatagtaagataaaaaactatatacatatataggaattggaattatattattattaatataaaactcaaaagaattagcgaataaattattaataggtgagcttaaaagattaaataatttgttaaatttagtcattttaaaatgtgatgtattaaagctaccatcataatagttatacatacatatatatttcttaggaataaatctaagtacatataggtgctttataaagaaaatgagaaaactttaatgaaagactacagagacctaaatagatatctaaataattcatggataagaagatttgaagygttaatttcccccaaagtaatccatgtattcaatgcaattccattgaaaattccaaaaggaatatttacgaaactggatgagatgattctgcagtttatacggaaacataacttggaaggaggattcgtcttgcagatctcatgcattttatgaagctatagtagttaagacagtgagatactggcatgtgtatgagaaataagccaatggaatagaacagaatgctcagaaataagcccatgcttatatggagatttgtcacagaaggatattgaagaccatcaggaaaatgacagacaattcaatcaatgatgcagagacatcattccaaatgcaaaaaccttaaatggcatatcctcctcacatgctacacaaaatacatccctggtgaattttattatatttaacaagaaaaatgggctgggcatggtggctcacgcctgtaatcccagcactttgggaggccaaggccagtggatcatgaggtcaggagattgagatcatcctggctaacatggtgaaaccctgtctctactaaaaaatacaaaaaattagctgggcgtggtggtgggcacctgtagtcccagctactcaggaggctgacgcagaagaatggtatgaactcgggaggtggagcttgcagtgagctgagatcacaccactgcactctagcctgggcgacagagcgagactctgcctcaaaaaaaaaaccaaaacattttttaggagaaataggagtttatgatcttcaggtagaagttcttaaacaaaacattaatacataatccattaaagaagatttgtaagtatggttacattaaaataaaaaatttctgttcaccaaaaggtattaagaagagtgaatacataagccaccaaatggagatattacatttataaatgacaaaggataagtatcatgaacacataactgataa

SEQ ID NO: 707516 - DNA, 1115 bp, Homo sapiens
taaaggtagttataaaccactaagatgggggataatttgttaccatgttttagcctagcctayttttactacaaaacgaaatgaaaaaccaacctaaacactgaactgggcacattacctatataatctaaagtcctacaatgaacctgcaaggaaatattacatatccattttccagatgaagcaactgaatctaaaacatcacacccaggaaggcagcacttagaatcaaatacaaattcgtctgactccaaaacctgtgctctttccgcagtaatactgagttctctttaatgttcaggcttactttgaccattaagatgcaccatgagtcatttcctgccacctctaaatggctataatgctctttctcctcaagcaataaaagatgatttctctgcctcactttactagcctctaattaggcacgatctttctggaagtacagtctcctttggtcagcaaagaccttctgagctcttacatcccttgaatatggaatcttgcacaaaagcctcaggctcttagttttcaagctgtgaaatgggagtactaatgactcatcacaagcttgctcatggacattgcacaaccacacttacgcttgggtccccaggagcaagtgaagccatggacctttcttaggctgcttgggctgggatcagtggcagtggaggacatgggtcacaggtcagcatgggaggagagcataggcaccggccttaggtctccgggttcgttggtgaggtatcagctctgaggtatgggcaggttatttgtcctttctatagtttcctcttgtgccaaatgcggatgaccaagggattgctttgtgaaggaagttagttcaaacaaataaaacactgagggagtaaggtagagaggaatgtctagagtatttgcagcattcaaagagaggaaaatgctttccagaagctgctcaagtcctgttgtgggctgaattgtatctcccttaccccccaaactcatctgttgaagttctaatccccgctacctcagaacgtgaatgtatttggagacagggtcattaaagaggtaattaagttaaaggaggtaattagggtggccctaattcaatatggctgatgtctctg

SEQ ID NO: 707517 - DNA, 1731 bp, Homo sapiens
tctaaaagcattagctgattgtccagaggtggtcactcattgtccagagactgggatggagaaagacagaactgggcaacttgtttcttagatggattttgtctcatgtaagagttgcatgagatgaattcaggtagacaatcatttcatatctttttaagacaaaggaagggactactagtatatactgtgctatttgctttgggccaaaaatagcactacgaactttacatgcatatctggttgaattatcccaaatcttacatggtagctattattatcttattttacagacggtgagatttgttcaaactagcataaaatatttaggcaattgtgcttctccatttatatttattttgaggaaaattgaagccatgatttgggattcactgatgctktacctccctgactagttttgcagattacctatcatggtatacaagatgcacagacaactgtaatgggtatctatcctttttgccttcctagcatccccttctgataaaatagcatcctccctcctgataatacagctcttccttttttggaacctgcttttcccaccccatgtaattcagacagagttatcagccagttgattacttccttccttcctttcagtaggtctagacacattagccagcctgattagtcagaaatctccatctctgtacccagtaattggcccgcgaagagcctgttattcaagagatccaaagacagcttgtaagagatgaccatgaaagagagtcctgctcatttacctacattcactaactctaagaacaagtaaccctagagctgctgggagaagaatctgccagaaaatgaagtccacacaaagaaaagcagagccaagacatggcagagccagagaaacagggttcagatgccaccatgcaaagtccttgatccagcttctcctggagctcttttattcctgagactccctggtcacatcagtcagtaagtttccctttctgccaatgctagcagtttgagttagtctctgtcgattagactaatagaaacaggtccggcagaaaatgaaataaaaatatatttagcaaaaaatcatctgagttagttttacagttatggatttcaaatttcaccatttgaaacagataaatttgtacactaaatagtaactaaaaatattaatagcaagatctcaaagatacccattgggaaattttaccttggttgcaataatttaagcttaagaagggtttttgccactgacttggaggtaacaatgacatgaccatttctcagggactttttgacaattatcttacttatgaataaaccagaaagatagatgatactaaatattagtttcgcccttagacccaaatatctaggacctctcccctgggccccatgcctggatggccccattctgtatacagtggtttaggtggcttcactgtattactatgtaattattattctccaaatttccataaaagttgtcaatatcactttttttcaaacatatgcatgaaccatcatgaaaacttgagtactatcttaatgctatttatttatttatttatttatttatttatttagagatggagtcccgctctgtcacccaagctggagtgcagtggcgtgcgccgatctcggctcacggcaacctctgcctccttggttcaagtgattctcctgcctcagcctcccaagcaggtgggactacaggtgcaccccaccacgccttgc

SEQ ID NO: 707518 - DNA, 2068 bp, Homo sapiens
ctagagataagtagggtcactatacaataataaagggtttaatacwtcagaaatacataaaaattctgaacatctacacatttaatagcacagcctcaaagtatacactgcaaaataagataaaagtctatgtaattatttataaatctatagtcacagtggtctcttttaaaacaattttcagcagtttatataccaaacagattaaaaagtcagcaaagatagagataatctggaaagctcatatgattaacaaccgtgaaatgaaacattgatatggtttggctgtgtccctaccaaaatctcatcttgaattgtagctcccataattctgaggtgtagtgggagggatccagtgggataaaattaaatcatggctatggtttcccccatactgttctcatggtagtgaataagtcttaaggtatctgatggttttatgagagatttcttctttcacttggctttcattctgtcttgcctgccaccatgtaagacatgcctttctccttctgccatgattgtgaggcctccccagccacgtggaactctgagtccattaatcctcttttctttataaattacccagtctcaggtatgtctttatcaacctcatgaaaacggactaatacaaacatgctattcaataattagatagtagaaattcttttaaggcacatattgaaaatttgtaaaatatcatcttaggataggacttgaagttagcctcagcaaattttgaaaaccaggtttcatctcctgttacagtgtttcaaagaaatgcttcaggatcttgatcctacttgtttaaaatgtccactgaaagatctgcttttgtctgcagctgatttgggcacatggattttgatacccatcacgtagagtttgatcaactttcattgttcagccagaattgtgtaagctgaactaattaagatgtcaatgatattggctattgtttctgccgttaatagttggtcctcttcagttaggacatggacacaattaactttttcttcacagattgatgtggattgtctgccctgtgggctttacatcttcaacatcatctcatcctttcttaaaatgagtgatccatttgtaaactgccaatttctctggggcattctttctatgaacttttgtaaagcaccagtgatttcaccattcttccaccaaagcttccccatcaatttgacgtttgtccttacttcaattttagcagaattcatgttgctctgataggggttcttttgtaactgatatcttatcctttttagtatctcaagttgaatcctatttagacacattgccacatttgtataagtttattttggtgcaaaaagttttgaaatccatattatcttaccataaacccatcatttaaatccagttaaataaacaactgtgaggaatcactgatcctgtggagtcaagtgggcatgaacattttgaaaaatctctcgtattgcttagtttgacttcagttgtttttaaattttatatcattggaatcacattttttactaaacattattttctttattcattttgatgcatacattgatagttcctttatttttactgctaaatagtacttaatacaccacaaaatatttatctgttccaccactcatggacattctgattatttccactcccattctcttgtggaaaatgctgctctgaacattgtgggcatgttcctggggcacatgtgcaaaggtgactctggggtgtggagtgggaatactcagtgctaacctggtggatacagaatggtctcccattatgattttaatgtcaatttcccagattactaacatttcacactggctaggttgtggggaaaatagtcactcttatacctagttggtgaaatgtgtgaatctggcaatatctgtaaaaattgacaatatttctactcatgagttcagtaaccctaattctgtagacttatttcataaatatgaccatccatgtgcaaagatcaaaggatataataagatcttttacaataataaataattagaaataacttaaatgaccctaaacagaggattggtca

SEQ ID NO: 707519 - DNA, 1489 bp, Homo sapiens
acctggtagacagatgtcatgacagctccaacagccatcttggactatgaggagagatggaagccatacagaaggttggtgggccacaaagaaataagaatccaagaacgctgatgatacgactaggcaccatgccagccctagactgctcattgctagattttttttaagtgatagaaaatactctacttttgttttagttctcctttaccaatatctaatataatttctaatcaatattggctgcaaaatatactcatgctgtatcatccaataaattaacattaactattttttgagataacattgtaattgcaattcttctatcttatacttatctgtttaatcacctaagacaaatagagccatttacattttatgggtgctttgttttgctttgctccatatttgagatttgagaaacagaaagacctagatcagatgtcatgtcatctgatgtataatttatagcacataataaataccaggcaacaattattgctggagaagactagtgggactatttcccaagggaagaaactgataccttcctacttgtaactctttgaaagtgcaccaggccttgtgagattagaaagtagtccccgagggtgcttagcagaagccagatgcccatcatcagggatttggggaaaagaagaaggagctggactaaactattttaaaggtcttctctaatttgcagcttatgattctgactcttgaagttataaataattggtaagatgtagaataattggactctaaaaagtagagaagtccaataaatcttccaaatctcagaaaggaatgttggatatttacatcaaactatgtccctaactttgtcctcctcctggttcttgatctcaatgaattcagcattctctatttcatctttgcagttgcccaagacagaaagctcagaaggcatccccaacaattctccctctcactgtcccatggccagtccattgcaagtttgcctgctgaatgtcctcaagtgcatccaatccgtgtcttctccttccactctagagcagaagatactggtcctcacctgaatcacagtagcctcactacatccacttttgcccccttctaatctattttccacagtgttaccagggtgcaatttttttatgatgatggcttagaatcttcagtaactgccaatagctccttattgatcttaagacagaggacaaattctttcctgggatctacctcttagatctgactgctctccctcaggtagtggtaatcttcatcttgttctccttccacaatatttttcattcagttctttgaaagaccyatgccatcttctacccctcagctgtctaagtttctgttcttcctttgcccaagatgttcttccctcattctcagctcaaggaacctttctcagggacgcttcctctgctctctcttaagtcacaactcaattccatttcattttcaaaacacccgcaattttcttgaaaaa

SEQ ID NO: 707520 - DNA, 1546 bp, Homo sapiens
atattgtccttttatcctaatggaagcttatttgaatgtgtggttaataaataattatctttgagatagcattggtggtagacagattggtacttttcaaatcagatatgggtatgatttaccaggttttatggcttcaggttatctaacctttcttgttcagctttcttacctatgaaatagggtgagaaatgtctaaatcattattctagtcatgtgaatgtttactgagcatcttctgtgtgctccagtgtgtaagggttaaatgagattacttacgttaggtgcctggcacatgagaggtgttcctttgatgtttgttccaattttctctattcaggtaatttttcaggctgattatctttttatttagaatctacatcaggagacaaacccgtatcacattcttgcacaactccttccacgtcttctgcctctggactgaaccccacatctgcacctccaacatctgcttcagcggtccctgtttctcctgttccacagtcgccaatacctcccttacttcaggacccaaatcttcttagacaattgcttcctgctttgcaagccacgctgcagcttaataattctaatgtggacatatctaaaataaatgaaggtaaatcttcataacagttttttaaaaatttatttgcattgtgcaaagttatgtaagtagtaaaatccccagtttaggaatggtctttgttttcttttgaaatttatagttgaacacttttttttgttttgttttttgtttttggagtttggaaatttatatccactgtagtttaagaccattggtagtataattgagttagtggtgcttggatcttgtgtatatttttcaatacttgttatgtgtctggtagttactggaggtaagccattctatatacataatgtgtatggtgaaattttacattaaaacaatcgagcgtttrttgaaatcggtattaaaacttctggtatgtttctaaaaaacctgtataaataattactcagaatatttaaaatatgctaattactagaaaagtaggaattcaggtagctacttaaaatactttcaaaaaattctgagaagggaggagataggtactagataaaatgttgccatttttttcctggtgaattgcattatttaattccagccttgcttttcagtaatgctacttacgtttcagaatatttagtcagccactttgaaaaagtatgaataaaagtagatgtgttaatttggaaactattcagattcacacgttaattcctaaaagcactgcaaaattttctgttgaaaatgataaatttttaggccgaggcgggtggatcacctgaggtcaggagtttgaaaccagcctgaccaagatggtgaaacgctatctctaataaaaatacaaaagttaaccaggcgtgatggcacatgcctgtgaatcccagctactcgggaggctgaggtacgagaatcgcttgaacccaggagacggaggttgcagtgagctgagatggtgcctgtacactccaacctggctgacagagcaagacccca

SEQ ID NO: 707521 - DNA, 1448 bp, Homo sapiens
aggaatatggggcaaggactgatgctcaccactggagggttggggagaggatatcggtctgtagccactgaagctatcactaggatggggttttgggggaagggtgtggggggtaccgtgcagctggaagcccctgagttagggttccctgggcagaggggctgacattcccaggttagggaggtgaggtcattgtttgcagcccagggcctgggctagggcacagaggaggtactaggatgtagattccagatctggggaacccaggatgaggtgtgacttttaggggcctgagggcagtgcttacagctgaagggcagctttgggcttggaccgggtcctggggggatgagggggtggggttctaagtctaggagcactcttcacaaccgagaatgccccggggctaggattccgtatctgcgggtccgatgggagctccgtttgtcgcccagggagctcatggtaatttcttgatctggggagtgtctctgcagccaggaaaccccggggccaaggttctggcttgggttcggaagggacactggggtggggtccccgaacttgctatttgcaagttagacacccgggctggagttccgcatctgggcccgaggttgggactccagtctggggtcgctgtccgcagccggggctggtgaccgcaggcctggaggggggcccagaggtcttacctggcgagtagagcgcagccagctcgcgggccccggcgtgctgcgcgccccagcggcaacaagacgcctcgtcctcgtccagctccagctgctggcccggccmgtcctcggcgcccgccatggccactcgcccgatcggcccggtgcgctctgctggcggcggcggcggcagggccgcggaaccgcggcgagatcacgccgcccaatgaccgcccagcgccgggcgcggcggcggcgcgggcggggtcctcgcccggccgcgcgtcacagccaatcggggctcgcgccggagccgcgcaggccaatcggacgtcgctgagccgcagccaaccgccgcgagccggaggctgggacgcagctggacgcagctgggcgcggaagcttggggcggaggcgcgtgcccgccttcccagctcagccccggcagggctcccggctccagcccactgggagctcgcggcgcgtcgccgcccagctaggcttcggttcacgggcccatgcaatgggccgaggcagggcccagaaatgggcatttcttgagccggcagcgttaagcgcccactgtgtgcaaggaacgcgagggcagggcgccgggctggggccgaggccaggaagcatttggcgggtgctctgtacgatgctccctagcgaggccgatggagagtgggctggtttatcaagccctactgtgtgcagaggtttcgggtgccatgtgttcatcagctgtgtgccagctctgtgctgtgcgcccaa

SEQ ID NO: 707522 - DNA, 1448 bp, Homo sapiens
aggaatatggggcaaggactgatgctcaccactggagggttggggagaggatatcggtctgtagccactgaagctatcactaggatggggttttgggggaagggtgtggggggtaccgtgcagctggaagcccctgagttagggttccctgggcagaggggctgacattcccaggttagggaggtgaggtcattgtttgcagcccagggcctgggctagggcacagaggaggtactaggatgtagattccagatctggggaacccaggatgaggtgtgacttttaggggcctgagggcagtgcttacagctgaagggcagctttgggcttggaccgggtcctggggggatgagggggtggggttctaagtctaggagcactcttcacaaccgagaatgccccggggctaggattccgtatctgcgggtccgatgggagctccgtttgtcgcccagggagctcatggtaatttcttgatctggggagtgtctctgcagccaggaaaccccggggccaaggttctggcttgggttcggaagggacactggggtggggtccccgaacttgctatttgcaagttagacacccgggctggagttccgcatctgggcccgaggttgggactccagtctggggtcgctgtccgcagccggggctggtgaccgcaggcctggaggggggcccagaggtcttacctggcgagtagagcgcagccagctcgcgggccccggcgtgctgcgcgccccagcggcaacaagacgcctcgtcctcgtccagctccagctgctggcccggccagtcctcggcgcccgccatggccactcgcccgatcggcccggtgcgctctgctggcggcggcggcggcagggccgcggaaccgcggcgagatcacgccgcccaatgaccgcccagcgccgggcgcggcggcggcgcgggcggggtcctcgcccggccgcgcgtcacagccaatcggggctcgcgccggagccgcgcaggccaatcggacgtcgctgagccgcagccaaccgccgcgagccggaggctgggacgcagctggacgcagctgggcgcggaagcttggggcggaggcgcgtgcccgccttcccagctcagccccggcagggctcccggctccagcccactgggagctcgcggcgcgtcgccgcccagctaggcttcggttcacgggcccatgcaatgggccgaggcwgggcccagaaatgggcatttcttgagccggcagcgttaagcgcccactgtgtgcaaggaacgcgagggcagggcgccgggctggggccgaggccaggaagcatttggcgggtgctctgtacgatgctccctagcgaggccgatggagagtgggctggtttatcaagccctactgtgtgcagaggtttcgggtgccatgtgttcatcagctgtgtgccagctctgtgctgtgcgcccaa

SEQ ID NO: 707523 - DNA, 1448 bp, Homo sapiens
aggaatatggggcaaggactgatgctcaccactggagggttggggagaggatatcggtctgtagccactgaagctatcactaggatggggttttgggggaagggtgtggggggtaccgtgcagctggaagcccctgagttagggttccctgggcagaggggctgacattcccaggttagggaggtgaggtcattgtttgcagcccagggcctgggctagggcacagaggaggtactaggatgtagattccagatctggggaacccaggatgaggtgtgacttttaggggcctgagggcagtgcttacagctgaagggcagctttgggcttggaccgggtcctggggggatgagggggtggggttctaagtctaggagcactcttcacaaccgagaatgccccggggctaggattccgtatctgcgggtccgatgggagctccgtttgtcgcccagggagctcatggtaatttcttgatctggggagtgtctctgcagccaggaaaccccggggccaaggttctggcttgggttcggaagggacactggggtggggtccccgaacttgctatttgcaagttagacacccgggctggagttccgcatctgggcccgaggttgggactccagtctggggtcgctgtccgcagccggggctggtgaccgcaggcctggaggggggcccagaggtcttacctggcgagtagagcgcagccagctcgcgggccccggcgtgctgcgcgccccagcggcaacaagacgcctcgtcctcgtccagctccagctgctggcccggccagtcctcggcgcccgccatggccactcgcccgatcggcccggtgcgctctgctggcggcggcggcggcagggccgcggaaccgcggcgagatcacgccgcccaatgaccgcccagcgccgggcgcggcggcggcgcgggcggggtcctcgcccggccgcgcgtcacagccaatcggggctcgcgccggagccgcgcaggccaatcggacgtcgctgagccgcagccaaccgccgcgagccggaggctgggacgcagctggacgcagctgggcgcggaagcttggggcggaggcgcgtgcccgccttcccagctcagccccggcagggctcccggctccagcccactgggagctcgcggcgcgtcgccgcccagctaggcttcggttcacgggcccatgcaatgggccgaggcagggcccagaaatgggcatttcttgagccggcagcgttaagcgcccactgtgtgcaaggaacgcgagggcagggcgccgggctggggccgaggccaggaagcatttggcgggtgctctgtacgatgctccctagcgaggccgatggasagtgggctggtttatcaagccctactgtgtgcagaggtttcgggtgccatgtgttcatcagctgtgtgccagctctgtgctgtgcgcccaa

SEQ ID NO: 707524 - DNA, 658 bp, Homo sapiens
tgtctctccatatgcagtcagctctactcgtagaatctagatcagaaagacaaacctggctttgccttcgctaagttactttttcatctgctaccactcctgtctcatgaagggaagagaaagaaaacttcaagctgcatcctctaccaaccaccccaaagaaaagaaataaagagatagagacttctcagccattgcccagagataatttcagagcttacagagaaaaccttaaggaaaatcgtttttgaagccctggacatttgtccatccctttagtaggggtcattctcatraatgtggttttaaaaggttttttttggattccatcatctctccatctattatcgtcctttgtcctgggccagctgtgctgtgattggcagatttacccgtgcaaaattcagttccctttacaactctttcccttttcaccatgcttattttttctaaattccttctttttccacgctcatccatgagatggatggttgctttttatctgggcagttcttctgaaaacaaagccttcaaaggatgtgaatcaaaatgtctctatgttggagaaaaaataaaaaagaaatatccttttgaatcaaagacctaaaaatttcttggtaatattttttaaatttatgctaatttcttccctccccca

SEQ ID NO: 707525 - DNA, 641 bp, Homo sapiens
aatggcccttcctatgccttttatctggttagatcctttggctctcagtagggctcaagtattgcttgctctaggaagctttctctaattttgtgaaatctctctcttgaaaacacacatctcctttgtagcacttatcacagttgctgttttcctgtttatgtgattgcatttgactcgttatctgtttccccamtggcagagacttcattttgtgtcacatcttccaccacctcaatgtgcacaataacttctccataggggtttaccgacaaatccctctagtggcttgctgtcgcatgcatctgcatcctggttttcccaggacagctctggtgaatgactcttgccctggcatcactgtagataaaagcatcgcagtttggatgatcaattatatggtccctccagttatgcaacactggaggtattactgaaaatccagcaggattaaaaatctaattaaatcatttaaacgtgattagcttttaagtagtatttacatataaatcaacattttgaaactgcaggtcaccacctaatagtagaccatgactactgttttgtatgtgtgaatctggatacactagaatagcatatatagcaaatcatttgaattgaaccacaagtggacaaataaa

SEQ ID NO: 707526 - DNA, 1120 bp, Homo sapiens
gtattttgggtgatttttctttaggacatgcccacacattttatcatgatacatgtactattccagaagggcggggagagtgggactgttgaaagtccatgtaaagaaatcataatgtgaagcaagcaacaagagagaaaacccttcttatggtttcacatctatacatcaattgctacgattttttttaagttttagtgtaagatatttaagttcatgtttgcatatcagtgtgcagcgtagaaacatacatatttctccgggctcaaccacacatgtggcaatgtctctccagcagcagactcctctcacagtaagtctaaggagcgttggccgaatgagacttcacattcagtgaatttccactatctcttcagtttctccgtgctactgaaatctcattgttccactcagaatttatcttctcctaggaatctctttcaaagcatttcactgactatgtcaagccagagtaagtaaaacgctgatgagcttggatttccactccagtctctcagcctttctgtcttatagtttggcatctcatttctacatgatatcagatgccatattagaaattcctgcttgatcttgagatacatcaaaggtactgactgacaggtcattaggtacagcttaaattcagtctttaatcactaccacttttaaaacatttaatagtgtaattaggaaaaattcataaagacttgaaaacttcacatcataataaatccagattttagtgaggctgtcagatgttgttacctcactctcaataccagtaccagaaggatgagacmgattctccacatattcagaaatcatattctagatgaagatatgagctaaatgccctattctggtctattcttttcatgtttgtgtgttcccttctctgtttattgaaagatgtcactgaatttaaaaaatgataagattcaaagttctcacttaaaagtaaggatacaaaatgtcttaatcagggagaaaattttgggaaagaagaatacttttttgtatcaaaagattaaaagttcttttcaaaaatgctattaaatatgaactaataccacatttgacttattatactgaaactaaatcatcaaatcatcaagcaccc

SEQ ID NO: 707527 - DNA, 588 bp, Homo sapiens
aaaamaccagatgaaaaagaaaaccaaaaagtaaaaataaaaaacaccaggtgcatgagagaaaaaaaaaatagaagacggagaaatctgtagcacacgaccatttctgtgatttttttttttttttttttttttgcgactgagtctcactttttcacccaggctgcagtgcagtggcgcaatctcggctcactgcaacctccgcctcctgggttcaagcgattctcctgcctcagcctccggagtagttgagattacaggcatgcaccaccacgcccagctaatgtttgtatttttagtaaaaacggggtttcgccatgttggccaggctgaactcgaactcctgacctccggtgatccacccgcctcagcctttcaaagtgctgggatgacaagcgtgagccaccaggcccggcccatttctatgaatgaaaaaaactcacaagctacagaacatccctacacgcgttaaaaggattcacacacattcaagcccagagaacagactcacaggagcagatgcctggggggagggggaggggaaagggcagaagagcatcaagagcgaaatccaattcaatccaactg

SEQ ID NO: 707528 - DNA, 588 bp, Homo sapiens
aaaacaccagatgaaaaagaaaaccaaaaagtaaaaataaaaaacaccaggtgcatgagagaaaaaaaaaatagaagacggrgaaatctgtagcacacgaccatttctgtgatttttttttttttttttttttttgcgactgagtctcactttttcacccaggctgcagtgcagtggcgcaatctcggctcactgcaacctccgcctcctgggttcaagcgattctcctgcctcagcctccggagtagttgagattacaggcatgcaccaccacgcccagctaatgtttgtatttttagtaaaaacggggtttcgccatgttggccaggctgaactcgaactcctgacctccggtgatccacccgcctcagcctttcaaagtgctgggatgacaagcgtgagccaccaggcccggcccatttctatgaatgaaaaaaactcacaagctacagaacatccctacacgcgttaaaaggattcacacacattcaagcccagagaacagactcacaggagcagatgcctggggggagggggaggggaaagggcagaagagcatcaagagcgaaatccaattcaatccaactg

SEQ ID NO: 707529 - DNA, 588 bp, Homo sapiens
aaaacaccagatgaaaaagaaaaccaaaaagtaaaaataaaaaacaccaggtgcatgagagaaaaaaaaaatagaagacggagaaatctgtagcacacgaccatttctgtgatttttttttttttttttttttttgcgactgagtctcactttttcacccaggctgcagtgcagtggcgcaatctcggctcactgcaacctccgcctcctgggttcaagcgattctcctgcctcagcctccggagtagttgagattacaggcatgcaccaccacgcccagctaatgtttgtatttttagtaaaaacggggtttcgccatgttggccaggctgaactcgaactccygacctccggtgatccacccgcctcagcctttcaaagtgctgggatgacaagcgtgagccaccaggcccggcccatttctatgaatgaaaaaaactcacaagctacagaacatccctacacgcgttaaaaggattcacacacattcaagcccagagaacagactcacaggagcagatgcctggggggagggggaggggaaagggcagaagagcatcaagagcgaaatccaattcaatccaactg

SEQ ID NO: 707530 - DNA, 560 bp, Homo sapiens
gtttttctgccatatgttttattatattctgggttacagtttagaccagggattggcaaactacagttctgtagtagggagaattctaagaatgaccccccggtgccgttgtaatcctcccctctttgagctcgtgaggaactgtgattgtgctacacgacatggcgaaagggagagtgtccctgtgtgcttaatctaatcatgtgagccccataaaagcagagtttttctgcctggtaacagaagaggaagcggagatttgaagtgtcagtgtgaaaaaagagagagtgaaagtaaaaattgtttcatttgggataatatgcaagagagaggattgcaatccgggacatacatgcagaccagggtggcctctggcaaygtccaggaaaaaaagtaaaaggttgaggcttactggggaaggagaagggtttgcaagttgttttgaaagaaagcttatggtgctggtggcagcttgcaagggctggcaagttctgagtggcaagtatcagtagttgccaggtaggacctgtaatcttggaggtacaattaggtccttacag

SEQ ID NO: 707531 - DNA, 1177 bp, Homo sapiens
aagaaagaaagaagaaagaaagaaagaaagaaagaaagaaagaaagaaagaaagaaaagagaagcaaaaagaagaaaagagaagggaagaaaagaaaagcaaacggggaaggggcatatctccttgaccggtgactgcccaggatacagtgggtcacggccgaccgaagcctcgacctgtggggcctcaagtgatcttctcctcgtctcagcctcccgagtagccgcgactacaggcggccatcaccgcgcacaactcatcttataataacatcatgwttctctcgagacggggtctcgctccgtcatccaggccgcatcgccacggcacgatctcagctcatcgcaacctcggcctccccggttggaacaagtcgcccgccccagtctcccgagcggtcgtgattccaagcccacgccaccaggcccggctaatcgttctatttttcagagagacggggtttcgccacgtcggccagcctggtctcgaactcccggccccaagcgatccacccgcctcggcctcccaaagtgccggagtgacaggcgtgagctagcgtgcccggcccagatcatctttttcatcaattgtagagaaggggtttcgtcagccaacgggtggagggtggggcgggttttactcagcctgcgtactgtgaaaaggggaagtgagtgtgctctgtgaactagatatggaaattgtgtgtgtgtgtgcgcgcgtgcgcgtgcgagagagagagagagagagagagagagagagagagagagagagaccaatcccaccacgaggacccggaaatagtgtttgatctgtgtccctgcctagtcacctgtcttgtgtgtcgatgactgaggattccacaaatgaaggtcagcggtatctattgagctgtttctccctctcgtgcgtctcatctgtgtgctggagaaagggaagagaagaggttccgatgggaagttgtcttcacgcctgaggcagctgaaggcagaccgaagggaaggagggcatcctaggtgacatttccatacccacgcaccctttacaatgctggggctgccagtccaccctgtacgtcaacccacccccaagaacagcacggtccggggtggtccagtctgatcccaaccggcccacccggggcatccggtggaagtcttcgccggaggatccgaaggca

SEQ ID NO: 707532 - DNA, 1671 bp, Homo sapiens
tgcacacacattccactaataccccattggtcagtcttgtggctcttatctgtaaggggaggcctggaaagatggtctgtattgtgggtcaccatgtgctcagctaaaattggggttctatgactttaaaatgggggacagtagatattggcagagacctagctatctctgccatttcaaggttccctggtgtccccaagaaaggagcaaagatacctcctctgtgccttcaggtgtgtccattcacggggttcatttattcagcagttgctgtgcctccttactctgcctggaaagggcctcaaaggccacaagacttccaagatggcaccactgcctgctggagtcctcatctccttttgccttggaaggcgcactccctgttcatggcttgtgtttttctggaaactattagagctctccgcccaaaccagatgataattacatgttactgatcttgagtctttaaatttttctctctctcttttaaaagagagatatttttactgcacattgtgttgacaaaacccaagtctccyttctaccaggcagcctggattttattttcagatttcctctgtgaattcatgcagggggaggaggtggaaaggtactgaatgtgaataataacatgtctttggtcagggacaagggtcagagaaccaggggtggctgaagaggggaatggagattgcccaaggtcacaaagtcatcctcctggggtggaatgaagactgagtaaaactggtgtgtccaggaaagcaggttttcattgcagtccctagaggagtctgccctggccctgttctctgctcttccaggcagagctgttgatggggcctccattgtttatctgtatccattggagttgaagagacctggggttctggtcttggcacccagctttttaactctgtgccttgagcaagttactgctctgtctgaggctcagtttatgtctttgtaaagggggtcatagaagtacttaccttgtgggattgttgcacaggttaaatgggattgtgtacctgtaggtcctagtagagcactgggcacatagtatgtgctcaataaacaggagctagtcatgttatcaccatgtgatgctcagctgtccctctctctggtaataaagcaatcctattcactcacctgatcatttgccaaatactttctcatgccttccttttatcgggccacatgctgggccctgcagggcatgggagaaacgtctctgtcttcgtctgttttctgctgctataacagaacatcacagcctaggtaatttataaacaataggattttatttggctcatgcttctggaggctgggaagtccaagagcatgacaccagcctctggcaagggacttcatgatgtattatctcatggtggaaggcagaagggcatacaagcatatgagacagagaggaaaggagctgaactcccaagataaccaaactacaatggcaaaaaatagcatttgtccattcatgagggcagagccctcctgacctaatcacttcttaaaggtcttacctttttaataccatcacaatggcaattaaatttccacatgagttttgcaagggacattctaacaatagcagttccatttgctgattcctgcctccatttcccactctggctgcagaagaggccacactgcctg

SEQ ID NO: 707533 - DNA, 2197 bp, Homo sapiens
tttaagaatcagttcttactttaacagctgcccatgtaatatagtaatttagttttatttatttatttatttttttgagacagagtctctctcttgtctcccaggttggagtgcagcggcgcaatctcagcttactgcagcttacgcctcccaggttcaagcaattctcctgcctcagcctcctgagtagctggaattacaggcgcccgccaccatgcccagctaatttttgtacttttagtagagacggggtttcgccatgttggccaggctagtctcgaattcctgacctcaggtgatctgcctgcctcggcctcccaaagtgctgggattacaggtgtgagccaccgggcctggccaatttttttttttttttttttttttttttttgagacggagtctcactctgtcacccagactggagtgcagtggcacgatcttggctcactgcaagctctgcctcctgggttcacgccattctcccgcctcagcctcccgagtacctgggactacaggtgcccaccagcatgcccggctttttgtatttttagtagagacggggtttcaccatgttagccaggatggtctcgatttcccaacctcatgatctgcccaccttggcctcccaaagtgataggaccacaggcgcactttttttgtttttgtttttgtttttgttttgagatgcagtcttgctctgttgcccaggctggagtgcagcggtacagtcttggctcactgcaacctctgcctcctgggttcaagccattctcctgcctcagcctcctgagtagctgggactacaggtgtgtgccaccacacctggctaattttttttagtacagacagggttttgccacattggccaggctggtctcaaactcctgacctcagacgatacactcgcctcggcctcccaaaatgctgggattacaggcatgagccaccttacccagcctaatatagtaatttttattatgcataaaaagttataaagtaaatatgcctcatgggacatcattgtttcatttttatatgaaataaagtaactttctatttttacatggaaatcagaattcatatgtctcacgtgtttttggtgttgttatccacaggagaccaatcattttgcaatggcagtccctaatgatctattccctaatcaactggaaatacttccaaatcagttaataaacttctttcaatgtttaaagtttgaaatatctaagttgggttaaagggaaagctcatgtttagttgtcagtgtatctcagcagcacatcatgggaatatttatttgtattgttggaaacatgttttctttcctgttatgtgctggaggagttggctcatgggttgcaggaccaaaacctgaaaatatctctgactgtgtgtcaccagaccacacaatgaatacatcacttaggttagcatgagaaaaggggaaaaacagctgtgaagcccatgaactttccaagaaggtaaaggagaaaaaaaaaaaaagttgggtttgaagtctaagttttactatgaacagcaccctgctgagatcataaaaatgaaaaataccatcaagatacatgaaaaaggaaacaccaaagggaagagtgataacaaggctccacagagygcagtttcctttgacaagatgaaaaagaaatgaaaagaggaaggagataaatggaacagccctctacctaaagtttctgtccatggagaaactgacatttaagtgctgctcaacaggaaaaagaaaaaagacctggttattgaagttggctttgttggagatgcgttactcagatacagatacaaagatgggtttggccaatgggcatccgtgtcaagaagcctgacctaacacgttctgaatattaagctaccttttatctgccagtccttggtgttcagaagaatccctcctcctcaccctaacttctatggggctatttccaaagacactgtcattgaagtgaggaagagtgagttgggccttatgacacaaagagacaagactatttgaggacaatagacacaggttttcatatacattccatgttattctgaattactgatgggttcactgatggaattattgagtatagccaataaggagaaccacagttaagctggtgtctctgggttctggacatcatcctcaagaaaactatttactaattacattgaatgaggttat

SEQ ID NO: 707534 - DNA, 2197 bp, Homo sapiens
tttaagaatcagttcttactttaacagctgcccatgtaatatagtaatttagttttatttatttatttatttttttgagacagagtctctctcttgtctcccaggttggagtgcagcggcgcaatctcagcttactgcagcttacgcctcccaggttcaagcaattctcctgcctcagcctcctgagtagctggaattacaggcgcccgccaccatgcccagctaatttttgtacttttagtagagacggggtttcgccatgttggccaggctagtctcgaattcctgacctcaggtgatctgcctgcctcggcctcccaaagtgctgggattacaggtgtgagccaccgggcctggccaatttttttttttttttttttttttttttttgagacggagtctcactctgtcacccagactggagtgcagtggcacgatcttggctcactgcaagctctgcctcctgggttcacgccattctcccgcctcagcctcccgagtacctgggactacaggtgcccaccagcatgcccggctttttgtatttttagtagagacggggtttcaccatgttagccaggatggtctcgatttcccaacctcatgatctgcccaccttggcctcccaaagtgataggaccacaggcgcactttttttgtttttgtttttgtttttgttttgagatgcagtcttgctctgttgcccaggctggagtgcagcggtacagtcttggctcactgcaacctctgcctcctgggttcaagccattctcctgcctcagcctcctgagtagctgggactacaggtgtgtgccaccacacctggctaattttttttagtacagacagggttttgccacattggccaggctggtctcaaactcctgacctcagacgatacactcgcctcggcctcccaaaatgctgggattacaggcatgagccaccttacccagcctaatatagtaatttttattatgcataaaaagttataaagtaaatatgcctcatgggacatcattgtttcatttttatatgaaataaagtaactttctatttttacatggaaatcagaattcatatgtctcacgtgtttttggtgttgttatccacaggagaccaatcattttgcaatggcagtccctaatgatctattccctaatcaactggaaatacttccaaatcagttaataaacttctttcaatgtttaaagtttgaaatatctaagttgggttaaagggaaagctcatgtttagttgtcagtgtatctcagcagcacatcatgggaatatttatttgtattgttggaaacatgttttctttcctgttatgtgctggaggagttggctcatgggttgcaggaccaaaacctgaaaatatctctgactgtgtgtcaccagaccacacaatgaatacatcacttaggttagcatgagaaaaggggaaaaacagctgtgaagcccatgaactttccaagaaggtaaaggagaaaaaaaaaaaaagttgggtttgaagtctaagttttactatgaacagcaccctgctgagatcataaaaatgaaaaataccatcaagatacatgaaaaaggaaacaccaaagggaagagtgataacaaggctccacagagcgcagtttcctttgacaagatgaaaaagaaatgaaaagaggaaggagataaatggaacagccctctacctaaagtttctgtccatggagaaactgacatttaagtgctgctcaacaggaaaaagaaaaaagacctggttattgaagttggctttgttggagatgcgttactcagatacagatacaaagatgggtttggccaatgggcatccgtgtcaagaagcctgacctaacacgttctgaatattaagctaccttttatctgccagtccttggtgttcagaagaatccctcctcctcaccctaacttctatggggctatttccaaagacactgtcattgaagtgaggaagagtgagttgggccttatgacacaaagagacaagactatttgaggacaatagacacaggttttcatatacattccatgttattctgaattactgatgggttcactgatggaattattgagtatagccaataaggagaaccacagttaagctggtgtctctgggttctggayatcatcctcaagaaaactatttactaattacattgaatgaggttat

SEQ ID NO: 707535 - DNA, 1081 bp, Homo sapiens
ccataaatatatacatgctaatgtgagaaatgcttttgagttatttttatgcatatcataattttattcatttttactgtgaaatagatcatatatgtacagttaaaaatattgctaatttttcaaaagaatgtatatattgttacatgaatataccacattttatcagttctactgtcccattttgctattgttaggcaattttcatttttgcttttagatttgctttataaaatttaggggggtggtgtttcrttgttttgctttttttttagacagggagtcactctgttgcccaggctggagtgcaatggagcaatcacagctcactgcagcctctgcctctccaagctcaagcacttcttccacctcagcctctggagtagctgggactgcaggcctgcaccaccacacccagctaatttttgttgttgttgtttttcttcgtattttgtagagacagagttttgccacgttgttcaggttggtctgaggtgatccatccacctcagcctcccaaagtgccaggattacaggcatgagccaccatgcccagcctaaaatttagtttttaaaatattcttaacatacctagtttttccagtgaattttgcattccttgtgtgtgcttttgtaactttatttacccatctgtatagtaaacttcgggaaacaccagctctaaccaccatgtttaacagcataagctggttgttaaattttactgatgtatataaacccaaaatagatcatttcttcacatagaaacagcctttggttccgctagtattcattactcattttagtaatttaaagaccacatgacccaaattcttcttgaatgctgtgcagtgcactgaaagagactaataagcccttttctgttttctaagcaaatttacttcttgggatatttctgttcatacggtttcctatgacacatagcatcactaagagtcaaataagtgaaactgaaaagattaaaattaatcctgtaatccagttttaataatgagttcatttcattatgtttctttttcctttccatttgttttatactggcctggagaaaacaggcttg

SEQ ID NO: 707536 - DNA, 2394 bp, Homo sapiens
tcagtttcacttattttatccttaatgatgctatgtctcataggaaaccatatcaactgaaaaatatgtcatcacacattcttctctggtttcaacttccaagtcttcttccacctccccttcaccaaccatgttccttagtaggaccaccttagtaggactcaagtatttcagtcagtggatttgtacctgatctttcaatgcatctttctctgcggcgtcgcccacgatgatcttgccgcctgatttgctagtcttccccaccggaaaggcgtctcgaagcccctgcaggtgctccccgaggccccagccttcccggaagctgcgcttctgcatgatgttgtgcaccaccgttcccaccacgttagcgaggaaggagctgctaggacggtttggagatctcagtctgtcctgttcctccttcactgggggaggaatggctgctttggaagaccgtgactgaggtcttgaatcctcttcataaggaaaatctcggggtgactcttggtctttctctaccagagaagtgggaggggcaatggcagctccaccctactacttttcctcctctctccctcctaatcttccccttcatcagaatctggatttggtcgccttgatcagaactcccctaatttcttgcctgtcttcaggcctcttttccctttcttctatttcctttcatatttctagctcctgctgtgtctgtcgttcctctctttggcacttcactactttctcataatcataagggaacataggatcatattcgtcagctaagggaatcagaacgtcccctgcaaaaacccactgggagcaggatccttcagcccacctgctgcatgccgtggtgtgtccccaatttgcaggtcatctgaggagccgcctggccttaggtcaatgactggcaagagctgcactgtttctaactttggctctttccctgagtgagagctgccttcctcacctgaagctgagactgcagaagtttgacgttttggaaccagccttatgcttttgagtcactggtctccactctcaggccatcgtatgggggcatctttttttttttttttcaatttaatgttgccctgctgactctacccatgggtagccaggttaatatgaaaaaatgaagaagaagaaaaacccaccaatttcctgatgccagataaatggaaaatgttatttgcaccaaagaaaccttgagagacttggaacaaatcactggtggatgtgggtttctggatctcactagatttattttaatagaaagtttaggccagacgcggtggctctcacctgtaatcccagcactttgagaggctgaggtgggtggatcatctgaggttagtaattcaagaccagcctggccaacatggtgcaaccttgtctctactaaaaatacaaagattagctgggcatggtggcgggagcctgtagtcccagctactgggtaggctgaggcaggagaattgcttgaacctggaaggcaaaggttgcagtgaaccgagatggtgccactgcactccagcctggcaacagagcgagactctgtcaagaaagagagagagagagaaagaaagagaaagtctaatttgcagatgcagacctatcttctatactgtcatttgtccattcttttttttctggtctgtgatttcatctttttgaagaagtgtttttcaagcagcactctgtacggttgcaggttgtgcatatagcctgcakttttttgcattcatgcctgaaatagagattgactgaaggtcaaattcttttaaacttacctttatggaatctttctgctattcaatgccatgcctccttccatgatattgagaatacaaaattgactgttgtgtcgccagtcctcacatccttcttgtaggaatctgctagaccaagaacttgtggcaacactgcattgaagtctgtcactgcaataacacacagtgacaattttcttgccaacctcatatgcttacacaagtgaaaataaccgggctaaaattttcatgggtcttaatatctttatttgtttgatttcatatccatgcagtactttatgattagaatttgtcctgaaagtttcataactttttgcgggacacctggatttattttagtttttttttttctaacagagttatcgaattcattttcttttaagaataacctggctgggtgctgtggcttatgcctgtaatcccagcattttgggaggctgaggcaggtggatcacgaggtcaggagatcaaaaccatcctggctaatatggtgaaaccccgtctctactgaaaaaaaatacaaaaaaagaaattagcagggcatgatggtgcgtgtctgtagtcccagccactcgggaggctgaggcaggagaatgctgtgaac

SEQ ID NO: 707537 - DNA, 644 bp, Homo sapiens
gaggattataaatcatgctgctataaagacacatgcacgtgtgtttattgtgacactatctgcaatagcaaagacttggaaccaacccaaatgtccatcaatgacagaatggattaagaaaatgtggcacmtatacaccatggaatacaatgcagccataaaaaatgatgagttcatgtcctttgtagggacatggatgaagctggaaaccatcattctgagcaaactatcgcaaggacagaaaagcaaacaccacatgttctcactcataggtgggaattgaacaatgagaacacttggacacaggatggggaacatcacacactggggcctgtcgtggggtggtgggaggagggatagcattaggagatatacctgatgtaaatgaggagttaatgggtgcagcataccaacatggcacatgtatacatatgtaacaaacctgctacgttgtacacatgtaccctagaacttaaagtatatataaaaaaagatctgcatagttttggatggtatatatttaaaatgatcttcctgttctagatagataaacctctagatattagagagttgtcaattttcactcttataaacaatgctgcaaccctgtaaatatgagtaagatttacgcttacttatctcta

SEQ ID NO: 707538 - DNA, 644 bp, Homo sapiens
gaggattataaatcatgctgctataaagacacatgcacgtgtgtttattgtgacactatctgcaatagcaaagacttggaaccaacccaaatgtccatcaatgacagaatggattaagaaaatgtggcacctatacaccatggaatacaatgcagccataaaaaatgatgagttcatgtcctttgtagggacatggatgaagctggaaaccatcattctgagcaaactatcgcaaggacagaaaagcaaacaccacatgttctcactcataggtgggaattgaacaatgagaacacttggacacaggatggggaacatcacacactggggcctgtcgtggggtggtgggaggagggatagcattaggagatatacctgatgtaaatgaggagttaatgggtgcagcayaccaacatggcacatgtatacatatgtaacaaacctgctacgttgtacacatgtaccctagaacttaaagtatatataaaaaaagatctgcatagttttggatggtatatatttaaaatgatcttcctgttctagatagataaacctctagatattagagagttgtcaattttcactcttataaacaatgctgcaaccctgtaaatatgagtaagatttacgcttacttatctcta

SEQ ID NO: 707539 - DNA, 644 bp, Homo sapiens
gaggattataaatcatgctgctataaagacacatgcacgtgtgtttattgtgacactatctgcaatagcaaagacttggaaccaacccaaatgtccatcaatgacagaatggattaagaaaatgtggcacctatacaccatggaatacaatgcagccataaaaaatgatgagttcatgtcctttgtagggacatggatgaagctggaaaccatcattctgagcaaactatcgcaaggacagaaaagcaaacaccacatgttctcactcataggtgggaattgaacaatgagaacacttggacacaggatggggaacatcacacactggggcctgtcgtggggtggtgggaggagggatagcattaggagatatacctgatgtaaatgaggagttaatgggtgcagcataccaacatggcacatgtatacatatgtaacaaacctgctacgttgtacacatgtaccctagaacttaaagtatatataaaaaaagatctgcatagttttggatggtatatatttaaaatgatcttcctgttcyagatagataaacctctagatattagagagttgtcaattttcactcttataaacaatgctgcaaccctgtaaatatgagtaagatttacgcttacttatctcta

SEQ ID NO: 707540 - DNA, 947 bp, Homo sapiens
attatcagcctctcttgatctaaytgtcctctccacattgcccaaacagcatggtacctttttttccagactcttttgccaatttgttagcatttatgtagccaaatcctcaatgtcggcatacctgcagatgctaattctaggtcagtcttctcagttgccttcacaggttctgcaaacagctgactattgctggggaaaaccccccagctgtgcgggtgtggtccctattcatggtctccatcctggggtctgtatgctacgaggacaatggtccttagccttgaatgaatatgggaatcatcaggtggattctttaacatactgcttagttcctactctcttgaggttcggatttaagtggtctgggcaggtgtttccagtgtagaaatgtactattactagggactcttgttgttccctgtcaaaatctttttccattccacatcctctactacacacacataaacatttcctaccttaattccacttttcccttatcacttttttgtttgtttgtttgtttttgagacaggctcttgctttgtcacccaggctggagtgcactggctcgatcacagctcattgcagcctcgatcttccagactcaagcaatcttccttagttttccgagtagttgggactacaggcacacaccactacaactaggtaatttttgtatttttttgtagagacaggggtctcactgtgttgcccaggctggtctcagactcctgcactcaagggatctgcctgcctcagcctaccatagtgttgggattacaggtatgagccacagcacctgatccttcatcactcatatcacagagcttgaatcttctgaacatcaagtagataagaaacagctataaactccctttcagaaatttaaaataaagcgtatataattagctattttcctcctgtttcagaaaacatcactgttt

SEQ ID NO: 707541 - DNA, 947 bp, Homo sapiens
attatcagcctctcttgatctaattgtcctctccacattgcccaaacagcatggtacctttttttccagactcttttgccaatttgttagcatttatgtagccaaatcctcaatgtcggcatacctgcagatgctaattctaggtcagtcttctcagttgccttcacaggttctgcaaacagctgactattgctggggaaaaccccccagctgtgcgggtgkggtccctattcatggtctccatcctggggtctgtatgctacgaggacaatggtccttagccttgaatgaatatgggaatcatcaggtggattctttaacatactgcttagttcctactctcttgaggttcggatttaagtggtctgggcaggtgtttccagtgtagaaatgtactattactagggactcttgttgttccctgtcaaaatctttttccattccacatcctctactacacacacataaacatttcctaccttaattccacttttcccttatcacttttttgtttgtttgtttgtttttgagacaggctcttgctttgtcacccaggctggagtgcactggctcgatcacagctcattgcagcctcgatcttccagactcaagcaatcttccttagttttccgagtagttgggactacaggcacacaccactacaactaggtaatttttgtatttttttgtagagacaggggtctcactgtgttgcccaggctggtctcagactcctgcactcaagggatctgcctgcctcagcctaccatagtgttgggattacaggtatgagccacagcacctgatccttcatcactcatatcacagagcttgaatcttctgaacatcaagtagataagaaacagctataaactccctttcagaaatttaaaataaagcgtatataattagctattttcctcctgtttcagaaaacatcactgttt

SEQ ID NO: 707542 - DNA, 947 bp, Homo sapiens
attatcagcctctcttgatctaattgtcctctccacattgcccaaacagcatggtacctttttttccagactcttttgccaatttgttagcatttatgtagccaaatcctcaatgtcggcatacctgcagatgctaattctaggtcagtcttctcagttgccttcacaggttctgcaaacagctgactattgctggggaaaaccccccagctgtgcgggtgtggtccctattcatggtctccatcctggggtctgtatgctacgaggacaatggtccttagccttgaatgaatatgggaatcatcaggtggattctttaacatactgcttagttcctactctcttgaggttcggatttaagtggtctgggcaggtgtttccagtgtagaaatgtactattactagggactcttgttgttccctgtcaaaatctttttccattccacatcctctactacacacacataaacatttcctaccttaattccacttttcccttatcacttttttgtttgtttgtttgtttttgagacaggctcttgctttgtcacccaggctggagtgcactggctcgatcacagctcattgcagcctcgatcttccagactcaagcaatcttccttagttttccgagtagttgrgactacaggcacacaccactacaactaggtaatttttgtatttttttgtagagacaggggtctcactgtgttgcccaggctggtctcagactcctgcactcaagggatctgcctgcctcagcctaccatagtgttgggattacaggtatgagccacagcacctgatccttcatcactcatatcacagagcttgaatcttctgaacatcaagtagataagaaacagctataaactccctttcagaaatttaaaataaagcgtatataattagctattttcctcctgtttcagaaaacatcactgttt

SEQ ID NO: 707543 - DNA, 947 bp, Homo sapiens
attatcagcctctcttgatctaattgtcctctccacattgcccaaacagcatggtacctttttttccagactcttttgccaatttgttagcatttatgtagccaaatcctcaatgtcggcatacctgcagatgctaattctaggtcagtcttctcagttgccttcacaggttctgcaaacagctgactattgctggggaaaaccccccagctgtgcgggtgtggtccctattcatggtctccatcctggggtctgtatgctacgaggacaatggtccttagccttgaatgaatatgggaatcatcaggtggattctttaacatactgcttagttcctactctcttgaggttcggatttaagtggtctgggcaggtgtttccagtgtagaaatgtactattactagggactcttgttgttccctgtcaaaatctttttccattccacatcctctactacacacacataaacatttcctaccttaattccacttttcccttatcacttttttgtttgtttgtttgtttttgagacaggctcttgctttgtcacccaggctggagtgcactggctcgatcacagctcattgcagcctcgatcttccagactcaagcaatcttccttagttttccgagtagttgggactacaggcacacaccactacaactaggtaatttttgtatttttttgtagagacaggggtctcactgtgttgcccaggctggtctcagactcctgcactcaagggatctgcctgcctcagcctaccawagtgttgggattacaggtatgagccacagcacctgatccttcatcactcatatcacagagcttgaatcttctgaacatcaagtagataagaaacagctataaactccctttcagaaatttaaaataaagcgtatataattagctattttcctcctgtttcagaaaacatcactgttt

SEQ ID NO: 707544 - DNA, 677 bp, Homo sapiens
ttgcctccttttaatgttccttttcattgtaagtatttcttttttttttccgatatggagtcttgctctgtcacctaggctggagagcagtggcacaatcttggctcactgcaacctctgcctcccgggttccagtaattctcctgcctcagcctcccgagtagctgggattgcaagttcccgctaccatgcccagctaatttttgtatttttactagagatggagtttcaccrtgttggccaggctcgtctcaaactcctgaccttgtgatccacccatcttgaccactgcacccagcctcactgtaaatattctttccttggttactttgcccatttctctcttcttcagtggaacatgttttttctgggtttcatttgggtagcttttcacatttgatgaacgatgttgtcctcaatcataacaacagtgtctctttgtatagtggttgctcggaggtctacaaggtagtattatgtaacatttcccattgtgttctaaatactcttatctttttaagttaaaaaattgaagtcaaagctgcctctaaagtcacacacatagcttgaaataatagagttgaaatttggacataaaacatattgccatgggataatgcctgttgttttcctaaagttttaaaattatctttttgacatctcaaataaacatttgt

SEQ ID NO: 707545 - DNA, 573 bp, Homo sapiens
tatctactttgttactgagattcgataaaagaattccaaccacagataaagggcatgcatctttctacctacaagtttcctactaggtaaagttggtaaggaaattaaggttttgtctcatatgtcaaagagtaaagaactgaggtcacacagtttggacaggaatgattcaatcatcagtcactrggtaacatgtaatttcaaaagcaaaacaatattatctagtaacgtggctcagcttagaaaaaaagcaatggttatgaccacttctagagagttcatttaaaaactcatctggctttctgagttctttttactgttgttaaaaacaggtcttaataattaaacgtgacaaccaggaaattaagtataatgagctcaactcaaggtgaggccaataaataaggtcaataagtgcaatgacttatatttcgatacataaatctactgttaagaaaaggtgaaaaaaaatctcagacttaaagattcctattgtggagtaatagttcatggccactgagagtcttagcataagttagttactattttgtggcaacaaactgacttaattaa

SEQ ID NO: 707546 - DNA, 573 bp, Homo sapiens
tatctactttgttactgagattcgataaaagaattccaaccacagataaagggcatgcatctttctacctacaagtttcctactaggtaaagttggtaaggaaattaaggttttgtctcatatgtcaaagagtaaagaactgaggtcacacagtttggacaggaatgattcaatcatcagtcactgggtaacatgtaatttcaaaagcaaaacaatattatctagtaacgtggctcagcttagaaaaaaagcaatggttatgaccacttctagagagttcatttaaaaactcatctggctttctgagttctttttactgttgttaaaaacaggtcttaataattaaacgtgacaaccaggaaattaagtataatgagctcaactcaaggtgaggccaataaataaggtcaataagtgcaatgacttatatttcgatacataaatctactgttaagaaaaggtgaaaaaaaatctcagacytaaagattcctattgtggagtaatagttcatggccactgagagtcttagcataagttagttactattttgtggcaacaaactgacttaattaa

SEQ ID NO: 707547 - DNA, 658 bp, Homo sapiens
attagccaattcagttattagattaactgttgtggtattgttctactttattattatagttgttaatctcttactgtatctaatttataaattaaattttatcatagtatgtacgtttaggaaaaacgtagygtatatagggtttcgttctatccatggattcaggtatcccctgaggttcttaggatatgtctcctggggataaagtgggactgttgtgtaatatgttttgagcttctaatttatgttgctttattcaatttcccttttagacacattttttaaaacaaatctgaaagctttcaaagcaaaaaatagttttgaaattattcacctaagttcttgtaaatgacaaccaaatactgtggaaaaatctgaatagtttattttttaaatccaaatatgcacaattatccatggaactaatattatgcaatcaaatactttaacagaaatttacatttttcataaatacatcttaccttgtagtgctttttgaagtggctgtaagaccttctttggaggtcttctttggtaaatgccgtcagtgttttgcagagagatgatcttagtctcgtgatcaattacctacatgcaaagaatagtttgaacactgaattttgatcttttctgttttgttgtactacttagcataata

SEQ ID NO: 707548 - DNA, 658 bp, Homo sapiens
attagccaattcagttattagattaactgttgtggtattgttctactttattattatagttgttaatctcttactgtatctaatttataaattaaattttatcatagtatgtacgtttaggaaaaacgtagtgtatatagggtttcgttctatccatggattcaggtatcccctgaggttcttaggatatgtctcctggggataaagtgggactgttgtgtaatatgttttgagcttctaatttatgttgctttattcaatttcccttttagacacattttttaaaacaaatctgaaagctttcaaagcaamaaatagttttgaaattattcacctaagttcttgtaaatgacaaccaaatactgtggaaaaatctgaatagtttattttttaaatccaaatatgcacaattatccatggaactaatattatgcaatcaaatactttaacagaaatttacatttttcataaatacatcttaccttgtagtgctttttgaagtggctgtaagaccttctttggaggtcttctttggtaaatgccgtcagtgttttgcagagagatgatcttagtctcgtgatcaattacctacatgcaaagaatagtttgaacactgaattttgatcttttctgttttgttgtactacttagcataata

SEQ ID NO: 707549 - DNA, 658 bp, Homo sapiens
attagccaattcagttattagattaactgttgtggtattgttctactttattattatagttgttaatctcttactgtatctaatttataaattaaattttatcatagtatgtacgtttaggaaaaacgtagtgtatatagggtttcgttctatccatggattcaggtatcccctgaggttcttaggatatgtctcctggggataaagtgggactgttgtgtaatatgttttgagcttctaatttatgttgctttattcaatttcccttttagacacattttttaaaacaaatctgaaagctttcaaagcaaaaaatagttttgaaattattcacctaagttcttgtaaatgacaaccaaatactgtggaaaaatctgaatagtttattttttaaatccaaatatgcacaattatccatggaactaatattatgyaatcaaatactttaacagaaatttacatttttcataaatacatcttaccttgtagtgctttttgaagtggctgtaagaccttctttggaggtcttctttggtaaatgccgtcagtgttttgcagagagatgatcttagtctcgtgatcaattacctacatgcaaagaatagtttgaacactgaattttgatcttttctgttttgttgtactacttagcataata

SEQ ID NO: 707550 - DNA, 1746 bp, Homo sapiens
taactcagtttaaataaagttcaaataaacatagacataacattgacataaatatattcttgaattgaaagactttaatgaaatcacttctccccaaaattaatctttgtaactagtgcatccaaagtaaaacccagtaaggtttgatttagatattgacaagctaattctagaatttatgtaaactctaaaaatattaaaattcagttaataatttattgaggaaggaagaatatattacaggaaatattataagacttaattaatgcaatgtggtattaacaaagtaataaataatcaatgaaatggaataggtagactacagtaaggaaaatataagaacccatgatatgtaagaagctagtattatagatcagtggtgaaaaataaatttgccaataaatgagagtgagaaaactggctatacatatggaaaataattaaagagattctttaccttatataatatgtaacaatcaattccttggtgatcaatatttaaatgtaaacccaggtaaaaattacagaaaacccgacagtaaaacaaagaaaatggcttgcacatgtgctttataaaatgtaaaatataagtgtccaccatacatatttagaatcactttaacttatttttaacacaaaaatgcaaatgaaaatgttttatatgtacattattacttatacaacagattgaccaaaaacagtctgacaagaaagacttctggcaaacatatagagcaataataatttcatatgctttcctggaaatggaaattatatccgttttaaaaagaggcttgtattacccagtaatattgaagatgaccatatattctaatcagcaattggctttcactccttattttgtatgtacgtggttggccattaaraaatgtgatccaaaatatttacaggctcagttaagtactataagcaatgtaaaagttaaacaacagtagaatgtggtagattcatacagtggaatactacactttagaaaaacatagataactttatttagatatgttaatgtggcttactctcacaaacgtaatatgcagtggtatgattaagtcacaaaaggatatgtacaatataattcagtttaaataaagttcaagaacacaaaacagcaagttggattgtttataaaatgtttactggacactaaatctataaagataataatagaaattattttaacacatccttcaattacctttcattcctccagaaatttgttgaaacctcttgaatgcctatgacctttctcatttcctccactgtttaatttccttttatactttgtttaaaactttgaatggacatatgagagatgaagtcatatttttctaaataagttcaaaaatattttgctttaaaatataagtagtgattaaatttctaagaattgagcaatagtttaatgttataaatttagttttcatgaatatttctctctccacatttcttcttctcaacttgctcatatcccttcaaatgacaaaatacttagaagtatttgagtcaagttagatatatttttgaagatattatttgcttatttatctatgagaggtcaacaacaacttccatgaatattaggaaagcaaatatcggtagctctattcacttcaatattgaattcacctatatctgaaatttaaatgtcagtgataagactgacagaaagtgacaatttctttaggtaacacagcactaagtggcaatactttaatattgtcactg

SEQ ID NO: 707551 - DNA, 1096 bp, Homo sapiens
cccttcccttaaagtccttaacttaatcacaagcattgccgtataaggtaatattcactgtttaacgtgtcattatattcaaagattccaaggattaacgcgtcacatatcttttagaaaaaactattcggcctactaaactcgatgaatcttcatctattgagactcaggccgaatcagataaaaagctttacaatattccacacctctctctacacgtgttaaaaacaaggagaaagagtttctcttaaaattttaagttcactaaaaatagaacaaaagcagaaacaattgaggtttttgtggttgttgctgtttgtgtctttatttttaaagattctactttgtaccatatacgcatggtaaattattcattatcatatctgctccttttttttcatttgaagtaaacakattccatggaaaatatttaaattcccaggcattgttagttgtagagctcataaaatgttcaatgcttcagtgagttgcaaattgaaaacagaaataaattcttggagaaaaacttgacagtattctacacactttgctcttgattgatgtcatgtggtgattccaataaatgacttttttcaaacaacttaaactataactgatttaagtaaatgggggtgcaatggttctttcttatatatctcatctgctgagatgctatacacagaatttcaatcatcttaccctatgatttttcaaaggtatataagaatgaataataatattattataataatattattcattattatttattctaaaaataaaaataattataatattcattattctaaaaataaatttttgtttattattaataaaataacattataaggatacatttatttattacaatcatgaaaatatttaaaatgtaccattttctaggtagtaaactagtgcttcacatatttttgtttatttaatctttatttttataagtcaacaactatagacattattttatattatttatacttcatacaatataataaagacattttaaaatatatatcaaatatatattataaagtattacattataaaatactatattgtataaagtagatgactatcgata

SEQ ID NO: 707552 - DNA, 876 bp, Homo sapiens
ataatgctcaaagaacagtggtcgttgcatttattccagagagaggacawttatcctgatctggctgtaataacgtagtaggtagaactgctggcgtggacacccaagcaaggaaggaaagctggtgtctcaaggggtcccactgagatggaaaggggtcagggcccagactgttgatgtcacctggacccaaccaccacatcttggaagaagaaatgaccctcccttcctggtgttgccccaaacaaggagcttagcagtgttgcacacaggatagtccttgcaggagacatgtttgacaagctgctgaggtgcctgatggggccaggctttttttcatgaaatgagtttgcatcctgaggaagcctctttattggaaacctggcagggatccaatttcccctttgccttaaccccgtaggagcatagtagatagggaggaggtcacccaggtggctgttcctgcttggcccccactttccagaccattccaggcagggagagccgctgagatcactccatgggctgctcacatggggtctggacccagccgccctcctgtgcctggcaggcagcccctgggccatcacaggacccactgtgtggtgatcagtggcccaccacctgcccttgtggtgggtgcggttcacaggtgctgccccagtcctggcacactggccttcccagcctggcccaggataggggatgtgaatgatccttgcctgtgccccttcagaccatgtgaggttggacactcactgcagaagtccctccaggtcccttttcaactgagttgtgggggacttgcttagtcctcatgcccagggtcaggggaggggtgcagagtctgcaccctaaatcccctagggcctgagg

SEQ ID NO: 707553 - DNA, 2753 bp, Homo sapiens
cttccttgtcttttcttagcttctcacagttgccatcaatccttggcattctttggcttgtagttacatgactccaatctcttccttcatcttcacatactttatccactatgtgtttttctaaatatccacgttcttacaagcacactagtcatttgataagggcccatctgaatccacttaacttgactgactaggcaagattttatttccaagtaatgtcatatttacaagtactgagagttgggatttgaacatctttttggggaagacataattcaacccacagtactcacatcccaaagctccttaccatgcacacatctccagtcctttggtattcaaagtgtgatacacagaccagtagcaccagcatcccctgaaacttgtaagaaatataaactctccagaccacctgaatcagaatctttattttaatgtgaaacctaggtgatttatatgcaaattagaattctgagtaaggcatagcccctccaaacgcaagcggcgccttcctttttctgtattaatatcatctggctccctcacgtccattatcacttcatgtcagttactcatggcgtggtgtcaaattgggccttttttgatattcctgaagggcctggacaattcctcccccagatatttgcatggggttatttactcacctgcaccagatataaagatacagttattatatatagtgatatataattatacatatattatcacacatatatataacacagtgcagttgttcctggataatctattttaaatatacatcctatcaaccccattcttcttccttgctttttctaattcaaacgtatttatttccacaaatttttatccacagctaaatattacagtgactattccaagcatttttctataaagaaaggtgtagtttacagatttgttcaaagtggaaaaatattttcatcagtagtctttcttccctggtgttaggttcacccctgaatgttctgaactcttccggagaggcagtccttcatctaaatgtcagcgggtggcaaaatgttatattcaaatctggattattctgatacagtgtcacttcagaaagtagcttagtttcatttctggttgatcccctttgttagaattaggaatttttttttaaaaaacaatcttttgtatgtaatgacctttataataataataaatcctgccctgtgtttgtcattggcattaacctctgtctacaccctctaattctctaattatggctccagtgggtacaaaaggtgaattatggttatttggctcatgcagcaaattaattggagaaactgatgacaaatagtctgtgaagaactacaaggtcttgccccatgctgtcccattttagttaccatttagttatgtaggcattatacaaatgcctcaaattaggacatctttgctctctcagtaggtcgagtttatgaaaatttactttatgcagaaaaaataaattctaatttattggttaccagaatcttaatgtatgaaggttctaagtaaatatttgatgaattgatggtagcagcgttaatttttaaatgttccaagctcctagtttttttttttgttttgtttttgcaaaagccttaaagtttggtactaaggaaatcaaagaatcaactcccaccatcatgcttcaggaaagggaaaaatgtctacctttgggtctaacctgcctcccaggtgagcctactggtactagaactgtaactgcaactatgatggcacagrgaaaatgcatgtatgtaatatgcttgtcggcttcagcaacaactcatgtatacatacacatttactatatgtaaacaggtcctgtataatacttaaaacacaagtgtttgatctataaatatttgattcttagtatttaaaatgcttctaatattttaaaagacaaaactccaccatgatatcacattgaacattaaaattattcccacagcaacacttatttcagagaaacaattgagaagtcagttatcttagtcaccactaaaggcacctggtgagaaaagctgaactaaattttaaatattaaaaaattaaagagacatctagtgcagagttcaaacctttatgttgaattgtttgagtcgttactgatttcatgatgctgataagtgtttgagttgaaatgattttttaaaatgcagagaaaatgctaacagaatattatatagttcccctaaagatgcttcttctaacctccaagtattaaataagactgatctaaatgttaagtacatataaagtatatatttgctagtcatctataaattttaagtacaattccagtgatatacctgtatcttttggaagagaagaactaaacctgccgtttcttaggctaaatagatgattcataaggtccttccctccccatttattctgattgccaagcttttgttcagtaagctcttggcatctagtgattaaccagtgacagcagacagtagtgaccaagagagatggagagaacgatggtgtaagacagtatataaggacagtaagccactgtatttgtggaaccactgcatgtcaaaactccttaacactctaacaaagcatttttggtcttttaagattaaggacagtccttacataagggactcagtttcaaactaaagtgcatcaaaaagcaaattataccccacaaacaactttaaagaggtagccacaaacccagttgttttagattggccttctaaatgaagtcagcacat

SEQ ID NO: 707554 - DNA, 2753 bp, Homo sapiens
cttccttgtcttttcttagcttctcacagttgccatcaatccttggcattctttggcttgtagttacatgactccaatctcttccttcatcttcacatactttatccactatgtgtttttctaaatatccacgttcttacaagcacactagtcatttgataagggcccatctgaatccacttaacttgactgactaggcaagattttatttccaagtaatgtcatatttacaagtactgagagttgggatttgaacatctttttggggaagacataattcaacccacagtactcacatcccaaagctccttaccatgcacacatctccagtcctttggtattcaaagtgtgatacacagaccagtagcaccagcatcccctgaaacttgtaagaaatataaactctccagaccacctgaatcagaatctttattttaatgtgaaacctaggtgatttatatgcaaattagaattctgagtaaggcatagcccctccaaacgcaagcggcgccttcctttttctgtattaatatcatctggctccctcacgtccattatcacttcatgtcagttactcatggcgtggtgtcaaattgggccttttttgatattcctgaagggcctggacaattcctcccccagatatttgcatggggttatttactcacctgcaccagatataaagatacagttattatatatagtgatatataattatacatatattatcacacatatatataacacagtgcagttgttcctggataatctattttaaatatacatcctatcaaccccattcttcttccttgctttttctaattcaaacgtatttatttccacaaatttttatccacagctaaatattacagtgactattccaagcatttttctataaagaaaggtgtagtttacagatttgttcaaagtggaaaaatattttcatcagtagtctttcttccctggtgttaggttcacccctgaatgttctgaactcttccggagaggcagtccttcatctaaatgtcagcgggtggcaaaatgttatattcaaatctggattattctgatacagtgtcacttcagaaagtagcttagtttcatttctggttgatcccctttgttagaattaggaatttttttttaaaaaacaatcttttgtatgtaatgacctttataataataataaatcctgccctgtgtttgtcattggcattaacctctgtctacaccctctaattctctaattatggctccagtgggtacaaaaggtgaattatggttatttggctcatgcagcaaattaattggagaaactgatgacaaatagtctgtgaagaactacaaggtcttgccccatgctgtcccattttagttaccatttagttatgtaggcattatacaaatgcctcaaattaggacatctttgctctctcagtaggtcgagtttatgaaaatttactttatgcagaaaaaataaattctaatttattggttaccagaatcttaatgtatgaaggttctaagtaaatatttgatgaattgatggtagcagcgttaatttttaaatgttccaagctcctagtttttttttttgttttgtttttgcaaaagccttaaagtttggtactaaggaaatcaaagaatcaactcccaccatcatgcttcaggaaagggaaaaatgtctacctttgggtctaacctgcctcccaggtgagcctactggtactagaactgtaactgcaactatgatggcacagggaaaatgcatgtatgtaatatgcttgtcggcttcagcaacaactcatgtatacatacacatttactatatgtaaacaggtccygtataatacttaaaacacaagtgtttgatctataaatatttgattcttagtatttaaaatgcttctaatattttaaaagacaaaactccaccatgatatcacattgaacattaaaattattcccacagcaacacttatttcagagaaacaattgagaagtcagttatcttagtcaccactaaaggcacctggtgagaaaagctgaactaaattttaaatattaaaaaattaaagagacatctagtgcagagttcaaacctttatgttgaattgtttgagtcgttactgatttcatgatgctgataagtgtttgagttgaaatgattttttaaaatgcagagaaaatgctaacagaatattatatagttcccctaaagatgcttcttctaacctccaagtattaaataagactgatctaaatgttaagtacatataaagtatatatttgctagtcatctataaattttaagtacaattccagtgatatacctgtatcttttggaagagaagaactaaacctgccgtttcttaggctaaatagatgattcataaggtccttccctccccatttattctgattgccaagcttttgttcagtaagctcttggcatctagtgattaaccagtgacagcagacagtagtgaccaagagagatggagagaacgatggtgtaagacagtatataaggacagtaagccactgtatttgtggaaccactgcatgtcaaaactccttaacactctaacaaagcatttttggtcttttaagattaaggacagtccttacataagggactcagtttcaaactaaagtgcatcaaaaagcaaattataccccacaaacaactttaaagaggtagccacaaacccagttgttttagattggccttctaaatgaagtcagcacat

SEQ ID NO: 707555 - DNA, 1227 bp, Homo sapiens
ttttattcattttattttatgtatttatttatttttattatactttaagttctagggtacatgtgcacaacgtgcaggtttgttacatatgtatacatgtgctgtgttggtttgctgcacccattaacttgtcatttacattaggtatttattttaaggctgttaaagctgtagtcaattttctcactttgatcttccaaaggaacctgctgtatctttttcattctgtgcaaaataggcattttaggatccactcaatgctaaagtcattgagtagctacagacttgctatttgtttctccattgttatattttcatagttttagaatctgagcagcatttaatttgtctatgctttatattttcctttagagaaagaacacagtgatacttgctcatagtgttagaggaataatcccaaagagagaaattattcttcgaatatccaccatgactgaatacttagcaatactgaaacctacttataaaacaaaacagaaaacctccaaaaaaccaaataaacaacaacaaaacttaaaaccaaaaaagtactggaagtctcagaagtatttagcagttattcttgctccttcaaatgaaaagatgctttatcgtatcctctatggagagaattctgactatttatcaaagaccttacatttattcaccttttgccctaacaatttcataacttaaaaatacatacaacaatttacaatatagcattttttgtaaagggaaataatcagaaagaatctaagtgttcaacaatagggcacttgttgamttatgatacaatcactcaataaggtcttcatagagcccattaaaatgatgttattgatatctatttattaataggagaaatcatttagaatttttggttaagacctttaactaagcacaaagtctatgaaataatgtgcacaacattccatattttcataaggggaatgacttttaaaactaccctgcaatcgtctcattttacacaaatgtctaggcaggtttgttacccgggtatattgtgccatgctgaggtttggggtatgactgatctcatcatgcagatatgaagcttagtaccctgtagtttttcaaccctggctgccctctctactgcctctactagtctccattgtctattacagtcatcttttcttttttttaaaaaaaatctgtttttctgatttttttattaggtaaaaaatggaaaaacaaaatata

SEQ ID NO: 707556 - DNA, 3258 bp, Homo sapiens
tgtggtattaattactgtttttctcccaacactgaacaacagctctgtgaagccaagacattctgaatgttattttcactattttttccccagtccctagaaatgggcctagaatatacatagtagatgctcaataatttgttggggaacaaatgaaagttgatcctcaataatattttataatgaataggcttacaatttatgaaaaagccataacttatttagccatctccctaaatttgcatgcttttgtaagtaataatatcatggttgtgaaaacaattatgtgtgtatatacatatatgtatatagttattttatggcaatgatatacatacatgtatagtcttctgtaatatttacaggtgcttttgttttccttgcattatgcagcatatatgattttatagctagtattctggatgtccatgaaacatcaattaaaaagaaactaatattattaaatagcagacctgttaaagtggtagtcaaaatattctttccccattatatacctcagagatttctgatgaacccttttgaaacctaatagtggctgtaatcataataaattttttctagatagttttacaaacaatttttaatcttcaaaattcaaggctaatgtatgcatattgaatgattatggcattcatatataagctatgtttagaaccagaacttaccagtgcttatatttatgtgtaggtatgatagacaaagcataggaataacaagatatcattagtttactatttattaaaaatatgaatagaactggttttgctctgtaatttttgctatgataaaccttagccatgaacataacctgctattgagcatgtgcgtcatccatcttatgactcaccaaaaatagggaaatgagtctagaaccatcaaagcaattgacaacagaagtgagatttcagcttggatgcattttattataaaagtagtataattatattcaagaatttgttaaccttttatctcactaaataaatttcaatattcattataaataacaaattcaagcatttaaaatattatttatatattcttaatttttattgtttgttttaattacacatgtcaatcctgttatggaatgacatcaacatccccttggcaagaggatatttttaaatttccacatgtacattttaagagtttgatacaaccctatttatccatgattttctctttcctataattagtaattttcactgtagaagactcacttataaaagtgtatagtattatcatatttggatgataaactaaaattttgaaatatttagaagcattgttatgaactcattaaaattatcagaatcacttcatataaaatgatatttaatattttcttatacataaattagtgacattgttttatacttttaatttaatttgattatgaaaactttctatgtgtttttgaatttgtgtaaccttagacagattgctaagcccatttcatcatgcattaatagaataggattagataatctctaagggtccttggctctaagattatatgattgtaattaatggcactgcagatcttgtagagggacattaaaatggacccatacctgaagttacttttcaattgaattagtacttaggsagttgagacagtagaaacaaggaaggcaaaacagtctttcataacagatcataataaatttgctaatattatagaaaggtcattggaaagtgtttgtcctttcttttttttttaataggaccttcccattttcacttacagttttgaatacatttatacatttccttcttcaaatgtcatttaaattaaaagtgtttctattttctccagatggagtttcaatgctcgtaaacatttacattaggagagaatatagtacctattatctaacttaagttgaaaaagaatgaaactgtaaaatatatttaccaaaataactaaagatttatttaccttcggtaggcctcaattagtttacctttaaaaagcattcattgatacaaattttaaaaatccatgtaacagacatcaatcaaatgtgatttttctccagtttattattttctgccaggggaaataaaatgcaataatcacattttaaatatacatctttttaaatgattctgttgttatacatgattgttattcatatttttactattattgaatgcccctgtactgacctttccaatttgatagtgcagtaagaaataaacttttttttaatattgagaattggaaatgacctggtaatttctttgtactagagaccactaattgtgcatataatgcattctttcattttgtttagtaatagaatcctaagtacatatgaccacaagcaggagattaccttctatagtctcttatcagtgattaattttgatcaaatataatatgaattatattatgagcataaatttaagttaatctccataaaggcaaagccgattgtttttacatctcttcttacacattttactgtctggaatgcagaagtattgctgaacttagccatgaggatgaaacactaagataggattataaagagaatacaagatgaaaatctcctggggcccgggatgaactcatggaaaaaacatccccaccaactctcttaattgttggagagaaatataagactacaataagggtcactccttatactcatcatttttgagttagagatattgacaattgtatcaaactatatattttctcccacaagacattgagggacacacttcttttattctccaaaagtaacaaaaaatgctttggtgtctaagttttagcctgcaaggactgtcatagtgttgttttcaaagacttacatgttttatttccttacctcactgcaacttataaatttatcttctatgctaacatcatgatagcatctaatggttccaagagtgaagattatcactagtttatgaacctttgtattccccaaaagagaaagagatattacataaccaaattccaagtatgattaaccaagatttttctaaaattttccatctctcaattctgtctactaatttgaaataactgaacaaaatacatttgcaacatgataattcttcaaactcggctcttataccaagcagtactgatgattggggcattaacaaaaccaataaaattgttttgcaaaacaaaaacgaagtgaaaaatatgctcagcttatcttacacaatattgttttctacatcgaaaatggctagataaccttagaaaaagtg

SEQ ID NO: 707557 - DNA, 2144 bp, Homo sapiens
aggattacttgaatatgtgctgattttggtatcctctggggtcctggacccaatctcttgaggatatcaagggaccactgtatttttatttaaaatgacaagagtagagaatatatgcagatatatcccgaggaacatcttttaggtatatgcttttctattttaattcytcttaaaaaaaacacacacatcttagaacttacaatgtatcgatacaaaaatgtggccattatttatgtaggaaaagtttatatactcctctggagggtaggaaatgagattgcagtgcacatggggttctgccactcacagtgtaggatgtttcaccatgtcttcctgaaatgatttgcaaatagtcaagaacaaatgactgtggtgatagagatgtatttattgctgccaccttgttcccacttcaccattgcatatttgtacacaggacacatatttattcttttaagtttagattttactgagaaatgaggaccttatctggacttcactgggagaattatgagtggccagagatactacattttgagctggatgccagaccttgaaagaactctgcatttttcattttgagagaagtcagtgtgttttataatgggaggaagattaaagcaggtattttggcatcagaaggactgaccttgacagagattggtgaggtaacattatttccttctttggaccacaagaaaatgctgtatttttcagcctcaattgcaggtaggatgagaccatttcactggtgaatgaaatgtaggtagaagttatatttcccacttttagactgagctataagatacctcatgcaatgcttctcatactcctctttatattaaatgcagagtattctgtgaaaacgtttaaggaatttcagaaagttaatcctctactgaattattatatgaatgagaagaaaaaaaattgtgttaagtcacagatatttgcagtttggttcagaaactaatattaattgccctgactaatatactgagatactggtgatgattctgcaatgactgcttttacagtgaaagtgaccacagtagcatgcatggataaatttaaggtgataaacattaggattgcttacatattttttggcttcttcacacacatggtaggatatagctcactgccctgtttaattcagttatggaatgtgatttccttttgcttattgaaatgttagtagactaaagtgtctgtttccttctagaggcaaaaattcagagcgtgcctcacaacattctttttttcctcgactacagtaactttcaatgttctggagtggctgctttgtcctctagatcctggtataaaggtgacaatgacccatgagtagaatcataagcaacaccaaggacatgtgaaatgagcaacttatgaatgaattgatataggctcctgacatttagaaattgttttgttatcactcagcttagtttttctgatgtaatttaattgctctaaggaaacagtatctgctgtgatttgttactgtctcttactgcccagtggttggcaaggccaaaagttctagacatggcagtattctgagagttgagagccaatatattttcttggcagtgctcatgctcatggtgcacttgaagttgtgttgatgctgccataggagcaccacaagccaaccttgtttcttccatggttgcactctttatgtattcaattacagacctcaggtgtgtctgacatgaaataaacatacgcaggcatcatgatggtaatcaactgattgcttcaatgtgctggtctttgtaggtcttgagagtatcaacctggaaaaacaagcttttaactttaataatttcagcaagttaatataaagggaagttccacatataggtctggatcaagtttttctatgaagtagttgccaattagaaaagtttcctaaacaattaaccctagcaaaaaattgtgtaaagattccattcacttattacacaaaacagtatattttatgagtgctaccttctactttgtccattagataaaaggtctcttcacccttcttttgtcgtgttttgcctaaatatttgggcataaagctataacccatcattcccttttgaaaacaaagaataataaccaaagtaatataatctaaacct

SEQ ID NO: 707558 - DNA, 2144 bp, Homo sapiens
aggattacttgaatatgtgctgattttggtatcctctggggtcctggacccaatctcttgaggatatcaagggaccactgtatttttatttaaaatgacaagagtagagaatatatgcagatatatcccgaggaacatcttttaggtatatgcttttctattttaattcttcttaaaaaaaacacacacwtcttagaacttacaatgtatcgatacaaaaatgtggccattatttatgtaggaaaagtttatatactcctctggagggtaggaaatgagattgcagtgcacatggggttctgccactcacagtgtaggatgtttcaccatgtcttcctgaaatgatttgcaaatagtcaagaacaaatgactgtggtgatagagatgtatttattgctgccaccttgttcccacttcaccattgcatatttgtacacaggacacatatttattcttttaagtttagattttactgagaaatgaggaccttatctggacttcactgggagaattatgagtggccagagatactacattttgagctggatgccagaccttgaaagaactctgcatttttcattttgagagaagtcagtgtgttttataatgggaggaagattaaagcaggtattttggcatcagaaggactgaccttgacagagattggtgaggtaacattatttccttctttggaccacaagaaaatgctgtatttttcagcctcaattgcaggtaggatgagaccatttcactggtgaatgaaatgtaggtagaagttatatttcccacttttagactgagctataagatacctcatgcaatgcttctcatactcctctttatattaaatgcagagtattctgtgaaaacgtttaaggaatttcagaaagttaatcctctactgaattattatatgaatgagaagaaaaaaaattgtgttaagtcacagatatttgcagtttggttcagaaactaatattaattgccctgactaatatactgagatactggtgatgattctgcaatgactgcttttacagtgaaagtgaccacagtagcatgcatggataaatttaaggtgataaacattaggattgcttacatattttttggcttcttcacacacatggtaggatatagctcactgccctgtttaattcagttatggaatgtgatttccttttgcttattgaaatgttagtagactaaagtgtctgtttccttctagaggcaaaaattcagagcgtgcctcacaacattctttttttcctcgactacagtaactttcaatgttctggagtggctgctttgtcctctagatcctggtataaaggtgacaatgacccatgagtagaatcataagcaacaccaaggacatgtgaaatgagcaacttatgaatgaattgatataggctcctgacatttagaaattgttttgttatcactcagcttagtttttctgatgtaatttaattgctctaaggaaacagtatctgctgtgatttgttactgtctcttactgcccagtggttggcaaggccaaaagttctagacatggcagtattctgagagttgagagccaatatattttcttggcagtgctcatgctcatggtgcacttgaagttgtgttgatgctgccataggagcaccacaagccaaccttgtttcttccatggttgcactctttatgtattcaattacagacctcaggtgtgtctgacatgaaataaacatacgcaggcatcatgatggtaatcaactgattgcttcaatgtgctggtctttgtaggtcttgagagtatcaacctggaaaaacaagcttttaactttaataatttcagcaagttaatataaagggaagttccacatataggtctggatcaagtttttctatgaagtagttgccaattagaaaagtttcctaaacaattaaccctagcaaaaaattgtgtaaagattccattcacttattacacaaaacagtatattttatgagtgctaccttctactttgtccattagataaaaggtctcttcacccttcttttgtcgtgttttgcctaaatatttgggcataaagctataacccatcattcccttttgaaaacaaagaataataaccaaagtaatataatctaaacct

SEQ ID NO: 707559 - DNA, 2144 bp, Homo sapiens
aggattacttgaatatgtgctgattttggtatcctctggggtcctggacccaatctcttgaggatatcaagggaccactgtatttttatttaaaatgacaagagtagagaatatatgcagatatatcccgaggaacatcttttaggtatatgcttttctattttaattcttcttaaaaaaaacacacacatcttagaacttacaatgtatcgatacaaaaatgtggccattatttatgtaggaaaagtttatatactcctctggagggtaggaaatgagattgcagtgcacatggggttctgccactcacagtgtaggatgtttcaccatgtcttcctgaaatgatttgcaaatagtcaagaacaaatgactgtggtgatagagatgtatttattgctgccaccttgttcccacttcaccrttgcatatttgtacacaggacacatatttattcttttaagtttagattttactgagaaatgaggaccttatctggacttcactgggagaattatgagtggccagagatactacattttgagctggatgccagaccttgaaagaactctgcatttttcattttgagagaagtcagtgtgttttataatgggaggaagattaaagcaggtattttggcatcagaaggactgaccttgacagagattggtgaggtaacattatttccttctttggaccacaagaaaatgctgtatttttcagcctcaattgcaggtaggatgagaccatttcactggtgaatgaaatgtaggtagaagttatatttcccacttttagactgagctataagatacctcatgcaatgcttctcatactcctctttatattaaatgcagagtattctgtgaaaacgtttaaggaatttcagaaagttaatcctctactgaattattatatgaatgagaagaaaaaaaattgtgttaagtcacagatatttgcagtttggttcagaaactaatattaattgccctgactaatatactgagatactggtgatgattctgcaatgactgcttttacagtgaaagtgaccacagtagcatgcatggataaatttaaggtgataaacattaggattgcttacatattttttggcttcttcacacacatggtaggatatagctcactgccctgtttaattcagttatggaatgtgatttccttttgcttattgaaatgttagtagactaaagtgtctgtttccttctagaggcaaaaattcagagcgtgcctcacaacattctttttttcctcgactacagtaactttcaatgttctggagtggctgctttgtcctctagatcctggtataaaggtgacaatgacccatgagtagaatcataagcaacaccaaggacatgtgaaatgagcaacttatgaatgaattgatataggctcctgacatttagaaattgttttgttatcactcagcttagtttttctgatgtaatttaattgctctaaggaaacagtatctgctgtgatttgttactgtctcttactgcccagtggttggcaaggccaaaagttctagacatggcagtattctgagagttgagagccaatatattttcttggcagtgctcatgctcatggtgcacttgaagttgtgttgatgctgccataggagcaccacaagccaaccttgtttcttccatggttgcactctttatgtattcaattacagacctcaggtgtgtctgacatgaaataaacatacgcaggcatcatgatggtaatcaactgattgcttcaatgtgctggtctttgtaggtcttgagagtatcaacctggaaaaacaagcttttaactttaataatttcagcaagttaatataaagggaagttccacatataggtctggatcaagtttttctatgaagtagttgccaattagaaaagtttcctaaacaattaaccctagcaaaaaattgtgtaaagattccattcacttattacacaaaacagtatattttatgagtgctaccttctactttgtccattagataaaaggtctcttcacccttcttttgtcgtgttttgcctaaatatttgggcataaagctataacccatcattcccttttgaaaacaaagaataataaccaaagtaatataatctaaacct

SEQ ID NO: 707560 - DNA, 2144 bp, Homo sapiens
aggattacttgaatatgtgctgattttggtatcctctggggtcctggacccaatctcttgaggatatcaagggaccactgtatttttatttaaaatgacaagagtagagaatatatgcagatatatcccgaggaacatcttttaggtatatgcttttctattttaattcttcttaaaaaaaacacacacatcttagaacttacaatgtatcgatacaaaaatgtggccattatttatgtaggaaaagtttatatactcctctggagggtaggaaatgagattgcagtgcacatggggttctgccactcacagtgtaggatgtttcaccatgtcttcctgaaatgatttgcaaatagtcaagaacaaatgactgtggtgatagagatgtatttattgctgccaccttgttcccacttcaccattgcatatttgtacacaggacacatatttattcttttaagtttagattttactgagaaatgaggaccttatctggacttcactgggagaattatgagtggccagagatactacattttgagctggatgccagaccttgaaagaactctgcatttttcattttgagagaagtcagtgtgttttataatgggaggaagattaaagcaggtattttggcatcagaaggactgaccttgacagagattggtgaggtaacattatttccttctttggaccacaagaaaatgctgtatttttcagcctcaattgcaggtaggatgagaccatttcactggtgaatgaaatgtaggtagaagttatatttcccacttttagactgagctataagatacctcatgcaatgcttctcatactcctctttatattaaatgcagagkattctgtgaaaacgtttaaggaatttcagaaagttaatcctctactgaattattatatgaatgagaagaaaaaaaattgtgttaagtcacagatatttgcagtttggttcagaaactaatattaattgccctgactaatatactgagatactggtgatgattctgcaatgactgcttttacagtgaaagtgaccacagtagcatgcatggataaatttaaggtgataaacattaggattgcttacatattttttggcttcttcacacacatggtaggatatagctcactgccctgtttaattcagttatggaatgtgatttccttttgcttattgaaatgttagtagactaaagtgtctgtttccttctagaggcaaaaattcagagcgtgcctcacaacattctttttttcctcgactacagtaactttcaatgttctggagtggctgctttgtcctctagatcctggtataaaggtgacaatgacccatgagtagaatcataagcaacaccaaggacatgtgaaatgagcaacttatgaatgaattgatataggctcctgacatttagaaattgttttgttatcactcagcttagtttttctgatgtaatttaattgctctaaggaaacagtatctgctgtgatttgttactgtctcttactgcccagtggttggcaaggccaaaagttctagacatggcagtattctgagagttgagagccaatatattttcttggcagtgctcatgctcatggtgcacttgaagttgtgttgatgctgccataggagcaccacaagccaaccttgtttcttccatggttgcactctttatgtattcaattacagacctcaggtgtgtctgacatgaaataaacatacgcaggcatcatgatggtaatcaactgattgcttcaatgtgctggtctttgtaggtcttgagagtatcaacctggaaaaacaagcttttaactttaataatttcagcaagttaatataaagggaagttccacatataggtctggatcaagtttttctatgaagtagttgccaattagaaaagtttcctaaacaattaaccctagcaaaaaattgtgtaaagattccattcacttattacacaaaacagtatattttatgagtgctaccttctactttgtccattagataaaaggtctcttcacccttcttttgtcgtgttttgcctaaatatttgggcataaagctataacccatcattcccttttgaaaacaaagaataataaccaaagtaatataatctaaacct

SEQ ID NO: 707561 - DNA, 413 bp, Homo sapiens
  misc_feature 4, 5, 6, 7, 8, 9, 10, 11, 12, 13, 14, 15, 16, 17, 18, 19,20, 21, 22, 23, 24, 25, 26, 27, 28, 29, 30, 31, 32, 33,34, 35, 36, 37, 38, 39, 40, 41, 42, 43, 44, 45, 46, 47,48, 49, 50, 51, 52, 53, 54, 55, 56, 57, 58, 59, 60, 61,62, 63: n = A,T,C or G
  misc_feature 64, 65, 66, 67, 68, 69, 70, 71, 72, 73, 74, 75, 76, 77, 78,79, 80, 81, 82, 83, 84, 85, 86, 87, 88, 89, 90, 91, 92,93, 94, 95, 96, 97, 98, 99, 100, 101, 102, 103: n = A,T,C or G
tgtnnnnnnnnnnnnnnnnnnnnnnnnnnnnnnnnnnnnnnnnnnnnnnnnnnnnnnnnnnnnnnnnnnnnnnnnnnnnnnnnnnnnnnnnnnnnnnnnnnnncatgcacatcattcatctaaaaaacccatttactataatsatctagttatgtaaagatatacccaatagctacttaaaatagaaatattctatttcattattagaaattattattttaaaaggttgttaaaacatcaaaaatatgcttatttctagtaaccagagaacacagcagggttatgaaactttggattcctgtttggtttggcaggtaactagattaacaaaaatacgaggttttgagtttcaaaacacaatagcatatttaaaaaatacttggtgggggtctggcaattgagagaccttagta

SEQ ID NO: 707562 - DNA, 1535 bp, Homo sapiens
aagattactgaatagatagcagaaggtaacctctgccctactttcagaccaatgagtagatataaatgacattacactctcgcttcatgaaaagtaactggagagttgagatgaggtgattcttgaaagaaggaaaggctattagattycttactattaatgattaaggttcctcaattttttattaaccagcctttttttctaatgacaaaatacatccttatggtacataattcaaactgtagagaagggaataaagtaagaagtaaaattccttttctccactccacaccctccttcccacacctccctgaatacttccctgcggaaaccactattaacagtttcttctccatctttctagaattgcctatgtatattccaacctcctctgacaatcctcttttttactcacccacaagaggccttccaacttggcatctcacatcatgataccgcctttgtctgggaagctcttctcctctttgcatggctccctcatggctgctacaaccttctcggaattgtcaactactcagagaggtctcctgtgacttctctatttaaacaaccccaccaccatcaccattctccaccctgacaccaccagtgtctgcccaacccttagcacaatgtccagcacacagtatttgatcaatacatgacggatgcgtgagtacattaggtacgtgcgcatgcacacatatgcatgtattctccccacaaagtataaaggggatggtattacagagataattctgtaatttgctttcctacttcacaacatataataaaaaacaataatgataatatttcttaagcacttatgttccaaggactattctaagcattttacatgtattctttcatttaattcttacaacagccccttaaggtggtactaatactacccgacttgccagataaggaaacaaagaaatggagacatggggaggttaaaacacagcttgcaagtggtagagccaatacataaatttacactaatcgtaaaatggctgtttagccttaattcacatattaaaatattttgtggcaaaatatactcaacataaaatttatctttttaataatttttaagtgtacagcttagtggcatcaagtatattcacattgttgtgcaaccatcaccaccatccatctccagaactttctcatcatcccaaactgaaactcagtacccattaaacattaactctccatgctccccttcctccagcccctggcaatcactatgttatttcctgtctctataaatttgagcactgtaggtccctcatagaagtagaataatatagtatttgtgcttttgggattggtgatgggtttgttgcacttagcaagtcttccttattaattaattaatatctaatgaataattttattgagtaaaatatttgagtgcatgatacaaaattcaaaaggcatagaataaaagagcaagttctccttctacctctgtctctaggtaccccaggggcaaccactcttcctagtgtccttccaaagatgttcta

SEQ ID NO: 707563 - DNA, 1535 bp, Homo sapiens
aagattactgaatagatagcagaaggtaacctctgccctactttcagaccaatgagtagatataaatgacattacactctcgcttcatgaaaagtaactggagagttgagatgaggtgattcttgaaagaaggaaaggctattagatttcttactattaatgattaaggttcctcaattttttattaaccagcctttttttctaatgacaaaatacatccttatggtacataattcaaactgtagagaagggaataaagtaagaagtaaaattccttttctccactccacaccctccttcccacacctccctgaatacttccctgcrgaaaccactattaacagtttcttctccatctttctagaattgcctatgtatattccaacctcctctgacaatcctcttttttactcacccacaagaggccttccaacttggcatctcacatcatgataccgcctttgtctgggaagctcttctcctctttgcatggctccctcatggctgctacaaccttctcggaattgtcaactactcagagaggtctcctgtgacttctctatttaaacaaccccaccaccatcaccattctccaccctgacaccaccagtgtctgcccaacccttagcacaatgtccagcacacagtatttgatcaatacatgacggatgcgtgagtacattaggtacgtgcgcatgcacacatatgcatgtattctccccacaaagtataaaggggatggtattacagagataattctgtaatttgctttcctacttcacaacatataataaaaaacaataatgataatatttcttaagcacttatgttccaaggactattctaagcattttacatgtattctttcatttaattcttacaacagccccttaaggtggtactaatactacccgacttgccagataaggaaacaaagaaatggagacatggggaggttaaaacacagcttgcaagtggtagagccaatacataaatttacactaatcgtaaaatggctgtttagccttaattcacatattaaaatattttgtggcaaaatatactcaacataaaatttatctttttaataatttttaagtgtacagcttagtggcatcaagtatattcacattgttgtgcaaccatcaccaccatccatctccagaactttctcatcatcccaaactgaaactcagtacccattaaacattaactctccatgctccccttcctccagcccctggcaatcactatgttatttcctgtctctataaatttgagcactgtaggtccctcatagaagtagaataatatagtatttgtgcttttgggattggtgatgggtttgttgcacttagcaagtcttccttattaattaattaatatctaatgaataattttattgagtaaaatatttgagtgcatgatacaaaattcaaaaggcatagaataaaagagcaagttctccttctacctctgtctctaggtaccccaggggcaaccactcttcctagtgtccttccaaagatgttcta

SEQ ID NO: 707564 - DNA, 1535 bp, Homo sapiens
aagattactgaatagatagcagaaggtaacctctgccctactttcagaccaatgagtagatataaatgacattacactctcgcttcatgaaaagtaactggagagttgagatgaggtgattcttgaaagaaggaaaggctattagatttcttactattaatgattaaggttcctcaattttttattaaccagcctttttttctaatgacaaaatacatccttatggtacataattcaaactgtagagaagggaataaagtaagaagtaaaattccttttctccactccacaccctccttcccacacctccctgaatacttccctgcggaaaccactattaacagtttcttctccatctttctagaattgcctatgtatattccaacctcctctgacaatcctcttttttactcacccacaagaggccttccaacttggcatctcacatcatgataccgcctttgtctgggaagctcttctcctctttgcatggctccctcatggctgctacaaccttctcggaattgtcaactactcagagaggtctcctgtgacttctctatttaaacaaccccaccaccatcaccattctccaccctgacaccaccagtgtctgcccaacccttagcacaatgtccagcacacagtatttgatcaatacatgacggatgcgtgagtacattaggtacgtgcgcatgcacacatatgcatgtattctccccacaaagtataaaggggatggtattacagagataattctgtaatttgctttcctacttcacaacatataataaaaaacaataatgataatatttcttaagcacttatgttccaaggactattctaagcattttacatgtattctttcatttaattcttacaacagccccttaaggtggtactaatactacccgacttgccagataaggaaacaaagaaatggagacatggggaggttaaaacacagcttgcaagtggtagagccaatacataaatttacactaatcgtaaaatggctgtttagccttaattcacatattaaaatattttgtggcaaaatatactcaacataaaatttatctttttaataatttttaagtgtacagcttagtggcatcaagtatattcacattgttgtgcaaccatcaccaccatccatctccagaactttctcatcatcccaaactgaaactcagtacccattaaacattaactctccatgctccccttcctccagcccctggcaatcactatgttatttcctgtctctataaatttgagcactgtaggtccctcatagaagtagaataatatagtatttgtgcttttgggattggtgatgggtttgttgcacttagcaagtcttccttattaattaattaatatctaatgaataattttattgagtaaaatatttgagygcatgatacaaaattcaaaaggcatagaataaaagagcaagttctccttctacctctgtctctaggtaccccaggggcaaccactcttcctagtgtccttccaaagatgttcta

SEQ ID NO: 707565 - DNA, 675 bp, Homo sapiens
ttgagggtggtgggctggggtgtccactacagccttccttctgctgcccacccctagcaaggagtcagtctggtaccctcggtcagcctggtagaggggatggcagccccagtgggtggcstacgccttctgggggagggaggtctcactgactctgagtttcctgtcagcagctgggggccccttttggtccttcaactctgttctctcctgaacatgtcattttggcttctttgggatatgctcccattgcctctgcaaaattatcccttccatctggtgggtggcagaaggggagagaggaatgtctgagccttttccttggagccagagttcccagggagtgggagaggagacctgcaggcgttgtccctgcaactgctcactcctggttgattcggggatagtgggagcaaggggaatggggctgctgtgtgttgggggagagaaagggctgaaagcatgcggtcctttgagttcaaggggctgggagagagtaggagaagaaaggagaaaggagtggtctgttgagagagaagactgccaagccggggggcctctttcccttggccttgggacagtctggccttccacaaccccagagggggcagctcaggtgtctcggatcagatgtccccatccttccccaggcctagggggctggacaatggcccc

SEQ ID NO: 707566 - DNA, 675 bp, Homo sapiens
ttgagggtggtgggctggggtgtccactacagccttccttctgctgcccacccctagcaaggagtcagtctggtaccctcggtcagcctggtagaggggatggcagccccagtgggtggcgtamgccttctgggggagggaggtctcactgactctgagtttcctgtcagcagctgggggccccttttggtccttcaactctgttctctcctgaacatgtcattttggcttctttgggatatgctcccattgcctctgcaaaattatcccttccatctggtgggtggcagaaggggagagaggaatgtctgagccttttccttggagccagagttcccagggagtgggagaggagacctgcaggcgttgtccctgcaactgctcactcctggttgattcggggatagtgggagcaaggggaatggggctgctgtgtgttgggggagagaaagggctgaaagcatgcggtcctttgagttcaaggggctgggagagagtaggagaagaaaggagaaaggagtggtctgttgagagagaagactgccaagccggggggcctctttcccttggccttgggacagtctggccttccacaaccccagagggggcagctcaggtgtctcggatcagatgtccccatccttccccaggcctagggggctggacaatggcccc

SEQ ID NO: 707567 - DNA, 902 bp, Homo sapiens
tcatttctagtgtcttttttttttcatccagattttcatctggtgtcagtttccttctgcctggaggactcctttaacttgtctattaggtgtcttaaacttgcactgtcattcactgatgctctgttcatttaaaaaaaaacttgttggccgggtgcggtggctcacgcctgtaatgccagcactttgcgaggccgaggtggtagatcaggaggtcaggagatcgagaccatcctggctaacacggtgaaaccccgtctctactaaaaatacaaaaaaattagctggctgtggtggcgggcgcctgtagtcccagctactcaggaggctgaggtgggagaatggtgtgaacccaggaggcggagcttggaacctgtcaaaaggcattcttagccttaaaagaaaagccagggacatcccttgcctcaggactctcgaacttagaaaaacctttcaccctctatgtggatgaataacaagggacagcttcaaatgttctaattcaaaggctgaggaattgctttggaccagtggcttatttctctaaacagctagaccaggtggcagctaggtgactaggaagcttgagatctgtggctaccatcactttattgttagaagaaaacagtaagtttaccttgggacacaattacatgccataccaaccccacccccaccccctgccaccccatgaagtacagtacagagggtcctagaggcaaaagtacaccaatggctaacagggrgccagttacttaaatatcagacccttctgcttgacaccccagatgttaccctgaaagtatcctgattttgaaaccctgctactctgttgctgcacctcacatctcaagaaacagatcccaaactcattgactcctgtgtggaaaccacggaagagc

SEQ ID NO: 707568 - DNA, 620 bp, Homo sapiens
agggagcccaagttaggacagcttcagctcgctcagtcatctttgtaacaccttcctggttttggcaatatccacagtccgtcagtattattattattgtcttataacattttctctaaatcaaatcctttaaaatattttatgtgttgtattataaccacctatgataagccagtatcacttttacatttcaaaagatcaagataacaacattacaaatcgtatgattggtttctaagtgttgctgcccatgggggatggggagatgtgagcctgaagtttcttctttatgctgaaaagaagaaagaaaagaaagggggttgctgggtgcagtggctcacgcctgtaatcccagaactttgggaggccaaggcrggtagatcgcctgagttcgggagtttgagaccaccctgggcaatatggcgaagccccatctctacataaacaattagccaggtgtgatagctcatgcctataatcctaactactcgggaggctgaggcacgagaatcacttaggccctggaggcggaggttgcagtgagctgagatggcactgagcgacagagcaagactctgtctcaaaaaaataaaagtgggggtgggggtaagataaaggga

SEQ ID NO: 707569 - DNA, 1447 bp, Homo sapiens
atgtgatcaccatttgtttctagtctttatcttgtttcatttctctccatagcttttggagtccatagtgtgtgtgtgtgggtgtgtttgtgtggatgtgtgtgtgttcatctcccccttcgaataaaagctccatgaggcagggacatcactgctgcaccccaggatcaagaacagctgcacacaaaaagtcagctataagtaytgatgacattaatgaatgaatgaaccaataagtgactaagctggccctttcatttactagctttatgatgttgagtaacttattaccttttctaaattcaagtacctcttctgtacagttttgtgaatgaaataaatgccatagtacagggcctgtaatatgtttactgagtgcccagtaaatattagttcatagaatttagagagagggagacaggtggcaaaagagggagggggatagagaaaataaagcaaaacaaagctacccatccaatatttccattttggtgagtggccctccctcgttttagactcactgtcacaaacaggaagccaaacaaaacaaaatcaacaaaagcaaattttaaacttttgattctccttccaggaaaacaataaaatcaagagaatgaagccgatactgaaaaattataatttagacttttattttatagaattaagtatccatcagtctgtttatgaattttgctttaccacgctgatctaccaacttctatacagactcggttatatgagagcatgggtctgtgtttgtgtgtgctctgtagtcaaagacgtatgttcactgagacatgaaatatatatgatacatgtggaacaactataaacaacatgggcgaagtgtgttttttagccattctctggatccctcacagttcttctagagagtagaatcatcagggaaatcagaaaactgaaaggtattttttattccccaaacaaaacaaaataaaacttcactcctgactcttggtggttgaaagcaaatgtatagacaatactgatgcttgttcctaatttaataaaaaacgaaaatccataatacagcactagtcaacatggagcccgagtgtgaaagctaatctcatcatgaggtgttaaaacacatggaaaagtgggaataatggataaggcgttttaactgtaaatttcagcttggcagtgataggcgataatgttcacccacaaggaaaggctttcatttcatccctgttttgtggagctggtgttaattctgagggaggttgcaaagactgacttattttgccaacttcataactgctcttggatctgaggagcagaggctcaaggctccttgtagagtcacgtgttgattttctaatttattcataagttatatatttctgtttataaaaagaatttgcaatggcttaaagcatgcctttacttctatacctaccagggctttgttttatcattc

SEQ ID NO: 707570 - DNA, 1447 bp, Homo sapiens
atgtgatcaccatttgtttctagtctttatcttgtttcatttctctccatagcttttggagtccatagtgtgtgtgtgtgggtgtgtttgtgtggatgtgtgtgtgttcatctcccccttcgaataaaagctccatgaggcagggacatcactgctgcaccccaggatcaagaacagctgcacacaaaaagtcagctataagtattgatgacattaatgaatgaatgaaccaataagtgactaagctggccctttcatttactagctttatgatgttgagtaacttattaccttttctaaattcaagtacctcttctgtacagttttgtgaatgaaataaatgccatagtacagggcctgtaatatgtttactgagtgcccagtaaatattagttcatagaatttagagagagggagacaggtggcaaaagagggagggggatagagaaaataaagcaaaacaaagctacccatccaatatttccattttgrtgagtggccctccctcgttttagactcactgtcacaaacaggaagccaaacaaaacaaaatcaacaaaagcaaattttaaacttttgattctccttccaggaaaacaataaaatcaagagaatgaagccgatactgaaaaattataatttagacttttattttatagaattaagtatccatcagtctgtttatgaattttgctttaccacgctgatctaccaacttctatacagactcggttatatgagagcatgggtctgtgtttgtgtgtgctctgtagtcaaagacgtatgttcactgagacatgaaatatatatgatacatgtggaacaactataaacaacatgggcgaagtgtgttttttagccattctctggatccctcacagttcttctagagagtagaatcatcagggaaatcagaaaactgaaaggtattttttattccccaaacaaaacaaaataaaacttcactcctgactcttggtggttgaaagcaaatgtatagacaatactgatgcttgttcctaatttaataaaaaacgaaaatccataatacagcactagtcaacatggagcccgagtgtgaaagctaatctcatcatgaggtgttaaaacacatggaaaagtgggaataatggataaggcgttttaactgtaaatttcagcttggcagtgataggcgataatgttcacccacaaggaaaggctttcatttcatccctgttttgtggagctggtgttaattctgagggaggttgcaaagactgacttattttgccaacttcataactgctcttggatctgaggagcagaggctcaaggctccttgtagagtcacgtgttgattttctaatttattcataagttatatatttctgtttataaaaagaatttgcaatggcttaaagcatgcctttacttctatacctaccagggctttgttttatcattc

SEQ ID NO: 707571 - DNA, 1689 bp, Homo sapiens
tctgagggatgttaaagtctgagaactattgagtcatgagagatatgcaagtgcttctgayacaagtagtgttaaaaaaaacacttggagaaacacaaataaaatttttaaatgttcttcatttttgctttcaaactcagtatagatatctactctgaactctagctgtacattcaaataccttttctatgtcataattcaactcttcatggcctagaacaaactcaaactccctgctaatttctcttcctccagcactctctacttcaaaaaggacataacctttcccacaggggagcagtctgaaaacctggaaatcatcctcacatgtctttcctgcatcacccgttttgctggcatcatgagtgattcctgacactctcacctgctaaatctgtcactactctgctcttctcttctgcagtccttgctatcaccatctccccagggctttggcagcagcctggcatcttgtctcccactttttgtccccaagccattcttcatattgtggaaagagtgatcttttcaaaccatgagagatgaaaccccagatccttaatatttcctagaaaagtctgcatgtgcagctctgattactacatgggccttagctcaggccatggtccccagcccccatactccaggcatgttgatcttcctttagttctaactccactgtttctttgtcttcagcttttcacgtgggtccctgtgcttggaatgctcccctcagaagagcattgcataagttacttcaggactctgagcctcagttctcatctataaaatgggtataaaactttggaacagaattgttaaaatcgtgaaaataaaatgtatatagtcaataaattttagtttttctgcatatgttcagggctttttttcttatcttccaataatcttcatattaaaacatatcaaatgatgtttcttttcactcttttactagcagcaatttcatgaaatctcaaggttagatacgtctcttaaagaatttatgttatttcagaaattaattaaagtcatcacatatcttgctggggaacgctttccctgcggtttttaattactgtctagttaacaatatcctttagaatgttgtgtcttttacaaatgtaggtgttggatggctataattttcagaattactactttggtctacaacccatttaatgagttagtaaaaacaattaatggaatttacatacttacttgggctctgacagggaggaaaaaaagagaagattccaaataaatgagcaagtaaaagagcattaattagcatctaatttgtaattgcagagttcagtgctcaatactttagaaattaattgaactctatgttgatgtgtaaggtgaaagcatacccaacttcttgttaagattaatattatcctcataaaaaaccctcaagaatactgattgttgaaggaacaaacatatataacaccaagggttgtcagcagtatgagccagcaaggagggatggtatagcattaaatacatacaaaagatggaaaggcagtgaggttctgaataaaatgtccacagaaataagggtccaaccaaacatactggttattgcattattatgttaagtctaggactaatacaacttttgttaccatgtaagtcataatttattcaagaaaataaatgaatatttgaaatagggattgaaaa

SEQ ID NO: 707572 - DNA, 1689 bp, Homo sapiens
tctgagggatgttaaagtctgagaactattgagtcatgagagatatgcaagtgcttctgatacaagtagtgttaaaaaaaacacttggagaaacacaaataaaatttttaaatgttcttcatttttgctttcaaactcagtatagatatctactctgaactctagctgtacattcaaataccttttctatgtcataattcaactcttcatggcctagaacaaactcaaactccctgctaatttctcttcctccagcactctctacttcaaaaaggacataacctttcccacaggggagcagtctgaaaacctggaaatcatcctcacatgtctttcctgcatcacccgttttgctggcatcatgagtgattcctgacactctcacctgctaaatctgtcactactctgctcttctcttctgcagtccttgctatcaccatctccccagggctttggcagcagcctggcatcttgtctcccactttttgtccccaagccattcttcatattgtggaaagagtgatcttttcaaaccatgagagatgaaaccccagatccttaatatttcctagaaaagtctgcatgtgcagctctgattactacatgggccttagctcaggccatggtccccagcccccatactccaggcatgttgatcttcctttagttctaactccactgtttctttgtcttcagcttttcacrtgggtccctgtgcttggaatgctcccctcagaagagcattgcataagttacttcaggactctgagcctcagttctcatctataaaatgggtataaaactttggaacagaattgttaaaatcgtgaaaataaaatgtatatagtcaataaattttagtttttctgcatatgttcagggctttttttcttatcttccaataatcttcatattaaaacatatcaaatgatgtttcttttcactcttttactagcagcaatttcatgaaatctcaaggttagatacgtctcttaaagaatttatgttatttcagaaattaattaaagtcatcacatatcttgctggggaacgctttccctgcggtttttaattactgtctagttaacaatatcctttagaatgttgtgtcttttacaaatgtaggtgttggatggctataattttcagaattactactttggtctacaacccatttaatgagttagtaaaaacaattaatggaatttacatacttacttgggctctgacagggaggaaaaaaagagaagattccaaataaatgagcaagtaaaagagcattaattagcatctaatttgtaattgcagagttcagtgctcaatactttagaaattaattgaactctatgttgatgtgtaaggtgaaagcatacccaacttcttgttaagattaatattatcctcataaaaaaccctcaagaatactgattgttgaaggaacaaacatatataacaccaagggttgtcagcagtatgagccagcaaggagggatggtatagcattaaatacatacaaaagatggaaaggcagtgaggttctgaataaaatgtccacagaaataagggtccaaccaaacatactggttattgcattattatgttaagtctaggactaatacaacttttgttaccatgtaagtcataatttattcaagaaaataaatgaatatttgaaatagggattgaaaa

SEQ ID NO: 707573 - DNA, 1689 bp, Homo sapiens
tctgagggatgttaaagtctgagaactattgagtcatgagagatatgcaagtgcttctgatacaagtagtgttaaaaaaaacacttggagaaacacaaataaaatttttaaatgttcttcatttttgctttcaaactcagtatagatatctactctgaactctagctgtacattcaaataccttttctatgtcataattcaactcttcatggcctagaacaaactcaaactccctgctaatttctcttcctccagcactctctacttcaaaaaggacataacctttcccacaggggagcagtctgaaaacctggaaatcatcctcacatgtctttcctgcatcacccgttttgctggcatcatgagtgattcctgacactctcacctgctaaatctgtcactactctgctcttctcttctgcagtccttgctatcaccatctccccagggctttggcagcagcctggcatcttgtctcccactttttgtccccaagccattcttcatattgtggaaagagtgatcttttcaaaccatgagagatgaaaccccagatccttaatatttcctagaaaagtctgcatgtgcagctctgattactacatgggccttagctcaggccatggtccccagcccccatactccaggcatgttgatcttcctttagttctaactccactgtttctttgtcttcagcttttcacgtgggtccctgtgcttggaatgctcccctcagaagagcattgcataagttacttcaggactctgagcctcagttctcatctataaaatgggtataaaactttggaacagaattgttaaaatcgtgaaaataaaatgtatatagtcaataaattttagtttttctgcatatgttcagggctttttttcttatcttccaataatcttcatattaaaacatatcaaatgatgtttcttttcactcttttactagcagcaatttcatgaaatctcaaggttagataygtctcttaaagaatttatgttatttcagaaattaattaaagtcatcacatatcttgctggggaacgctttccctgcggtttttaattactgtctagttaacaatatcctttagaatgttgtgtcttttacaaatgtaggtgttggatggctataattttcagaattactactttggtctacaacccatttaatgagttagtaaaaacaattaatggaatttacatacttacttgggctctgacagggaggaaaaaaagagaagattccaaataaatgagcaagtaaaagagcattaattagcatctaatttgtaattgcagagttcagtgctcaatactttagaaattaattgaactctatgttgatgtgtaaggtgaaagcatacccaacttcttgttaagattaatattatcctcataaaaaaccctcaagaatactgattgttgaaggaacaaacatatataacaccaagggttgtcagcagtatgagccagcaaggagggatggtatagcattaaatacatacaaaagatggaaaggcagtgaggttctgaataaaatgtccacagaaataagggtccaaccaaacatactggttattgcattattatgttaagtctaggactaatacaacttttgttaccatgtaagtcataatttattcaagaaaataaatgaatatttgaaatagggattgaaaa

SEQ ID NO: 707574 - DNA, 999 bp, Homo sapiens
tgagccaccatgcctgacctttcttatctactacaaatccttgtccctacaaccacctctggaggtaggaagtgacaggaatcattatccacattttacacatgccgatcatgctgtaaaagagacagatggacagagactttggggagagccccaccgatgactgctyttgtaaatgctgcacatttgcacactacctgggagaatcagaggcaaagacaaagatgtgagacaaaggggttgaggctgaaggaagccctctgtcagcaccggcactgcccgtcacgtggcagcactgatgccctggcacctcagaattataaaaaaagggtgaagcaccaatactagtggcaaacatttcacacaaaggaaaataatgccacaatcaccacccaaacacagtaatttccaattatggacgtctatttccatttagcacatgcaggcaaatatgatgagagggatttaatgaccactctcttgtctctgctttttaaactcagtatctgttgtggtcacatgattgacccccaacattcattccacatggatgagtcagctgagctgaccagggttatactgcctctctcatgaatgatggcttagaagggtttagatggtttagaaggaaagcctgctccagggattcggagaaaagaggctgttcatcccttcttttggtccctgtcattactgagtgtgatgtgtggagccgctgcagccaccttggcaccatgtggctaatcagccttaggctgaggatggggtaagagggaaaggagcctgtgtctttggtgatgatgatatggagatgtttaatcagccagtcttggtgtctgccctatctctggatttctcactatgtgaggtgatagatttgcttattctttaagtgtgttggagggttttttcttttcttcctttttggttacttgctgctaagacattgaactgatataattttatgtcacaagaccttttttctttttcttttctttc

SEQ ID NO: 707575 - DNA, 999 bp, Homo sapiens
tgagccaccatgcctgacctttcttatctactacaaatccttgtccctacaaccacctctggaggtaggaagtgacaggaatcattatccacattttacacatgccgatcatgctgtaaaagagacagatggacagagactttggggagagccccaccgatgactgctcttgtaaatgctgcacatttgcacactacctgggagaatcagaggcaaagacaaagatgtgagacaaaggggttgaggctgaaggaagccctctgtcagcaccggcactgcccgtcacgtggcagcactgatgccctggcacctcagaattataaaaaaagggtgaagcaccaatactagtggcaaacatttcacacaaaggaaaataatgccacaatcaccacccaaacacagtaatttccaattatggacgtctatttccatttagcacatgcaggcaaatatgatgasagggatttaatgaccactctcttgtctctgctttttaaactcagtatctgttgtggtcacatgattgacccccaacattcattccacatggatgagtcagctgagctgaccagggttatactgcctctctcatgaatgatggcttagaagggtttagatggtttagaaggaaagcctgctccagggattcggagaaaagaggctgttcatcccttcttttggtccctgtcattactgagtgtgatgtgtggagccgctgcagccaccttggcaccatgtggctaatcagccttaggctgaggatggggtaagagggaaaggagcctgtgtctttggtgatgatgatatggagatgtttaatcagccagtcttggtgtctgccctatctctggatttctcactatgtgaggtgatagatttgcttattctttaagtgtgttggagggttttttcttttcttcctttttggttacttgctgctaagacattgaactgatataattttatgtcacaagaccttttttctttttcttttctttc

SEQ ID NO: 707576 - DNA, 609 bp, Homo sapiens
ctctgcccaatgccctgagtattacagctcaggcttccacccatggtagaatccgccggcatactgtcccatgctgctgttagggagagcaggagggatccagctctcttgggaagcaggtgctgtggtcttgggggggtcttcctctggatcctggtttcctcacctgaagagctgggggatctggccaggtgatcctgacatttcttcctgtgccagaaacctccctttttacattgggakcagtagacaattggtctgggcagaagctaagctgtgtgtaaatcatgcacaattttgtttttagttctgatatttttaaaacactggtactaccacttggaaaacataacatgctcagtggtttattttatagagtgatcgttgctgccaattcttatatctcaaaagggacttctagttattaatgtgacctaagccttcctgccagtagtaacccaggcagactgaaaaccaccggagagtgactcatacaacatgtgtctcctttgaagatggccatgcccttgagccctggagccgacggctgtttccttaacacggggtggtggttactgtacttggttagtgtaatatctgacttccacc

SEQ ID NO: 707577 - DNA, 1318 bp, Homo sapiens
gcgcggccatctcaagcagcacctgtggggaaggcttatcccaggtggtagtttgtgcagtcatgagtagggccaaaactagggtgaagcaggaccctgataatgatgcccccctaaaatttgcatctttgtgccttctcacctcgccctggttccagccctggttataagcacaggctcagaatccggtctgcctgagctcatctccatctgctacctgctcgctgtgcaactttgggtgagaaaataacctctctgggcctcagtttcttcacttgtagagataaggatagtgcttactagcaggattgttatgcagattaaatgaattaacatgggcaacaacacttagagtggagtctggccaatcacaagcctccaaagtgttaacctcttttgctatcttctcttgccctgtgtagcagaagctgttggcccactcagatcccctaagtccctaagttggcatgcaccttggcctgcccacctctgcccaccttggccatcctcccttctctatttggctgccagatggctttttcctgagccccaggagcatacttagttcaggaacctgcttagcaggggcaacctggaagtaccggggacttagtgttcatggcagttcccagccacaagcagcaggaatcggggtgaagaccccactttccaggcctcagtggcacaattctggggtcattctgcacagggaacatactcataactgcatctttcttgtcctgcccccttcccctctcaccttcctcacccccctcactcctgctccccagaatcacatccctaattaacttcatcccccagtgctctttctcaagggctgtttggtggggaaaccaaacaagtcatcttctcagtggtggtttttatctatggaaaagccctctctgtttggtttcccagagctttcatcctgtgtgcacgcatgcggtgttccatccgggcagccagtgtgtccttcgttcaaaaacacgtcctgtgcgcctaccgtgtggtgaggcaccagctggcaaccatcgggtcaagctcttatccagggcttggggctgcctgtggtgggacatgtcatgccccctttggggccaacacggatcggaggaggtggccggtcagtgaggaagggtatgagctctggactctacctgaggggctrgaccttggctcctcctcatgatagccatgagacctcgagctagtggctaaccgctgagcctcagtttgctcatctggggcccgtgggaagaggtgacactcaggaagggctgagcccttcgtgcctgagctcatttgctctgttgga

SEQ ID NO: 707578 - DNA, 1737 bp, Homo sapiens
tgccctatttcacaggtgaggaaactgagtcacccagcagttaaataattagcccaagatcacacacagcagcagacagctgagccaggccttacattcagtactctttgacttaaaagcttaaccatggaactaccctctactgcctaccaaatccagcttggtgagtttagccaaggcaaataatgtgacccctacttgcacgagggttatttctggggctcagaatgatcaaatatcatgggaggaaactgctttgtcttcatcactaccctgctatagcttagcaaaacctgcactcgtcaatacttcttacaaggtgggcagatctccatatgcagccacccctatccggtgtccaacccccaagctgtgaaactgggctaagtgctgaatctgctcattcctctggaattcagaggaggcagcatcgtatggaagagcacagctgaggcaagaaacagctctttcactggtcagccatgtaaccgtgagcaggtgactcgacctcactatgcctcagttttttcatctctgaaatgagaaaaatagcagaatctacttcataggattattatgaggattacgtgagttaatattgatttggtgcttgggatgtggtcagggccatagaagacttagttactagtgttmtgtaattatgttgggatgtaactctcaaagaagagagttgagacaatgatcttaacttttgggtgaatccagatagtcaatttggctaactgagacaaggacaggtttcttaccactgctgggaaaaccaggtggtctattgaattggcctactgttctgaaattatttagacatgccctgcatatgtttgcatatacaattgtacaagtcatatgtttgtaagaaatgtcatttcttcaccatttattcaataaaaatgcttcgtgctcttgctctgaatcaggtactagagaaacaaaactgaacaagaccatccccaaagagcacacaatgtagatggcagcaaataacctaactgtaatacaacacggcaagtgtagtaaatgcttcagtgaaagtatgaaaaacgtggaggaaatgaaatgtttttgtactgctgggtcaggggcagtcactgaagccttccctagcaagcaacatttgagccagggcttaaagaatgaggtagaatttgcctgttggaggatgagggctggatatggacatccaaacagaaaggacgtcttgaaaacgtgcaggaagttacaaaaatttacgctgtgtttggggaacattctaggtagggccgttgtggcagtgccctgtgtattggagtaaagacaagacaagaagtgaagcaggttgtgaagggaaacactcatttcctagaagcagaaagcaacagtatctcatttctttggtcacaagcaacagaaatggattttggccctttgagagaatggagactttgtaggaactatttggggcaccaacaggagggaagggaagaccgtcttcctcaggcactatcccactgtgtttgctacctttgctttgattcaaggtctcaggagacagaaactctgattgcctgaactcaggtgaaatgctcacatcttggctgtactaggtggtgaaaagaatgtctggtgggcagagcctccacctttcaacttctaaggtggacagtcagcacactagagggcaccaagactacaccaaatcaggaaaggtaattccccagaaggaaatcagggagcagc

SEQ ID NO: 707579 - DNA, 2008 bp, Homo sapiens
tgcttcctcttgagccccaagaatggagagctgcaaatccacagggcttcaaagcatgttgttttaattaatggctgagcagaagcttctstaatccttgtgggcagatgtgccctcattaaaaaaaattctatgagaattaaacttatctcagaaagtagtggggataacttgttcatctggtagtaacatctccccaagtactgggcctgccattttgaagtctataaccacatatttaatctaagtagggaaaaccactcacgtcatcccgtcactcaatcatccagtgagtcattaatctagtttctattctctagtagccttatctgtttataaatgttattttactcaccaaaacactgcaaggtaggcattaggatcctcattttattgacaaggaaatggaatcgcagagaagttaagcagctagcttaaggccacacagcaagtaaggggctcattccatgaccctgtgcactgttctatatcttgagcaccaacttggatctgtaccagtcttcacagctcccatctctgaactgtccagaaagagcccatgttttctgccccttgttgggagaggatgactgagaattccagcaaaatggagactcttgaactgatccccctgtctccagaactgtccaactcacctccaagtctccaactcaccttccacactggccaccagcaattgtttaaaacgctaaaccaaccatgacacttagcttaacatctttcaatggctcccaattacctttaatagaaaatccacattcacacggaatgtgagacccctcatgatccagcccttgctacctcttctgtctcatcttccaaaacatcccctgagtgctcatttcactctagccatacaactctcccaacaaccttgaaggcaccagcacacctctgttcacttgttcttctctttagaacccctttcccttttatatctgctcagctaactcctattcaaccttcaaaactcagttcaagtatccccttctccagaaagttcccaccagagtgactgtgtccatcctctgtgctttttttttgaagatttttgtagcataccaggggtactctcactctctaatagtagggatgacagtcaggaagtttttggtctgcataggacagaaagtccacccaaagaagactaaacaaaaagaaaatagtagattgatctcatataaaggccatttggatgtagactgggctccagatgtgatacgatcagggtttctgcttagggtttctgtaattttctcagatctgtcatcccagatatatttgttttgtcctcaggccaatctccccagtggtagcaagacagttgctaaaagcaattggggcaacatgcatagaggggaagagagagaaccttccccgcagttgtccttccctttggtgtgaggagggctttaggtcacatgttcatccctggaccaattaccgtcaccaattaagcaataggctgaagccatgatgcctgagccaatcacaggcaagggtgtgtgtaggattatcatgattggtatagcctggtgtgggtcagctttccagagatcacatagcttatgtacaggagaggtgggtacccaaataaaaacggagttccgggttgggtacagtggctcacacctgtaatttcagcacttcggtaggctaagataagtggattgcttgaaaccaggagttcaagaccagcctgggcaagatggtgaaactcatttctacaacaacaacaaaaaatacaaaaattagccaggtgcagtggtgcacacctgtaataccagctacttgggaggctgagaggtggaggttacagtgagccgagattatgccactgcactccagcctgggtgacacagtgagaccctgcctcaaaaaaaaaaaaaaaaaattctgccaggagggaggaagaagggaatggatgctgtctaagccaccacagtagctgcatgagtgttcacacacacctgtcctcccacaatac

SEQ ID NO: 707580 - DNA, 814 bp, Homo sapiens
taaggccttatggctacccaagtgctgcttagactagggagtaaaagacagttttaaaacctgatagaaatggaatatttggcatttcttgaaaactggcctctgccctgcatcttgcaaaggaatcagttactttagggttagagttgacagctgcaagtaccaaagcagcaggaagagtaagttggtccacatttcagwtacaattctccatagcaagtgtctctgcagtatcttataaaatatcacaacatggagccccttccacaagcacccaggaaaaaaggaacgacattttttctctagcctggccttctgcttttgttccatctttggggggacactcccaggccccacacaggctctgccctctgcccaggatagtttccatggcctcccctcttagcccctctcctgtccccctgagcttcctcttgtgagaagccttccttgtctctcctgtcgtagcacctgactgggagctcctagaaggtagaaccttgacttaccatcttggtgtaaccaggtactgctatacattttcaatcaatgcccgaccagctttaaacagtacttaaaaaaaaaaccccaaaaacaaaaaactattctcaacaggtacataatgtgcagctccctcataaaatttcagggcgttaaaaagcacttatcatgtgcatgtttccaaatggtccttccttcagtctttctatttatttatttatttatttgacagagtcttgctctgtcacctaggctgaagtgcagtggcacgatctcggctcactgcaaccttcgcctcccggattcaagcaat

SEQ ID NO: 707581 - DNA, 814 bp, Homo sapiens
taaggccttatggctacccaagtgctgcttagactagggagtaaaagacagttttaaaacctgatagaaatggaatatttggcatttcttgaaaactggcctctgccctgcatcttgcaaaggaatcagttactttagggttagagttgacagctgcaagtaccaaagcagcaggaagagtaagttggtccacatttcagttacaattctccatagcaagtgtctctgcagtatcttataaaatatcacaacatggagccccttccacaagcacccaggaaaaaaggaacgacattttttctctagcctggccttctgcttttgttccatctttggggggacactcccaggccccacacaggctctgccctctgyccaggatagtttccatggcctcccctcttagcccctctcctgtccccctgagcttcctcttgtgagaagccttccttgtctctcctgtcgtagcacctgactgggagctcctagaaggtagaaccttgacttaccatcttggtgtaaccaggtactgctatacattttcaatcaatgcccgaccagctttaaacagtacttaaaaaaaaaaccccaaaaacaaaaaactattctcaacaggtacataatgtgcagctccctcataaaatttcagggcgttaaaaagcacttatcatgtgcatgtttccaaatggtccttccttcagtctttctatttatttatttatttatttgacagagtcttgctctgtcacctaggctgaagtgcagtggcacgatctcggctcactgcaaccttcgcctcccggattcaagcaat

SEQ ID NO: 707582 - DNA, 814 bp, Homo sapiens
taaggccttatggctacccaagtgctgcttagactagggagtaaaagacagttttaaaacctgatagaaatggaatatttggcatttcttgaaaactggcctctgccctgcatcttgcaaaggaatcagttactttagggttagagttgacagctgcaagtaccaaagcagcaggaagagtaagttggtccacatttcagttacaattctccatagcaagtgtctctgcagtatcttataaaatatcacaacatggagccccttccacaagcacccaggaaaaaaggaacgacattttttctctagcctggccttctgcttttgttccatctttggggggacactcccaggccccacacaggctctgccctctgcccrggatagtttccatggcctcccctcttagcccctctcctgtccccctgagcttcctcttgtgagaagccttccttgtctctcctgtcgtagcacctgactgggagctcctagaaggtagaaccttgacttaccatcttggtgtaaccaggtactgctatacattttcaatcaatgcccgaccagctttaaacagtacttaaaaaaaaaaccccaaaaacaaaaaactattctcaacaggtacataatgtgcagctccctcataaaatttcagggcgttaaaaagcacttatcatgtgcatgtttccaaatggtccttccttcagtctttctatttatttatttatttatttgacagagtcttgctctgtcacctaggctgaagtgcagtggcacgatctcggctcactgcaaccttcgcctcccggattcaagcaat

SEQ ID NO: 707583 - DNA, 367 bp, Homo sapiens
tacaaacttacactggcctgctacatgtcagacactgttctaagagctgccgacaaggtgatgaacaaatagcaaatggactggatccctaccttggtagagtttcagttctaacatggggattggttagagccacagcctttaggcctcactggacttgaagcttcaaaagaagaggaaccttgcctgccctgttaaagcctggtatccccggcaccagtacagagccttgatgaacagctgtgatgttgtcagagataaggagaaaccccaccagtagtattccagttgatctsagttgatcagaaataaggagaattcagcagtatcccagttgatcagaaaaaaaaaaaaaacaaaaaaacga

SEQ ID NO: 707584 - DNA, 921 bp, Homo sapiens
tacatttatactgaaattttagaaacaagatgaattttcacagtaaatgtctaacataataattctaaggcaaagcaatgtaacaaaaaaagagaaaaaactgagaatggatttctgcttctttattcccagcgtagttttctctccaccaggtaagagtgcctacatttaagaaaaggaagaaatggcttatctgaaattcctaataatagcaataataaataaaaaccataaactagttacaatgatagtaataacaataataattactcagaaactgttttattatccctgtggacagtgtcagcattttttcttagatccatgaaactataaataattagtgacataaatgaggactcttcatggtcaaaaagctgagcttctagcaaaattactcaagaagcaaatgattcacaacccatctttaatagctgagaggttagtacagcagtatctcctgtcacctggctacaccttgmattttcaaggtgtattagtccactttcacaccactataaagaatgacctaagactgggtaatttattaataaaagagatttaattaactcatagtttcgcatgactggggaggcctcaggaaacctacaatgatggtggtaatggaagcaagacacatctgacatggcagcaggagagagagagtgaccaagtgccacactttagaaccatcatctttcataagacctcactatcacagggacagcatgagaaaaccacccccatgatccagtcatctcccaccaggtccttcccttgacatgtggggattgcaatttgagatgagatttgggtgtggggacacagagccaaaacatatcattttgcctctgacccctcccaaatctcatgtcctttttatatttcaaaaccaatcatgccttcacaacagttccccaa

SEQ ID NO: 707585 - DNA, 566 bp, Homo sapiens
tgtttaggtcagggtaagtctcaaaacattttatagacttaaccaacgtgagctttgaaccagcaatgggtgtaacagatacggaaacactgggtcccctcacttttgcagttgcggtggccaggaagtaattttgcttccttaaacttgaggctttggagtggtgtaatgaacactaccagacagctccaggagaatgcttcttctaatagttcttccaatattcaaattgccacaggaggcgtacttccataactgctccaggtggtgaggacatgcccacatacttgcattctgrggactgcttgaccccagtcctatggcagtcccattatttccagttccataatccaccaacatgtaaagaaggcagaccaagcagcatccagattacattttagtttgctgtacaaattctaatccaaacaaagtcttgaagcatcataacttcagtgttcaacaatattgactcctgctcttgacccaatgtgacttgctgagagacaggaggcctaacaaactttactatttctcaaggtaggtgctaaagagcaattgttaggact

SEQ ID NO: 707586 - DNA, 592 bp, Homo sapiens
tgcaacccctccgtgggaggcttacctagacattcccctaaaggatgaactcagtatcttgacttttcaggtctgggcctgtcaccaacaggacatactagtgtcccytgacagccaagcccagctccgcacagattatcatctgtcctccaatgctgccgacagtactaaccaccgtcatgaaccacagtaatagaccagttctggactaaagaaaaatgaatgctcgagattctagagaccccaaacggcatactcaaccagatcgcctcaggtcacaccaaaatcaagagaaatctaacaaacatctacaacactgatgcattttaatgaagagataggagaagggaagaaggaaaaaagagaaaaaagaaaaggggatgggtagaggtaggaaaggtggggagaagaaggcaacagtacacaaggagctataacaggagagagggggaaaaggagagaggagaaatgagagacaagcagaaaaaccaacggaagcgaggcccctgctctggaaagagaatgaacaggtacccagtcactggcccccagggtcagcgccagtctgcacagctcagatggcgtggggata

SEQ ID NO: 707587 - DNA, 682 bp, Homo sapiens
catgatccgcccacctcagcctcccaaagtgctgggattacaggcgtgagctgcagtgcctggccaaaacttgaasttttcataacagactctatggctatctaacaagaagcaaatgcacgctttttgaatgaaccaatgctcttcagcaattgcctgtttcattttcaagtcttgatcaatccagtttcccatttctccgattaaagcagagtaggattgaaaggattgtttagctaattcccccacgccttgttgtgtagggttagaactgtggggctgagccagtattctgtctttcacagaaagtttgttggttagccttgtcatatcaatctctggtttccagctattaaaggtgaataaccttctcttcccttgagaggcagtgtagaatagcggttacaagtataggctctaaagccagacccactggcttggaatcctaactccactaacttaccagcaatgtcatctcggacagatctacttaatttttctagacttaatttctccatgtgcaaaacagggaaaatactaggacctatctcacagagttgctctgaggactaaatgagttatttatttatttatttatttttgagaccgagtctcactctgttgaccaggctggagtgcagtggcgcgatctcggcttactgcaacctccgcctcccaggtt

SEQ ID NO: 707588 - DNA, 1888 bp, Homo sapiens
caagccactctgggatataaaacactcataaatgtgacatgcagtaatcaagaatgtattctcataatcccaatataacaaactaataagcagaaagagaagctcttaaatcaacagattttaacgatttttaaatcttaactatttgcgtgagggtaaatggggttttctggcctatctcatttccaaaagttgtgagacctgatatcgtacctatagggccaatccaataccagccaaaattggtctagtttcctaaataggacttgacatggtctatttcattacaaaaccacacatacaacaaacacaatatggttgagatgtaagggaaaaaaaaatcattcatggaatcactattctaaccaaattactattttttatttttgaattttcccttctacttttccctatcacacatacattttaacatataattttacatcctgctctcattatatcttaagaatttccccatgattctatataatctttgtaatgaacattttaaatgatcaaattagttttcatttagaagctatgcttttcccttcttgttagacatttaggttgcgtcaaactttttgttattttaaaacaaatctgggcaggggaagctttgtgcttataacttctttcttttgtattcttactttggataagtttccaaaagagctattaacaaggtaaaatacttacatgacccttgatatacgaggccattcctttttaaaatattaatataagcagcagaagtaatagcaatgtaatgttttggttgtttttaaaactgttcaagcccaaccaaagcttcaatgcaatcagttgtcccttggtatcttgtgggggcttggttcaggacctcccaaggataccaaaatctgcgaatgctcaagtccttgatataaaatgtgttgccatataacctacacacatcctcccatatacttcatatcatctctagattacttataatacctaatacaatgtaaatgctatataaatagttgttacattattcagggactaatgataggaaaacaaagtctgaacatgttcgctacagaaagcaattttttccccaaatattttctatctgcggttggttgaatccatggatgcagaacctacagatacagagggccaactatataaagaatgtcatgcaagagctttctatacctgtttctcaggtaaatacaatttacatttaatttctcaggtaagtttttgataagtgctgatattacactctcactgaattctcaatgtatctataattttataataaaatcagatcatttgttattatttatcttaaaatgtccttcctgtgtagggctgattattcatttattttagagaagtttaagccagagaaaaccagaatccagctcttataccatatctacttagacggacttaattcctaaataccacaatacattttctttccaacagtgacatactatttataaagttttatttgataaagaaaacaactattttcctttcaatgttcaggaaaccaatttgtcattatatatatataatatatatataaaatatatatttttttcttgcaacagccaattgcttttgcagtcttggattatttttcttctgaaatcagtaacattttgttcatacagtaagtcaggatacctataaagtaaaaggaggaaaatattgctctatgtaattttaaccacgtttgaaagcaatgtttctcaaagtgaaccctgactgcaacatcagcatcatctggaacttatgygaaatgcagatcctcaggcctcagcccagaaccaactgagtcagaaactcaggtgggcacagcaatatgtgttttaaaacaagctcttcagatgatgcccattggctgggc

SEQ ID NO: 707589 - DNA, 645 bp, Homo sapiens
aagcaatccacccatctcggcctcccaaagtgctgggattacaggtgtgagccaccatacctggccttagagctacattttaaaaaaatcaactgctctaatgtattcaaataagaatctgactggagatacaatttccactcacaaacagattcaaaaagtgctgtagctcaaacaacttagatatactatgatgggctctggaaaamtgtgctacagaactaaaaacaactaggtcttgtgatgacaaagtcactgatgtcaatgaggcatgtaaggtgtttgaataaaactgactactctttttcttttctcaatctttactctgtctgaaatgacaataataatggccatcctcattaaaaactaccatgtattgaacacttcctctgagtcaagaaccgtgtaaagtgatttacatatgttacataatttctcacaacaatcctgtaaggtaaatatcatcattgagccatatgaaattgctgatactcaatctttttttaaaaataaactttttattttacaatagtttcaggttcgtaaacaagttgtaaggataatacaaagaattcccatatgccctgtacctagtttctctgctattaacatcttatattaccatggtacctttgtcaaaattta

SEQ ID NO: 707590 - DNA, 645 bp, Homo sapiens
aagcaatccacccatctcggcctcccaaagtgctgggattacaggtgtgagccaccatacctggccttagagctacattttaaaaaaatcaactgctctaatgtattcaaataagaatctgactggagatacaatttccactcacaaacagattcaaaaagtgctgtagctcaaacaacttagatatactatgatgggctctggaaaaatgtgctacagaactaaaaacaactaggtcttgtgatgacaaagtcactgatgtcaatgaggcatgtaaggtgtttgaataaaactgactactctttttcttttctcaatctttactctgtctgaaatgacaataataatggccatcctcattaaaaactaccaygtattgaacacttcctctgagtcaagaaccgtgtaaagtgatttacatatgttacataatttctcacaacaatcctgtaaggtaaatatcatcattgagccatatgaaattgctgatactcaatctttttttaaaaataaactttttattttacaatagtttcaggttcgtaaacaagttgtaaggataatacaaagaattcccatatgccctgtacctagtttctctgctattaacatcttatattaccatggtacctttgtcaaaattta

SEQ ID NO: 707591 - DNA, 1102 bp, Homo sapiens
agatacaaccctggatttactgtgaatctcctagttttaaatgtggccaactaattaaaatgaaaaaaaaaaaaagtaaacagagctcatgccaaacaatgtctgttggccttaaccagtgggagatgccagtttgcagtctctggccagaaaagttcttgtatgtagcctagaaaatatgaggggcctcgttcaaatcactccatgtacaccctacccccaggaagtggcagccctggaggctggtcctctaaataggcatctccctcctgctgtgcccctggcctctaattccttttatgagtaagtgcctgtgtcagaaatgtgatttccaggcctctgacagcacccccttttcaccccctatttatacacacccgctctgtgtgaatgagctaaaacctcaggtggcggggatttggctgctgcgtggcccagtgtgtggctgggagctgcccctgaaaggctctcctatttcctcctctctgctccaaccctctctcccactctctctatttctcctttgaaaatatttctttcccttttctttcttttctctcttttcctccttcccattcctctctcgtctcatctttttctcacctttcttctcatttccttctttctctacatttctcccccacttttctcattcttttttccgtttcctctgtcgtctccactcctgtcccctctctctgactctcctttcctttcctgttccatcctttccccyctctttcctccccgcagcacccgggaacttgcgaggggacttcgctcaccaggaatacaccaacaccggcttcgagtatttcttgtgatgggagcggagggtcagggagcccttgcgctccaccaagtccggtggtccgatctccaaccagtgttgcttcctgtcgcaccagtcctggcaggatctgtcaaggctatccatgggagccctcgaggtacagacctctgaggagttccctatgcacctgtcctgcccggcaggaacgtaagtaccaagattcggcgtctcttatctcctaagcaacctggggcggggccagtggaggggcggatccctccaacctgacggccaaacgtttcctagacg

SEQ ID NO: 707592 - DNA, 622 bp, Homo sapiens
tgtgcggatgactggccgcaggcggccgggcgggctgtaacccgccgctgaactagcgcttctgtgtccagaggcttcggcctggccgccgtcgcctgtaagctacgaggaggagatttacgacttggccgggcgcagcaaaggccagactctgcgcgaacaggcgctgcgcaccaaccggcaggcacctggcgggcaccatcgcacggtggcgcagaagcccytcaatggccagcgccagctgcagccgcggccgcgcagtcgtcccacctgagcttgggtacgtgcgccccacaacacctcccccagccagggcccggggacccccgggagcgtccccccgctacctggcgccactcatcctgggcggggtcggtcccctctcaggctgcctctcattagggagctgcacccccgagcttgacctctgaaggccctttgcgatagcattaagcctttgaaactttgtagcgggttagaaggggctaggaaacgaagaaaacatctttttaaaaatataagcaatcggccgggagcggtggcccacgcctgtaatcccagcgctttggtaggccgaggcgggtggatcacgaggtcaggagttcaagaccagcctggccag

SEQ ID NO: 707593 - DNA, 622 bp, Homo sapiens
tgtgcggatgactggccgcaggcggccgggcgggctgtaacccgccgctgaactagcgcttctgtgtccagaggcttcggcctggccgccgtcgcctgtaagctacgaggaggagatttacgacttggccgggcgcagcaaaggccagactctgcgcgaacaggcgctgcgcaccaaccggcaggcacctggcgggcaccatcgcacggtggcgcagaagcccctcaatggccagcgccagctgcagccgcggccgcgcagtcgtcccacctgagcttgggtacgtgcgccccacaacacctcccccagccagggcccggggacccccgggagcgtccccccgctacctggcgccactcatcctgggcggggtcggtcccctctcaggctgcctctcattagggagctgcacccccgagcttgacctctgaaggccctttgcgatagcattaagcctttgaaactttgtagcgggttagaaggggctaggaaacgaagaaaacatctttttaaaaatataagcratcggccgggagcggtggcccacgcctgtaatcccagcgctttggtaggccgaggcgggtggatcacgaggtcaggagttcaagaccagcctggccag

SEQ ID NO: 707594 - DNA, 597 bp, Homo sapiens
ggtaaaagctagacagacattcatgacaatttcaaaaattttaaattagttcaaaaaagcaatgacacttgtgaggatagtagcagaatgctgaattcttagcttaytcaatgaaaaaatgttttcaaatatccctaaaattgtctgaatatgtgttaaggcattcgacaacatttaaaatgtagacaaagataattggctttccacttctgcattatgtcttgttgataatctttatgtgtgaatacaggccaacattttctaattcaccttttcacttggacatctgctacacaaaacatatggctctctctgagaaaatctggagtccagatttttgcaggtaagtttaggcttaactttttgttttgctaaaaactttgctaagataaatgctgtttaataaaataatctgaaaaataaagtcattattcattctctcctctattttatgtcccatctttacataaatttgatcaccaggatttggtttactttcctgtaggagttcatttgtttgggttcctgtaaaaatattttcactggattagggtataatgctcctggcagacagaattttggcttctgtgatctttg

SEQ ID NO: 707595 - DNA, 654 bp, Homo sapiens
ccaaaactcaagggtacctgtgctccccagtgccccagccagtaaaggagctgtgacgcgttctcaacgccacgactgccttgagcaaaaggagggaggtcttgcgggaaagtgttttcagctcacttctcctacagggaatgagccctctcgtttatcgcagacaccgaggaaacgcagcgatgggcttcggggctgcagtcagcctccctgcccacccagatcctctggcagcctcgggcgctcacccacttcgyttctcctccgcctttgccgccgctacagcaggtgcacaccccaccacgtccctgcttccctctcgagctcttttcgtaggtggtcctcgttcttctctccgtctgtcgtttcttgagtgtcagaactggaaccacagcatccccaagatgaaatccatgctgggttttgcgaccacagtgctggcccagtcaccggcgagggtaaggatgggcagcgacccacgctcctgggtcttcatttctaagagttcggaattccactttctcacctcctcacctggacctaaatcccctgaggcggtactgacccttctgttttagtatccatctacgttactcttgatggagagtacagtccttgaagaagaggaaaataaatttgagaagggagaattaa

SEQ ID NO: 707596 - DNA, 1159 bp, Homo sapiens
aaaaatatgaaatttcttgattcaaagtactatattgagtcaagtattcaaaattgaaatataactactaaaagtgaaaatgagaataatatgtgatcaaataggtatcataagtcacacattgtggttgtgtaaccagaaaactctaaagaataaatcaaaaaattatcagaattaataaaatagttaagtaaaaggcctgaattaaggaaaacctgtgcagaattaagtggtttttaattatttaccattatagataattaggaggcataaggaggaaatgggagtttataaaaagaaaataataataatctggaaatccagtgaacaaagttatcaaatatactaaattatttaaaaattaacataaaggtggaatcctatttatgcatttatcctttaattccacaattatctttgccgtgtctatgttgcagagacatttaccactgagtgtatatcagtgaacaagacagatatagtccctgcctttaaaactcccacctacgtgaggaggcatgcatttttaaaattggcattttaaataattatatgacaaattaaaactgtgatcattgcgatatataatgtagggggctacctacacatatggaaaacatgaggtgagagacagtggcacatttgaggaattcaaaggcagctatggtggctcagtgtcaagaagaaatgggaaaaaatgaagtggaggggtagagagagggaggtcttaaaagatgtggggtcttgttgactgtgttaaaaattttgaccttattctaagagtaataggaaggcacagaaagtttttatgagggtttggaaaaatgtgaatggcaggaaacaatctatacatccaacagaagggggaaaactgtagaaattatagccagagctagaatatttgtcattactaaaagygtttcctcagaattgttaatgatatggacaaaatgaaggtaactaagatctaatatggagtgtggcatcaactgtgttaatatataatttgtgtataacatattttctacgtgtgtatatatgtatatattttctatgtatgtgtatatatatgtgtatatgtaagtatatatacatatatacatacacaaacatgcatagaaaaagttaacagtggtaatctatgatttggggcttccag

SEQ ID NO: 707597 - DNA, 2427 bp, Homo sapiens
aacgtggtggcacatgcctgtactcctagttactcaggaggctgaggcaggaggatgacttgagcccagaagtttgaggttacagtgagctatgattacaccactgcattccagcctgggccacagagtgagaacttgtttcaaaaaaaaaatggtgggaagcaaaggaaatttttagaaaacttggcatccttaataggatgccagaagacagagcaaatacaaagagagagaatagaaacaacttagttcaacaaaatttgatgcaaagacaatacttagagatgaataggaggccaggtgaggtatagaagaacaaaaaggaaactagcattgaaagataattaaaatctacaatggagtcagttaagaaaggaaagtatatggcaaagaaacaaatgtagaaaataacctgaagagccatcctaaaatgtagctgtaaagacacagactggaaaactatatgattttataaatatagagaaattagataaaaatccagtcaaaacattagggaaaggccaactaaatcagaataatttagaagttacaacttttctgagctaaaatatataaagattagattatgcatatcaaaggtgattagcatattctaggtaaaattatcaaaaagagagccatgccaaaatttctgaattacaaagatcaagaaaatatcctataagtcttcagagttagagggatgttacctactgtactagggttttcaagagaaacagaaccaataggagggatacatatgatatagatacatatataattaattatgggaatcaattcatgtaattatggaagccaaaagtcctacaatctgctgcctgcaagctggagaaccagggaagccagtggtgtaattcattctgaatccaaaggcctgagaactaggagaaccaatggaaaagagtctgaaggcctgagggggttgggagggaagaggaaaaaaaaggaagggtagagtaaggaaggggagtggatgctggtggtataagtctcagagtctgaagaaccaagcagcagctctgatgtcccagcctttttatcttattccagacctcaacagattggatgatacccctcaaggctgagaagggtagatctttacttagtctatcaattcaattcagtctcttccagaagcatcctcacagatacccagaaaaaaatattttcccagctatctgggtatcccttagcccagtaaagttgacatataaaattaactaccacaccaacaaagaaataccctgtacccccataaaaagacattgtgtgacctcaaaaccctctccaataaaaaatgcaaaaaactaatagagaaaagtctataggatttcctaggggaaaagctgtgacatgagattatctctaaatgaatagttattcctgtgtgaaagaaaaaaataatcattccagacatacaaaaattcagaaaatacagaatccaagtgtcttttttatcttagagtaattttttcctttttaattataaaatgtataacaaattattaaaagaatattcaaataatagaaaaaagttacaatcacccatatatctctgggttatctatccaaagataactttccagtttcatttaacaatctgccacaaagttgttgtcttctatgccattgaaaattctcctacagtgtaattggtaaggtaggaattagatactggtttattttaatatggaaaataataaactgtgaatgttccaccatttatttaaccattctctgtgaccaattgtcagttgggctcacccttagatcagcactggggaagtccagtgcttcctcccaagatcttgcatattcctaagggatttaaattcttatggttatttctgactttgggctcttgctttccactgagtttattttgaatacaattgttttggcctgctgtatctgatcctaccactctcygcttaaaagcttttaataaaataattttccattgcccttgtaattaagtataaactgctcagctcgacttacaagtcttgcctatgtgtctagcctcatctccaggcactgcccccatctcacctgctctcctcctttcccctgtactccaataatatgaacaacttttcaaatgagtcaaactctatcttaacctccagacttttggcaagttgttaaagtacatatatactaatatatttctaggcactttgctaaaaacctaacaggtctggtccagaacaaacagatcagtgaaacagaatatgcagccagaaaacagattctagtacatatgggaatgtaatgtgttatacagaggtgtcacatgacactgaaaatgtggtaaacattctaacaaatgttgagatcactagcttccactggagcaaaaaaattttaagactgataaagtttgatccttacctaataatagta

SEQ ID NO: 707598 - DNA, 455 bp, Homo sapiens
ttcataaagtagacaaattatgccatatttttacaatagaatatcatatcacaatgaacatgagcaacagtagatacccacacatcataggtgagtcacaagcatcatgttgggtgaaaaaagccagacacaaaatactacatatggtatgaatccttccatataaacttcaaaaacaggcaaaagttgaatactgtttagaaatacataagcagaaaagcataaagaaaagcaaaaagtaattatctcaacagtcaggacataagattcttaaagggagaagataaaagttacccgcatggaagggcatcatagggaagtgttctatgttgaaatgcgtgtggtttcactactgctgtatgctttatgcactttcctacagttatctaaaatatgaaaatattaattgrtttttgttttaaagcaaatattaaatactttgaaagacaacataa

SEQ ID NO: 707599 - DNA, 1327 bp, Homo sapiens
  misc_feature 1296, 1300, 1311: n = A,T,C or G
tcagtgacaaaaggaactttggctcacacagagaagaaactatgtagaggccgggcgcggtggctcatgcctgtaatcccagcactttgacaggcacaggtgggcagatcacctgagatcaggagttcgagaccagcctggacaacatggggaaaccccatctctactaaaaatacaaaaattagccaggcatggtagcaggygcctgtagtcccagctactcgggaggctgaggcaggagaatcacttgagcttgggaggcagacattgcagtgagccgagattgcaccactgcacgccagcctgggtgacaaagcaagactccatctcaaaaaaaaaaaagaaaagaaactatgtagaaaggggtggcatgggatggcaggtggatggaaaaacagtcttatttccttctcaaaattacacttctagaagaaacgaaatactatctaagtaccatatacatgtctttttgcatagtatataaccaaggagcacagcgtctgtcctctctaatttgaaatggatagctcaaaagtaaggcaaatcctgtctaataaagttgaggggatattcttttcatatcaaaaaaaatagagacttaaatgcaaccagttacttaaccagtaaaagcactacttttgtaatgcgaagaggcactggaacttttttttttttctggcaatttcattgatcatgtatttctaaggtacctatttaagaggaattcatagaaaaagtactcttgtactacttatcgctaagtaaagataatttttaaataattttcagtgcaagagatctggaattttactccctacagcctagtgattttaaatgccctgtgaccctctgaggcactgccaacatcaacatctggtacctggtacaaagaaaatgtattttcaacagtttttaaaaacctcttctttttcatcatgtgctttaaatatgtttctaagatagttgtctttctctcctttctgatgtagaaaaaaaagggaagctattctatcaggcaactacgtgttttagaagcaaaagggaaaaataataaccaaaaattaagttgttgctaatgttttttcattcctcccaaaagaaagattacacaaaatagacatcttcaacctgactagatgaaaaaagaacccaaaatgattgtaattattgccccacaagtatatacacttctaaacaagacttcaaaatccaaagtatatcccctacacaattctccgtatttctgatttcttcctcctttttcacatgtaaagtcttttgtgaccttcaaatctnccanagactttagcnaaaataataatgatag

SEQ ID NO: 707600 - DNA, 1327 bp, Homo sapiens
  misc_feature 1296, 1300, 1311: n = A,T,C or G
tcagtgacaaaaggaactttggctcacacagagaagaaactatgtagaggccgggcgcggtggctcatgcctgtaatcccagcactttgacaggcacaggtgggcagatcacctgagatcaggagttcgagaccagcctggacaacatggggaaaccccatctctactaaaaatacaaaaattagccaggcatggtagcaggtgcctgtagtcccagctactcgggaggctgaggcaggagaatcacttgagcttgggaggcagacattgcagtgagccgagattgcaccactgcacgccagcctgggtgacaaagcaagactccatctcaaaaaaaaaaaagaaaagaaactatgtagaaaggggtggcatgggatggcaggtggatggaaaaacagtcttatttccttctcaaaattacacttctagaagaaacgaaatactatctmagtaccatatacatgtctttttgcatagtatataaccaaggagcacagcgtctgtcctctctaatttgaaatggatagctcaaaagtaaggcaaatcctgtctaataaagttgaggggatattcttttcatatcaaaaaaaatagagacttaaatgcaaccagttacttaaccagtaaaagcactacttttgtaatgcgaagaggcactggaacttttttttttttctggcaatttcattgatcatgtatttctaaggtacctatttaagaggaattcatagaaaaagtactcttgtactacttatcgctaagtaaagataatttttaaataattttcagtgcaagagatctggaattttactccctacagcctagtgattttaaatgccctgtgaccctctgaggcactgccaacatcaacatctggtacctggtacaaagaaaatgtattttcaacagtttttaaaaacctcttctttttcatcatgtgctttaaatatgtttctaagatagttgtctttctctcctttctgatgtagaaaaaaaagggaagctattctatcaggcaactacgtgttttagaagcaaaagggaaaaataataaccaaaaattaagttgttgctaatgttttttcattcctcccaaaagaaagattacacaaaatagacatcttcaacctgactagatgaaaaaagaacccaaaatgattgtaattattgccccacaagtatatacacttctaaacaagacttcaaaatccaaagtatatcccctacacaattctccgtatttctgatttcttcctcctttttcacatgtaaagtcttttgtgaccttcaaatctnccanagactttagcnaaaataataatgatag

SEQ ID NO: 707601 - DNA, 1327 bp, Homo sapiens
  misc_feature 1296, 1300, 1311: n = A,T,C or G
tcagtgacaaaaggaactttggctcacacagagaagaaactatgtagaggccgggcgcggtggctcatgcctgtaatcccagcactttgacaggcacaggtgggcagatcacctgagatcaggagttcgagaccagcctggacaacatggggaaaccccatctctactaaaaatacaaaaattagccaggcatggtagcaggtgcctgtagtcccagctactcgggaggctgaggcaggagaatcacttgagcttgggaggcagacattgcagtgagccgagattgcaccactgcacgccagcctgggtgacaaagcaagactccatctcaaaaaaaaaaaagaaaagaaactatgtagaaaggggtggcatgggatggcaggtggatggaaaaacagtcttatttccttctcaaaattacacttctagaagaaacgaaatactatctaagtaccatatacatgtctttttgcatagtatataaccaaggagcacagcgtctgtcctctctaatttgaaatggatagctcaaaagtaaggcaaatcctgtctaataaagttgaggggatattcttttcatatcaaaaaaaatagagacttaaatgcaaccagttacttaaccagtaaaagcactacttttgtaatgcgaagaggcactggaacttttttttttttctggcaatttcattgatcatgtatttctaaggtacctatttaagaggaattcatagaaaaagtactcttgtactacttatcgctaagtaaagataatttttaaataattttcagtgcaagagatctggaattttactccctacagcctagtgattttaaatgccctgtgaccctctgaggcactgccaacatcaacatctggtacctggtacaaagaaaatrtattttcaacagtttttaaaaacctcttctttttcatcatgtgctttaaatatgtttctaagatagttgtctttctctcctttctgatgtagaaaaaaaagggaagctattctatcaggcaactacgtgttttagaagcaaaagggaaaaataataaccaaaaattaagttgttgctaatgttttttcattcctcccaaaagaaagattacacaaaatagacatcttcaacctgactagatgaaaaaagaacccaaaatgattgtaattattgccccacaagtatatacacttctaaacaagacttcaaaatccaaagtatatcccctacacaattctccgtatttctgatttcttcctcctttttcacatgtaaagtcttttgtgaccttcaaatctnccanagactttagcnaaaataataatgatag

SEQ ID NO: 707602 - DNA, 635 bp, Homo sapiens
taacaatgaatgtatttctggtcattccatccttgaaaatggataagtactgtgttgtatttatttatttgaaacagggtttcactctgtcactcaggctggataataaatactgtgtcgttagtatgtatgtatgtatgtatgtatatatttgagacagggtttcactctgtcacccagcctggagtgcagtggcacactcacggctccttttaactttgaactcttgggcttaagtaatcctcctaggattacaggcacatgtcaccacacccagctaatttttctttcrttattacttttctctctgtgttgcccaggctggtctagaactcctggtctcctgccttgacctccctaagtgctaggattacatgtgtgatccaccacatccaatttgactctgttttgatttaccagttgctttctgatcagtgagcagtgggttccttcttcgcccttaggttctatattcttggtccttctgagtcttagtctggggtcccatggtagagaaagtttaggcccagaattttgtctcctagttaaattgtaggctgaaaaatggagatataatttaactgcatactctgccacgtagctcaccttcctgtgtttctgcttttgtattcatt

SEQ ID NO: 707603 - DNA, 635 bp, Homo sapiens
taacaatgaatgtatttctggtcattccatccttgaaaatggataagtactgtgttgtatttatttatttgaaacagggtttcactctgtcactcaggctggataataaatactgtgtcgttagtatgtatgtatgtatgtatgtatatatttgagacagggtttcactctgtcacccagcctggagtgcagtggcacactcacggctccttttaactttgaactcttgggcttaagtaatcctcctaggattacaggcacatgtcaccacacccagctaatttttctttcattattacttttctctctgtgttgcccaggctggtctagaactcctggtctcctgccttgacctccctaagtgctaggattacatgtgtgatccaccacatccaatttgactctgttttgatttaccagttgctttctgatcagtgagcagtgggttccttcttcgcccttaggttctatattcttggtccttctgagtcttagtctggggtcccatggtagagaaagtttaggcccagaattttgtctcctagttaaaytgtaggctgaaaaatggagatataatttaactgcatactctgccacgtagctcaccttcctgtgtttctgcttttgtattcatt

SEQ ID NO: 707604 - DNA, 1424 bp, Homo sapiens
  misc_feature 287: n = A,T,C or G
attaaagtgatctgcaaatagtgtaattgaagaagttaatcaggagtgtgtgtgagaattacttagatagtaggaagaggcttcaatttaggaggaatttcttattctttgctcaggttacagacccaacctttcagattgcacttttcaaatgggagaggagagaaactgggaatgggagaggagagaaactgggaaattcagttatatttcacaatatgtctcttgtctctttcttttaccactgaatgtggggtactcagtttaggagcaggggaaaatattanaaagtttaatatacctggttctctctcttcctttctctgtttgtatgattgtttaacgactttcaaatattaagtctcctttaattcttggttattttctatactgcttatttctttaatgtgattttcctttttgttgcttgtcatttcagtgggcaaaaattgtacgcatattatcatcttaccctgaaaaatctctgtggctataccctgatcatattcagaagttaattttttatatattctaaagtattggagaactgaggtgaagtggtggctgagctggcagcaaggggcattgtcataacctgcctcacacagttccctgcctgtgcagtgcccctggagaaggacacataaaaccttgtttctgccctgaatcccttggaggagatacaggaagtcgtggcacagtgccacctggagacagctaggttttgtgagatcaaggatccaaaatgaatatggtcatgcctggactctccctgcctggcaagttcagtactgcaaaggttaagtacttgaagttaaatactgctaggcacaaaaacatagtcaatagagagaatctttcccacgtgattatacccaacgtgttggtaaagaatgcagaagttcatctgtgcccctgttcaggtgcttctatgttctgattcctctaggaagagactacactaggctcaggactctcatttgttgaaaaaagcagagcccacattatgaaacatgaagaagaaaaggcaagcagcagctttagaacttggaaggaagagagagatacttaacacattgactggaagagcggcaggtcctcaggagatggagcaatacmaatgggagcactgaatcaactacttaagattattctgatcagagagaagattaaagtggatgctgaaaccacagagtgttcccatggagacatggccaacgtcagtgtccccaccatggataacactgataccacagcagcctgagagtattggaagggacaagggttactccagtgtccgttgcaaaaataaatttcctccctaggacccagcaagtcatcagagtgcagggaaagttaggcatagggccaatgcaatccgaggcatgtcataattcgggtcataatgcagcctgatttaaaga

SEQ ID NO: 707605 - DNA, 672 bp, Homo sapiens
ttgccgtttcttcatatatctagtagttttggattgtatcctggacactgtcaatgataagttgtagagactctggattttattatgttcttctgagtgtcggctttttattttagcaggcagttaacttggctgaactcaaacttcaaagtctcccctctggtagacagcagctgaaatctctgttcagytattttagccacagttaggattccaggagcctcccagatgaattcacagttcagaaaacagcctgaagtttgggtggagaattcggaacatatcctccatggagttctccttcccggaatttcctcctttacttttcaatttctgtggaagtcccagattctgccctgtgattccttaacaagtaagaatgcagatttctatccaacttttaactgacttatgtggtgctatgtgggccccgcagggcagtgacccagggaggcctgaatttgatggcagccaagcctccggcctcagaggggagccagtcatataaaatataaaaataagaaacactgtcattcccttcttagaaatgtcagatgttataagttctgcctggtttgggtcacttttagtgcccccacctagccttttgtccagaatttataattgctatctgtgggagagattgtcttttacaaggtactctgtcattat

SEQ ID NO: 707606 - DNA, 1041 bp, Homo sapiens
tctattgctttgtaacaaattaccacaaatttagtggcttaaaacaacacccatttattagctcacagttctgtaagttagaaatctggatgggttcagtggggttagagtctccttagagtctcacaaccagtatttagcttcactgctgagccatgtagtrtactatattaatatttcctttcttatgcaacttggagttgatagctgctggctttttttattcacttatttttattgatacataatatttgcaatttatggggtacatgtgatattttgattccggcacacaaggtgtaataatcaagtcagggtgtttagaatatccatcaccttgaacatgtattatttccttgtgttgggagcatttcaaatctagctattttgacatatatgactgttaactatagtcattccactgtgctattgaatactagaacatattccttctctctaactgcaggtttgtacccattaataaacctttcttcatccttccacccccactttcccagcctctggcaactaatatatacataatatctatctattcccttgctgggtaggggagggacagttgctgtgtgggttagaaaaataggccagggagcgggtgggagatctcacagctctttctacaaactctcgtctaaatccaacatctaaatccaacacataaacaccctattatttctctcataaaagcaaaacaaaaccaaatccaaaaagcctcactcctactccacctcccgccttctgatctcatgtctcccttccatttgtagcaaaactttttggaagacctttcttctgtccaatatggcagcccctagctacatgtggctctcgagcacttgcagtgtagccagcaaaatcgaggtgcattgtaagggtaaaatatacaccacatttcaaagacatcatatgaaaaacaatgcaaactatctcattaataattttatatcaattacatatggaaatgataatttttatatacattaggttaaataaaatatattaataaaattaatctcacct

SEQ ID NO: 707607 - DNA, 1041 bp, Homo sapiens
tctattgctttgtaacaaattaccacaaatttagtggcttaaaacaacacccatttattagctcacagttctgtaagttagaaatctggatgggttcagtggggttagagtctccttagagtctcacaaccagtatttagcttcactgctgagccatgtagtgtactatattaatatttcctttcttatgcaacttggagttgatagctgctggctttttttattcacttatttttattgatacataatatttgcaatttatggggtacatgtgatattttgattccggcacacaaggtgtaataatcaagtcagggtgtttagaatatccatcaccttgaacatgtattatttccttgtgttgggagcatttcaaatctagctattttgacatatatgrctgttaactatagtcattccactgtgctattgaatactagaacatattccttctctctaactgcaggtttgtacccattaataaacctttcttcatccttccacccccactttcccagcctctggcaactaatatatacataatatctatctattcccttgctgggtaggggagggacagttgctgtgtgggttagaaaaataggccagggagcgggtgggagatctcacagctctttctacaaactctcgtctaaatccaacatctaaatccaacacataaacaccctattatttctctcataaaagcaaaacaaaaccaaatccaaaaagcctcactcctactccacctcccgccttctgatctcatgtctcccttccatttgtagcaaaactttttggaagacctttcttctgtccaatatggcagcccctagctacatgtggctctcgagcacttgcagtgtagccagcaaaatcgaggtgcattgtaagggtaaaatatacaccacatttcaaagacatcatatgaaaaacaatgcaaactatctcattaataattttatatcaattacatatggaaatgataatttttatatacattaggttaaataaaatatattaataaaattaatctcacct

SEQ ID NO: 707608 - DNA, 676 bp, Homo sapiens
tcagaaaaagtaagcaaacaggattctaacttaaagcaaaaaattgaaggccgggcacggtggctcacgctgtaatcccaatactttgggaggccgaggcaggcagatcacctgaggtcaggaattcgacaccagcctggccaacacggtgaaaccccatctctactaaaaatacaaaaaaaaaaaaaaaaatagccaggcgtggtggcagatgcctgtaatcccagctacacgggaggctgagacaggagaatcacttgaacccaggaggcagaggttgcagtgagccaagatcgcgccactgcattccagcctgggtgacaacagtgagactccgtctcatctgaaacattcatctcccttgtcaaacaaaataccaaagcaaagcagttaaattgtggttgcagtctcctagaagaacacagctgaattgaaccaagcaaggacagaaaagcccaccaaaakgaaggagcttttgtattatttctatatttgcatttttataatatttttaatcattaaattttggactcccttggagcctaaagatataagcatctagtgttgactgaactcctttcagggaaacatttgccctttgagactaaactatgtgtatatgaaaacttaggcttgagatgtactgtaaccaagctaataaagttttcagacctca

SEQ ID NO: 707609 - DNA, 807 bp, Homo sapiens
ggagcttttcttagggtatattttaagttattaatgtagagattaattgcattattgtcagagaacatggtatatataataatgattttataaaacttgttgagtcttggccaggtacagtggctctcacttgaaatctcagcactttgagaggccgaggtgggaggatcccttgaggccaggagctcaagacgaacctgggcaacatagagagattccatctctacaaaaaatttaaaaattagacagggatggtggcacacatgtgtagtcctagatacttaggaggctgaggtgggaggatcagctgggcccaggactttgagactacaatgagctatgatcatgccactgcactccagcctgggcaacagagtgagatcttgtctcgaaaaacacacacacacacacacacacacacacacacacacacamaaaccacgaaacaaataaaaacttgttgagtcttgctttatggcctgatattattatatgcatgttaaatttcagatgtctttccttttttttttttttttgagactgagtttcactcagtcacccaggctggagtgcagtggcgcaatctcggctcactgcaacctctgccttctgggttcaagcaattctcctgcctcagctgccccgctaactgggaccacaggtgcccaccatcacgactggttaatcttgtgtgtttttagtagagacagggtttcaacatgttggccatgctggtcttgaattcctgacctcaggtgatctgcctgccttggcctcccaaactgctgggattacaggcatgagcca

SEQ ID NO: 707610 - DNA, 641 bp, Homo sapiens
tagcctggcgtggtggtgtgcacctgtagtcccagctacttgggagggtgaggcaggagaatcgcttgaacccaggagtcggaggttgcagtgagccgagatctcaccactgtactccagcctgggtgacagagctcactcaaaacaaaaacaaaaacaaaaacaaaacaaaacaaaacaaaaaaacagaaagctttctttccttcttttgttttttgaaagctttctacggtttactttatgcagctttcagaatcttaaggaagacttgaccaacctataattaccccaagccttcttcattcctaattatttttaatacatactagaattatgataatttgtagcagggataagataataggaaaaaaaaacccagaggtctggctttaatttgctgcataaccttagtttattacttttctttcgtggacctcaattttaccatctataaaataaagggtaatatcatataattcctataggtttttccaattgtaaaattggtgatatacttttactttatattgctttcatttagctttctttctttytttttttttttttttgagagacaggttttgctttgttgcccaggctagagtgcagtggagcaattttagttcactgtaatctcaaat

SEQ ID NO: 707611 - DNA, 1233 bp, Homo sapiens
tgcctcattaacataatatgatctcttgaattaatttggaaatattctagtacctctgaaagaagaaatggcaatgagcattattattattatttgggaggagtttacaattgatgaatctacattaacacttcactatcacccatattttatagtttacattagggttcactcttggtgttgtatattctgtgggtttcgatgaatgtgtaaaatccaccattatagtatcacacagagtattttcactgccctaaaagtcctttatggtccatctattcatccctccctccccctaactcctggcaaccagtgatccttttactgtctccatagttttgccttttccagaatgtcatatagttggaatcatatagtatgtagcttttaagattgacctcttttactttagtaatacacatgtaagtttcctccatgtcttttcatgccttaatagctcatttctttcttttcaatactgaaaaatattccattgttctttaaatccttaagttgagaatgactgtttgaaactacattcccttatacttaactgtctttgatcatctgagattttacttgctgctttcttttctttaactctctctcacttacttgtggttgcatggataagaaaagattacggtactcttccattgtgagtcaattcagttttcttcctcttatttatttatttttgaggcagggtctcactctgtcacccaggctggagtgtagtgatacaatctaggctcactgcaacctctacctcctgagttcaagcaactctcctgcctcagccaccctagtagctgggattacaggcatgtgctaccatgcccagctaatttttttgtatgtgtttttagtagagacagggtttcaccatgttggccaagctgatcttgaactcctgacctcaagtgatccgcccgccttgacctcccaaagtgctgggattacaggcgtaagccaccgcaccagcccctcttactttttgccagaaatatgattaaataccaaaattgaccaatgagttgcattttatttaatttccttcaccattaaggataattttatgaaaaggctaattaacattaaaaccaactaattttctcacaaccagaaagaagtatatcaaagactcctggctaatattcaaactgaaaatattagcyctgcatacataacttaatttacatttcatgaataaaataaatggcttaatttata

SEQ ID NO: 707612 - DNA, 690 bp, Homo sapiens
attgtaggctttttggtggtgttatagaatccagaatttgggagtctccactgtagaccaaatgctctggagtacgtgaaatttgtctatcagcaaatcaacagactagttaacctttctccaggcagtgtctcccctccagccctcaggcattttgcctaaatcccatttctttttctctgccggctgtctgctaatccctcggaaagtgttagctgataacttaaggtgtgaccactctcaggagtattgcatttcaaaagaggcctccaagatagaaaatacttcacttaaaggagctagacaaggaaggaaggttgttattttttaacctgcttgtaagttgagttccaggccatttaactcagtctttagcgagatcctctgtgagcttccccactgcatgaatttccctccaattctgagagccagtgactctggacggcacttcctcacttgaaagcatcacatsacaatcatttcggcctaaaacttattactcatctgtgttagctagagattgtagctgcgtaaatgtggcttatttcatccagaacagaaacattaaaacgattcgactcctgcaggacatcttaatagtgtgtgaaaggaagaattcatatttccagaactctgtacctgttacagctcaggcggtctatgctttcataaacatagtgacatatttta

SEQ ID NO: 707613 - DNA, 574 bp, Homo sapiens
tgtaaccacatgctgtgttctcaactacagacttcttaagaccaggcagccctgtgctgccagggaaagacaggctcctcccacccttatgttctggctaatttgtggagagccacagtggtgtctcttagtgcatttgtcatcacagctcttcctcgttcaaaattgtatycgtgaatgataccacgaacaaccacaactgcaagcagcaaataaacaactgccgaatgcacaaaaacaatggcaaattgctcctaaaataaaatgaacaaacttgttttaattggacagaagtggaacagaagtagaattgtttttctgggggtaactctaggccatttaaagctgcaaagagtgcctttgcctagctgctttcttcatgtcctgaggacaggacaaaatgcccgggaaggggcctcacatgtctactactcaggcagctgcccacagagaacatgaatcccttgccacgtcacacatgccaagcacacacaatgcatcatcaacaggctgggctccgcctggtccaggccactgggggacagcacttcccttctctctgctctatacaaaa

SEQ ID NO: 707614 - DNA, 1271 bp, Homo sapiens
gtcatctttctgcataatctaacttttgtcatcttttatcaacttttaaaaatataacagcttaataagctcttttgttaaataagcttttatatctcagatgatatagattattttatagacattagtgattgaaataatgacattactataataatactattcatactaatacgttcacatactatttcaatttgcccttttaaattctaccattcaatagtttttagcatatttttagaatgctgccactcttaacacagttgattttagaaaattctcatcatccccccaaaaaactaacaccctcattagcagtcactcctcatttcccaactccccagttgtaggcaaccaccaatctactttctgtttttaaaataacaactaaaaggatatttacaggccactctcactagtataacttacttataacatacaaataatattttatatttcatctggattatagtttacagagtcctttcatataaactatcttatttaagtgccagttaccacacagctaataagtgaagattttggtccaagtaaaattctttatactgtaccatatggtatctaggtaaactttatatacacttaacagaatattgaatgttacattttaaaattatagcagaatgtgcaagacacaatctattaagttttataacttctgctattctttacctacctaatacaaatgttgtatcaactaagccctgtatcattagaaaatcaatatatcaatagaaaaatcattcagcagaatgagattcaaggccattgttatgatagatttactgtaaagaatctacctctttgaactgmtagaatctattctccctggacccttctggtgtacagtttcctatttaatgtctcatctagacctcatgcttagacctccttttattataccacagcccttgtgactgttctttcacttgacatcatgataacactaaactgaggtagtagtttcaaattcattctcaataaggttactgagataatctttctaaaatgaaaatctgattttggccttgtgtcaaatcagccaggctttatcacttgtacatccctgatcaaatagtggccttacattagtccccacaggaaaatgttggcacacacaaactaaaaagtttaataaagggactttttacagagacaggcatgattgagggaaaccaacaaggaatggattattcgattccagtatttgcaactagatggaaacattttctacccctaatcttgaggga

SEQ ID NO: 707615 - DNA, 607 bp, Homo sapiens
ttttttttttttttgcgtaagagaccaggggaaatgagaatatatatttacctattctagtttttgcatgaagaaatactagaggatggagaagaaactttgggagaaaattttgcctataagagccagggatgaaacgggtgaagggtgccaggattggcataattcttctagtgtagctttttatatagtttttgacttgggactcaagcaaagattattcaraaactatgactatgctcaagttgtataactgaatttgagtttggttttatttaggagacaactgctttaactccaaagtacagcaaatttcctttggaagttcataattgttgttaatttgctgtgagtggccagaatctgcttttggtgattttaaattgtcaacccaacatacgtctttgttgtttattgcaagaattgttatagtccatgacattttttatttgcttcaaaataaaatgaggatatgatcaggtggtcaggtaactttttatgattcagcagagtggaacaaataatttcaattacataattgcttaatgaaccaaatgcagatacttgaattaactaaaatgcagatattcaaataaaggattgcacc

SEQ ID NO: 707616 - DNA, 1023 bp, Homo sapiens
tctacatggcctttcatcttccaagagttagactatgattcttcccatcatgatggcttagggtcccaaaaagaaaagagtagatcttgcaataccttttaagccctatgcccaagaactcatacagtgatacttctgccaccttgtgtcagtcaaagcaagtcacaaggccagccagattcaaaagaatggaaaaataggctcaatttcctggtgagaagtagcaaggtcacattgcaaaggagtctggacatgggaaggagttactcatttgtggcctttataataatcttccacaaatgcctgtaatttgggcactgtgcttagtactggtgatagaagataagtagcttatttcagtatcttaattttgttttatatatttgataattttatgatgcaggttcactgtgcactggtatcaatcccaggggaggactgtaaacaccttgccaatactgtgtaccagtatcaatccactggcatgagtctggtgagacagaacacacaataagtttagggaagcaactttattactcacagacaggcagcaagggacartagacacctaaggattcatggcaagctcatcccccaaagcttaggatagctgtccaggatggatggagtctcacgtgcacgtcattcatgttgcaccgcagctaaggaactctgaaagcctgctctgccctgggttttatacctaggagcaacttgatgagctgtgctaaagcattgcaagacatcctgttctaggagctatgggaacagagcttggctttactggcaattccttcatatttcttgcatttccagcacatcattctacagttattctgagatttacaagtgagaaagcgaggaagagctgggttgccaagatcttttggggacttgccctacaataacatcatataaaatgtgttttttccctcagtgttcttcacattctcaattttaattgttcattgtataattttgagttagttattgctatttagtaaaagtggaaaatcttaaata

SEQ ID NO: 707617 - DNA, 1023 bp, Homo sapiens
tctacatggcctttcatcttccaagagttagactatgattcttcccatcatgatggcttagggtcccaaaaagaaaagagtagatcttgcaataccttttaagccctatgcccaagaactcatacagtgatacttctgccaccttgtgtcagtcaaagcaagtcacaaggccagccagattcaaaagaatggaaaaataggctcaatttcctggtgagaagtagcaaggtcacattgcaaaggagtctggacatgggaaggagttactcatttgtggcctttataataatcttccacaaatgcctgtaatttgggcactgtgcttagtactggtgatagaagataagtagcttatttcagtatcttaattttgttttatatatttgataattttatgatgcaggttcactgtgcactggtatcaatcccaggggaggactgtaaacaccttgccaatactgtgtaccagtatcaatccactggcatgagtctggtgagacagaacacacaataagtttagggaagcaactttattactcacagacaggcagcaagggacaatagacacctaaggattcatggcaagctcatcccccaaagcttaggatagctgtccaggatggatggagtctcacgtgcacgtcattcatgttgcaccgcagctraggaactctgaaagcctgctctgccctgggttttatacctaggagcaacttgatgagctgtgctaaagcattgcaagacatcctgttctaggagctatgggaacagagcttggctttactggcaattccttcatatttcttgcatttccagcacatcattctacagttattctgagatttacaagtgagaaagcgaggaagagctgggttgccaagatcttttggggacttgccctacaataacatcatataaaatgtgttttttccctcagtgttcttcacattctcaattttaattgttcattgtataattttgagttagttattgctatttagtaaaagtggaaaatcttaaata

SEQ ID NO: 707618 - DNA, 1671 bp, Homo sapiens
  misc_feature 3, 4, 5, 6, 7, 8, 9, 10, 11, 12, 13, 14, 15, 16, 17, 18,19, 20, 21, 22, 23, 24, 25, 26, 27, 28, 29, 30, 31, 32,33, 34, 35, 36, 37, 38, 39, 40, 41, 42, 43, 44, 45, 46,47, 48, 49, 50, 51, 52, 53, 54, 55, 56, 57, 58, 59, 60,61, 62: n = A,T,C or G
  misc_feature 63, 64, 65, 66, 67, 68, 69, 70, 71, 72, 73, 74, 75, 76, 77,78, 79, 80, 81, 82, 83, 84, 85, 86, 87, 88, 89, 90, 91,92, 93, 94, 95, 96, 97, 98, 99, 100, 101, 102: n = A,T,C or G
atnnnnnnnnnnnnnnnnnnnnnnnnnnnnnnnnnnnnnnnnnnnnnnnnnnnnnnnnnnnnnnnnnnnnnnnnnnnnnnnnnnnnnnnnnnnnnnnnnnnntgggattacaggtgtaagccactgcacctggccaatttttaaaatatatcttattgaaccaaatgaaatggctgatgttttttacctataaaaatggcagatccatatagttcaagttaccattacttgatcatgcagaaagagattactaaaagccacatgccatttgttgaatttattatatgccattaagattatctcaaaaatttttaaatgaaaaataaaaatgctatgggtcaaagaaaaatcatttattgaatgtactttgacatttacagtgaccaagccttaatgtactacaccttttggcaatgaatttattcaaaaaaggcttaagagaccttgggaagaaaaaataagttttgcgtgacatgggtgatgtcactacattaattttaggtaccttctgactctatgactctgcattttggggtatagctatattatctcagtgtatgctacaagataatgcctggagtataagcactgatgcttggactgaaatacgtgggattctgactggatataaaattccatgttcagaagttaatacaataatcttatttgccagattctaatagtrcaaacatttttatcagtctctgcaatactgcctatgcagttcacaactgtcaatgtcagatcgtcagtgtttacagcattaagaatcagtggctcaaggataaagataataagatgttagataagtaaggccaaatatgatcacaaatctcccattccaggatgtatgtctaagttcatgctacaatttcagtaaaattattccttatttcgtatatgaatatatttaataatatcatcactttattcttttgggtgggcaaattcaacactcaaaaatcaattttattttctcttcagtaattttctttcatcaagatacacgagaagccttacacctgtattatatgtgatttccatgtgttctccatgacctcttagcagatggggctgtagattgttaaaaattatgctcaatccccatcatagtctcaagagagggaaatcatccaattagcaggagctcttgtagaaaggcagggatgacatcagtacccaggtggaggggctggctttggacagcaagagtgttgacaagggcagttcatgtatctttctcctctaatgccatccctgaaccattttcaaggatggtgccactcgccacactttggaaaggagtccttacagcccattccaaggcaaacactcccgtgtttaggcagcaagatatttgctttcatacccctggttagaggtgactacaccagggaagggtgtcggattcaagaagactggtggtagccagttcactcatgacatggtctctcaggactttgaacagaaaaagacagagagagccaggctatgggtcctgggagtagaaacagaaatgtgagcaagaatagagaaagcagtgagcgaactgaaatggtgaataagctgcagttgcaataagtgaaagatttgtcatttgaagtaagtgatttgacgtgacagttatggaagaatcacggattgaaaggaatttagtgaccatgatgggca

SEQ ID NO: 707619 - DNA, 1264 bp, Homo sapiens
  misc_feature 418, 419, 420, 421, 422, 423, 424, 425, 426, 427, 428, 429,430, 431, 432, 433, 434, 435, 436, 437, 438, 439, 440, 441,442, 443, 444, 445, 446, 447, 448, 449, 450, 451, 452, 453,454, 455, 456, 457, 458, 459, 460, 461, 462, 463, 464: n = A,T,C or G
  misc_feature 465, 466, 467, 468, 469, 470, 471, 472, 473, 474, 475, 476,477, 478, 479, 480, 481, 482, 483, 484, 485, 486, 487, 488,489, 490, 491, 492, 493, 494, 495, 496, 497, 498, 499, 500,501, 502, 503, 504, 505, 506, 507, 508, 509, 510, 511: n = A,T,C or G
  misc_feature 512, 513, 514, 515, 516, 517: n = A,T,C or G
gggatggctgggtatagatccctgaggaatcgccacactgacttcaaaagaagacatttatgcagccgaaaaacacatgaaaaaatgctcatcatcactggccatcagagaaatgcaaatctaaaccacaatgagataccatctcacaccagttagaatggcaatcgataaaaagtcaggaaacaacaggtgctggagaggatgtggagaaataggaacactttaacactgctggtgggactgtaaactagatcaaccatctatgcctattcttatgctggttcattacctggaattttctctctctgtctctgtgtgtgagtgagagtgtgagtgtgtgtgtgaagaaagaaggatggtctcctaacaagaaacagcccactaagaatgctagatatatatactgaacttgatatgnnnnnnnnnnnnnnnnnnnnnnnnnnnnnnnnnnnnnnnnnnnnnnnnnnnnnnnnnnnnnnnnnnnnnnnnnnnnnnnnnnnnnnnnnnnnnnnnnnnnagggcaggtatatctcatcgctgactttgataacactatgtcgattgtttcacagttaaatactatggtaagtgttggagaatcccttgatctttagctcttcttcattaattttcaataatgacaataaactgttgcatttatttaactcaaagcccatcttcacattatctttcatgccagttaaatgtttcttccttcattattgttttccacagtttctccctctggratagattttagaaaacttggttttagtttcttttagtaatttaatcgaaaaagatatattttccttgctaattcagtatcattcctcatttaacatttctaatatagttctatcagcaagttctaatataaatcttgctagttgttgctgttgttttgataacttattcataaggaattcccacaacattgactttcaacttgtgactactcttctaagaggaaagggcccatctcattatgaagaatctctcctttttctatttacctgtaccccatctaccctcgtgccaagtttggcaatattaatgatactttgatcggatcgcttccacatttccactgtgctatttaatgagagtcagaatgctaagatgccccatttgttctttctaacatatcaagttcagtatatatatctagcattcttagtgggctgtttcttgttaggatgccatccttccttctttccaacactaattaatttttgcctgtgtattgtgtttgtcaattctc

SEQ ID NO: 707620 - DNA, 625 bp, Homo sapiens
catgccttgcctgtatctgtagttatataccastgtatgtgttccccatggcatctagcatacttcctcaaactcagaagttagttgatgtttgataaatgctgtcattgattttatgtactcatatatagatgtggattaaagatagaacgaatttttagttttatggaatgattcaatttagtatgtgccttctgggattttcttgggtaaacatcatcagcaagcttgtttctctatcatgttatacctccttggcagagctctgctgtggatgattgttgttgaagtgaaaggagggaaagggataagattctgaaatgtgatttgggtccttttgaaaactgacatagcatttcagattccaaagtacttgtgttgtccaccttcatgaaaagttgagactaaaagaaagaaggtattataaagtttaaaacattggattgcctcaaatccaatctagagatgtcaacttagaaacttaccatgtcttggaaaatcttttatccatggctaagttttaacaatgggaccacttgatatcattggtgctgacagtgggtatgtgagagttgctgtgtctttaactattaacggtaatgaaataagaggtaaagaagtaggc

SEQ ID NO: 707621 - DNA, 644 bp, Homo sapiens
ttctctaacttttcttttcttttatacttctttgaaggaagatttatcgtctcaggttatgcatgtgaaatatggaacagattattttcagatagtgtcccaaacgctacagcctcagaactttcctataggtgatgttctatagaaaatgtgcatttctctaggatgagattaaccatgggaatcttatgtacagtcataattaaataataaggtccttgtaggcagtctatctatgaataaatctttgtcttgttttaaggaagcctgctaaaaatyaacacatattgccatatgaaagtgaaatttgcagcctgaaatgcattgctagaataggttgattatgatggaaggacagacagtttcttgaagaaatagaataatattcaggcaacatgtcctccatatgtagccgtcatattagagatgacaaatggggacattccaaaggtgtccagattgctcaagtcattttgtattatgcaagatggagtactcaccttaaaaaataaaaaataataaattataaaaacctagaactttcggagttcacaaattgctgagctttcaaaaaaaaatcaataatgaagtcaacatgtaaccttcatgcacactgtggaaatagagtgacacattgtagctta

SEQ ID NO: 707622 - DNA, 606 bp, Homo sapiens
tgagtcaccgcaccctgcttaaaatctaattctttaatgatcattattgtttttttgtcaatgcattcagatgcaaggctttgaaagatctactatatgctgttcagacttctgaaactgaatagtattatgaaacacaaatcaacagcctgccccaaaggacatggaaggccccagagccttctgctggatgctgcagaccacagctccttttgagttctggcrtctgggcggctgtccctctcctcacaggccatcagggcattctggcactgctcaccgctcaagctcaacccccacctgaacccagttaggcttctaatatgctgaggaccaagacacccacacacactgcccacacaaggagggcccaaaggaccgatgcgtgaggaaagcacctgagcttcactgtcccaagctttgcaaaccctattctgattgctgagagtttttaagtcgtttcattcttaaccatatgcaggataactcatataaccagacggttgcatgcaagtgacatgcaaccaacagttactgagcgctagtcagcagttgctgggagctggagacatagagcactggtagctcgggcggccctccctcccc

SEQ ID NO: 707623 - DNA, 979 bp, Homo sapiens
ttttcctttacgttaataattaagaaaataggcaataataattcactaaatcaacacattcaacttctttatattgaaatatattgatataagtgatccattaaagatgaaagctttctaataacagtatatacaattataccataatcttctgcttcagctgtaatgttatcatttgcctccctttccagcattagtgaaaaaattcaaatgaaatgactatatcaactataaatctaagcatgtacaaagctattttaatcatccataaattattccttggtatattaatatataccttaacctcccgaaggttcatgcattcctcccaggaataaaattttcttttcattctagaagagaagaaagaaacaaacagcacacttattctcagtaataggttaaactttgcttttagaaaaatgcttccattctgatcctaattaacagtacttaaagtgggtttaaatttctacccagtattatactatcccaaaccagcacttattttcaaacagcagtgcaataatcctaagtcacaaattttgccagtagcagtggtgtggtgcagtccaaagaggcctggactgctgtcttactctatactaactaactaaccttgctctggaaggaaattgctcaggcttattctatttagaccagagctgtccagcagaactttctatattggtgaaactgctctgtgctgtccaggatggtagccactagacacatgtggctacygagcactttggcatgtggctagcacaatgtgggaactgaattttaattttaattaaatttaaatttaaatgccacatatggttacttgctatcatactagacagcagagttctagaccctctagtgcaggagtcagcaaactatgacccatgggccaaaacctcaccaccatctgtttctgtacagcccacgagctaagaatggcatttacctttttaaattgggggacaagtca

SEQ ID NO: 707624 - DNA, 653 bp, Homo sapiens
ttcatcaatatataaataaataaggaaggaaggaagaaaacagtgattgtgagctatgtttagtaagcaaaaccaggattatgatatctaatcactttcacaggatagaattattgatttattttttggttgctcctaagcacctggttggtagaagctttcatgtattgtaacgctaaacctgtaatttttcagggctggggagtgggaagggggttttcatttaaggacgtctgtgctttaagaatattttaggtttgtggtccagctgacrttttctttattttaaagttggagaggctgggcgcagtcgctcacgtctgtaatcccagcactttgggaggctgaggcaggcagatcacctgaggccaggagttcaagaccaccctggccaacttggagaaaccctgtctctactaaaaatacaaaaattagccggccgtggtggcgggcgcctgtaatcccaactactcaggaggctgaggcaggaggatcgcttgaacccaggaggtggaggtttcagtgagccgagattgcgccactgtactccagcttgggcaagagagtgagactctgtctataaataaataaataaataaataaataagtaaaaatataaagttggagaaatgagattcaaagaaatttttcta

SEQ ID NO: 707625 - DNA, 592 bp, Homo sapiens
aagtagtaaatttaaaaaagactctaaacatgcaaatgtgtgtgtgtgtgtaaaatatattctcagacttttttttttttttgcaccgtaactctacaaagttaaaattacattgtcttacaatcaaactgacaacatcttagagtgggtgaaatgaaacaggacagagaaggcaggtgtgtgcctatgaccgcctggctggagatgacacttccacttcctacttaaaggcttccccaggcttttctttttcttttttcttttttytttttttttttttgagatggagtttcgcttttgtggccaagactggagcgtaatggcgtgatctccattcgccgcaacctctgcctcccgggttcaagcaattctcctgcctcagccttcctgagtagctgggattacaggcatgcgccactacgctcggctaattttgtatttttagtagagacggggttcctccacgttggtcaggctggtctcgaactcccaacctcagatgatctgctggccttggcctccaaaagtgctgggattacaggcgtgagccaccgtgcctagccggcattttattattattattattatttta

SEQ ID NO: 707626 - DNA, 592 bp, Homo sapiens
aagtagtaaatttaaaaaagactctaaacatgcaaatgtgtgtgtgtgtgtaaaatatattctcagacttttttttttttttgcaccgtaactctacaaagttaaaattacattgtcttacaatcaaactgacaacatcttagagtgggtgaaatgaaacaggacagagaaggcaggtgtgtgcctatgaccgcctggctggagatgacacttccacttcctacttaaaggcttccccaggcttttctttttcttttttcttttttttttttttttttttgagatggagtttygcttttgtggccaagactggagcgtaatggcgtgatctccattcgccgcaacctctgcctcccgggttcaagcaattctcctgcctcagccttcctgagtagctgggattacaggcatgcgccactacgctcggctaattttgtatttttagtagagacggggttcctccacgttggtcaggctggtctcgaactcccaacctcagatgatctgctggccttggcctccaaaagtgctgggattacaggcgtgagccaccgtgcctagccggcattttattattattattattatttta

SEQ ID NO: 707627 - DNA, 2221 bp, Homo sapiens
catgttaatgcttgtttcagatctgactcccacagactacttctactaccactaacaccagtagagcatctggcatacagcaggtgcttggaaatatataaaacatatgtggaataaatacatggataaataactatatacattaaatgttagaatgtggcattggcctgagtacccaattctgaggcgttctacacaattgcaatttaggtagaccattcttttttttttttttttttgagacagagtctcactctgtcaccaggctggagtgtggtggcgcaatctcggctcactgcaacctccacctcctgggttcactccattctcctgcctcagcctcccaagtagctgggattacaggcttgtgccaccacgcccagctaattttttgtatttttagtagagatggggtttcaccatgttggccaggatggtctctaactcttgagctcatgatccacctgccttggcctcccaaagtgctgggattacaggcatgagcagcggcgccccgccaaccactcttgaatatcagaacaaattacaccactagcaagtggaagcagggatttctgtgcaaaagccagccaaagtcaagctttcaacacagatgggctctgacaaggaagcccaacaggtttgcatcacttagagataagtagttctttttagggatctagaaacgaaggcctagctaaacatatttctgacttcatagtttcaccttatgcaaatcatttctcagtatccaaatgagttggcaaaaaacggagtccatattttatcatggtacacccttccaggaattttagtagttggctataaatctctgtatgtgctaactgagaaacttctcctatgaaagctcattttatttatttatttatattttattttctgagacagagtctcgctctgtcacctaggctggagtgaagtggtgcgatctctgcttgctgcaacttttgccttctggggtcaagtgattctcccacctcagactcccaagtagctgggactacaggtgtgtaycactatgcccagctaatctttgtatttttagtagagacagggtttcaacatattggccaggctggtctcaaactcctgacctcaggtgatctgcctgcctcaacttcccaaagtgttgggattacaggcgtgggccatagcgcctggccattttagattaagatcatgataatcagagcaacatttatatagctcgataactgaagtattttctgggcatgttggttgagtaaaacaattctcctttgcagataggtaagggttataaacacctgggaggcaggtttccgtgaaccagtctgggacttgaactcccattgcttaccctgtgttagaaaacatagtctgtgttgctgggtgtggtagctcacacctgtgatcccagcacagggagggatgggaggatgaggcgggtggctcacctggagttaggagttcgagaccagactgggcaacgtgatgaaactgcatctctactaaaaatacaaaaattagccgggcgtggtggcgggcgcctataatcccagctactcgggaggctgaggcaggagaatcacttgagcgcagggggcggagtttacagtgagccaagattgtgccactgcactccagcctgggtggcagagcaaaactctgtctcaaaaaaaaaaaaaaaaaaaaggaaataaaaaaatatagtctgtttttcaaacaatgaatttacaaacagatttttggaacacaaggcttgtgtatatacttctcaccaaatttacatgggtccctattgctgctgaacatccgaactttaaacatggtgtttgaggccttcttacctttccagacttacctctcaccttgctccacctagctgtgttatggccaaactgaactacatgcgcttactcagcctacaacgctttcttgctgctatacatttgctcatgctgtccccccacttctgtttgttaagatcctaccctagctttaagaatcaactatggcctttcctgatcaattaaacatgatcacttcttcctgtaagtactaaaggtactttatcatttaaaaatgatgacagttgtcatttattggcaactcctatacactgacctttgtacgaggcactttagaaacattgtttagcataatcatcatgaaattatatggggataggcatgcatttcagatgtgcctcttccatggt

SEQ ID NO: 707628 - DNA, 2221 bp, Homo sapiens
catgttaatgcttgtttcagatctgactcccacagactacttctactaccactaacaccagtagagcatctggcatacagcaggtgcttggaaatatataaaacatatgtggaataaatacatggataaataactatatacattaaatgttagaatgtggcattggcctgagtacccaattctgaggcgttctacacaattgcaatttaggtagaccattcttttttttttttttttttgagacagagtctcactctgtcaccaggctggagtgtggtggcgcaatctcggctcactgcaacctccacctcctgggttcactccattctcctgcctcagcctcccaagtagctgggattacaggcttgtgccaccacgcccagctaattttttgtatttttagtagagatggggtttcaccatgttggccaggatggtctctaactcttgagctcatgatccacctgccttggcctcccaaagtgctgggattacaggcatgagcagcggcgccccgccaaccactcttgaatatcagaacaaattacaccactagcaagtggaagcagggatttctgtgcaaaagccagccaaagtcaagctttcaacacagatgggctctgacaaggaagcccaacaggtttgcatcacttagagataagtagttctttttagggatctagaaacgaaggcctagctaaacatatttctgacttcatagtttcaccttatgcaaatcatttctcagtatccaaatgagttggcaaaaaacggagtccatattttatcatggtacacccttccaggaattttagtagttggctataaatctctgtatgtgctaactgagaaacttctcctatgaaagctcattttatttatttatttatattttattttctgagacagagtctcgctctgtcacctaggctggagtgaagtggtgcgatctctgcttgctgcaacttttgccttctggggtcaagtgattctcccacctcagactcccaagtagctgggactacaggtgtgtaccactatgcccagctaatytttgtatttttagtagagacagggtttcaacatattggccaggctggtctcaaactcctgacctcaggtgatctgcctgcctcaacttcccaaagtgttgggattacaggcgtgggccatagcgcctggccattttagattaagatcatgataatcagagcaacatttatatagctcgataactgaagtattttctgggcatgttggttgagtaaaacaattctcctttgcagataggtaagggttataaacacctgggaggcaggtttccgtgaaccagtctgggacttgaactcccattgcttaccctgtgttagaaaacatagtctgtgttgctgggtgtggtagctcacacctgtgatcccagcacagggagggatgggaggatgaggcgggtggctcacctggagttaggagttcgagaccagactgggcaacgtgatgaaactgcatctctactaaaaatacaaaaattagccgggcgtggtggcgggcgcctataatcccagctactcgggaggctgaggcaggagaatcacttgagcgcagggggcggagtttacagtgagccaagattgtgccactgcactccagcctgggtggcagagcaaaactctgtctcaaaaaaaaaaaaaaaaaaaaggaaataaaaaaatatagtctgtttttcaaacaatgaatttacaaacagatttttggaacacaaggcttgtgtatatacttctcaccaaatttacatgggtccctattgctgctgaacatccgaactttaaacatggtgtttgaggccttcttacctttccagacttacctctcaccttgctccacctagctgtgttatggccaaactgaactacatgcgcttactcagcctacaacgctttcttgctgctatacatttgctcatgctgtccccccacttctgtttgttaagatcctaccctagctttaagaatcaactatggcctttcctgatcaattaaacatgatcacttcttcctgtaagtactaaaggtactttatcatttaaaaatgatgacagttgtcatttattggcaactcctatacactgacctttgtacgaggcactttagaaacattgtttagcataatcatcatgaaattatatggggataggcatgcatttcagatgtgcctcttccatggt

SEQ ID NO: 707629 - DNA, 757 bp, Homo sapiens
  misc_feature 469, 470, 471, 472, 473, 474, 475, 476, 477, 478, 479, 480,481, 482, 483, 484, 485, 486, 487, 488, 489, 490, 491, 492,493, 494, 495, 496, 497, 498, 499, 500, 501, 502, 503, 504,505, 506, 507, 508, 509, 510, 511, 512, 513, 514, 515: n = A,T,C or G
  misc_feature 516, 517, 518, 519, 520, 521, 522, 523, 524, 525, 526, 527,528, 529, 530, 531, 532, 533, 534, 535, 536, 537, 538, 539,540, 541, 542, 543, 544, 545, 546, 547, 548, 549, 550, 551,552, 553, 554, 555, 556, 557, 558, 559, 560, 561, 562: n = A,T,C or G
  misc_feature 563, 564, 565, 566, 567, 568: n = A,T,C or G
tgcaatcaatgcaatcaattcccttataaatgcagatatatcttgcttttttttttttgagacaaggtctcactctgtcgcccaggctggagtgcagtggtatgatcatagcttattgaagccatgacttgctgggctcaaatgatcctcccacctcaacttcctaagtagctgggactacaagtgtgtgccaccaagccagggtaattttttatttttatagagacagggtctcactatattgcctcagctggtctcaaactcctggcctcaagcaatcctcccacctcagcctcccaaagctctgagattatagctttgagccatygtacccagttcaaatattacatttcttataaattgaaggtttgtggcaaccctgagtagagcaagtctactggtgtcatttttttaacagcatgtgttcatgtcatgtctgtgtcacattttgttaatttttgcaatattnnnnnnnnnnnnnnnnnnnnnnnnnnnnnnnnnnnnnnnnnnnnnnnnnnnnnnnnnnnnnnnnnnnnnnnnnnnnnnnnnnnnnnnnnnnnnnnnnnnntcttcttttgccaagagagttataggaaagcagccagcctcctgagcccagtcctctgttcaaaacctaagactggtctgttccatgttctggtcattctttttctggttcccttttacatttttcactgtttgtttctgtcctttttaaatgtatttctatttttattttttctaaaaatgagctctc

SEQ ID NO: 707630 - DNA, 1187 bp, Homo sapiens
ttctggcatcagttgtcatgtctcctttttcatttctaattttatttgtttgggtcttctctttttctttcttaatctagataaaggtttattgattttgtttatctttttgaaagttctctggcttctcttccctccccaccccctaaagaatttcaactggtaatcatccagtggcaagtttaccaccctgagtattccagaacttgggagtgaaaacacgatcagataataagggaaacactgctctattttccaaaatttctaactcattccttttcatttcagatttcatttttgttgcttttgttttataatttcttatttttcataaattttatgcctccttttttctccttaaataccttaaatatatatatttcaaagtcttggttagactaagttaataaaataaaattaataaattaatcttatttgttattaatccatttcttttttaccattagatttctttacatgtttacagttattaaaatgaaggcttattttaaactgaatggattttgttttcattttttttctccctcttcgctttccctctctatagaagttttgaagttgcctctgtgtagtttcccagaccccagtccagaacacaagctcataagaagagtttagagattccctagggtgataattgaggtgttacaaatcaaggcactgagtcagcaggcagcttggttaagctgctggtcaagctgtcgagtctgtgtcctcccacctcccaagtcaagcatttgccaggatgtagaggctccaagcattgattggtagcaatttccccatccttaatcttcctttatgaaacattgagtcccattccggtactagcttcaagtaacaaatttgtgtccaggcctccaactctcatggaacattctagagtccctgtttctagtaacaagctactgtctgcttctagacccagagcccagcaagcctgtaattccagccccactcacggcttaaattgtttgttcatttctgataaataaggactttctttaattttttctgtccatgtctgcattacagagcagcgagaaagtgttaaaatataaatctacttttccaatttgaccagaaatctcttctctcccttgaatcaatgaatgagaacaaamatgaatgaatgaatgagaaaagaaaattctcattcataataa

SEQ ID NO: 707631 - DNA, 1047 bp, Homo sapiens
atttaaatgaaaattctagtactgattataattcacatattctttcattgccctagagtttttaattgtgcccaaataagtcttggtattcacaaactaattacttgagtttttaggttcacataccagtgatatcctccttgaatctttctgccacttagtcattttacttccaartatcatgacatccaacagaggccgatgaaggaaaaaagatgcaaaagtcatcccatttatttttctgccttaaaataagagtgtgtatattgggagaaggaaagggtaaagcagttagatgttattagaaatacttggaagagaatagaaataaaaatttgtgatttttagttattaaagtcatcattaaattgtgttatccatacaactgaaggatttcaatatgggcatcttgttaaggaaaagctttcagagaatggtaacatttcttaatagtgaacatgtccctacactcacataattataagacttcatgtacaaggtactcaaaatcagaaactttgtaaaaagccttttaatcagataaacctgaatatatcattatctagaaataactgaaaagagtgcaaaacattagagaacagtcatttgataatatggtaaataaatcaataggctattatattcctattaaaattataaaagttgcataaacaggaaagattatacaaatataccataaaaagtacttataataaaaatatgagaaaaatacaaactgatatgtaaactataaaatatgtaaaatagccaagcatggtggttcacacctgtaatcccagcactttcggaagtcgaggtgggcagatcacttgaggccaggagttcgagaccagcctgggcaaccgaatgaaaccctctcaagaaaaaaatacaaaaattagctggacatggtggtgcgcatatagtcctagctactcgggaggctgaggtgagaggatcgactgagcctggaaggttgaggctgcagtgagccgagatggtaccactgtactctaggctgggtgacagagtgagaccctgtctcaa

SEQ ID NO: 707632 - DNA, 1047 bp, Homo sapiens
atttaaatgaaaattctagtactgattataattcacatattctttcattgccctagagtttttaattgtgcccaaataagtcttggtattcacaaactaattacttgagtttttaggttcacataccagtgatatcctccttgaatctttctgccacttagtcattttacttccaaatatcatgacatccaacagaggccgatgaaggaaaaaagatgcaaaagtcatcccatttatttttytgccttaaaataagagtgtgtatattgggagaaggaaagggtaaagcagttagatgttattagaaatacttggaagagaatagaaataaaaatttgtgatttttagttattaaagtcatcattaaattgtgttatccatacaactgaaggatttcaatatgggcatcttgttaaggaaaagctttcagagaatggtaacatttcttaatagtgaacatgtccctacactcacataattataagacttcatgtacaaggtactcaaaatcagaaactttgtaaaaagccttttaatcagataaacctgaatatatcattatctagaaataactgaaaagagtgcaaaacattagagaacagtcatttgataatatggtaaataaatcaataggctattatattcctattaaaattataaaagttgcataaacaggaaagattatacaaatataccataaaaagtacttataataaaaatatgagaaaaatacaaactgatatgtaaactataaaatatgtaaaatagccaagcatggtggttcacacctgtaatcccagcactttcggaagtcgaggtgggcagatcacttgaggccaggagttcgagaccagcctgggcaaccgaatgaaaccctctcaagaaaaaaatacaaaaattagctggacatggtggtgcgcatatagtcctagctactcgggaggctgaggtgagaggatcgactgagcctggaaggttgaggctgcagtgagccgagatggtaccactgtactctaggctgggtgacagagtgagaccctgtctcaa

SEQ ID NO: 707633 - DNA, 567 bp, Homo sapiens
ggtttgctggagggtgccaggcagctggggaacagccagagtcaggagacaggaagggacccggggagtggggcctggaggtcttgggcagctggagaaagaggagggggtgggggacacctgggagcagagccattcctgccttgaagtcactctgggagcttggcccttgcaaccctcccgcagccgtctacggacgggtcatggcccactcactgtcgacctcctcttcccccgcagcttccagcgggcacagccgggaggcctctgcgtccaggcacaaacggtggagaagccccgacggctcccctcgcagtcccggcagagaaaccggaaaccgagggcggaaggtcaagccacgaccagccccagccggagagmgaggccacgacaagcccgagtccggcagagcacgacgcccccacgagcgcagaggaggcaggtttaggggctgggagcttggaggggtggggaggagggcgcagggccccgggaaggggagcggggagtggggggccccgagggggccgaggaagccctcagtgcgccaggaacccgggcccccgg

SEQ ID NO: 707634 - DNA, 636 bp, Homo sapiens
ggaatacatgctctagagccacactgccagtttgagtcctgatttttccacttattatctctattatctgatcaaatcctcatctgtaaattggggataaaagtaaacttacctcataggttttattttatttatttttttgagacaaggtcttgctctctttcccaggctagagtgcagtggcatgatcacggctcactgcagcctcaaccttatggatacaagcaatcctcccaccccagcttcccaggtagctgggaccacaagcacacactatcatgcctagctaatttttttttktgtgtgtgtgtgtgtgtagagaaggggtcttcttatgttgcccatgctggtcttgaactcatgggctcaagggatcctcccacatcaacatcccaagtagctgggactacaggcacatgccaccatgtttggctaatttaaaaaaaaatttgtagagatggggtctcacagctgcctgatctggtctcaaacctcctggtttccagccaatcctcctgcctcagcctcccaaattactgagattacagtcatgagccagcatgcccaacctcatttagattattttgtataaataactagtctagtcatttaaagtatttcagtgaagtgtgctac

SEQ ID NO: 707635 - DNA, 1483 bp, Homo sapiens
ctcactgtgttacccaggctggagtgcagtggtgcgatctctgctcactgcaacctccatctccggggttcaagcgattctcctgcctcagcctcccgagtagctgggattacaggcgtgcatcaccacgcccagctaagttttgtgtttagtagagacggggtttcaccacattggccaggctggtctccaactcctgacctcaagtgatccacctgcctcagcctcccaaatgctgggattacaggtgtgagctgccgtgtctgggcagtttgtttctttacaatccgtatgagttcaataattcccaaagaaaattttggtaactggagaaaggtttctctggagcccatgggtatattcccatctttagctttctttggcatctacattctgagcaagaagcctgagaggaggggagattggtagataaaaatgaaggatagagtttgaaggattgaaattattatttatttatttattgagacagatctcgctctgtcgcccaggccagagtacagtagcatgagcttggctcactgcactctccgcctctcgggttcaagcaattctcctgcctcagcctcccaagtagctggaattacaggcatataccaccacacccagctaattttttttgtatttttagtagagagtgtgtttcaccacgttggccaggctggtttcgaactgctgacctcaagtgatccgcccatcttggcctcccacagtgttaggattataggcatgagccaccaagcccaccaagtccacctgaaattgctagtgaaaatggaaaggggcacttcctggtattggaaatcctttgacaggccatatctgtgttagatattttaccgaaaaatattaataagacggtgtgttgaaacatctggggttttttttgtttttttttaattgtccaggttgttctggaattgatagagctccgtgaattgggtgctgccaggtcacttttgagacagactgatcccatgatcatgttaaaacaaacacagccagagcgatatattcatctggagaaccttttggccaggtcttactttgatcctcgtgaggtatgactgtggtaatgaaaaggaactttttgttaactttggaaatgaaataacatgatcttttttttttttttttaccattttattgtatactctttgtgattttgatttaatttttgagaatgatgcttctctgtttatatatgttggctgaaatttgygtatgttaaagagaataattttgttcagttttctgattatttgagtcttctatacacctcagtttagaggattgcgtgttggttagtaaaaaaagcagaacattttattctgatgtcatttccacattagccctccccgaagtgctgcctgactgctggtatgttcactgatcatttgtgtgtcttgcccctaacaattgtagtttccttctagcctttttagtccctagaagcttttgtttc

SEQ ID NO: 707636 - DNA, 725 bp, Homo sapiens
tttctttttctttttcttttttaaagagacaaagtcttgctatgttgcccaggctggtcttgaaccctgggctcagcctcccaaagtactgggattgcaagcattagccatcgtgctgggcctcattttttcttgttgtttccctatgctgtgttccacaagaattcttcagtattctcttctaattaacatattctttatttgattgtgtcaagtctagcttgatctcatatactgatttttttttttttttgagatggagttttgctcttgttgcccaggctggaatgcaatggcgcaatcttggctcactgcaacctccacctcccagtttaagcaattctccagcctcagcctcccgagtagctgggattacaggcttgcaccaccacaccyggctaattttgtatttttagtagagacgggtttcaccatgttggtcaaggggtctcgaactcctgacctcaggtgatccacccacctcagcctcccgaagtgctgggattacaggtgtgagccacctcacctgaccctatactgaatttttaaaggaatctatttttatatttcaagccttctagttgtttcttattcatatataaccgttcttttattttttccctctccacattttcttggtgtcttaaaatgaaagatattatttcatttatatctttgtgcattataaacattctttttttaaaaaaaaatcttttctaggctgt

SEQ ID NO: 707637 - DNA, 682 bp, Homo sapiens
caagtcgttattataaacacaactacagcattgtccttggacctgttaggccagggttttagagcatactgcaattactgactgcaaatataattcccttaatgcatattttaaagtttgaaatgcacttgctgacttcacacaacagtagctccctaatgacaggaactttgcctgtacttgagaagaagatttcaagagaaaccaagcataaagtagaatgggtgaaaaatgataattcaaattgagccagatttccccagtggtttaggtacacctggttttacatttaaaacttttgaaagttacattaactttttaagaccacacatttaataatcttaagaggtgcctcaagaagactctaggttctaagagaatatatataaaagaagagtgaggcaaatattagcttacatttttgacaattaatatattaatggcattctgaaaccatccgatgtttcagattgggtgtgcatttctttctcccagaatrcagggtgcatttttttttttttttttttttttgagacagagtctcgctctgtcgctcaggctggagtgcagtggcaccatctcggctcactgcaagctccgcctcctgggttcacgccattctcctgcctcagcctcccgagtagttgggactacaggcgcccaccaccacacctggctaatt

SEQ ID NO: 707638 - DNA, 855 bp, Homo sapiens
ttggatgtacagagactcataagtaggggcgactcagatatgcacctgataayggcagggagttggatttggattcacgtcttgcagaactgacttgtacatttaacaggagacaggccaccctacttccaagcagtaaaaagacttcacaccgggcttaattaagttgtacttttttttttttgagatgccgtctcactctgttgcccaggctggaatgcagtggcgcgatcttggctcactgcaacctcctcctcctgggttcaagtgatgtggtggctcaagcctgtaagttgtacatttttgttgacatttcctcctccaagaaccaactatatggctgacctggcccagcctgcccctgctgtgtctggagggagagttggggacacatttcagaggagccaaagcccccatccacttacccccacaccttttctaataacatgtcacaaatgccccctggagaactcacccttctgtcctcagcagcctccatcaggttaaaacttcacaaactccaggaagcttccctgttggtcccctaagccttggaagcctgggttaggtacctctctttggtgtttccttagcacactgagttcacttttaatggttttatttaacaaacacttgcactgcataacacttgctaagcacttttagaaatgtttcctcgttgaggggggcggttccaagatggccgaataggaacagctcgggtctacagctcccagcgtgagcgacgcagaagacgggtgatttctgcatttccagctgagcttggaagagagtagtggttctcccagcacggagcctgagatctgagaacagacagactgccacctcaagtgg

SEQ ID NO: 707639 - DNA, 376 bp, Homo sapiens
tgcaagaacttcacctcaagggttagcaaacacctactctctattcatgtgcaatggccttgagtggagctctcaactgataagtgggggtttgtttgtgtgtgcgagtgtgtggtttgtgtgtttgtgtgtccatgcacccacacacgtaggcacaaatcttggctatcaactcaaatgcaggaactggattgatttttataactttgctcttaaggtttctcacccccyaatatttgctcaggcctcttttgagactacatgttaaataaggcataggctgcctcacagtggctttatttgcttgttgtgggtggtggtggggccggggagctcattaggattcttaaaagtttaggaaggagcaaaggccaag

SEQ ID NO: 707640 - DNA, 1446 bp, Homo sapiens
ttttccaacagtataagatatcctacaaaagttgactttaatggttatgttatacattaacattttcctatctcaaaacttaactaaacattgccaatggttaaatactttggttgttgcccatttttcaacactacaactactttaaaaagaaaagtattagtacataaaacattctaagcatgtctcaatatttttgtaagacaaaacagaaaaaagttactttgataactattttttaagttatttttataaaactattaactcctgaaagtgtgcacaattttatgtctttattgataacaggtaagttttcatatgctctaacaccaaaatagccatgctaattttaattataattaagaatttgcctcagtttgcctttttattgattactggtgagatttaaaatatttgtagtttattataaatttgtatttcttctttgtgagtttttttaaactacttttgttttagattgaagttattttcttctctttgcagattttaatttgtcctgtaccaaattacattttttttctgcgatttataataccacccactacttcagaggctgaggcagaaggatttcttkagcccagaacatcaggtctgcagtgagccgtgattgtgtcactgcactccagcctgggcaacagagcgagaccctgtgtctatttgataacaaaataataataataatatcatcattgtattttacgtttaatattttctcattcctaattgagttcaattttcatccattttatgagttctaaattttgatatcttgctcatgctgtcagttgattttttttttttttttttttttgagatggagtctcgctctgtcacccagtctggagtgcagtggcgcgatctctgctcactgcaagctccgcctcccgtgttcatgccattctcctgcctcagcatcccgagtagctgggactacaggcgcccgctaccacgcccggctaattttttgcatatttggtagacagggtttcaccgtgttagccaggatggtctcgatctcctgacctcgtgatccacccgcctcagcctcccaaagtgctgggattacaggcatgcgccaccgcgctgggcccagttgattccattttatctagggactaaatacctgcacttttttttcttgttattacctttaaattatgactatataaacatatttctctattaaagtaaaaaaggaagcatacctattaaaaccagttctgtagcttgaacatttcagcatttcagaatgtgttgctttctctgtctcatcttaccattcagtgtttcctagctttcagatatctttgatatttatatttttattaattttaactatctcagtattctctcatcaattatttttgacattcactttaaatttaatgttcctactaagcctaagagcaaagttttctgctttcc

SEQ ID NO: 707641 - DNA, 1446 bp, Homo sapiens
ttttccaacagtataagatatcctacaaaagttgactttaatggttatgttatacattaacattttcctatctcaaaacttaactaaacattgccaatggttaaatactttggttgttgcccatttttcaacactacaactactttaaaaagaaaagtattagtacataaaacattctaagcatgtctcaatatttttgtaagacaaaacagaaaaaagttactttgataactattttttaagttatttttataaaactattaactcctgaaagtgtgcacaattttatgtctttattgataacaggtaagttttcatatgctctaacaccaaaatagccatgctaattttaattataattaagaatttgcctcagtttgcctttttattgattactggtgagatttaaaatatttgtagtttattataaatttgtatttcttctttgtgagtttttttaaactacttttgttttagattgaagttattttcttctctttgcagattttaatttgtcctgtaccaaattacattttttttctgcgatttataataccacccactacttcagaggctgaggcagaaggatttctttagcccagaacatcaggtctgcagtgagccgtgattgtgtcactgcactccagcctgggcaacagagcgagaccctgtgtctatttgataacaaaataataataataatatcatcattgtattttacgtttaatattttctcattcctaattgagttcaattttcatccattttatgagttctaaattttgatatcttgctcatgctgtcagttgattttttttttttttttttttttgagatggagtctcgctctgtcacccagtctggagtgcagtggcgcgatctctgctcactgcaagctccgcctcccgtgttcatgccattctcctgcctcagcatcccgagtagctgggactacaggcgcccgctaccacgcccggctaattttttgcatatttggtagacagggtttcaccrtgttagccaggatggtctcgatctcctgacctcgtgatccacccgcctcagcctcccaaagtgctgggattacaggcatgcgccaccgcgctgggcccagttgattccattttatctagggactaaatacctgcacttttttttcttgttattacctttaaattatgactatataaacatatttctctattaaagtaaaaaaggaagcatacctattaaaaccagttctgtagcttgaacatttcagcatttcagaatgtgttgctttctctgtctcatcttaccattcagtgtttcctagctttcagatatctttgatatttatatttttattaattttaactatctcagtattctctcatcaattatttttgacattcactttaaatttaatgttcctactaagcctaagagcaaagttttctgctttcc

SEQ ID NO: 707642 - DNA, 596 bp, Homo sapiens
tccttctcaaaaaaaaataagaaaaaaaagagaaagagagagaggtttgatgaattcttaaaggccagcccctggggtggagggtaccatggctaagatgcctccatgccacacsaaaggtcattagggatacaggactccctgggctccttcctgggccatttttatcatgtgcaaatgcccagggtcttagaggctcacctgagaacacgtgacttcaccttagaccaaacctggaggcctcaagccacctgcatttggatgatgagaaaccaccacgttatcagactcattcatctttgtatcaacttcagcaaaaagcaattaaaccaggaagcagggcataattcatagttataggaaatcatttcaactcttcggtacccaagtcaaagacaaaaggcaagagcttttttgtgtaaaatctctgtagcatagaaagtctgctagacctccctagaaaggacacattccagcagcctacgcatagacattttctcaggcctccccattttttcctgatctcatccatgtgtttcttccagctttgattgtaaaataaaaatgagattcagaaaaccacataaaacaaacat

SEQ ID NO: 707643 - DNA, 1285 bp, Homo sapiens
gactgaagaatggatttctgtgaagcacagaattgtatatgtgtgtctgtgcatgtgtgtgtcatccatgtgtttgtgtatgttctgtgcatgtgtgtgtatgtttgtttgagggctactgttaaccaaatgagacatcatcttaaaaactcaaatttcaatgtgttaagggttatataaactgaagagcataaacactacagtagaaactgaaggctttagcatgcttatacttagtggtttccacctgagtagctaaaacaagcacacatgttgaatgtattcacagatctctttctattcctgtctttacacctccacctaccccctctatctgattccctttaaatcaaagtgtatacagatggtcagagggcgaacttgatctagtaaaggatttttccctccctgtatgttctcttgcactttaaggagtttccgaaaggaggaggaggagcatttctcactggacatgagggaactgataacgacaaattctgaaaagagatttcattcagaaagccaagtgatttaagcacaatgaatggtcttctttctctgatagaattcccaagacagtcgctaacatccaaagttgacttttaattaattttaagttcattgaaaatttggcctgaggaaacgccaatgagggatcccaagagtttgttcccatcgcttttgtcccattcagcctatacgtggacctgatgaagctgtgaagctgccggctgtgcctatcaggaaagactgcagtggagagtagaccagaagcctatttaagtctcccagtaaatgtccacattgcacacctgtagttctttattttttcttcttttttgagacggagtctcactctgtyacccaggctggagtgcagccacgcaatctcggctcactgcattgtgtgcctcccaggctcaagcgattcccctgcctcagcctcctgagtatctggactataggcacgtgccaccacgcttggctaatttttgtatttttagtagagacagggtttcttcatgttggccaggctggtctcgaactcctgacctcaagtgatccacctgcctcagcctcctaaagtgctgggactgcaggcatgagccaccatgcccggcctcgctttatttttttttaataggtgtaagataagcatgccccaggtcagcgtgcagatttcccagagggcttggaagaaccaccagaacattcctttatgcgtaaggatattttagaaatgaccagcttaaacatagctaactgggttgtatcacaattttaa

SEQ ID NO: 707644 - DNA, 1381 bp, Homo sapiens
ctttttctctcttcttccctcccttcctttctcctttcctattttgcctttccttttgataattttcagwtatattaaagaaaaattttaaaagttcttaaggaaaatataaaataagaaaatcccattcattcaggcttctctgagagctaagtatcagctgagaagaaatactcagtcactctatagtcccgttatacatcataaactctcacgtatttatagtgaaataaaaatgtttactgcctgtctggatgcatttcccagaaaaggagaaaccagtgtctaactcagagtgctaggaatgttatctgatactacagagaaaagagcaatatgttttgcaaacacacaagtaataaaatacttgagtaagttctgaaaggagaaaggagagctggagggaagaggcagggctaaaaatcattaagaagattttggttataaaccagagcccgatctgcacaccaaaaaaagaaagagtctcagaatggtaagattaaagtatcttagaatttggcagtcattaaaagcacaattttgtgttcttggggtgtttgtatgtcctattgtgcttttctgacctagattagtctagttactcagaacacagcagtatagctttgcaataacattgccccatggcttaatttcccaattaaacttaaacaaatttctcaaatgctcataaaacccttggtggtgagatcagtgcacctgaatagttaattatttgaatgtcagtctgagacatagataattggcagctaacagaaaatgcctaagacctgaaaacaaaagattcttctatggctgatcagggaataagtgaatagatttactaaaatggagataaattttttgtttttaccctaaagaattggaaagatactagaagactgaaaaattatttaagacctataaataagaaagaaaaaaaaggatcatcggattgtaattatattatagatgatgaacttcggctgcagtcaaatgatagaactaatattaagagactatctctgtatgtctccagaccaagtgatcatttaatagaaaatgtcagggttatcctgactaaaaatatttttcttctttggctataatgtttcaacatatgcaaatatgaaactaagtaaaataaatatatgtatcagacaacattttacaaaataaaattaatctagtgactgtcataaatcaacttaattatatagttagtaaaatagcttgagatttggctggaagatgataaaccagaggtggtcataaaagagttggggagctcaggagaggtcccagtgggaagcccagggaattagtcttgggctcagtcttactttacatcttaattactgatttcaaagaaaggctaaactgc

SEQ ID NO: 707645 - DNA, 1381 bp, Homo sapiens
ctttttctctcttcttccctcccttcctttctcctttcctattttgcctttccttttgataattttcagttatattaaagaaaaattttaaaagttcttaaggaaaatataaaataagaaaatcccattcattcaggcttctctgagagctaagtatcagctgagaagaaatactcagtcactctayagtcccgttatacatcataaactctcacgtatttatagtgaaataaaaatgtttactgcctgtctggatgcatttcccagaaaaggagaaaccagtgtctaactcagagtgctaggaatgttatctgatactacagagaaaagagcaatatgttttgcaaacacacaagtaataaaatacttgagtaagttctgaaaggagaaaggagagctggagggaagaggcagggctaaaaatcattaagaagattttggttataaaccagagcccgatctgcacaccaaaaaaagaaagagtctcagaatggtaagattaaagtatcttagaatttggcagtcattaaaagcacaattttgtgttcttggggtgtttgtatgtcctattgtgcttttctgacctagattagtctagttactcagaacacagcagtatagctttgcaataacattgccccatggcttaatttcccaattaaacttaaacaaatttctcaaatgctcataaaacccttggtggtgagatcagtgcacctgaatagttaattatttgaatgtcagtctgagacatagataattggcagctaacagaaaatgcctaagacctgaaaacaaaagattcttctatggctgatcagggaataagtgaatagatttactaaaatggagataaattttttgtttttaccctaaagaattggaaagatactagaagactgaaaaattatttaagacctataaataagaaagaaaaaaaaggatcatcggattgtaattatattatagatgatgaacttcggctgcagtcaaatgatagaactaatattaagagactatctctgtatgtctccagaccaagtgatcatttaatagaaaatgtcagggttatcctgactaaaaatatttttcttctttggctataatgtttcaacatatgcaaatatgaaactaagtaaaataaatatatgtatcagacaacattttacaaaataaaattaatctagtgactgtcataaatcaacttaattatatagttagtaaaatagcttgagatttggctggaagatgataaaccagaggtggtcataaaagagttggggagctcaggagaggtcccagtgggaagcccagggaattagtcttgggctcagtcttactttacatcttaattactgatttcaaagaaaggctaaactgc

SEQ ID NO: 707646 - DNA, 1381 bp, Homo sapiens
ctttttctctcttcttccctcccttcctttctcctttcctattttgcctttccttttgataattttcagttatattaaagaaaaattttaaaagttcttaaggaaaatataaaataagaaaatcccattcattcaggcttctctgagagctaagtatcagctgagaagaaatactcagtcactctatagtcccgttatacatcataaactctcacgyatttatagtgaaataaaaatgtttactgcctgtctggatgcatttcccagaaaaggagaaaccagtgtctaactcagagtgctaggaatgttatctgatactacagagaaaagagcaatatgttttgcaaacacacaagtaataaaatacttgagtaagttctgaaaggagaaaggagagctggagggaagaggcagggctaaaaatcattaagaagattttggttataaaccagagcccgatctgcacaccaaaaaaagaaagagtctcagaatggtaagattaaagtatcttagaatttggcagtcattaaaagcacaattttgtgttcttggggtgtttgtatgtcctattgtgcttttctgacctagattagtctagttactcagaacacagcagtatagctttgcaataacattgccccatggcttaatttcccaattaaacttaaacaaatttctcaaatgctcataaaacccttggtggtgagatcagtgcacctgaatagttaattatttgaatgtcagtctgagacatagataattggcagctaacagaaaatgcctaagacctgaaaacaaaagattcttctatggctgatcagggaataagtgaatagatttactaaaatggagataaattttttgtttttaccctaaagaattggaaagatactagaagactgaaaaattatttaagacctataaataagaaagaaaaaaaaggatcatcggattgtaattatattatagatgatgaacttcggctgcagtcaaatgatagaactaatattaagagactatctctgtatgtctccagaccaagtgatcatttaatagaaaatgtcagggttatcctgactaaaaatatttttcttctttggctataatgtttcaacatatgcaaatatgaaactaagtaaaataaatatatgtatcagacaacattttacaaaataaaattaatctagtgactgtcataaatcaacttaattatatagttagtaaaatagcttgagatttggctggaagatgataaaccagaggtggtcataaaagagttggggagctcaggagaggtcccagtgggaagcccagggaattagtcttgggctcagtcttactttacatcttaattactgatttcaaagaaaggctaaactgc

SEQ ID NO: 707647 - DNA, 1633 bp, Homo sapiens
taccagcttaagaaacaatgtaatgaaaagtccatgtgctattactttcattgccctgtcaataagatccaggattgcctccctcattctactttttaaaaattattttctcaacttttctgatgtgattcacacttacttggaagcttttgctttttggaattcttttaagaattataacctcttaattgtaacttatacattttacaatttttgtttgaaatgaggaagatgcttttgtaactatatttcaatttcacaagtaatttagggtaaaagacagcaagggatgttggtagtgttgcatccaagtgtcttctatttgtcatgattgtgtaaacacctataatttctcacttcacttctctagcccctctggatggatattcagagaatgaggatgaacattcctctgaatacaaagacttgggatattctttccctttaactgagagaaagaaaagcaaactgaatagacatggaaataataatttgcatcacagacatcccttcaggtcggcagtttgagttcaccttaaggcaatgccactgactggggctttccttgagtgtgtgtgctatatcttaggcactgccatggccctggttggggcttagaacatgtcatcccaaaatataacaccatggtctgctgagtactttcaatggaaggaaattggaagggcctcagaagcaagaatttctctctgaccttctcctattctcctttccccatttctctaccaaaagtgggtcatagaaactaaaactattctccttgaaagcaggccataaaacctataaactttactctctggtcttctcccttttcccttgagggtccttatgtgacaggtgtcataccctatacctggaagaaggaatgctgcatagagaggcccggaagaatctgaaaaaacaggccttactgggctccttcagtttatcaccattacaacacaccctttttgtccaatcgtatttctatacagctgatcctgcattgagtgcaagcaaaaaactgtcaagttttccctggatctttgggctttcatttctgaagtctcctgtgtcacgtaaaaytttgttaaataaatttgttatgcttttctcttgtaacctgtcttttgttgtaggagtgtcaggcaagacccttggaatgggtgggcaaaaggtgttactatttcacttctacagcctcaagacctagcaccatctctagcatatgttgtattaatgacgttagatgattgaatgactgttatctcaataattgccactgatttgactatttaagcaggtcattttttccccctaaatattccccccgtgctatactgaaagtcacagaacatcattattgcagaagaatagctttcctcagtcaaggctaaataagttacaggaattgacagcgaacacctcccattcaagttagaatgaacactatttggtcttagacacataaatgttcagacaagaggtttccatttagaagaagccaaccaatgatgagttcagaaaacattcttgttaacacactcaaaaattgcaataaaaaatggagcatcacctgaaaatggtaaactttttaaacaaatagaacgatatgaggataaagggatgtttctaa

SEQ ID NO: 707648 - DNA, 598 bp, Homo sapiens
aatttttgtatgcttaaaatttggtgtcagcagaccttagatgttttcattacaaaaaaggtacctatgtgaggaaaggtgataaaaatgctcagaaacataattgtgctaatcattttacaatatacacatgcagtaagtcattacattgtacacaataaatatatatacaatttttatttataaaaaaatccacaatacacacctacatatatatacacacatataaattacagttctggtaaactttatcctgaacaagataaaattamaaaatagtaatttaaaaaacaaggaaagaagtgggagcttaacatatgctcagtaatgttctaagttccctgacatagtgaattgtagaaatgtaggaaatatctacgttatattacagttgagaaattaagacagaattgaaattaccaacctcagttagtactaaaagaataaaaatttcaattcaaataacattagatattcttaaagagatacttaatattctgattaaattaccgagtatgaatttctgtagaaacacatttgaaacctccataaaataagaaactataaagcagaaaacatacaacatatgtgggttgta

SEQ ID NO: 707649 - DNA, 598 bp, Homo sapiens
aatttttgtatgcttaaaatttggtgtcagcagaccttagatgttttcattacaaaaaaggtacctatgtgaggaaaggtgataaaaatgctcagaaacataattgtgctaatcattttacaatatacacatgcagtaagtcattacattgtacacaataaatatatatacaatttttatttataaaaaaatccacaatacacacctacatatatatacacacatataaattacagttctggtaaactttatcctgaacaagataaaattaaaaaatagtaatttaaaaaacaaggaaagaagtgggagcttaacatatgctcartaatgttctaagttccctgacatagtgaattgtagaaatgtaggaaatatctacgttatattacagttgagaaattaagacagaattgaaattaccaacctcagttagtactaaaagaataaaaatttcaattcaaataacattagatattcttaaagagatacttaatattctgattaaattaccgagtatgaatttctgtagaaacacatttgaaacctccataaaataagaaactataaagcagaaaacatacaacatatgtgggttgta

SEQ ID NO: 707650 - DNA, 598 bp, Homo sapiens
aatttttgtatgcttaaaatttggtgtcagcagaccttagatgttttcattacaaaaaaggtacctatgtgaggaaaggtgataaaaatgctcagaaacataattgtgctaatcattttacaatatacacatgcagtaagtcattacattgtacacaataaatatatatacaatttttatttataaaaaaatccacaatacacacctacatatatatacacacatataaattacagttctggtaaactttatcctgaacaagataaaattaaaaaatagtaatttaaaaaacaaggaaagaagtgggagcttaacatatgctcagtaatgttctaagttccctgacatagtgaattgtagaaatgtaggaaatatctacgttatattacagttgagaaattaagacagaattgaaattaccaacctcagttagtactaaaagaataaaaatttcaattcaaataacattagatattcttaaagagatacttaatattctgattaaattaccragtatgaatttctgtagaaacacatttgaaacctccataaaataagaaactataaagcagaaaacatacaacatatgtgggttgta

SEQ ID NO: 707651 - DNA, 598 bp, Homo sapiens
aatttttgtatgcttaaaatttggtgtcagcagaccttagatgttttcattacaaaaaaggtacctatgtgaggaaaggtgataaaaatgctcagaaacataattgtgctaatcattttacaatatacacatgcagtaagtcattacattgtacacaataaatatatatacaatttttatttataaaaaaatccacaatacacacctacatatatatacacacatataaattacagttctggtaaactttatcctgaacaagataaaattaaaaaatagtaatttaaaaaacaaggaaagaagtgggagcttaacatatgctcagtaatgttctaagttccctgacatagtgaattgtagaaatgtaggaaatatctacgttatattacagttgagaaattaagacagaattgaaattaccaacctcagttagtactaaaagaataaaaatttcaattcaaataacattagatattcttaaagagatacttaatattctgattaaattaccgagtatgaatttctgtagaaacacatttgaaacctccataaaataagaaactataaagcagaaaacatacaacatatgtgkgttgta

SEQ ID NO: 707652 - DNA, 626 bp, Homo sapiens
caccttggcctccataaactttgatatcttgctcttaaattcagcaaatcatgatattctctctcggattgtctcataccatgctggaggctggaaatcactttcagtaagtatgctggcactataaagggtatatattgttttctttctctsagaaatcacagttttgtgctgcctatttttttcatgcaatgaaaacagtttatatacttgctctggatttctaaacgtttacaaaagttgcataattctggtaatcattaattcttcatcagcaacagttgaattctcagagacttgtttaactgcccagatgacaattatcctattgctttattcttcaaatctagtaagtgaatcaaagtcagtcttagtgatgatcagtatctctatatttttgtctaaaaaacagaatgctattttaatctatagattcaagtgtcattttatctctttgaagttttcaacaagtaatgtttccaatgttaatgttctttcttattcttcaaaacatcaagtaggcagaggttgagtctccattgtcatgcatctatatttaccaacaccatattaaggatttttattatgcctttgtcttttcatataatttacttttgtatggtttc

SEQ ID NO: 707653 - DNA, 626 bp, Homo sapiens
caccttggcctccataaactttgatatcttgctcttaaattcagcaaatcatgatattctctctcggattgtctcataccatgctggaggctggaaatcactttcagtaagtatgctggcactataaagggtatatattgttttctttctctgagaaatcacagttttgtgctgcctatttttttcatgcaatraaaacagtttatatacttgctctggatttctaaacgtttacaaaagttgcataattctggtaatcattaattcttcatcagcaacagttgaattctcagagacttgtttaactgcccagatgacaattatcctattgctttattcttcaaatctagtaagtgaatcaaagtcagtcttagtgatgatcagtatctctatatttttgtctaaaaaacagaatgctattttaatctatagattcaagtgtcattttatctctttgaagttttcaacaagtaatgtttccaatgttaatgttctttcttattcttcaaaacatcaagtaggcagaggttgagtctccattgtcatgcatctatatttaccaacaccatattaaggatttttattatgcctttgtcttttcatataatttacttttgtatggtttc

SEQ ID NO: 707654 - DNA, 588 bp, Homo sapiens
ttcaatttggtggaaatgaggcatgtttctaagctgatatrgtaagtacatttatcatctatttatacatatatatatacacacatatatatgtgtgtatatatatatacacacacacatatatatatatatgtgtgtgtgtgtgtgtgtgtgtgtgtgtgtatatatatatattcaactagattcagcatttagccaaggccattttctttcaggaaggttgaaaagtatttatattttttgatacttacttctctttctgctttctctttttcatattgatctatacattcttttaaatggttaccataattgaatacctcctcatttttctcttttagatgacgttgcattttcgtctcaggaaactgaatattaattgttaccttgcttttgttaactttcttatgtgcataaactaattgctgtcgaagccacctatttttgctttctagtttaaataatttctgctccaaagactcctgctgttcagtgtgtttgtccacattatcttgttcattttgatacatgtgttcagctttcttcatttgacactgtgtttcacatcggtctctttgtgcatgttcc

SEQ ID NO: 707655 - DNA, 588 bp, Homo sapiens
ttcaatttggtggaaatgaggcatgtttctaagctgatatagtaagtacatttatcatctatttatacatatatatatacacacatatatatgtgtgtatatatatatacacacacacatatatatatatrtgtgtgtgtgtgtgtgtgtgtgtgtgtgtgtatatatatatattcaactagattcagcatttagccaaggccattttctttcaggaaggttgaaaagtatttatattttttgatacttacttctctttctgctttctctttttcatattgatctatacattcttttaaatggttaccataattgaatacctcctcatttttctcttttagatgacgttgcattttcgtctcaggaaactgaatattaattgttaccttgcttttgttaactttcttatgtgcataaactaattgctgtcgaagccacctatttttgctttctagtttaaataatttctgctccaaagactcctgctgttcagtgtgtttgtccacattatcttgttcattttgatacatgtgttcagctttcttcatttgacactgtgtttcacatcggtctctttgtgcatgttcc

SEQ ID NO: 707656 - DNA, 588 bp, Homo sapiens
ttcaatttggtggaaatgaggcatgtttctaagctgatatagtaagtacatttatcatctatttatacatatatatatacacacatatatatgtgtgtatatatatatacacacacacatatatatatatatgtgtgtgtgtgtgtgtgtgtgtgtgtgtrtatatatatatattcaactagattcagcatttagccaaggccattttctttcaggaaggttgaaaagtatttatattttttgatacttacttctctttctgctttctctttttcatattgatctatacattcttttaaatggttaccataattgaatacctcctcatttttctcttttagatgacgttgcattttcgtctcaggaaactgaatattaattgttaccttgcttttgttaactttcttatgtgcataaactaattgctgtcgaagccacctatttttgctttctagtttaaataatttctgctccaaagactcctgctgttcagtgtgtttgtccacattatcttgttcattttgatacatgtgttcagctttcttcatttgacactgtgtttcacatcggtctctttgtgcatgttcc

SEQ ID NO: 707657 - DNA, 588 bp, Homo sapiens
ttcaatttggtggaaatgaggcatgtttctaagctgatatagtaagtacatttatcatctatttatacatatatatatacacacatatatatgtgtgtatatatatatacacacacacatatatatatatatgtgtgtgtgtgtgtgtgtgtgtgtgtgtgtatatatatatattcaactagattcagcatttagccaaggccattttctttcaggaaggttgaaaagtatttatattttttgatacttacttctctttctgctttctctttttcatattgatctatacattcttttaaatggttaccataattgaatacctcctcatttttctcttttagatgacgttgcattttcgtctcaggaaactgaatattaattgttaccttgcttttgttaactttcttatgtgcataaactaattgctgtcgaagccacctatttttgctttctagtttaaataatttctgctccaragactcctgctgttcagtgtgtttgtccacattatcttgttcattttgatacatgtgttcagctttcttcatttgacactgtgtttcacatcggtctctttgtgcatgttcc

SEQ ID NO: 707658 - DNA, 515 bp, Homo sapiens
tatgataaatgtacatcctcactaagtgcaaagaaagcagagtgtcatgtgatatgaaatgaayatgtaaccgaaatattttcctttatgaagaaaatagctggctttgacctttctaagacaagataaaaaagcaaaacatgcagagatgaaacattcagagctatctcatcatcaacgaaccgtttatcacttggcatttaggaatcctatgtatggttgaaaactctggttctaaattgtgatctgattacccctgaagttcaaaatccatgcagaggaaggaagcaggggaatactaccttcgttatttttttattacttttatttttataaaggtgtacactggagttttttagagtcaggacaggtcacatggcatggctctaaagattagtgagccacatttgtaatggctattgaaatgtatggctgtgaatccttgcattttaagtacttcacttttaatttctaatgtagcgtgaagtaagacatacacttaaacaaagccttgt

SEQ ID NO: 707659 - DNA, 583 bp, Homo sapiens
gtgaatagtgccacaataaataaattctttttttttttcacagagtctggccctgtcacccagggtggagtgtaggtgcacgatcttggctcactgcaatctctgcctcatgggttctcacattctcctgcctcagcctcccgagtagctaggactagaggcacccaccaccatgcttggctaattttttgtattttttcatagagacgcggtttcaccatgttagccaggatggtttcgatctgctgacctcgtgatcygcatgcctctgcctcccaaagggctgggattacaggcgtgaaccacagcgcccggcctgaaatcttgaaataaatgaaaaacgagctaatcgctgaacaaaaaaataaaaaatcgctgtggaatgacaagaacattctacaaacatttatatgtggtttttgcaaaaagtgttaatgccaatgtgtatatgctgagtgatgaggagataagtgatcttgaatcagaggagcaactcgtgacactgagaaaataaatgcaaaagctgaacgtagaatgctacaccatgtgtctttaatgcaacacattataataatttatatca

SEQ ID NO: 707660 - DNA, 1330 bp, Homo sapiens
cattgccctctaaataataatggcttcataaaatgaaaataaacaacatacaataaaccagtaaaaattcacattgaaagagaaaagagaagctaggtaacaatgcaaacacttttaagacataataaacatataaaaaatgatccttttaactcaatccaaacaatgtttctaattcagaaaaaaatataacacatatttggaagctggaaaacattattttaaaatatgaatacacagtagactcaagtaggtttagggatttaatattagtgtatctatgtgataaaattactggatattggaatctgaagaagtacaattatggttcaagtaccatgctcatctgtcactgacacacacacacaaacaaattagcatgaatgcttgctttgctcagacaattaactctctataagttcagggtttgctgtggaatgctccctgttttccattttcactatggtgaaagctatggaaactcaatccatgtaatttaatccaagctgtacataaagtaacttataagtaaaaactgaagatactacctttagtgtcaaaaatattttaatcccggtaatataatctgcctgcttctaaaaactgggatataaagcaatagattaatcaggcagtcacaagggaaacaagctcatcctactggagcagaagttttattcacaaataggaaagaaagaatctaagatatcagagggccggtaaggattaagaccacaagctgcccccacaggaacaagatatattattttgttttaagccatgaaagtttaacagggcagtttgtaatgaagaaacaaataataacaaacgatctatcaagctagagaaagaccccatgctcatttcattttgtcttacttcactagtattgcaaagggaaagtgagaaagaaaaagacagagaaggagagaaagagaaaatcgagagaaaaagagagactctccaaacaaaatgattatgtctcaaaagaaaaaaaaatttttcatctatttgtctaacacacacacacacacacacacacacacacacasagagacacacacaactctactgcttggtatcccaccctattttgtatccctgaggatttatttgagtccttgagaaagccccttatgaacattagagctcctcttagggttagcggggaacgggtataactgagctttccctacagactagagtaaatgtgctaagccagaatgtcttcttcctcctcctcctcttcgtctttctcctctcctcctcctcttctaaatttaaatagtctatatatgatttttattacttatgtaattgagttcctaaa

SEQ ID NO: 707661 - DNA, 1330 bp, Homo sapiens
cattgccctctaaataataatggcttcataaaatgaaaataaacaacatacaataaaccagtaaaaattcacattgaaagagaaaagagaagctaggtaacaatgcaaacacttttaagacataataaacatataaaaaatgatccttttaactcaatccaaacaatgtttctaattcagaaaaaaatataacacatatttggaagctggaaaacattattttaaaatatgaatacacagtagactcaagtaggtttagggatttaatattagtgtatctatgtgataaaattactggatattggaatctgaagaagtacaattatggttcaagtaccatgctcatctgtcactgacacacacacacaaacaaattagcatgaatgcttgctttgctcagacaattaactctctataagttcagggtttgctgtggaatgctccctgttttccattttcactatggtgaaagctatggaaactcaatccatgtaatttaatccaagctgtacataaagtaacttataagtaaaaactgaagatactacctttagtgtcaaaaatattttaatcccggtaatataatctgcctgcttctaaaaactgggatataaagcaatagattaatcaggcagtcacaagggaaacaagctcatcctactggagcagaagttttattcacaaataggaaagaaagaatctaagatatcagagggccggtaaggattaagaccacaagctgcccccacaggaacaagatatattattttgttttaagccatgaaagtttaacagggcagtttgtaatgaagaaacaaataataacaaacgatctatcaagctagagaaagaccccatgctcatttcattttgtcttacttcactagtattgcaaagggaaagtgagaaagaaaaagacagagaaggagagaaagagaaaatcgagagaaaaagagagactctccaaacaaaatgattatgtctcaaaagaaaaaaaaatttttcatctatttgtctaacacacacacacacacacacacacacacacacagasagacacacacaactctactgcttggtatcccaccctattttgtatccctgaggatttatttgagtccttgagaaagccccttatgaacattagagctcctcttagggttagcggggaacgggtataactgagctttccctacagactagagtaaatgtgctaagccagaatgtcttcttcctcctcctcctcttcgtctttctcctctcctcctcctcttctaaatttaaatagtctatatatgatttttattacttatgtaattgagttcctaaa

SEQ ID NO: 707662 - DNA, 1330 bp, Homo sapiens
cattgccctctaaataataatggcttcataaaatgaaaataaacaacatacaataaaccagtaaaaattcacattgaaagagaaaagagaagctaggtaacaatgcaaacacttttaagacataataaacatataaaaaatgatccttttaactcaatccaaacaatgtttctaattcagaaaaaaatataacacatatttggaagctggaaaacattattttaaaatatgaatacacagtagactcaagtaggtttagggatttaatattagtgtatctatgtgataaaattactggatattggaatctgaagaagtacaattatggttcaagtaccatgctcatctgtcactgacacacacacacaaacaaattagcatgaatgcttgctttgctcagacaattaactctctataagttcagggtttgctgtggaatgctccctgttttccattttcactatggtgaaagctatggaaactcaatccatgtaatttaatccaagctgtacataaagtaacttataagtaaaaactgaagatactacctttagtgtcaaaaatattttaatcccggtaatataatctgcctgcttctaaaaactgggatataaagcaatagattaatcaggcagtcacaagggaaacaagctcatcctactggagcagaagttttattcacaaataggaaagaaagaatctaagatatcagagggccggtaaggattaagaccacaagctgcccccacaggaacaagatatattattttgttttaagccatgaaagtttaacagggcagtttgtaatgaagaaacaaataataacaaacgatctatcaagctagagaaagaccccatgctcatttcattttgtcttacttcactagtattgcaaagggaaagtgagaaagaaaaagacagagaaggagagaaagagaaaatcgagagaaaaagagagactctccaaacaaaatgattatgtctcaaaagaaaaaaaaatttttcatctatttgtctaacacacacacacacacacacacacacacacacagagagacacacacaactctactgcttggtatcccaccctattttgtatccctgaggatttatttgagtccttgagaaagccccttatgaacattagagctcctcttagggttagyggggaacgggtataactgagctttccctacagactagagtaaatgtgctaagccagaatgtcttcttcctcctcctcctcttcgtctttctcctctcctcctcctcttctaaatttaaatagtctatatatgatttttattacttatgtaattgagttcctaaa

SEQ ID NO: 707663 - DNA, 651 bp, Homo sapiens
atgtacctttttcccacccagatttatgttctctttggcaacgctgttctctgtggtggcagcaaactcagtgcagtgagggaggggraaattttatatcttctttgttagtaataaatactttctgcctgtagtccaaaataagaataaattacccactgtgcagaaacatggaagtcatgatattctcaataaagcaccattaaacagtcccctggcagtcatggtttggggtgttactgtttacaataccgtgggggttacgtttccattagattttgaataatttagcaataaaatacaaattgtttattccataatgtctaactttattttgcactgtttacactttagcattttactagtgttgagggatggcatccaggatatttgcatctttacttctgacatttatgtaaaaaaagaaagaatggaggagactttgggttatcaagcaagttggcaatgtggatgattatagttatggctctcaagttaattcttaaaaattagacctttccacaatcaaataaaactggataattgacatgtctctgagtattttccgttctaacaatatgtggtaccagtaagaactttaatgcacgatattttatcctttgcttgctatgtaagatgtctctaaattta

SEQ ID NO: 707664 - DNA, 608 bp, Homo sapiens
ttctcccacctcagtctctttagtagctaatattataggcgcccgccaccacactcggctaatttttgtatttttattagagacagggtttcaccatgttggccgggctggtcttgaatttctgacctcaagtgaactgcctgcctcggcctcccaaagttctaagattacaggcatgagccaccgtgcccggmtgaaggtcgaagttttaaaaattataactaaattgtccatggttatactgatagtaagtagcagaggatttatagacaacacgtcttcctctagaatccctagttttatcactgcactgtactgtatgtagttcaggacccatgtgactgataatgtacttctccattcttcattatcattctttatctaaactcctacaggtctaaattcattctatgccagaaatgcaacagactgaaaatatcgtgtcccccagaattcatatgttgaaacataatctttggtgtgatggtatttgcaggtggggcctttaagcagtgattaggtcatgagtacagagtcctcatgaatgggattaatatcctaataaaagagaccccagagagctccctcacttcttctgccatgtgaca

SEQ ID NO: 707665 - DNA, 608 bp, Homo sapiens
ttctcccacctcagtctctttagtagctaatattataggcgcccgccaccacactcggctaatttttgtatttttattagagacagggtttcaccatgttggccgggctggtcttgaatttctgacctcaagtgaactgcctgcctcggcctcccaaagttctaagattacaggcatgagccaccgtgcccggatgaaggtcgaagttttaaaaattataactaaattgtccatggttatactgatagtaagtagcagaggatttatagacaacacgtcttcctctagaatccctagttttatcactgcactgtactgtatgtagttcaggacccatgtgactgataatgtacttctccattcttcattatcattctttatctaaactcctacaggtctaaattcattctatgccagaaatgcaacagactgaaaatatcgtgtcccccagaattcatatgttgaaacataatcwttggtgtgatggtatttgcaggtggggcctttaagcagtgattaggtcatgagtacagagtcctcatgaatgggattaatatcctaataaaagagaccccagagagctccctcacttcttctgccatgtgaca

SEQ ID NO: 707666 - DNA, 641 bp, Homo sapiens
tgcctccagggcagtgcaaacaggcctccagccagacagccatctcgctctccttttcctccagctgtgtctgcagaagggtcccgagtagcatcctgtagttccaacctgcttactccttaggactaggaaacaagaaaatcactgctaaccccactccaaacttgcctgatttcagagctcagtatcattctgcagtttgcagtcacactgggagggtctttttctcgtatatgagaaggaggacagaatgttggaagggaacgctcctcgacagatgggaatgagagtggtgtgagtaactaactggaggcaataaaggtgttagcaaacagcaggagggaagagtgggccccaccgatcactggctgtcccgcatgctgtgtgttgtaccagtgccagtgggagctgcctatccaagccttggtattaacagcatgtgactctggcagattcacaatgtcctcattggctttgtcagtatgacaagctttgactgagtccctatccaactgaggggccaccatccccgtcaccctcctttytgatgccttttctcctgatcatcccttcttcttccttcttctttgtctggcttcttttgttcttcctttttctgtccctcactcctccttacatta

SEQ ID NO: 707667 - DNA, 644 bp, Homo sapiens
tatgtcttttaagggaatctgaattccaagataataactttctttgaagtattatctttatgaaaaggtagatgtgtggtcatacaatttaacagatgccaaaaataattatctaaatacattttgctcaactgagggcctcaacatttgaaatgagaactgaggagtttcttgctctctcccaggggttctcattttaggtgcagatactcctcagagacaggtggcatggacaccagagacaccggtgacgaaaacagctgccsaggctgctctccactgcaacctgaaggacttaattttttggcccaaggccaaatttgctcctaacttctaggtccattggctttaacttgctcgtcagctgcttccataggagtaaaatagtgtcattcacattcccaactaaaaaagactcattagagacactcctgcgggagtaactcaagcattcaacgcaaggacacatgtatatgaggacccctctaaatctaaaattttattcctatgattccaagtaatttgtcaaattatagctgatgaaaatgacaagcattttaacgagaaagatgatatgctgtcataaagttgtggaaatagccctgaccaatatgttttactgtcttttcaataaattccggggg

SEQ ID NO: 707668 - DNA, 1260 bp, Homo sapiens
tttccagtgtataaatctattgctctattatagattattataatataaactcataaattcaggaatttaaaaaaaatctttaaaagcatgcttctcagaaatcattacactctgttaaacacttgctatctctcaacttctagatagattcctcaagagagaagtccttttttcattctgaacttctaattctcaaattttgattgtgtcctgttagttaccaaacacaccattatactactactctcatttcaatattgtacataaacgattccccatcttactaatgaaatgcttttttaaagcagtaacatatttaacatgtgcacatgttatgaagagtataggcaaactcaactattaaaaacatgtaactataaggaaagccatcttagacactatatgtgactacagctaagcttttctcttaagtatctaaagcaaatcaccagacttttacatagtaccctcacatagctagataagaaagtaaaagtaaaataatgaaagcagactctaaacagcagaagctccaaactccttagtttctctgttgtgctcaatcctttagcaaattacaggcctgaaaacaaggagtagctctatcacttaacaagtgactaaggaatgactttgttaattagaagtccaagggtgagaggctcctttccaccaaagctctgaataaacatcaacatcaggtcaaccagagttgtcttggtcccaggagtagcttaagcggatgactcaaattcccagcagaattctagtttaatatttattggaactccgagcttagtcacacagtgacttggaatttaagacacatggggtctcttctttccatccttaaagatatttttgctaagtgacacaaagttaaagaggcaagatgggttttaatttagagtttttattccctgaggtgtaagaaattaaaattttattttctggggagagtgaaccatactagctctgaatttcaaacacaactattaaccctgtcagakaattctattatcaagttttacaaaactgtttactattattatttttttttgctaccccagccctatgtattgaaagtggaaagaaggaagggagggaaggagggaaggagagagggagaatggatgaatggatgtatgtcacaatcacctttctagccaaaactgcaacatatgctggagttcttgaaattatttcaaccaaaaaaagaatcacaggactcataatttgtttagcaggtaattatttgcc

SEQ ID NO: 707669 - DNA, 1260 bp, Homo sapiens
tttccagtgtataaatctattgctctattatagattattataatataaactcataaattcaggaatttaaaaaaaatctttaaaagcatgcttctcagaaatcattacactctgttaaacacttgctatctctcaacttctagatagattcctcaagagagaagtccttttttcattctgaacttctaattctcaaattttgattgtgtcctgttagttaccaaacacaccattatactactactctcatttcaatattgtacataaacgattccccatcttactaatgaaatgcttttttaaagcagtaacatatttaacatgtgcacatgttatgaagagtataggcaaactcaactattaaaaacatgtaactataaggaaagccatcttagacactatatgtgactacagctaagcttttctcttaagtatctaaagcaaatcaccagacttttacatagtaccctcacatagctagataagaaagtaaaagtaaaataatgaaagcagactctaaacagcagaagctccaaactccttagtttctctgttgtgctcaatcctttagcaaattacaggcctgaaaacaaggagtagctctatcacttaacaagtgactaaggaatgactttgttaattagaagtccaagggtgagaggctcctttccaccaaagctctgaataaacatcaacatcaggtcaaccagagttgtcttggtcccaggagtagcttaagcggatgactcaaattcccagcagaattctagtttaatatttattggaactccgagcttagtcacacagtgacttggaatttaagacacatggggtctcttctttccatccttaaagatatttttgctaagtgacacaaagttaaagaggcaagatgggttttaatttagagtttttattccctgaggtgtaagaaattaaaattttattttctggggagagtgaaccatactagctctgaatttcaaacacaactattaaccctgtcagataattctattatcaagttttacaaaactgtttactattattatttttttttgctaccccagccctatgtattgaaagtggaaagaaggaagggagggaaggagggaaggagagagggagaatggatgaatggatgtatgtcacaatcacctttctagccaaaactgcaacatatgctggagttcytgaaattatttcaaccaaaaaaagaatcacaggactcataatttgtttagcaggtaattatttgcc

SEQ ID NO: 707670 - DNA, 847 bp, Homo sapiens
atcgttgttgtctgccaccaaattctgcattttagctcttttcactaaacattactatgtttttaataaaagcattatagtttggttactagtaattgtcataattttattatctttccaataggtatatatcatatgtaaaaaaaaacatgtctttgaaataatctcatttctgaaagataatttaaaatgatttctaattgcttttgcaaattcaaatgttttcaataaaagttttcattaaaatacgttaataaaagatttttcttgtataacttaaaaaagragcaataattatgttgtatgtttcaactccttttgacaatggttctcataaactcttccatgtttctctaagtatagaaaataactggcttaataaattaaattttaaatgatcctaatggagcatttacataaccttaaaatgactataacagagccaaaaagtaattaaaacttcataaatgcagagtgacatcatccaatcggcaatttacatttgtgtagttcaaagtaagaggacctgggaaagccctaattcacatggggagagcaaatagaatagaaaaaaaagaagacagctttagggaaaaaaataacatcagtggataaggttagaggaatagctttaagaataatttctccttaagacagaaagaatatgagaaatatgatgtttataaaatatttatgacagaagtaattttcttttaatattaacaataaaaattataaactgagacagatatcaccatatcaaaactgtaacaactcatttaatatacatgagagcaaattgttttcatcaagtctcacattaaggtgtaaaatatttttctaaaaa

SEQ ID NO: 707671 - DNA, 847 bp, Homo sapiens
atcgttgttgtctgccaccaaattctgcattttagctcttttcactaaacattactatgtttttaataaaagcattatagtttggttactagtaattgtcataattttattatctttccaataggtatatatcatatgtaaaaaaaaacatgtctttgaaataatctcatttctgaaagataatttaaaatgatttctaattgcttttgcaaattcaaatgttttcaataaaagttttcattaaaatacgttaataaaagatttttcttgtataacttaaaaaaggagcaataattatgttgtatgtttcaactccttttgacaatggttctcataaactcttccatgtttctctaagtatagaaaataactggcttaataaattaaattttaaatgatcctaatggagcatttacataaccttaaaatgactataacagagccaaaaagtaattaaaacttcataaatgcagagtgacatcatccaatcggcaatttacatttgtgtagttcaaagtaagaggacctgggaaagccctaattcayatggggagagcaaatagaatagaaaaaaaagaagacagctttagggaaaaaaataacatcagtggataaggttagaggaatagctttaagaataatttctccttaagacagaaagaatatgagaaatatgatgtttataaaatatttatgacagaagtaattttcttttaatattaacaataaaaattataaactgagacagatatcaccatatcaaaactgtaacaactcatttaatatacatgagagcaaattgttttcatcaagtctcacattaaggtgtaaaatatttttctaaaaa

SEQ ID NO: 707672 - DNA, 641 bp, Homo sapiens
ccatggcttgctcatgaccaaaaccttcccccaggcttttaaatatacctgtaggagcagagagataattactcttaaaatagccttgcttttcccttacaccgtggacattcactattcttgtttatgaacctacttcttgcttctctttatcttgttgggtcttccctgtgtttcatttctctgtttctgayctccttcctaaataagaactcccaattcttctcctatatttcagagtaattcagctaaacctctctcctgtctcttgtacaacaaagcccatgcaatgtgtgcaataaagcccatcaaggcacaaagtggctctccatttgatttgctcctctgtctatagaaagcagatgtagtcataaagaagagaacattcatgaacttaaaaataaatactataaaaataaacaatggcaatgattcctatcagataaaacccagactccttagtttgttctgtaaaaatatactttttggccgggcacagtggctcatgcctgtaatcctagcactttgagaggccaagacgggcggatcacctgaggtcgggagttcgagaccagcctgaccaacatggtaaaactctgtctctactaaaaatacaaaattagctgggcatggtggcacat

SEQ ID NO: 707673 - DNA, 641 bp, Homo sapiens
ccatggcttgctcatgaccaaaaccttcccccaggcttttaaatatacctgtaggagcagagagataattactcttaaaatagccttgcttttcccttacaccgtggacattcactattcttgtttatgaacctacttcttgcttctctttatcttgttgggtcttccctgtgtttcatttctctgtttctgatctccttcctaaataagaactcccaattcttctcctatatttcagagtaattcagctaaacctctctcctgtctcttgtacaacaaagcccatgcaatgtgtgcaataaagcccatcaaggcacaaagtggctctccatttgatttgctcctctgtctatagaaagcagatgtagtcataaagaagagaacattcatgaacttaaaaataaatactataaaaataaacaatggcaatgattcctatcagataaaacccagactccttagtttgttctgtaaaaatatactttttggccgggcacagtggctcatgcctgtaatcctagcactttgagagrccaagacgggcggatcacctgaggtcgggagttcgagaccagcctgaccaacatggtaaaactctgtctctactaaaaatacaaaattagctgggcatggtggcacat

SEQ ID NO: 707674 - DNA, 629 bp, Homo sapiens
gttagatcaatccacatatttctttaagattttttcttttgaattacaagccaatttaatactgtgggtttggcacgatctttgtcaagagtttcagcttgaaaggttaataagaaatactctatgctttratacagcacaacagaacaacagggagccctatcttcagaactgccaagcacatcaccttcatcagttgctgccatttcatcgagatcagtaatacacaaaccatttactcagtcccggatacctccagatttgcccatgcatccggcaccaaggcacataacggaggaagaactttctgtgctggaaagttgtttacatcgctggaggacagaaatagaaaatgacaccagaggtaagaagtgtctcatagcatggttactgtcacctcagatggatatgtgtaatgttaatattgagaagggaaatcacgtctggattttatatttaaatattatagtcatttttcttttccagaaagggttttaagataaactagtttggctccccatttttataatctcaatatcaggttcacagggaccaaaagattttccctggattgcttagctgattaatgacatagcagatggcctgattttctagtttgctgctctaaa

SEQ ID NO: 707675 - DNA, 603 bp, Homo sapiens
ctgtgctactacgaattccattacacttcaatctttgactcatactcaatataaatatattttaaatgaaggttagagcatgtaagaactttaagatgtctttttttwaaaaaaaataatgaaaccacatatgcccttgtccttttcttcctttggatttagaatgagaggtacaatcatttatcagagaactttagttagcaagtagtgaagcatctataaaaatatattgccacatatactcttaaagttgctactcttagcatctctatttaaaataaggctatgggaggtggttggcaggatggccgaaaaggaacagttctgatctgcagctcccagtgagatcaacacagaaggtggatggtttctgcatttcctactgaggtatccagcttatctcactgggactggttagacagtgggtgcagcccatggaaggtgagctgaagcaggatggggctttcagaggaaggaacaggcagcaatctttgctgttctgctgcctctgctggtgatacccaggcaaacagggtctggagtggacctccagcagcctccggtagacctgcagcagagaggcctgactgtcaaaaggaaaac

SEQ ID NO: 707676 - DNA, 603 bp, Homo sapiens
ctgtgctactacgaattccattacacttcaatctttgactcatactcaatataaatatattttaaatgaaggttagagcatgtaagaactttaagatgtcttttttttaaaaaaaataatgaaaccacatatgcccttgtccttttcttcctttggatttagaatgagaggtacaatcatttatcagagaactttagttagcaagtagtgaagcatctataaaaatatattgccacatatactcttaaagttgctactcttagcatctctatttaaaataaggctatgggaggtggttggcaggatggccgaaaaggaacagytctgatctgcagctcccagtgagatcaacacagaaggtggatggtttctgcatttcctactgaggtatccagcttatctcactgggactggttagacagtgggtgcagcccatggaaggtgagctgaagcaggatggggctttcagaggaaggaacaggcagcaatctttgctgttctgctgcctctgctggtgatacccaggcaaacagggtctggagtggacctccagcagcctccggtagacctgcagcagagaggcctgactgtcaaaaggaaaac

SEQ ID NO: 707677 - DNA, 603 bp, Homo sapiens
ctgtgctactacgaattccattacacttcaatctttgactcatactcaatataaatatattttaaatgaaggttagagcatgtaagaactttaagatgtcttttttttaaaaaaaataatgaaaccacatatgcccttgtccttttcttcctttggatttagaatgagaggtacaatcatttatcagagaactttagttagcaagtagtgaagcatctataaaaatatattgccacatatactcttaaagttgctactcttagcatctctatttaaaataaggctatgggaggtggttggcaggatggccgaaaaggaacagttctgatctgcagctcccagtgagatcaacacagaaggtggatggtttctgcatttcctactgaggtatccagcttatctcactgggactggttagacagtgggtgcagcccatggaaggtgagctgaagcaggrtggggctttcagaggaaggaacaggcagcaatctttgctgttctgctgcctctgctggtgatacccaggcaaacagggtctggagtggacctccagcagcctccggtagacctgcagcagagaggcctgactgtcaaaaggaaaac

SEQ ID NO: 707678 - DNA, 894 bp, Homo sapiens
ggtaaggggtcaaaatgacaataactggactattctgactggtgaggcgccaattaacgacacccatcttttaattgtagtttactggtaagatcatcgagaaaggagagctcatgtctactgttttgtaatatatatgaagagaacactgtaaataaccttctcttaatctcacaaaaatccctctcctccccacaccagcatgaaaaatcagcttcatcccyatgcacaatagccaccaaagtaaaacaagcctttctagttgataacgaaagagaatatagtttgctcctgaacttacccaaaagaagtgctgaaaaattgtgaatatataaaattctgataaaccctttctgtatttccagtttaattttatgatgatatcagttcttttgtctttattttctattattgtttactcatccctcagcattttggactttagggtctttgtctcttatgagctggaaaatcatcatttgacacctgatgcttaaataaacctgaagaggagtcattaaaggaatctctccaaaatgctaagactcactgatatatgtatcaaagagtgagatttctaagaattaaacatatccttcttttctttattttattattactttcatcattatgtttgggattctctgatattagtatgtacttattgaaggcagatgcttatattcttcaatattcttcaatctaatgatatatgaagcagcaaagttattaagcatgttcatgaaggagaaatacaagcagtgccaaaacagtcttggaaaatagaattgacctttctaatttttgcaatctatccatctgacaaaggtctaatatccataatctacaaggaatttaaacaaatttaaaaaaaacgttaaaaacttggcaaag

SEQ ID NO: 707679 - DNA, 894 bp, Homo sapiens
ggtaaggggtcaaaatgacaataactggactattctgactggtgaggcgccaattaacgacacccatcttttaattgtagtttactggtaagatcatcgagaaaggagagctcatgtctactgttttgtaatatatatgaagagaacactgtaaataaccttctcttaatctcacaaaaatccctctcctccccacaccagcatgaaaaatcagcttcatccccatgcacaatagccaccaaagtaaaacaagcctttctagttgataacgaaagagaatatagtttgctcctgaacttacccaaaagaagtgctgaaaaattgtgaatatataaaattctgataaaccctttctgtatttccagtttaattttatgatgatatcagttcttttgtctttattttctattattgyttactcatccctcagcattttggactttagggtctttgtctcttatgagctggaaaatcatcatttgacacctgatgcttaaataaacctgaagaggagtcattaaaggaatctctccaaaatgctaagactcactgatatatgtatcaaagagtgagatttctaagaattaaacatatccttcttttctttattttattattactttcatcattatgtttgggattctctgatattagtatgtacttattgaaggcagatgcttatattcttcaatattcttcaatctaatgatatatgaagcagcaaagttattaagcatgttcatgaaggagaaatacaagcagtgccaaaacagtcttggaaaatagaattgacctttctaatttttgcaatctatccatctgacaaaggtctaatatccataatctacaaggaatttaaacaaatttaaaaaaaacgttaaaaacttggcaaag

SEQ ID NO: 707680 - DNA, 2381 bp, Homo sapiens
tggcaggcctcttgtacttttttgtaggttgacttgccaaattacagatttggtccttccaagaagtgtgaccttggagaaaccttggcagatatggcactttaaggatggttacaagttctttgactttctttccatcaggagattggatgggggtgggacgtctatggccttttgccttgaaaatgtgtggctcagtgactgctttaacagtagaaaatggcggaaataatattgtactacctgttgagctcagcctttaagaaattagcaggttctattctggttcttagaaaactttctttaagagccctaagccatgtgagaaatgcaactacctgaggcctcatgccagagaggccagcatgggtgctctggtccatggccccagctgagcccagcctgccagtcatccctgccagtgtgccagacacgggcatgaagccgcattggatcctccgcacaacatatctgccagccaaatacctgagcaacctcaatcaatgccgcatggagtggaaaaatcacccaggtgagtcctgcctgaattcctgatacacaagatcttaagatataataaaacaagtcccgctttaagctgctaacatttgaattgatctattacacagcaataaatcatggaaacatcaggtacatagcattctaaatcactgaccaagatgatgctggtattttttttctttttctttttctggttttttttttttttttttttttggagacaaagtcgtgttttgtcacccaggttggagtggcataatcacgactcactgcctcaacttcccaggttcaagtgatcctcccacctcagcctcctaagtagctgagactacaggcacgcaccactacacccggctaatttttgtatgtttttgtagagacagcgtttcaccatgtttcccaggctggtcttgatctcctgaactcaagtgatccacctgccttggcctyccaacgtggtggtattttcttcataattgtttaatgaatgctgcaactaagtgtcccaaaatgtattgccaatttaaatatgtagttcaaacttcactgagaaactaagaggctaagttctctttctgttatctgcctggacataaagacgtatgtttggagatggcagcctttttttctgttagatgagtagatatggagagtgccaggcactcttctttgtgttttctcccctcttttccctttcccttggattatagtccttttgatccaacttatatataaccttatagaaacgaatagagggttaaaagctgtggtgtttggggcctccttccctcctttcagaacacagtgtaatcctaggacttacgccatttaccctttgggagatgtatctctccacaaggacagagggttagattttcaattcttggggacaataagtttattcatttgaagcaaagctccaaaaatctgaccttgctaagaagatgctattatccgatctccttccactggggagaaatcacttttcaataaaaaatttctattgtttttacaaagagagaatataatttttactaaattacaatgaacatgatgtagactttatagaaggaaataggattgagaaattatccctaaatgaaatcagacaatgcacaaagagaacataacttgtgcatacagaggctttgttcctgtgagccttgctattgtaaaatctcacgtagtcaaagaagcaaagatacttcaagcagaatcctgagaattcttgtaatttgctttctaattctgcattccctgcccttccctggtgtgcttttaggtaagcatggagaagatgaatgaacacgcagggaaatagaacagaaatggtaactacactgttcacaagagtaactcaatcacactttcttatgtgcattagaattatagagatgaagagggatttcattccaatccctcttttactcattaggtaaaaggaggcacagagaatttaaatgacttgttcagaatcacatagccagtttttgttacattgggattagaaaaccagcaattgtttgtactatgactacatcaactcctactttaataacaatatttatcctttccagagtatttgttgacctctatctaatatagggtactgtgccagtcattggttatgaggagctgaataagacagagacagccctggcatcatggaacttactcaaagcaatctggtgggacagtaaaaaatggtactattcaatgcggtatggtgctcataagatgacaatcaaattaaacttttcttagcatagtcttacttattgaactgatgggacagccagcatagtttcctttaggatactctgattccctaacattctaaggggagaaaatttactctt

SEQ ID NO: 707681 - DNA, 577 bp, Homo sapiens
atttatgtaggggttccctgagatccacaatgttttttaagggttcttccagtgtacaaatttgagaaaggctgatctaggcatatcaggattattttactcaaagcatttcgtagaaatcactacacagcaaccttaacaaatcctttggctaggtgcggtggctcacacctgtaatcccagcattttgggaggctgaggcgggcggatcacgaggtcaggagtttgagaccatcctgcccaacatggtgaaacccagtctctactaaaaaaatacaaaaattagccacacatggtggcccatgcctgtaatcccagctacttgagaggctgaggcaggagatttgtttgaacccaggaggcagaggttgcagtgagctgagattatgccactgcactccagcctgggcaacagagcaagactctgtctcagaaaaaaaaaaaaawaaaataaataaataaataaataaataaataaataaaaaataaacttaaaaaaaagtcctttgtttatcctccagctagtaaactcatcattcaagatttacaatggttccaaactttctcagttttctga

SEQ ID NO: 707682 - DNA, 577 bp, Homo sapiens
atttatgtaggggttccctgagatccacaatgttttttaagggttcttccagtgtacaaatttgagaaaggctgatctaggcatatcaggattattttactcaaagcatttcgtagaaatcactacacagcaaccttaacaaatcctttggctaggtgcggtggctcacacctgtaatcccagcattttgggaggctgaggcgggcggatcacgaggtcaggagtttgagaccatcctgcccaacatggtgaaacccagtctctactaaaaaaatacaaaaattagccacacatggtggcccatgcctgtaatcccagctacttgagaggctgaggcaggagatttgtttgaacccaggaggcagaggttgcagtgagctgagattatgccactgcactccagcctgggcaacagagcaagactctgtctcagaaaaaaaaaaaaataaaawaaataaataaataaataaataaataaataaaaaataaacttaaaaaaaagtcctttgtttatcctccagctagtaaactcatcattcaagatttacaatggttccaaactttctcagttttctga

SEQ ID NO: 707683 - DNA, 603 bp, Homo sapiens
caaaacactcaaagacagtaggtaatgagacagacaatgcattccaaccactagtctctcctcaaaaatactaattaacatcctcaaacacttctcaaaagtcttacttttaagaacctaaaaattatgaacctctgtatattgtctgaattagctttatccatcattatcatctaatcataaatcactcttccaataaaagtataaagcagtagccaatactgtaatgtttctaagatgttaacaaaygcatcttaaatgggtcctatatttcatgtaattatcttgacactatgtctgtatgggactgacaattctattctaaataattaactaaggaaggaatgggccagcttctaaggccactcaacatcaaaacaactcattttgaattcccctagcccttgtctctaatgacacttcactctccttaattatgtgcttcctttcatagctcttctgtcttgaaagggcagttaccatactttaaatacaaaaactcatgactactatagatttctttttttgtttgttttttacagttttcaaaatgctttcacatacatttttcacttcaaacttctgtcttccttccatctccta

SEQ ID NO: 707684 - DNA, 1860 bp, Homo sapiens
taaaaatgtttgtgttcttttaaactattaaatttgtgataatctgttatagtagcaacagtaaactcatacaagtatttattgcatatctcatttaatcctttcaacaatcttagaagaaaggaactatcattttctttaaatcacagatgggaaattaatgtctggagagataaagtgatctacacagggttacataactggtaagttaagggacaaggtctcaaaggaagaagaatttaaaaaccagtgctcttagaactgatccctaaattattttgggggtaaaagagtattattccttttcttttttctcttcttttttttaacttttattttaagttcaggggtacaagtgcaggtttgttacataggtaaacttgtgtcatgggggtttgttgtacagattatttcatcacccaggtattaaacctagtacccattagttatttttccttctcctcctcctcctcccaccctcccccttccaaaaggccccagggtacaaccctctatgtgtccaagtgttctcaacatttagcgtccacgtataagtaagaacattcagtgtttggttttctgttcttgtgttagtttgctaaggataatggcttccagctccatccatgtccctgcaaggacataatcttctgtttttatggattcataatattccattgtgtatatatactacattttctttatccagtctatcattgatggacatttatgttgattccatgtctttcctattgtggatagtgctgtaatgaacatacacatgcatgtgtctttataacagatgatttatattcatatgggtagatactcagtaatgggattgctgggttggatggtatttctgtctttaggtctttgagaaatygccaaactgtcttccacaatgactgaactaatttacattcccaccaactgtgtataagtgttcctttttctccacaaccttgccagtatctgctattttttgactttttaataatagccattctgattggtgtgagatggtatctcattgtggttttgatttacgtttcttaagtgatgttgagctttttttcatatgcttgttggctgcatgtatgttttcttttggaaagtgtctgttcatgtcctttgcccactttttaatggggtagtttgtgggatttttttggtaaatttgtttaagttccttatagatgtaaaggcataaaacacataccctgtctttggtactggttttttgtaaaacgtgaacactatgattagcttgaacgaagaatcttttcctgatatttgcagagtttaattccatcttgtaaagggaaagacatgttttcatacatttatacatgttctttcataaacaccttaagatataatatttgatttccaattaagttgtaatcatgcctacaatgctttccagcttctttctttcaaagctccccatttactagctgttgtccatttctcccgctttctcttttcacacttcacaccttccactctgagagtcagccaaatggaacaactttttgttccttaaatgggtcatgctttctcttactttttactttttatttttttccttagtcttgtgcatgctgtttgctctgatagaacacattgttcacttctctgtttctactcatttttcaagtcttagatttttgtcattaactttttcggggaattttattcttctaatcctccctacaccccagcacaggctgcgagtatttctattgcatttgtactgaaactttcatcagaatttatttcactcttgccttgtctacatctctctctgggctgaaagctcctaagggtaggactgtgttcgttcactggtaaata

SEQ ID NO: 707685 - DNA, 593 bp, Homo sapiens
ttaaagtgtctgtagagattgttgagtaatctaaaatttgcctgtttacattgccatatttagagaaatccaagttcagtgagatgaataggaaagatatgctcaagttactgtacttcaaatrtatactgatcttctttcacttgttttcatctaagcctacatttgtcttcttagagttctaaggtaaggaaccagaattactctcagtaatgttgaaagtgagatttaatagtgtggtatggatagttgcaataggaaaagacttttaagtaatgaggaaaaaatgtcaggtaagactcaacttctcctttttctcatattacataatcaaggaaaggtttaatatcagctggatcagaaattcagtaatactcactttcagaagaaagtggtatattgccatgtgatgcattcaaactgcataactttcaggattcacgcagtaggaactaagaataagactacagaatagtgaaagtatcattcacaaacaaaatgctgagtaatttggaaagacaaatatgtctataactagtacagtctgacaagggctgttatgatatacaggtatagatcaattagaaagagca

SEQ ID NO: 707686 - DNA, 596 bp, Homo sapiens
tgccacatccacagagaagctctccctgaacacyttccttaaattagcctcttctcatcatgctcaactataacactatttcacttcctttatagtattcattcctatctgaggctcactcacttatttatccattcaccattgcatactttccaacataagaaacgttacaataaagtttcttgcatctttttctttgccatttatcaaattatttctagagcatgtatttgccacacatcaacttgtatattaaagtctatgctgcattttttctttcactcattttgctatcctttcacagaaagattttactaacgtgtgtctataccaacagtatgtgtgctacagtttgaatgcttgtgttcctccaaaattcattttgaaacagaatctctaatgcagtagtattaacaggtggggctttttaggaggttatcaagtcatgagtgctcttctctctgaatgcgattaatgcccttattgaagaaagaggcttcacaccgtgttcagccctgtagcccttttgtccctgccaccatgtgaggacacagggttcctcccctctggaggatgcagcaacaaggaaccatctt

SEQ ID NO: 707687 - DNA, 639 bp, Homo sapiens
tagtatagaatattttacatatgtacacagatctatatttacacatcccagactcacattcaaaatgcattctatgttgagcaaattattcaaattcaaacccatacatagaggtaatattggctaaaataaaaataattttgtagtttcaaaatacttctgaaataaatttaattcaataacagaaatgaatcattatttccttagcttgattaaagaggtatcaaagagcttatttcattttaattccagaaaatttagtgattactgaggaatgttcttgacatatgcagtttttatacaaatgttgacttatgagtggcatatttaatattttggcctctctttattacttctcatcattatgattttgaaaaattccctaatggggcataaatttgctagtgtctgtcaatacgaaaaacagtcattaaacaataacaaaggccatgactttccctcttctcaactatcatatctcctaaacagaaatttgatgcagctgatatatttgtattaataacatctgctgctttcatcattaaattctacccacyggttaatgcctggagctgcaaaattatgagaattagctgaaggagtctcaaattaaagaataaaatgaaaactttgaaaaca

SEQ ID NO: 707688 - DNA, 605 bp, Homo sapiens
tcagatttcatgagaactcactcactatcatgaaaacagcatggaggtaactgcccctatgattcaattatctcccaccaggtccctcccacaacatatgggggttatgggaactacaattcacaatgagagttgggtggggacacagccaaagcatatcaataagtatatataacatatatatgtattttttgtttgyttgtttgaatcactagttatatgttcaatgcaaacattttaaaagaagagctgcacactggaaaaaaaaaatacccctgaaaatatttaatgtaaataagtccttgagatggtgctttttacaaaagtttatcagcaaatgccctttttttgtaggggacagggcagcaggagaatagggacaggatatcagacaactgatttttactgcaataagagcaacaaggaatctcaccgtcacatgccatctactttatgtaaaaaccaatccagcagaacgagcaacagtcaccctcaggaggtgatttagccccaagtacccagagaacagcctcaggccacgacttctgtgctgcttcactgtgcccagaaccatctgccaagaccaggaattcatctttggagta

SEQ ID NO: 707689 - DNA, 827 bp, Homo sapiens
ttactttttgtatttttatatttttttacttttatatttctattaaaaatcaaaataatttacagagcttcttttcacttacgtaaaatttcatcgtcttatgaaaatgtagtttgttttctcattaggaggagacaaaactaaagcaggaaataataagaattaccagcgttggcctctgttgtttaagacacagaaccatactgagtgttccaaaagggaagcataaaatagtgaggaaattaatgttccataggtctgttctatgaggatcctaccttgaccctaacacatatggtgtaggggttcagtaaaaagcaagagccttcctgagaaagaaagaaggaaccaattctagtgaacatagagagaaagcaaatgaaatcatcctggtctcatctgtgttgaccctactttatcagtttgcactgagcataactatgggtttttgatagaagtatcagaaacattaatcagtcatctatcatgtaccatatacttcaaataatgttctcaaactgatgagctcatattatttattttaattatgaaatacttggattatattatctgtgcacattgtgtggtttaggagagatttataaagacagtgccccccaaaaacaatgagtgagacgaaggactatagttwttttttaaaaaattattaacctggatgcaggaatattgtgctactttaaattttgttttgttttattttattaaaagagagaaagggccaggagcggtggctcatgcttgtaatcccagcacttttggaggctgaggcaggtggatcatgaggtcaggagaccgagaccatcctg

SEQ ID NO: 707690 - DNA, 644 bp, Homo sapiens
atgaagatgaattgatctaaaatattggacaaaataataatacaataaatatgttaatgatcacaaaaacgtaataatgtactagggggcaaaatgaattatagaagaagagaatgcctcccaaaatccagtatctccttatctcaaaactgagcaaaagccaaagtcatatatgagtgacagtaagagcattagtaaattatatggacttcctccatcttcacatgagttttaaaaagatgaagaaaaattttatagtgtcaattaggaatatagcaatgaccaaaaccaaaatttactagctaagaagtgaagaaataaaaaaggaataatattaaaatttttaaaaacttgttgattctggccacagtaaaatgcrtagctaaaagtagaagaatggaaatgatctgaagccttaagccttaatgaagataacatattaaacaaataacataatgttttgtttatttgtttgtttgagacagagtctcgctccaggctggagtgcagtggcgtgatctcggctcactgcaacctccagctcccaggttcaagcgattctcctgcctcagcctcccaagtagctgggactacaggcgcgtgccaccacgcccagttaattttttgtacttatagtagagaca

SEQ ID NO: 707691 - DNA, 652 bp, Homo sapiens
aggatcacttcaaggcagcacgcctctagttaagatgcatttgcagtgacagggaaatgccaggtttctgatacagatttttttatatataattattacagatattttatatatatatatatataattatatatgtacatatatataattttgtagacagacatcttcagrgataattcttttataaaatgaaatagcagtattttagtattatattgatatatgtctatgattgaaaaccacgttgaaatattgaatgatcaggcacctgctaatttctcatcagaactctttgagaaagtagtgggaataagtataatttagatgatgcaacattgagtaatcagtatgagaacagcttgtaaactgatgacattggcttgaatttggctgataaaaaattagaaaaataactatacttttcctattgtaccattttttcctctcaagcagaataatatttcttctgcacctggaaccagacttctgaactcatttcaagtgactgaaccattattgagatattaaaacaggtgttactaaacctaccagttattaggttttcttcatatatctataatttttaatgtacaaatatttacttatttgtgtgttatgcccctttactagattatcatttctggaatattca

SEQ ID NO: 707692 - DNA, 652 bp, Homo sapiens
aggatcacttcaaggcagcacgcctctagttaagatgcatttgcagtgacagggaaatgccaggtttctgatacagatttttttatatataattattacagatattttatatatatatatatataattatatatgtacatatatataattttgtagacagacatcttcagagataattcttttataaaatgaaatagcagtattttagtattatattgayatatgtctatgattgaaaaccacgttgaaatattgaatgatcaggcacctgctaatttctcatcagaactctttgagaaagtagtgggaataagtataatttagatgatgcaacattgagtaatcagtatgagaacagcttgtaaactgatgacattggcttgaatttggctgataaaaaattagaaaaataactatacttttcctattgtaccattttttcctctcaagcagaataatatttcttctgcacctggaaccagacttctgaactcatttcaagtgactgaaccattattgagatattaaaacaggtgttactaaacctaccagttattaggttttcttcatatatctataatttttaatgtacaaatatttacttatttgtgtgttatgcccctttactagattatcatttctggaatattca

SEQ ID NO: 707693 - DNA, 652 bp, Homo sapiens
aggatcacttcaaggcagcacgcctctagttaagatgcatttgcagtgacagggaaatgccaggtttctgatacagatttttttatatataattattacagatattttatatatatatatatataattatatatgtacatatatataattttgtagacagacatcttcagagataattcttttataaaatgaaatagcagtattttagtattatattgatatatgtctatgattraaaaccacgttgaaatattgaatgatcaggcacctgctaatttctcatcagaactctttgagaaagtagtgggaataagtataatttagatgatgcaacattgagtaatcagtatgagaacagcttgtaaactgatgacattggcttgaatttggctgataaaaaattagaaaaataactatacttttcctattgtaccattttttcctctcaagcagaataatatttcttctgcacctggaaccagacttctgaactcatttcaagtgactgaaccattattgagatattaaaacaggtgttactaaacctaccagttattaggttttcttcatatatctataatttttaatgtacaaatatttacttatttgtgtgttatgcccctttactagattatcatttctggaatattca

SEQ ID NO: 707694 - DNA, 652 bp, Homo sapiens
aggatcacttcaaggcagcacgcctctagttaagatgcatttgcagtgacagggaaatgccaggtttctgatacagatttttttatatataattattacagatattttatatatatatatatataattatatatgtacatatatataattttgtagacagacatcttcagagataattcttttataaaatgaaatagcagtattttagtattatattgatatatgtctatgattgaaaaccacgttgaaatattgaatgatyaggcacctgctaatttctcatcagaactctttgagaaagtagtgggaataagtataatttagatgatgcaacattgagtaatcagtatgagaacagcttgtaaactgatgacattggcttgaatttggctgataaaaaattagaaaaataactatacttttcctattgtaccattttttcctctcaagcagaataatatttcttctgcacctggaaccagacttctgaactcatttcaagtgactgaaccattattgagatattaaaacaggtgttactaaacctaccagttattaggttttcttcatatatctataatttttaatgtacaaatatttacttatttgtgtgttatgcccctttactagattatcatttctggaatattca

SEQ ID NO: 707695 - DNA, 625 bp, Homo sapiens
gcatatctagggagatgtcatcctcacattattctctacagtgttctttcgaatgacttactttgctggaaagtctattatctatggtcatgtgagtttatttttctctctaagtactactttatctgtttgaatcctttttctatgaagttgatacagttagttgacaatgtaaaagcaaggaaagaagtgagtggtaaagaagaaaggacaaagaaagaaaaagtgaaaagaaatgagagaaggaaggtcaaagcaatgtgattttgtttttttggaagaaagattggcttcttaaatgaaagcaggtatgaaaatactcactatatttgacattattgttttgatcagaygtcacataaaatccaaaatatgcccaagattaacacattaaatagtcgcccgctgtgcttaattatgttattgtccccagttattgactgccttccctataaggaaattacacctttttgctaaatcctatatgccctgcatggactcttgatggcataacttttctccttctctttgacatcatattggaccttgtgatttgctatggccaaagaaaggtgagcgctccaaaagaaatggtaaaatcctttttctagctctggcattgctt

SEQ ID NO: 707696 - DNA, 625 bp, Homo sapiens
gcatatctagggagatgtcatcctcacattattctctacagtgttctttcgaatgacttactttgctggaaagtctattatctatggtcatgtgagtttatttttctctctaagtactactttatctgtttgaatcctttttctatgaagttgatacagttagttgacaatgtaaaagcaaggaaagaagtgagtggtaaagaagaaaggacaaagaaagaaaaagtgaaaagaaatgagagaaggaaggtcaaagcaatgtgattttgtttttttggaagaaagattggcttcttaaatgaaagcaggtatgaaaatactcactatatttgacattattgttttgatcagacgtcacataaaatccaaaatatgcccargattaacacattaaatagtcgcccgctgtgcttaattatgttattgtccccagttattgactgccttccctataaggaaattacacctttttgctaaatcctatatgccctgcatggactcttgatggcataacttttctccttctctttgacatcatattggaccttgtgatttgctatggccaaagaaaggtgagcgctccaaaagaaatggtaaaatcctttttctagctctggcattgctt

SEQ ID NO: 707697 - DNA, 625 bp, Homo sapiens
gcatatctagggagatgtcatcctcacattattctctacagtgttctttcgaatgacttactttgctggaaagtctattatctatggtcatgtgagtttatttttctctctaagtactactttatctgtttgaatcctttttctatgaagttgatacagttagttgacaatgtaaaagcaaggaaagaagtgagtggtaaagaagaaaggacaaagaaagaaaaagtgaaaagaaatgagagaaggaaggtcaaagcaatgtgattttgtttttttggaagaaagattggcttcttaaatgaaagcaggtatgaaaatactcactatatttgacattattgttttgatcagacgtcacataaaatccaaaatatgcccaagattaacacattaaatagtcrcccgctgtgcttaattatgttattgtccccagttattgactgccttccctataaggaaattacacctttttgctaaatcctatatgccctgcatggactcttgatggcataacttttctccttctctttgacatcatattggaccttgtgatttgctatggccaaagaaaggtgagcgctccaaaagaaatggtaaaatcctttttctagctctggcattgctt

SEQ ID NO: 707698 - DNA, 552 bp, Homo sapiens
ctggttacaaatggagacctataattcaatatgtcatttttagttaccttttactaaaattaaatttatttatatgtaggaatctaatctacattattttgttttctgccaaatatctgagcagtatatgttgtctcatcatcacattattgaaacaatgcagaatgctatagtgactgacaytggaagaagtgatttctgatcaataaactgccaaaatgaacaccttcttgagcactacatgaaagcaaatattccaaatgtcagcattttatatacatgtgccttttgcttaagtatatacatagatttgttctttgtgcgtccattctgtaatctccgaggtaaaaattgtgacaaattagaattttcaataaaatattttaataaaataggccagacgcagtggctcacgcctgtaatcccagcactttgggaggccaagacgggcggatcacgaggtcaggagatcgagaacatcctggctaacatggtgaaaccccgtctctactaaaaatacaaaaaattagctgggcgtagtggcagacgcct

SEQ ID NO: 707699 - DNA, 552 bp, Homo sapiens
ctggttacaaatggagacctataattcaatatgtcatttttagttaccttttactaaaattaaatttatttatatgtaggaatctaatctacattattttgttttctgccaaatatctgagcagtatatgttgtctcatcatcacattattgaaacaatgcagaatgctatagtgactgacattggaagaagtgatttctgatcaataaactgccaaaatsaacaccttcttgagcactacatgaaagcaaatattccaaatgtcagcattttatatacatgtgccttttgcttaagtatatacatagatttgttctttgtgcgtccattctgtaatctccgaggtaaaaattgtgacaaattagaattttcaataaaatattttaataaaataggccagacgcagtggctcacgcctgtaatcccagcactttgggaggccaagacgggcggatcacgaggtcaggagatcgagaacatcctggctaacatggtgaaaccccgtctctactaaaaatacaaaaaattagctgggcgtagtggcagacgcct

SEQ ID NO: 707700 - DNA, 1239 bp, Homo sapiens
gataatttttgtatatttagtagagttgcggtttcgccctgttggccaggcttgtcttgaactcctggcctcaagctaaccaccagcctcagccgcccaaagtgctgggattacaggcatgagccaacacacccggctgagccactaaaagaatttagataagggaaaagatacagtcatggccaaatgctttgtagagggaatatctcttcctccaatggatgtttcgaagacggtggttgttggggtattcggtggctaattcttcagtgtgaattattgcagaaaatgacctaagtcaaatgttgaaagaaaatatgggcaacaagttactgacaaatctgagagagtgaactgaaaaggaaggaattaaaacaactgggctataattcatttctcccccagttactatggattggatgctctgggcaaagaaggcaagttctagtcttctagtcttgcaaaaatgatagctgaacctctagacaagcagtctaacaaagttggttaggagaaaattcctcatctgttgaatgctttgagcactgattttcctattttagaattgtctgcgataaacaaacttatactatgtgaatttatgggacatggttccttaaggaatgttacataagtaaacaactatctggggaaaaaaaaaaaggaaaatatgaaataacttaagaagcctgtcctgttgggtgacctataatcctcatttaaagatctcttttatttgagtctgatagcatgtgttccaatgggaacacagcatgtgtccaatgtgagaaggaacagcttgtggagtcaggaggatgtgcaaagcctctctctgaattttgtttgtttgcatccgtgtaattgtcagtaaagctcactactgtgaaagtctctgatttgtgtgttycctattagacaatcagatctctgtgttagattagttttctgtttttttatgcacttaactacaaatgatttttgtaatctttgaatgaaaactttttcatctcaattcattgttaaattggtttatagttttaacttctacaccagcttttaaaatttggcaatgaatttgcatcatactcataaaaggaattgagaaacactttctatttttctttaggtttaagtatgtttaaaataacataagttagataagaactttagcatatatccattatgttttcttatcactcacttagtatgtaaaataatacaaataatttgcaattttgg

SEQ ID NO: 707701 - DNA, 669 bp, Homo sapiens
taggaaaaaaaaatggctaygatggacagtggaaggtttgaatttagttacatttcagtgatggaattatcaatccaaaagacatgtaaaatcatgtaacgtacaaattaagtaaactgggtgggggagaaagcaaaaaatgaaaaactatagcaaaaaatggaagagtaaaatattttcagaaaacacatactagataaaaagaagacaatggagagagaacctatacaatggaggtgcgacataattaatatcctggacagaaggaaacggctgtgtcagggtcacctgcatactgggacaggcagagtgaagaaaacagtggaagctttttcttctttcatttgttaaagttagctgtttagctttataaagatatccctaggaatatgacattgtaacttttctctggctttgtgctttcttagatactaaattctgccttgtggtgacgaaaattaatggcataaatgcattcataaaggaagttattaaagagttatgtgactgaattacaagtaaggattattatacttgcaagttcataatgtaaatttttaaaaaaaaaacataatacagaaagggcgtgacttctaaaaacacagtcccgagaagagttgtacaattcataaggatatctaagctgtgtataagtagtttgtgtaagtg

SEQ ID NO: 707702 - DNA, 612 bp, Homo sapiens
taattgcttaggcaacttaagatcttgaaaatgccaccttacattaaaatgtgtattttacacattttcttataagccgaggtaataattatatggtaaatagtgagtacaagaaaaagagataaaattaccattgatttagttttatagaaagaactgcatacaccatattcatatttaatgtgaagctctctgttgcacctctttactgcaaattacttcaggtagtttgtgagaacacctgctgatcttgaacaatgaaattatcagctatctgctttaaaaaggctttcaactaccagctctgaagtgctggttgttcatttgccaattatatggtattcacagttccatagattcaaagacactatatccctctattatagaattacctcaattagaaggtatgagctgaattaaaatatctttatcatttaagcccaaatttactgtcttttaagagattattttcatttgtctcctttaaaatttaatttagccaattggagaatgaaatcaaatgacagaagtcatttattgctattaatcatcatttctaaatgtcttgtaatgtggagaacattatctaggtatatayacacataagaattg

SEQ ID NO: 707703 - DNA, 640 bp, Homo sapiens
tataagctaaattttgggatctattctgtatgtttgtatgtctgcatttgtatgcttattcttgtctcccctgccgccctttccatctctctttctacatggataggtagatagataagcagacagatagctagacccattataacattatattagcagttaaaggagaggagattttaaaaagcttatgaaagagtaattaataatgaacccctggctatgccaggaaatctagtgacaaattggctatgtagaaagaacaggtaacaagccattattgatgctgattagttgtcacaaagaaataaacatgaagcttagtcattgataagtcyattaaaaggtaagtgtttgtaagaaatatgaaaacgctttacagactaaatatattggaagaaaaattggagaaaaatgagcgagtctttagagaaaagaataggggtggagctgcctgtacaactgaaattgcactgaccatgaaaaccattaatagaaaattggacaaggaaaatttaggagatggaagaaacgattatttttaataaatgatttcaaaattgttataccatttaaaaaatgtttgagatactaatttgaaatttctagtccaaagacccgaaagagttaatatatgtaggga

SEQ ID NO: 707704 - DNA, 837 bp, Homo sapiens
ttttatgctcagcactatatatatatatatatatatatatgtttatgtatatgcccagaattgtgtacacttcggtcgcgtgaatcataactaaggcattcaagacaaagccctgactcttaccagagtctaacctctggttatcactcaatgtggcagtttaagtgaagaaggacttacgaaaataagaccagacaggaagggcagcactcagcagaatatctctgtgttcaggtctccaaagatacatgtgatatcactaatcaacatgatatttacctcatgaaattatactaaatattagataatgactgtgaaattattactggaacattagtgttttaaaaatatttctaattgtaaacataggtggagttaggttgccaggacactgtaatagcatttgttgataaatgtaaacccagaattttaaaataagaaaattatgcatatagcaattgttacaaattatatttactcttattttaagtggtaactggytggagaaacagagatatgtatgctttttaaaattcctctttgaggtcagtaggaagacagattgaatctctattagaaagcagcaaattttcagccgggcacagtggctcacatctgtaatcccagcactttgggaggccgaggcgggcagatcactaggtcaggagattgaaaccatcctggctaacacagtgaaacccccatctttactaaatatagaaaaaaattagccgggcatggtggtgggcacttgtagtcccagctactcgggaggctgaggcaggagaatggcgtgaacccaggaggcggagcttgcagtgagccgagatcatgtca

SEQ ID NO: 707705 - DNA, 837 bp, Homo sapiens
ttttatgctcagcactatatatatatatatatatatatatgtttatgtatatgcccagaattgtgtacacttcggtcgcgtgaatcataactaaggcattcaagacaaagccctgactcttaccagagtctaacctctggttatcactcaatgtggcagtttaagtgaagaaggacttacgaaaataagaccagacaggaagggcagcactcagcagaatatctctgtgttcaggtctccaaagatacatgtgatatcactaatcaacatgatatttacctcatgaaattatactaaatattagataatgactgtgaaattattactggaacattagtgttttaaaaatatttctaattgtaaacataggtggagttaggttgccaggacactgtaatagcatttgttgataaatgtaaacccagaattttaaaataagaaaattatgcatatagcaattgttacaaattatatttactcttattttaagtggtaactggctggagaaacagagatatgtatgctttttaaaattcctctttgaggtcagtaggaagacagattgaatctctattagaaagcagcaaattttcagcygggcacagtggctcacatctgtaatcccagcactttgggaggccgaggcgggcagatcactaggtcaggagattgaaaccatcctggctaacacagtgaaacccccatctttactaaatatagaaaaaaattagccgggcatggtggtgggcacttgtagtcccagctactcgggaggctgaggcaggagaatggcgtgaacccaggaggcggagcttgcagtgagccgagatcatgtca

SEQ ID NO: 707706 - DNA, 598 bp, Homo sapiens
aaaaaaaracagaaatcagaaataacaaatattggtgaggatgtgaaaaataaggatttttaatatgttgctggcggaaatgaaaactgtgggaattttggaaaacagtctcttgaatgacaaactagtcggtgggggctgaaactacattttatggacaacgtgtggaaaaaaaatgcgaccatcaaaaaatgtgacttacatgtaaattcatggtgcattttgctaaaaatgatggtataaatatttgaaacattgtttattttattgatctaacaaatgttcatagacaaattttagaacaaaacgcaatttgtaaatgagaactctgagaactaacagatttactacttcaaagaacaatgttttctgtgattcagatccattccccaaaaagtccaaagttgaaaaccaatataaatgaaaatatataatttactaaacaataatttagccaaatatttacatttattataatgaatagaaggaaaataaagtatcattagaaaacaatcagaaataactctatgagaactgtcttgaaacttttgttgtgcaatggatatagaaatagtgtaacataaccctcaaaatgagg

SEQ ID NO: 707707 - DNA, 526 bp, Homo sapiens
caccagtgaatgtgtaagaactctagaatctctgacactgtctgctgtgaatactcaatgatagttaaaaagttgctactgacagggtggaagcctgcagccagtcaatcaatgagtagtattttggagccttacttagctaaacttaacaaatatgtgaatagctgtggtgagttttttgttacacgttaggattgaggtttgactgctctcctgttttccccagaagcccaggacaatgaagtcactggttatttgcacatttgcaccatttcactacttattaaaagtaacaactgaaatttgtattattccttctgttcataagttattttcccatgttatcttatttgaaactcaaaacaatgttaaggagaatagaattattcttgcaaatttagagatgagagaaaacaagcctcaggatgctccagtgctgtaactaaaatcacagaaccagtaasaggccaaggggaaacttggtgcctgtcttgttgttcttaacctggagtcaggaatctttcag

SEQ ID NO: 707708 - DNA, 580 bp, Homo sapiens
catgcacacctaagtcccatgcacatctgagtcccatgcacacctgggtcccatgcacaccggggttccatgcacacctaagtcccatgcacacctgggtcccatgcacacatgcacacctgggtcccatgcacacctgggttccatgcacacctaagtcccatgcatacctgggtcccatgcatacctgggttccatgcacacctaagtcccatgcacaactgggtcccatgcayacctgggtcccatgcatacctgggttccatgcacacatgcacacctgggtcccaagcacacatgcacacctgggtcccatgcacacctgggttccatgcacacatacacacctggatcctatggacacctgggtcccaggtgcacctaagtcccatgcacacctgggtcccaggcacacctgagtcccatgcacacatgcacacctgggttccaggcacacatgcacacctgggtcccaggcacacctgggcaagctgctggctgcagtgcaggcagtgatgacaattctcctaaccaaagacccgctggcaccagcctcgtacttgatgatccttcaactctt

SEQ ID NO: 707709 - DNA, 580 bp, Homo sapiens
catgcacacctaagtcccatgcacatctgagtcccatgcacacctgggtcccatgcacaccggggttccatgcacacctaagtcccatgcacacctgggtcccatgcacacatgcacacctgggtcccatgcacacctgggttccatgcacacctaagtcccatgcatacctgggtcccatgcatacctgggttccatgcacacctaagtcccatgcacaactgggtcccatgcacacctgggtcccatgcatacctgggttccatgcacacatgcacacctgggtcccaagcacacatgcacacctgggtcccatgcacacctgggttccatgcacacatacacacctggatcctatggacacctgggtcccaggtgcacctaagtcccatgcacacctgggtcccaggcacacctgagtcccatgcacacatgcacacctgggtyccaggcacacatgcacacctgggtcccaggcacacctgggcaagctgctggctgcagtgcaggcagtgatgacaattctcctaaccaaagacccgctggcaccagcctcgtacttgatgatccttcaactctt

SEQ ID NO: 707710 - DNA, 637 bp, Homo sapiens
tgataaacaataactctcaagcactgctggtggaatatgggagtataaatttaaaatactaccctggaaagcaaattgttcatttttattcatgttgaatatgcacatttaccaaataattccacttccatgtaaccagaaaatgcacagctgtatacagtgctgttttgtaatgaggaaaaaaaatcaacagagaaatgaataaagtatttactgacaaaaaaaaaaaaaaamaaaactgaatgcctttaacagcacccaggttatctcttgaattctttgctgcttagaaatttcttccaccagttaccctaaatcatctctctcaagttcaaagttccacagacctctaaggcaggggcaaaatgccaccagtctctttactaaaacataacatgacaagagtcacctttgctccagttcccaacaagttcttcatctctgtctgagaccacctcagcctggactttattgtccatatcattatcagcattttggtcaaagccattcaccaagtctctaggaagttccacactttccctcattttcctctcttcttctgagccctccaaactgttccaacatctgcctgtaacccagttccaaagtcacttccacatttttgggtatcttttcc

SEQ ID NO: 707711 - DNA, 637 bp, Homo sapiens
tgataaacaataactctcaagcactgctggtggaatatgggagtataaatttaaaatactaccctggaaagcaaattgttcatttttattcatgttgaatatgcacatttaccaaataattccacttccatgtaaccagaaaatgcacagctgtatacagtgctgttttgtaatgaggaaaaaaaatcaacagagaaatgaataaagtatttactgacaaaaaaaaaaaaaaacaaaactgaatgcctttaacagcacccaggttatctcttgaattctttgctgcttaraaatttcttccaccagttaccctaaatcatctctctcaagttcaaagttccacagacctctaaggcaggggcaaaatgccaccagtctctttactaaaacataacatgacaagagtcacctttgctccagttcccaacaagttcttcatctctgtctgagaccacctcagcctggactttattgtccatatcattatcagcattttggtcaaagccattcaccaagtctctaggaagttccacactttccctcattttcctctcttcttctgagccctccaaactgttccaacatctgcctgtaacccagttccaaagtcacttccacatttttgggtatcttttcc

SEQ ID NO: 707712 - DNA, 1292 bp, Homo sapiens
gggaatggggacatgggcatcctttggagggtggttcagctgagcatgggatcatgatacaggtcctgtgtataaaattcaaatacttggcaggtcgggcacagtggctcacacctgtaattccaacacttagggaggccaaggtgggaggatcacttgagcccaggagtttgagaccagcctgggcaacagagcaagaccccatctctacaaataatttttaaaaattagcagcgcatggtagcatgcacctgtagtcccagctactccagaggctgaggctggaggatctcttgagcccaggagacggaggctgcagtgagctatggttgtgccactgcactccagcctgggggactagctagaccctgtctcaaaaaataaaaatttaaaataaaatacatagagaatctcaaggtggtgtggacagttctgagtgttggggagagaacaaaagaaggaaagtgcattttgggtggcagaaagcccctaacagagccttgggcccctgctttgaagcagccctcacagaaactgaccacgagttatgttgggcccatgacactggttccctgggtggacacagcctgagcccagcccgccctgtctggagctctcaccaccctgcctggcccgtgcccatgggctcacaatggcttcaaccccatttatgtgtcagctcaagcaggcctccccagagggctcatttgcacttggatgccctcacctgtgctccctctgtggcttcaggaaccccggggtcattacagagcttgctaaattcatccctggacgtgagatgtgtgtcgtaagcatccaggactgtcccaagatgggagaggcgttcagtcatgttcactcaagtgaagkcttctattctacttccagatacacctttttaaccttcaaagggtccaattttaacctttcttccacaaagcattttacgtaccactaatagtcccagtgcagaccccaaagttcccctgtaagattcatttcctgtgattcgagcacagcctgaggcagagctttctgctgggtttatcctcactgagactcagactgcagagggccaggaggagccctgctttttgcaagcaataccacctggggtaggacccacaagtgacatcctttgtgcgtggatctggccttggcctccgcaccgtctgttcagcaagtccctcctttgcctgccaaggctgaggtcctgtacttttgtgtgtggatctggccttggcctccgcaccgtctgttcagcaggtccctcctttgtctgccaaggctga

SEQ ID NO: 707713 - DNA, 539 bp, Homo sapiens
cttctgcctcccgggttcagtcgattctcctgcctcagcctcccaagtagctgggattacaggcgtacaccaccatgcccacctaatttttgtattttaatagagacacagtttcaccttgttggccaggcaggtctagaactcctgacctcaggtgacctgcccgcctcggcctcccaaagtgctgggattacaggcgtgagcccccgcacctggccctaaatgttttaatagactttagcccataattaaacctcctgcctaacgggctcctgtgaagagggactagcacagtaggggccttcttaaactcagaactagttacagcttgtaaatactgaagagtgtatgtgaaatgtgcagggatgggagctgaacagttagtggaactaatgctttgacggggttgggtgatgaatgascgaatcatagcaataggaaaacttgtagtatattttattaatcatgaaaaatgcctggcgtaactgaaacaaatccagcagatccatttggtctaaatttaaattttagcgtagatt

SEQ ID NO: 707714 - DNA, 652 bp, Homo sapiens
tcgcgtgtgtgagcatgcatttgcgtgtgagcatacattcatgtgtgagcatacattcacatgtgagagcatgcatttgtgtgtttgagcatgtgtgwgagcatacattcacgtgtgtgagcatgcattcacgtgtgtgtgcatttgagtttgggtgtgcttttgtgtgtgagcatgcattcgcgtgtgtgagcatccatttgtgcatgtgaggatacattcatgtgtgagtgtgcattcgcatgtgtgagcgtgcatttgcgtttgagcatgcatttgtgtgtgagtgtgcattgcatgtgtgaacatgcatttgtgtgtgagcgtgcattcacgtgcatgagcgtgcatttgtgtgtgagcgtgcatttgtgtgagcatgcatttgcttgtgtgtgtgtgtgttatcgtgcatgtgtgcatccccgcatgtagggaaggtggcagagtgccgatgtgagaagccacggccggcggggaagacatgcgctgtgactgacacacacgtgtgctggagacctgctctgtggcaaggcagtgctggtgtagagcggagcccttggcccagcagagcttgctgtgtggtttcttcagtgctgccgtcgctgtgccgtctatatgtgttgtggtctttaatgtttaataattggca

SEQ ID NO: 707715 - DNA, 652 bp, Homo sapiens
tcgcgtgtgtgagcatgcatttgcgtgtgagcatacattcatgtgtgagcatacattcacatgtgagagcatgcatttgtgtgtttgagcatgtgtgtgagcatacattcacgtgtgtgagcatgcattcacgtgtgtgtgcatttgagtttgggtgtgcttttgtgtgtgagcatgcattcgcgtgtgtgagcatccatttgtgcatgtgaggatacattcatgtgtgagtgtgcattcgcatgtgtgagcgtgcatttgcgtttgagcatgcatttgtgtgtgagtgtgcattgcatgtgtgaacatgcatttgtgtgtgagcgtgcattcacgtgcatgagcgtgcatttgtgtgtgagcgtgcatttgtgtgagcatgcatttgcttgtgtgtgtgtgtgttatcgtgcatgtgtgcatccccgcatgtagggaaggtggcagagtgccgatgtgagaagccacggccggcggggaagacatgcgctgtgactgacacacacgtgtgctggagacytgctctgtggcaaggcagtgctggtgtagagcggagcccttggcccagcagagcttgctgtgtggtttcttcagtgctgccgtcgctgtgccgtctatatgtgttgtggtctttaatgtttaataattggca

SEQ ID NO: 707716 - DNA, 640 bp, Homo sapiens
cttagctccattgtccacaaagcggcgacagacatagctcatagatgctaagggcctcactgtgcctctagaaagatccaggtacatttaaccagtgcaggtttcctgctccttctctccaaggaggacctggtgaggtgaccaggccaggtaactccagagagaagctgtgccttccagccaggaacgcttgatgtgggtggtccgcccgagctgtgtccctggttgctgacaaggcccttaaggctgtccccaaggggatgggagtcgtgggtctcagtgacctggctctggcctgagcttctcagagctctttcacacagcagcctctttcctctgccttttcttggccctctcccttcaagcccctgtggctcatctggtccccaaggtcacctgctgcactgactgtcacgtcccctcttcccctcctaatttagggagacgtcacgctcacsacccgtcttgcctaccagggaaactcctctttagcaacatctggcctcgcagcgttcttgggctgaggtcgtgcccagcagccctgtggcctctcctttgagccatgctggatctttgtttttgtttgtttgttttttgtttgtttgtttgtttggagacagagtcttgctctgtcgccagg

SEQ ID NO: 707717 - DNA, 1138 bp, Homo sapiens
attcaacagacatggagctattcagtttttaaaattaaaattgttcacaaatggtattttataaattctctattttcataagtagcatttattaccctttttattttttaagagacagggtctcactctgtcaccctggctggagtgcagtggcgtgatcatagctctctgtaaccttgaactcctgggctcagacaatcgtcccgccttggcctcccaaagttctggtattgctggcgtgagactctgagcctggcccatctttttaatatctgtaggatctttctttcttctattttttcattcttgatattggaaatttacgtcagtaccctttaaaaaaaaatcagtctgggccaggcgcggtggttcacacctgtaatctcagcactttgggaggccaaggtgggtgcatcacttgaggtcagcagttccaggccagcctgtccaacatggtgaaaccccatctctactaaaaatacaaaaattagccgggcgtggtggctyatgcctgtaatcccagctactcaggaggctgaggcaggagaatcacttgaacccaggagatggaggctgcagtgagccgagatcacaccattgcactccagcctgggcaacagagtgagactccatcaaaaaaaaaaaaatcagtccagacagaatttccagaagacaaaacaaaacaaaaaaacagcagcttttggcttcagtaatttttctctactgttttggtctgcttcctatttttcattaatttcagttctgatatttattatttcctttcttctgtttactttgtgcttaatttgcttttttcctggcttcttcagttggaggctcaggtcgtgtctttgtgctccttcttttccgcatttagtgctataaatttcccattaagcgctgcattagcttttccccagaaatttggatatgctgttattttcaattaactaaacaaagttttaattgtctcccaagagtcatacaatttattgagaaatgtgttgtttaaaatttcaaaatatgttgggactttccagataactattttttacttcttgcttaactctgttatgacctaaaagcatactttgtaggatttgtgtttttaaaaatttgttaagatatatcttatggc

SEQ ID NO: 707718 - DNA, 2080 bp, Homo sapiens
tatttttggtctgaagtccatgcttttgtatttccccaccgttccgttgagcagcttcaacatttgccgcagttaggcctctctggaatctgtgcttagagattgtgagacagggtcaagtttcagcagctcggactcctctgtctgcagagaacctgccagcacagctgctcctgggggcaggagaggcactgtctgttttggggtgacgtgagctgatgggaaagccaggctggacatagctcctgggccggcagcccatcttggtggcgkcttcacgccgtctggcatctccggtcctggagcatgagggctcaggaagagcctctgattcggctgctctggaggcctcgtctggacacacctgggcaggcccgagtccacacaccctatggcctcaggaaccgagagagaccttccttccatgtttcaacttagacaacaggagactttgttttgggaggaatcactcaattcaggtggacgctgcagctgggcgggacatctggcctctccctgtggcagggaggggcatgggagagacaggggtagtgtcccaggaactccgtgggcctgtggcgaagtcccagccctgcagctgccagtgcagggtgttatccaggggcaggacatcgtctgcagtggctctgccttccccgatgccaggtgaccccatggagccagtgtctgtgacctcttccatgctggggctaaagaggccagcaggattgggggctggcattagtggagaacctcagagcccagggctgtgggctgatgggtggcgaggcccccgccagctgcttggggatagcccagccactgttcttggtccacccggcctttgattcctttttcctgtgtgcatttttgagcaccttctgtgtgcgagaggccgtgcctgcccgagaagagaaggaaacaccacaatgagcctcggacacccacagtctgaagggcccggagtaagcctcagacgcccacagtctggagggcccggcgctgtgaacgagcagtcacagggaacagcgtgcccttatcgctgacacaggctctggagggcccggcgctgtgagtgagcagtcatagggaacagtgcacccttatcgctgacacaggcgagggcttcgtcttctcacagctcttatcttgggtgtcaccccagccagagtcagggctgatggcggggggtggggggggggcaggctgtggtcagggacctgcaggagaggggagggcctcgcttctgatgggcgacgttcatttacacacagctctgcggcccaaacggccaggctggatcctgtcttttaaaaaccttgctaatttggttgatggaaaatatcatctcagagttctgttttgtgagtccccattgccatgcgggcaaacattttcatccactaaggggccgtcgtgtttctctgggaacgtggcgttcaccgtgtgggtgaactttttcacgcactaaggggccgtcgtgcttctctgggaatgccgggtttgtggctcgtgcccactgccctgcaggtgcattctctttccccgtagctttttgtctgttgatgctttcagctctggatgtcctattttgcgtacttttattgtttatggtcagcctttaactgggggtatgatatttctttaactgggggtatatttcttttttttttttttttcgagatggagtctggctctgttgcccaggctggagtgcagtggcgtgatcttggcgccctgcaacctccatcttccgggctcaagcgattctcctgcctcagcctcctgagtagctgggactacaggtgtgggccaccacgcctggctaattttttttttttttttaaagtagagacggggttttgccatgttggccaggctggtctcaaactcctgacctcaggtggtccacctgcctcggcctcccaaagtgctgggattccaggcgtgtgccactgtgcccagccatggggtatatttcttaatgtgtggagttgtttttcctcatttttctggtccctttagagatggcaccctggagtggccagcagagctcaggggcctgcggcccaggcacaca

SEQ ID NO: 707719 - DNA, 2080 bp, Homo sapiens
tatttttggtctgaagtccatgcttttgtatttccccaccgttccgttgagcagcttcaacatttgccgcagttaggcctctctggaatctgtgcttagagattgtgagacagggtcaagtttcagcagctcggactcctctgtctgcagagaacctgccagcacagctgctcctgggggcaggagaggcactgtctgttttggggtgacgtgagctgatgggaaagccaggctggacatagctcctgggccggcagcccatcttggtggcggcttcacgccgtctggcatctccggtcctggagcatgagggctcaggaagagcctctgattcggctgctctggaggcctcgtctggacacacctgggcaggcccgagtccamacaccctatggcctcaggaaccgagagagaccttccttccatgtttcaacttagacaacaggagactttgttttgggaggaatcactcaattcaggtggacgctgcagctgggcgggacatctggcctctccctgtggcagggaggggcatgggagagacaggggtagtgtcccaggaactccgtgggcctgtggcgaagtcccagccctgcagctgccagtgcagggtgttatccaggggcaggacatcgtctgcagtggctctgccttccccgatgccaggtgaccccatggagccagtgtctgtgacctcttccatgctggggctaaagaggccagcaggattgggggctggcattagtggagaacctcagagcccagggctgtgggctgatgggtggcgaggcccccgccagctgcttggggatagcccagccactgttcttggtccacccggcctttgattcctttttcctgtgtgcatttttgagcaccttctgtgtgcgagaggccgtgcctgcccgagaagagaaggaaacaccacaatgagcctcggacacccacagtctgaagggcccggagtaagcctcagacgcccacagtctggagggcccggcgctgtgaacgagcagtcacagggaacagcgtgcccttatcgctgacacaggctctggagggcccggcgctgtgagtgagcagtcatagggaacagtgcacccttatcgctgacacaggcgagggcttcgtcttctcacagctcttatcttgggtgtcaccccagccagagtcagggctgatggcggggggtggggggggggcaggctgtggtcagggacctgcaggagaggggagggcctcgcttctgatgggcgacgttcatttacacacagctctgcggcccaaacggccaggctggatcctgtcttttaaaaaccttgctaatttggttgatggaaaatatcatctcagagttctgttttgtgagtccccattgccatgcgggcaaacattttcatccactaaggggccgtcgtgtttctctgggaacgtggcgttcaccgtgtgggtgaactttttcacgcactaaggggccgtcgtgcttctctgggaatgccgggtttgtggctcgtgcccactgccctgcaggtgcattctctttccccgtagctttttgtctgttgatgctttcagctctggatgtcctattttgcgtacttttattgtttatggtcagcctttaactgggggtatgatatttctttaactgggggtatatttcttttttttttttttttcgagatggagtctggctctgttgcccaggctggagtgcagtggcgtgatcttggcgccctgcaacctccatcttccgggctcaagcgattctcctgcctcagcctcctgagtagctgggactacaggtgtgggccaccacgcctggctaattttttttttttttttaaagtagagacggggttttgccatgttggccaggctggtctcaaactcctgacctcaggtggtccacctgcctcggcctcccaaagtgctgggattccaggcgtgtgccactgtgcccagccatggggtatatttcttaatgtgtggagttgtttttcctcatttttctggtccctttagagatggcaccctggagtggccagcagagctcaggggcctgcggcccaggcacaca

SEQ ID NO: 707720 - DNA, 1335 bp, Homo sapiens
ctgcccgcctcggcctcccaaattgttgggattacaggcgtgagccaccgcgcccagccgagactacagctttctttaactgcatccctggagggatctgagagtctctttccctgtctcctttcctttggaaaacatttcagccagggctccccaagatgaaaggccagagtcccaggcatgggcgttgcaggtgcacagttgccacggggagctgtgggtgayggtcgctgtcagcgatggctgctgcaggtccctgtgaggaaggggcagtgccacagcaggaggagagggagtcagcggacgttgattggcagtgcccgcccattccatcattcagtcacccactgtgcacccagcacccaggctcggctgcatagaacatggcccaggaaggctccacttcctgtctcctcttctcccctctccagtctcatgatggggctggaggcatcttctagttttgagttctgagctaatgaacatgctcatgagcaggcggcaggatcccaggacggtggagctgggagcctgactgcgggtgacggacaggctctggcagcccctgtcagcatcctctccagggcatgtgaaagccagtgtgtcctcagctgccagtgccccctccccacctcctctgggcccatgtgcacgggacctgggctcccccaaccaagcctgcccgccttggttcagcagaacggctcctgtctctacagcggtgccaggccaggagtgctgtgtctgtgaagcggggtcatggttttggggccctcatctccctcgcgccctctcattggggaccccccgtctccctagcgccctctcgtcctctcctgcatgtgctgtgtctgtgaagcggggtcatggttttggggccccccgtctccctagcgttctctcgccctctccagcatgtgaagtggggtcatggtttgggggcccccatctccctagcgccctctcgttggggaccccccgtctccctagcgccctctcgccctcgcctgcatgtgctgtgtccatgaagtggggtcatggtttgggggccccctatctttctagcaccctctcgccctctcctgtatgtgaagtggggtcatggtttgggggccgccatctttctagcgccctctcgccttctcctgagcgtgtggaactctgtggtggtcagagctaaggttctgaataggtcgaagcacctccccggtgcctctcaccctgaatgctctgggaggacacagccttttcataggctacgactgacatggcaggaggggcctgcctgccacccgggtcctctgctgcctgctgcttgctggggagggggctcga

SEQ ID NO: 707721 - DNA, 636 bp, Homo sapiens
gagttttcctgatcgaatccccatctcctcaccctgtactcagcaacggccttatgccttttgcaggttagaatcctagaactgagaaataataattgtttggtgaattgataaataatwatggtttggtgaatggagaaataataattgtttgaagaatggagaaataatagttgtttaatttttataagagtttctactaaagcctttacatacattttctctttttatcctactacaacccaatgtaagagtagcattatcaccattttacagatgagaaaactgagacgctggaggctaagtaacttgctgaaggttatgctgttgaaatttagtaagactaagattagaaggcagtccatctggtcccagaaccataagttttaactcctgtggctaggttcttactatgagctgcagatttatttcacatctgaactttcacacattatatgtgggcaaattgccaggaacctaagcttgatttgttggtacaccatcttccattccaaaatgcctgtagccagccctccttaatccctcagcctatggggctaaaaatctgtttttttttttttcctatggccatacctctattttacattttgtcaacccgtcaaagtattgtacagt

SEQ ID NO: 707722 - DNA, 1094 bp, Homo sapiens
aaaaatacagtccttcatgaccacagatgcaaaaagatcttaacagagtttcaaagaattgacttatggcagtaattcatgtttagattaccataataaaatcaaccaaagcaatttggcataaagactatcattctgcaaaacaatttggcagtttcttaaatgttaaacagatacctaccatatgacatagctattcttgtctagatatttacccaagagaaatgaaaggatattttcatatgaccatctgtgcataagtggtcatagtagcttatttataacagatgaaaactggacacaattcaaatgcccatcttcaaatgaatgaacacacaaattgagctatattcacacaacgagatactactcagcaataaaaaggaatgaactattgatacatatcacacattaatgaatttcagaataaaaaatgttgaaagaaaaaagccagataaagaaaagtaaatactatgtggttccatttatatgacattctggaaaatagaaactaatcatgagagagatcagatctgtggttgccagggatttgagggaagcagggaggttatgggggaggggttatcaagagggaggagaatattttgctaggttgatggatatattccttattttaattgtgatgatagtttcatggttgtatacataagtaaaaatttaacaagtcctgcactttaagcatgtgtrttcattatatgccaataaagcctcaatatggctgttgaacaaaaattaactaccgaactactaaatatgtgtatcaccctaggaaatgaaagacatctcttcaactgcttttgtgtcttgacttttttcccaaaggaagacctatattttgcttcatttctttctactctacatttctttttactctgcttgcatttagtttaaaaaaaaagctctctgttggtgatttctaatctgttttaaggtaaataattgtactgtccaattagagactgagataactcatgaattatcacacaggttgttctcctgtacaatatatatgattttgagtactaatattacacagtgaattcagaattgtgtgtttgtatatacataccata

SEQ ID NO: 707723 - DNA, 769 bp, Homo sapiens
tgttttctttttttaaattcagtttttttaatcctaaaatttatttattttattttatttttttattttttatttttttatgtttttattattattatactttaagttttagggtatatgtgcacaatgtgcaggttagtttacatatgtatacatgtgccatgctggtgtgctgtacccattaactcatcatttagcattaggtatatcttaaaaaagaaatttcttataagttttttaaaaatatggtttaaaataattgtggtagaaggaatgcccatttcttaatctgtgttttcttaaaatatamcatcctatgagaaaaattaggatatggtccactttacattatatttcttactatttttttaaaaatcttgagattttcacttaaattcattggatatcttcttttatccacccctcaaaaatgtttttaagagttttctctagctttcatctttcttttcatgatgtcaccatcaacccagtcaccttaaacctaagacttatttttcctttttcctcttcccacctaagcagttgccaagactatagattctgtccctacaaaaccttcaaatcaatctaatgccttttatttccattttttcatacctccctcaaatcagattcccaaaccactttttggccaaactattccgcatattgtcaccagattaaatgtcctgaagtgtagctccaagctccacttctgtcatgtgtgaactcataaccattaaattgcatcccattacttaatgaggca

SEQ ID NO: 707724 - DNA, 769 bp, Homo sapiens
tgttttctttttttaaattcagtttttttaatcctaaaatttatttattttattttatttttttattttttatttttttatgtttttattattattatactttaagttttagggtatatgtgcacaatgtgcaggttagtttacatatgtatacatgtgccatgctggtgtgctgtacccattaactcatcatttagcattaggtatatcttaaaaaagaaatttcttataagttttttaaaaatatggtttaaaataattgtggtagaaggaatgcccatttcttaatctgtgttttcttaaaatataccatcctatgagaaaaattaggatatggtccactttacattatatttcttactatttttttaaaaatcttgagattttcacttaaattcattggatatcttcttttatccacccctcaaaaatgtttttaagagttttctctagctttcatctttcttttcatgatgtcaccatcaacccagtcaccttaaacctaagacttatttttcctttttcctcttcccacctaagcagttgccaagactatagattctgtcyctacaaaaccttcaaatcaatctaatgccttttatttccattttttcatacctccctcaaatcagattcccaaaccactttttggccaaactattccgcatattgtcaccagattaaatgtcctgaagtgtagctccaagctccacttctgtcatgtgtgaactcataaccattaaattgcatcccattacttaatgaggca

SEQ ID NO: 707725 - DNA, 769 bp, Homo sapiens
tgttttctttttttaaattcagtttttttaatcctaaaatttatttattttattttatttttttattttttatttttttatgtttttattattattatactttaagttttagggtatatgtgcacaatgtgcaggttagtttacatatgtatacatgtgccatgctggtgtgctgtacccattaactcatcatttagcattaggtatatcttaaaaaagaaatttcttataagttttttaaaaatatggtttaaaataattgtggtagaaggaatgcccatttcttaatctgtgttttcttaaaatataccatcctatgagaaaaattaggatatggtccactttacattatatttcttactatttttttaaaaatcttgagattttcacttaaattcattggatatcttcttttatccacccctcaaaaatgtttttaagagttttctctagctttcatctttcttttcatgatgtcaccatcaacccagtcaccttaaacctaagacttatttttcctttttcctcttcccacctaagcagttgccaagactatagattctgtccctacaaaaccttcaaatcaatctaatgccttttatttccattttttcatacctccctcaaatcagattcccaaaccactttttggccaaactattcygcatattgtcaccagattaaatgtcctgaagtgtagctccaagctccacttctgtcatgtgtgaactcataaccattaaattgcatcccattacttaatgaggca

SEQ ID NO: 707726 - DNA, 1570 bp, Homo sapiens
acactgaaaacagtttataatctctcaatcttagcggtgaacataactggacatttgagcacaatccttgatcggttatattatctcaaccctttaactcttacccgtatttgaagacaggatccaagcactatctcctagcttcctagaaatcttggtatttctttgcaagcaaatcagaccatataaattttttaaaaaaattctagatagatccaggattttatgcccaagtccttgtgtttgattttcaaaacaaaaagccttaaggaaattctgattgcgaaaataattatttctgaacattattatggtcaaggaccattgaaaccctttgccttgctccccgactcctgccccttttaccctccttctcatccccaggttctgcttctggtcattatatagagctcatattttctatagttttatataaatggaatcacatagtgtgtgctcttttttgcctggtttctttcacatatcttaagtgttttgagatcatccatgttgttatgtacattgatagtttgttcccttttactggtgagaagcatcagaaagtactttataagtgatgtaatcatttattattgtatgttttgagtttgtctttttgattcagagagtgtacctcttcttacatatttattcaggaccaagtttgactagcttttggctgggacaccataagttcagttcttattacttacctttgtttgtccttcccaccaaagatcttcaaaaagttaatagcaatgatggtcattaacaatagccgtatacacttacttatttagcgtctgctttcttccccaagtattacactagamcctgggtgataaaaagatgcataaggaatgtgttcatgcagtttgctacactgcataggaaaaaggggaaatatggtctgtgtacagaactgtataactctgggttctaaattggaacattagtattgtagtatggaaaactaatgatgaaatctgttctagctcatgattgatgtatttatagaatccttccatattattctttcaagttccccaatgtacaaattcaatgaaaatgtaccataggattccctttaaaaactggagatttttgaagtctttttttgttttattaaaagctctgttgaggtatgattgacatataataaactatgcatatttaaaatgcacagtttgataatttttaatatttataaatacccatgaaaccatcaccaatatcaagataatgaatctatctataatcctcaaagtatcctcagacccgttgacatccccaactcctgcaccttttaccctcctctctcatccccagggctctgcttctggtcattatatagagctcatattttctagagttttatataaacggaatcacacagtgtgtgctcttttttgtctggcttctttcacatagcttaagtgttatgagatcatccatgttggtacgtacattgatagtttgttcctttttactggtgagaagcatcagaaagtactttataaaaactcacacttatgcccacagacaaacatagtgacttcaatatttttat

SEQ ID NO: 707727 - DNA, 586 bp, Homo sapiens
ttttgtggcattttattacatccataaatatttagatctttataacctcatgggcaacttaaacttaaataaaaatataatgaccctcttcatctgtaataatggtttttgccttttaggcttttcctctgatattaatagtactatgccagatttctttgagttgttayctgcctggcatacatttttcaattaattacctaagtattctattcctatattcttaggctttaggcatatctcttgcaaaaagcatataacttaattttttaattctcatctggaaatctttgtctttttacctaatccattccttgtgatgactagtgcatttgggtttatttccaccatctcatttttgtgctttctatttttctgtttcctgtatcatgcttttttcttatttcttgcatttacttactgtattggctctccctgtatatatccaattaaaataataaatctaaagtgaatttaacatatctacccttttcgtgaatagaacaaagaccttaggattttttttatcatcctccatctgactaatctgctatcattgtacatataatttcatatttttaacttt

SEQ ID NO: 707728 - DNA, 851 bp, Homo sapiens
cagtaattggtcaatcacacatactcacatcgtagaggaagagaacaccatgtcatgtaggtcacataaggttttcactcagaaacagagtgagcaaacacggtctttgagaagagcttttgtagtgacaagaggttgaagttacccctggttcccacaggaggatgtgattggcttgtttgaataactgtgtaggctggcaggcaactgaagtgtactacattgtaatagtccctgtatctggagtgttcttggtcagcggatctcattcattggagtagagtggaagagaggagttgcaaacgggtcatttgaagacctcccagcttctactgtcatgacagcatgtaaattgtaggccttaactgtagacttcacaccacgctaataaagaacattctgtactcaataggattacagtacttctatggaccaaggactggtatgtctggaattatgctgtgccagtttccatggtaaatgggawgtatcagtgggtagataactttccatttcatttttaaacatccagattaaaaagaaaccacattgtacaattggcttaacctataatgtagataaatctacaatgtagatagaatataaaaatacttcattttccaacatgatgattacaaggcatcacccaaaaggactggactttgatcttgatgatgtaactatgtgaattcttgagtcacttctgaaagagtttgagtgcagtttattaccaactagagagtgaattaggcttttaatggtctctagtagatactagtgatcttcacaattactcatttcctcttcctgttaaagatagctctggcatatgacttgtttcagccaatgaa

SEQ ID NO: 707729 - DNA, 780 bp, Homo sapiens
tcatttcgcttcccatttcacagcaattgttatcctttactgcctgatgtctcatgtcttgagagccattgtttcatgtattttgaccagacttttagttgtttcatacagaacagttaatcttgtccctgctactgcattttggctatagctggatgttatgattatttttaattacagcataattagcctttcttgatgtctacagggaataktatattagtatcagtatgctcaaaaatatatgcaagacatattttaaaattttacatataaattccaaagaagttctgaacacggtgtgtgtgtatgcgtgtgtgtgtgtgtgtgtgtgtgagtgagtgatataacaagagaagtgcgatattaaacaaaattgattaggattctgtgcaagacagaaagtccaggtagctgattatacaattattggctgggctagtgaagtttatgttatgtaggcaccactaagttttggttttaatttcacaagaccacagctagcatgaagaaaccaggatgctacttctgtcatccagagttcagtttgcagtttttgtctcttgtaacagtgcttccacagccatcattttcttggagcatgaggctggtaattagacattaagacattgagtccaatttctgccaacactaatttctgtcacagccactttaactacccataatattccagaaatatggatctgcctcattttaaaatataataccaaattttaattcagaactttagctttaagggtgtctaagaaatggaatatt

SEQ ID NO: 707730 - DNA, 780 bp, Homo sapiens
tcatttcgcttcccatttcacagcaattgttatcctttactgcctgatgtctcatgtcttgagagccattgtttcatgtattttgaccagacttttagttgtttcatacagaacagttaatcttgtccctgctactgcattttggctatagctggatgttatgattatttttaattacagcataattagcctttcttgatgtctacagggaatattatattagtatcagtatgctcaaaaatatatgcaagacatattttaaaattttacatataaattccaaagaagttctgaacacggtgtgtgtgtatgcgtgtgtgtgtgtgtgtgtgtgtgagtgagtgatataacaagagaagtgygatattaaacaaaattgattaggattctgtgcaagacagaaagtccaggtagctgattatacaattattggctgggctagtgaagtttatgttatgtaggcaccactaagttttggttttaatttcacaagaccacagctagcatgaagaaaccaggatgctacttctgtcatccagagttcagtttgcagtttttgtctcttgtaacagtgcttccacagccatcattttcttggagcatgaggctggtaattagacattaagacattgagtccaatttctgccaacactaatttctgtcacagccactttaactacccataatattccagaaatatggatctgcctcattttaaaatataataccaaattttaattcagaactttagctttaagggtgtctaagaaatggaatatt

SEQ ID NO: 707731 - DNA, 2129 bp, Homo sapiens
caatggggtgcacagaagtcactactgcctttcacactgattttgtctttctgagtttttaggatcttggcaatattttttacattatctgtattacttttactccatttgatgtgaaatatacctctattcttttggctttatgttacttcatggggtccatatactctaatattataaagaaacttcaaaatcactaaaatttctatagttttaaagcatctgatctttctctattctctcctcttcccctattatgtaatatacagtttaccataactgcctaacttatttttttttacatccaagaactgagagcctgatagtcattggttaaacccatactttcacattattaagaactagaaatgaatatgtacagtatggtatttaatcaactagtagaagaaataaaagtttgagaaaacacagaaaccatgtaacaaatatatatatatacaaatatrtatatatatatatatatatatatacatgtatctaaaacaaaatttgaatcttagaaaaaaataaaaaggggatgcttaggtttacttcaggaatcattataacttttaatttgacagatgtttaagatacatagaacaatgtttgtatgattaaatattaaagacacactatgtgtaatgctcctagcttacatctggtcagtgaaaatgcttaataaatgtttattctcaaaaaacaaacaatccaacatagggacatatttttgaaccatcaggattcttgagtgatggttctcactgatttatgaataaatccaaatcagaagtatgtgggaatttttaatttcaaattacattaaaaaaattctgcttccaatgataatgtagaacagttggaatatgattacgtaatgtatagtatagatagctagacagagtcactatcaccccaatcataagaaaaagcaaattaatctataaagttataaccgaaaccctccagagagctaacattgcaggaaaaacacttcgtttgaagagtgaggaacacaggcatttgcaaaaagatttgggatatgcttctctttacacctaccaaaggataagaggaatctgctaaattttttaacagcattaaaggctgagtgtggcatagaaataaaggccctgaaagcttcagacccaacaagagctcacgtatacttaaaggttcttcccagatctctaccttgcacaaacaaaagagattgggggcaagatgcagaaacaagaaaatcctcatttggagtgtatgcttggagaagagtagggattattcctgaagaaaagagtgaaagctctacccaaactctctccccttcagaataaaagtttgcagtcactaaagatatggtataaaaccatttcgcccccaaggaacaagtaaatacttattgcagaaaggtttcagggcactgaggaaggtagtgtatctgagaaaaacccatgatagagacccagcacgaaaggcatgtatcatgctaaagattatcttagatatcccccatcactagataagtaccatgccatctacagttgggatgtgggcaggtaaaatgctaaagagagaccctgtttaggttccgggagcacaagaaaacacatagctgatggcggatgaggaagattaagcaaagctctccaacataccagcttaagcaaagctctccaatgtaccctcagcatcagttaagcctagagaattttgaagctagtggtccaccataataataaaacctgaacccaacttaagttttgactgcattcatctaatacccttattcaaggatagaagagctatgatcctctctaggaaaagctaatatttatctcagactcaggtatctttcacatcataaattgtcacagaaacctgaattaaaactgcactaaaattctaatatacagacaaaatctaatatacagataataatataacaaatattaaacaaaggttgagactaatgatgacaataatgtaaaacaaaacaactttgtcataaatagctaagcgggagtgtgtatgacacaaccactttggaagttatttggaagtatttactaaagctagactgtgatgcaataattaattatatgcccaattgtgtatatatttatatcaaa

SEQ ID NO: 707732 - DNA, 1261 bp, Homo sapiens
  misc_feature 901: n = A,T,C or G
cactccttctatacctccctctatctgtggaaaaaatgacaagatctctaccttccttggtgttctccagatatacagtctgaggggccctatgagcaaaggagattatgatttgggcaataaaaaaaatcttccagttgaccttttatgttagccaaaggcatttacaagagaataaattgttattcacagagaaagatctgttttctactgaccttaaggtgtggccctgcatacgaatgaatgaatccactgttaaagtaataaaatgtctcagactatttgaagccttgtcgatgtgacctacacaaattttttaagtgtactgatattactgaagcagcagcaacaagagaagggacgttttccacatcaaaatgcaatgtacttggaatgcaatgtaatatacttggaacacatgttagatctgaaggtatttataaatacaagcactccactttcttctcaactcttctacccacctccagaaacaattgtggtgatggatgtgcttccattagctagaaatatgcttttaacttatttcagggaagaaaaattgagacaagttgaaatactgaaaagttgcaggcatgtaatcatctctctaaatacaatggcagcctcttggtgtatctgatattttgtggcaaaataaagtgcttgatctgagaactaaagttggaaagatatttacagttaagataccatggtcatttaaagatattatgaaaacatggtattataggcataagagtattaaattgagtatttgctttttaataaagaactctttgcttattgctcctaggcagattttggcaccacaaaagccaaaacaagttttagcttctttccaattccttacccctgactctatgccaaaatccctctctcaagnactctgcacacagcaagctcagaggtctttaatttaacttcggttgaagtgaaggatgccagtgttgaattgcctctgcttctctgtgtgttaagcaggaaaaatgagaacatatgcacacctcctacagtgagaagcacaggtgtgtgtggtgtcctgcactgctctctagccccacagaagacatcrccaactgatctgggctcttgatctcaacaagccttggtgctggctcagaattctccttacagagtgatatacttcctcaaaatgagacctagctggccttccatttatatccatgtcctggatcaacaagaaaaagcaaacagccacaagtaccgagccctcttccagata

SEQ ID NO: 707733 - DNA, 1174 bp, Homo sapiens
tgatgatattatgtcaaagtatgttttaaactaatccatgtccttgtttaaactctacacaaacttaactcatagagacaaagcattctaagtagaagcattatttcatcctttttagctttgtattcataataactttattgaattgattctctaccatgacccaagaatatagtgtatctttataataagaaacggtgactcaccatcaccccaccttgctcctctttatctattataatctactagctttccatggctgggttaaactcctagccttggttcctgaaatccagaaccataatcaatacatacataattaataatccagaattaacttcataccatatggtaggtagtaactatggtgcctgtgaacaagcttcataattacaagaaattagtccctccagttttattcttgcttctagatccagttcaaaacaacatcaagaacagaactcaaagcagtaaatgcaaagcatagctgcctttgcagttaagttccagtttgctgcacctgttgaaaaatacaataaaaagagcaaaatcatttcaccatccagttggggtagaggtttaaaactagaagatgaagactgtgcccaaagcatcaaaagtgccaagtaaagaccaagacaagggattgcaaaacacacactcaactcagagataaatgaagcatgggaagtgtgggcaggacaggtgagaggtccatgagacaggacatgagaaaaaagatgagataacctgaactgtaagctaccaaagcaggccactggtttaaaggagggaatacagtgtaaagraaggcaagctgggtcactatgactagggcaagcaaatctctgaacttcaggaattcagggacagtaaggcaacagcttcatgaaccaatagaaagaataagccggctccagaaacaaggagagatcatcttcatcatcgtttacccttttcttataggctgttgagcataagtaagctgacaggtggaagcagcaactggagttaaagagagcacaggattccatagccttgggtatgtccatgtaggggagaaaaagatttctttcctcagtcctctctaggttcatgtctgagactctattacaaaagacagattaacaagagacaaaaaagacaaattcatttaatataaattttacaagac

SEQ ID NO: 707734 - DNA, 1355 bp, Homo sapiens
gatatgtaatgacacacagcrtacatttcatttttactgaaaccacataggagcgcaatcattcactaagattttggtttagaatcaaaacttctcattagcattcagattcactggttgaaattctgcattgtctatttataattggataatacatcatctatgacgtcaagttttaatgtctgtaagtgaacttacaggcatttgcaataccccctgagtgaagaattcttccagatttttattactgctcctccctcaacctttataacagttttgtctacacctaattctacagtaataatttggcagcttactttatgtagatttgatgcctatttgggggaagtggggaggcagcttacattttgtgtagcttttttacacaaaaaattcaataacaatcctctcctgcattcttttcatagaatatgtaatatttacttaaattatgaaagtataaggttagagttagggtacaagtaacataaacaagtttgagaccaagcacaatttattcttggttagcatacaactcaatggagagcacaattaatctggcaagttaatttggtggcagttggttacgagactctaatttcacagtgtaatttttacattcaaatatggtttttacctgctaaatttgacaatgatagcttcgtaaaaccataggaagatataaactgcttctaaattaaaagaagtttgttcttcccggaaaattatttctggcatttactggattgtatgaccccaatattaacaaatgccaagaacaggtttaagttgatagaaaggccaggcacaaacatcacatactaggttgacttatctcaaggatagagaagcaagtcagtaaagagctgcattagtgttatcagcaacattttcctggccagaaggagctgtaaccacatagaaacccagttctcactaccttagcatgaattgagtgaggctccactgctcttctccaaattaagccacagatttgaattttatatacatacttatatacatatgggtggagcagttcttctaacagactagtctagacacgagcttgggataacctcatctgagccaagtacaactcatcaaaataaaatattacaaaaagtcaggtacagaataaacatatgaagacatagacacagttttcatttatcatccctgccctccctcgcttaacacagccaggattagtactttacagtactaatgatatcttcttgacatagagctgctgaaaagagagcagagaactgttagacagctgtctctgaaggtcatgctaatgagttcttacaccagtccctggtcttgtgcacaggtgttaggtgaaaaaatgt

SEQ ID NO: 707735 - DNA, 2417 bp, Homo sapiens
gtaactgatgataagaccaaactggtcatagtacagaagtaaaaagagaaggtggtggcagtagagtaagctgtggtctttgaaagacagttgcaattcagatatgtgtgaaacgttggagaatgtcaaatttgaaacaaattcttctcttcagtcaaaaaaccttgccccacaaacttaaggagcaaaactctttgagctttctagatacttgcctgaaactactactttgtaattgctacattggyaaaagcttaccctaatagcaattgcttacctagcaattgctagggtaagcttcggcaaattcattcaggaacagaactcttcgggttccatcaagaaagaagtgctgggactccagtgtgttaggcagcattctaatgaagttttcccaagagtcttctccctggttagtcaatcaaacactaatctagatggaattaaggatgctaatcagctgaccttaaaataaagaggttattctggattctctggataggcctaatgtaattacatgagctcttaaaagccaaaaatgaaggcaaaagagaccatcagagagatgaggcaggaaggaacgtaagagaaactcaaagcctaacaatgacttgacccaattttactagctttgaagatagaggtggaggtaacaagacaaggaatacatgaaggcgacttctaacagctgagaacaacttctggccaacagctattgaggaatcaggaacctcttggtctacaaccacaaggacccaaattcagtcaacaacttgagtgagcttaggccagattcatccctgaggcttgaaaggaatgcaggcctgcctacaccttaatttcagccttgtaaaaccaggagctgagaaattatccaagccaatttagacctctctgacctacagaaatgtgagataattaatttatattgtttttaagccactaagcttgcagtaatttgttatggcaacaataaaaaactaaaacatcaggttttctacaccaacacaaaattaagtttggggattttttaaatcttgtgattattaaagaaatatattttatagaaaatttagaaaagataaaaatgtgagcatcagattcttcacagcaatgattagttgaaatccacacctttgtggaattaagtttaaattaatcagcctttttctatatatccccaagttctagctaatagggaatagacagaggagctaaataggaaaaaaaaaaatagcagttttatctcataactcctaaagcacagaggtccttagtaaatttctattctaaggtttaccctataaaacaaagacaaatggaggcctattagctccctactagaacccacgccttgggcatctcatatccctgaagtggtcacccaatcacggaaggataagtccagaatgaaaagtccccttcctttgaagaagttgttcaaggaggttggccaaatggagtataagacgctaaaagtcactgcgtttgagcacaaggaagacaaacaaaaaggcagagggggaatgtgaggagggagaaagagagacctctcccaccttgcctttttgatgcatgtgatggttaatttttgtgtcacttggcttagaccactagtccagatgtttttatgttgtttttttagatgaggttaacatctaaatcagtagactttgagtaaagcagattaccctccataatgtatgcaggcttcattcagtcaggtgaaggccttaatagaaaaagtctgacaaccccaggagaaggaggaattctgccagaagactgccttgggcttcaacatctcaactcttccctggatctccagccagcctgcctaccctgaagattttgaacttgccaacctccataatcatataagccaattccttaaaatctctctctctcaatattatgtatctatatctatgtatacatacacatatgtatacccacacatatattaatcaggattctctagagaaacagaacatatgagatacacacatgcacatatatatatatacaaatacaatacagtaactctgcctcttttaaaaacacagcccagtggatgctgagaaagacaaagatagagaaagcaaatgtggcaatatattaacagttgttaaatctagtcagaagatctaaacattttttcttaggtttgattttttcacaataaaaaagaatttatgggaaaaggaagaattaaatatagcaacatataaaaatgaatccttactgatcatggtctggcctctgacataccctccttcaggtgactacatagtagagagatgcctgctctctccagagaagaacaaccatgtctctgatatgcggagagagccagccctccctcagccgtacatatcctattcatttcaagattcatatccaacaaaagttctgca

SEQ ID NO: 707736 - DNA, 2417 bp, Homo sapiens
gtaactgatgataagaccaaactggtcatagtacagaagtaaaaagagaaggtggtggcagtagagtaagctgtggtctttgaaagacagttgcaattcagatatgtgtgaaacgttggagaatgtcaaatttgaaacaaattcttctcttcagtcaaaaaaccttgccccacaaacttaaggagcaaaactctttgagctttctagatacttgcctgaaactactactttgtaattgctacattggcaaaagcttaccctaatagcaattgcttacctagcaattgctagggtaagcttcggcaaattcattcaggaacagaactcttcgggttccatcaagaaagaagtgctgggactccagtgtgttaggcagcattctaatgaagttttcccaagagtcttctccctggttagtcaatcaaacactaatctagatggaattaaggatgctaatcagctgaccttaaaataaagaggttattctggattctctggataggcctaatgtaattacatgagctcttaaaagccaaaaatgaaggcaaaagagaccatcagagagatgaggcaggaaggaacgtaagagaaactcaaagcctaacaatgacttgacccaattttactagctttgaagatagaggtggaggtaacaagacaaggaatacatgaaggcgacttctaacagctgagaacaacttctggccaacagctattgaggaatcaggaacctcttggtctacaaccacaaggacccaaattcagtcaacaacttgagtgagcttaggccagattcatccctgaggcttgaaaggaatgcaggcctgcctacaccttaatttcagccttgtaaaaccaggagctgagaaattatccaagccaatttagacctctctgacctacagaaatgtgagataattaatttatattgtttttaagccactaagcttgcagtaatttgttatggcaacaataaaaaactaaaacatcaggttttctacaccaacacaaaattaagtttggggattttttaaatcttgtgattattaaagaaatatattttatagaaaatttagaaaagataaaaatgtgagcatcagattcttcacagcaatgattagttgaaatccacacctttgtggaattaagtttaaattaatcagcctttttctatatatccccaagttctagctaatagggaatagacagaggagctaaataggaaaaaaaaaaatagcagttttatctcataactcctaaagcacagaggtccttagtaaatttctattctaaggtttaccctataaaacaaagacaaatggaggcctattagctccctactagaacccacgccttgggcatctcatatccctgaagtggtcacccaatcacggaaggataagtccagaatgaaaagtccccttcctttgaagaagttgttcaaggaggttggccaaatggagtataagacgctaaaagtcactgcgtttgagcacaaggaagacaaacaaaaaggcagagggggaatgtgaggagggagaaagagagacctctcccaccttgcctttttgatgcatgtgatggttaatttttgtgtcacttggcttagaccactagtccagatgtttttatgttgtttttttagatgaggttaacatctaaatcagtagactttgagtaaagcagattaccctccataatgtatgcaggcttcattcagtcaggtgaaggccttaatagaaaaagtctgacaaccccaggagaaggaggaattctgccagaagactgccttgggcttcaacatctcaactcttccctggatctccagccagcctgcctaccctgaagattttgaacttgccaacctccataatcatataagccaattccttaaaatctctctctctcaatattatgtatctatatctatgtatacatacacatatgtatacccacacatatattaatcaggattctctagagaaacagaacatatgagatacacacaygcacatatatatatatacaaatacaatacagtaactctgcctcttttaaaaacacagcccagtggatgctgagaaagacaaagatagagaaagcaaatgtggcaatatattaacagttgttaaatctagtcagaagatctaaacattttttcttaggtttgattttttcacaataaaaaagaatttatgggaaaaggaagaattaaatatagcaacatataaaaatgaatccttactgatcatggtctggcctctgacataccctccttcaggtgactacatagtagagagatgcctgctctctccagagaagaacaaccatgtctctgatatgcggagagagccagccctccctcagccgtacatatcctattcatttcaagattcatatccaacaaaagttctgca

SEQ ID NO: 707737 - DNA, 1593 bp, Homo sapiens
actgctggaggcatgtgcagatccagtgattttatgcacggcatactctaagacacagcgcccctgcgattaggtgacatatagatgaagcatgtgcttacgactcctcgtggttgttactttgaaagactttgtggaattttagaagggaaccatagaaaagcaaacatcactttggtctatgtacatatattaagcatttaatgtattgacattcaagtagatcttaggggcttatttatagtttatagaagggtttttagaatagcctttatagtttccaagagaagactttaatgcacaaaaggacaaggagattgaccctacttctacacacttcctttgatgggggtgtggcagcatttaccacatggaggaaaggtaatacaagtaagatgattataaacaaatgctttgaaaacagagtcaatgaaaccagtctgtttgtgaggcccaaggtcttatattttacaactcagtctgtaaggatagctatgtatctgcttttactaaactgactatgaataggtgctaaaaaagagcactgttactacagactttagtatcttgtttaagataccaagtgctgtaatttcattatgctttttaggaaaatcactcagcagagaccatgtgcatgccccagtccattcagggaatgcatagtgctgtggcagagctgcaggcagggtgagatggctgcctgtgccacccactccggaaatccattctctctagagcaccggctggggaagggagcatgccctaatgtcaaaatcactgaccgtctaataagttccaaatgaatagttggaccagttcagtactacttctacaaaaagattgcgggggcaggggaacttcacacattaccaagcacctcccccaagggaaataatgtcaatttttaaatttatccacatcctgtcaagcatctggaaatatatggaactctctagataataaaaagacagccttgataaaagggtttawaaaatattattgaagtacatgtaaccccaactctttcatttattagctgaaggaccatgagtaagtcacttcatctttctgagcttcaaggtccctttaactgtaaactggttataacaccgtcactagccccccgatggtggatggaataattcaatgagaaaacatgtcgacctggcctaataggacctagaatgtaagaaagacttaaataaatgttagtaccactccaacacacatacagacctatatacagaataatgaaaagcagaaactgggccaaactttgaatgactctgacttgttactgtctgattcaaattttgggctattagaagcaatactacaatccattttgttaggcataggacttaataaagttttctaattagttctttgcaataaactcttagaaatggaaaaaattgaaaagctgtaattcaaaatttgaatagacgttttctcagaggtagggttgcgtgtaaatttattctttgggcttttacatggtttctcaattttctacaatgtatgtctgtgtttatacacgtacaaatgtatgcacatacatacacacacatacataactatagacacaca

SEQ ID NO: 707738 - DNA, 1593 bp, Homo sapiens
actgctggaggcatgtgcagatccagtgattttatgcacggcatactctaagacacagcgcccctgcgattaggtgacatatagatgaagcatgtgcttacgactcctcgtggttgttactttgaaagactttgtggaattttagaagggaaccatagaaaagcaaacatcactttggtctatgtacatatattaagcatttaatgtattgacattcaagtagatcttaggggcttatttatagtttatagaagggtttttagaatagcctttatagtttccaagagaagactttaatgcacaaaaggacaaggagattgaccctacttctacacacttcctttgatgggggtgtggcagcatttaccacatggaggaaaggtaatacaagtaagatgattataaacaaatgctttgaaaacagagtcaatgaaaccagtctgtttgtgaggcccaaggtcttatattttacaactcagtctgtaaggatagctatgtatctgcttttactaaactgactatgaataggtgctaaaaaagagcactgttactacagactttagtatcttgtttaagataccaagtgctgtaatttcattatgctttttaggaaaatcactcagcagagaccatgtgcatgccccagtccattcagggaatgcatagtgctgtggcagagctgcaggcagggtgagatggctgcctgtgccacccactccggaaatccattctctctagagcaccggctggggaagggagcatgccctaatgtcaaaatcactgaccgtctaataagttccaaatgaatagttggaccagttcagtactacttctacaaaaagattgcgggggcaggggaacttcacacattaccaagcacctcccccaagggaaataatgtcaatttttaaatttatccacatcctgtcaagcatctggaaatatatggaactctctagataataaaaagacagccttgataaaagggtttaaaaaatattattgaagtacatgtaaccccaactstttcatttattagctgaaggaccatgagtaagtcacttcatctttctgagcttcaaggtccctttaactgtaaactggttataacaccgtcactagccccccgatggtggatggaataattcaatgagaaaacatgtcgacctggcctaataggacctagaatgtaagaaagacttaaataaatgttagtaccactccaacacacatacagacctatatacagaataatgaaaagcagaaactgggccaaactttgaatgactctgacttgttactgtctgattcaaattttgggctattagaagcaatactacaatccattttgttaggcataggacttaataaagttttctaattagttctttgcaataaactcttagaaatggaaaaaattgaaaagctgtaattcaaaatttgaatagacgttttctcagaggtagggttgcgtgtaaatttattctttgggcttttacatggtttctcaattttctacaatgtatgtctgtgtttatacacgtacaaatgtatgcacatacatacacacacatacataactatagacacaca

SEQ ID NO: 707739 - DNA, 616 bp, Homo sapiens
ttttcccttaaaggataatggttttcgttaattccaaaggtcaagtgtaaaaaaagagtccctctccttcagtactgagattcatcatcctgacattatttactagaggcacagttcatgaactcataggaggccccatgatgttgggttctgctgtcatacttttgactattgcttaattatattgtgaggcaaaaatatattaaatcttgggcaccgagcgttgtcactttatgtttcagtgattttccagttcaaccactgctaataaaaacagttaccatttattttgttctatttgccagatattatcccaagttttgttatacatgcattayaaaatatctcagtcattaaagcacactgaaataatgaagcaaatatgtgtgcaaccactagccatttaaacaaatagaaacattttatattatcatttttaaaaaatcagtaacacattatagatagggctaaagtgtactatgcatagcatcccaacccaattatctgtcctcctctgcctaaagaggttagcgaacatcccaaagttgaagcatatttttcgcacctctgtctttatatatattttctctaaatgaaatctaataaagatttatgt

SEQ ID NO: 707740 - DNA, 1444 bp, Homo sapiens
tttaaatctgagacattgtttttcagatagggtttggtcatagaataaactcaccctgttgtcttatttcccagtgctgtctaaaagagggagagattakttcatcatccaacagataattccgaaatgtaacaaatgctgacagaagtgacaagcatttcattttctttgaatggattccaaagttcattccacttgctgcatatatttcttgttcaccagataactgctccaaagagtgtaaagtctgatagcaattgtggtgtaaaattgttatgcacactaaatactttacctataacctctgcctcgtgtaccaaaggagggataaggagctgaacttctcgtgcctggaagaggaaactaacttaaacaagttccagactggtggctgcagtgaaggaaatatcaatttttctcaagtttatctaggattattcaagtatttcctacacaaaacttttacaagaatttttttttaatcaccagtatcaaaattttccataggcagttaaatacctaagaggatatgataagaggataggatttttgctttttggagtgagtaaagaagggaaacttccgcttttattttgcctgttgtcattggaatttcaccatagccaagtgccttgtcctggcctactgccatgagtaggcattctttagtaactgaacattagccagagattccctcaatccactgaataacaaactcgtctcatgtagaaatgacagagagttgatcagtattttcacaacgcatctatagaagaaaaaaatatgaggcagcaatattatttcttgaaagtagtgacctctggcttgagatttcatccgtatatctaaaaatcacgtattaaatacctggactattcagaacatggccaaactcagaaagtaattaaaatggcagtcataaaaatcactgtaactaactcacgaaaggccctttggtctcctgttttgggtctattgttctaactttgcatttcatactaagcaggttgattaattgacacaggttgaatctcccttctctgaaatgattggcaccagaagtcttttgtattttagggcattttggatgtcagattttcagattgggggtatttaatctctatggctcaaagattttaaagtagcccctatgatcctcacctcctggtctttatagcctggtgttcataatcctttcccttgagtgtgggcagaatctgtgactgcttctaaccaatagaatatggcaaagacgacaggatattattcctctgatgatgttgtgtaagacaccctcatactagaagatttgcttgagagtcttgctctccttcctactggctttgaagaagccagctaccatgagttttacagccacaggccatgaattcttccaacaacctgtaaactaagaagtaaacacttcccctgatgagtcatcaga

SEQ ID NO: 707741 - DNA, 1444 bp, Homo sapiens
tttaaatctgagacattgtttttcagatagggtttggtcatagaataaactcaccctgttgtcttatttcccagtgctgtctaaaagagggagagattagttcatcatccaacagataattccgaaatgtracaaatgctgacagaagtgacaagcatttcattttctttgaatggattccaaagttcattccacttgctgcatatatttcttgttcaccagataactgctccaaagagtgtaaagtctgatagcaattgtggtgtaaaattgttatgcacactaaatactttacctataacctctgcctcgtgtaccaaaggagggataaggagctgaacttctcgtgcctggaagaggaaactaacttaaacaagttccagactggtggctgcagtgaaggaaatatcaatttttctcaagtttatctaggattattcaagtatttcctacacaaaacttttacaagaatttttttttaatcaccagtatcaaaattttccataggcagttaaatacctaagaggatatgataagaggataggatttttgctttttggagtgagtaaagaagggaaacttccgcttttattttgcctgttgtcattggaatttcaccatagccaagtgccttgtcctggcctactgccatgagtaggcattctttagtaactgaacattagccagagattccctcaatccactgaataacaaactcgtctcatgtagaaatgacagagagttgatcagtattttcacaacgcatctatagaagaaaaaaatatgaggcagcaatattatttcttgaaagtagtgacctctggcttgagatttcatccgtatatctaaaaatcacgtattaaatacctggactattcagaacatggccaaactcagaaagtaattaaaatggcagtcataaaaatcactgtaactaactcacgaaaggccctttggtctcctgttttgggtctattgttctaactttgcatttcatactaagcaggttgattaattgacacaggttgaatctcccttctctgaaatgattggcaccagaagtcttttgtattttagggcattttggatgtcagattttcagattgggggtatttaatctctatggctcaaagattttaaagtagcccctatgatcctcacctcctggtctttatagcctggtgttcataatcctttcccttgagtgtgggcagaatctgtgactgcttctaaccaatagaatatggcaaagacgacaggatattattcctctgatgatgttgtgtaagacaccctcatactagaagatttgcttgagagtcttgctctccttcctactggctttgaagaagccagctaccatgagttttacagccacaggccatgaattcttccaacaacctgtaaactaagaagtaaacacttcccctgatgagtcatcaga

SEQ ID NO: 707742 - DNA, 1444 bp, Homo sapiens
tttaaatctgagacattgtttttcagatagggtttggtcatagaataaactcaccctgttgtcttatttcccagtgctgtctaaaagagggagagattagttcatcatccaacagataattccgaaatgtaacaaatgctgacagaagtgacaagcatttcattttctttgaatggattccaaagttcattccacttgctgcatatatttcttgttcaccagataactgctccaaagagtgtaaagtctgatagcaattgtggtgtaaaattgttatgcacactaaatactttacctatracctctgcctcgtgtaccaaaggagggataaggagctgaacttctcgtgcctggaagaggaaactaacttaaacaagttccagactggtggctgcagtgaaggaaatatcaatttttctcaagtttatctaggattattcaagtatttcctacacaaaacttttacaagaatttttttttaatcaccagtatcaaaattttccataggcagttaaatacctaagaggatatgataagaggataggatttttgctttttggagtgagtaaagaagggaaacttccgcttttattttgcctgttgtcattggaatttcaccatagccaagtgccttgtcctggcctactgccatgagtaggcattctttagtaactgaacattagccagagattccctcaatccactgaataacaaactcgtctcatgtagaaatgacagagagttgatcagtattttcacaacgcatctatagaagaaaaaaatatgaggcagcaatattatttcttgaaagtagtgacctctggcttgagatttcatccgtatatctaaaaatcacgtattaaatacctggactattcagaacatggccaaactcagaaagtaattaaaatggcagtcataaaaatcactgtaactaactcacgaaaggccctttggtctcctgttttgggtctattgttctaactttgcatttcatactaagcaggttgattaattgacacaggttgaatctcccttctctgaaatgattggcaccagaagtcttttgtattttagggcattttggatgtcagattttcagattgggggtatttaatctctatggctcaaagattttaaagtagcccctatgatcctcacctcctggtctttatagcctggtgttcataatcctttcccttgagtgtgggcagaatctgtgactgcttctaaccaatagaatatggcaaagacgacaggatattattcctctgatgatgttgtgtaagacaccctcatactagaagatttgcttgagagtcttgctctccttcctactggctttgaagaagccagctaccatgagttttacagccacaggccatgaattcttccaacaacctgtaaactaagaagtaaacacttcccctgatgagtcatcaga

SEQ ID NO: 707743 - DNA, 612 bp, Homo sapiens
cctgggccccaccccaaacctacttaattggaggtccatttaacaatattctcrgctgggcgcggtggctcatgcctgtaatcccagcactttgggaggccaaggcgggaggattgcttgagctcaggagttcaaggttacagtgagctatgatcgcccactgcactccagcctgagccacagaatgagaccctgtctctattaggaaaaaaaataattttatatatatatatgtaatttgttcatagttcatatgcacgtcaaagtttgagaagcactgatttaaacaatctctttagatttctttatggggagaaatgtgctttaagttaaaaaagaaagttaaacacaacattgtatttaggaacacagtgaacaatcacaggtccagctacattttagctcttcttttgtgtccttacaaggaaaacatatgcatggaggagttgaagagaaagggaggatgatggaaaaaaaaaagacaaaaaaaaaaaaaaaaggaaaaggccttatatgcgtgagatgcctaggactaaaaataaaatggatggggacttggcaatatgaacttggaaacttggcaccctgggtcattataatgcatgggacatg

SEQ ID NO: 707744 - DNA, 1135 bp, Homo sapiens
gattcaaagatgactaagaagcttctagcttggacaaatggaaaaaagatggtgtcagtgacaaaaattagaagagagctagatcaaggaggaagaaaagaggcaaaagaagcaactttcaggtttagaaatgcagtatttgaggtgatggtagaacactgataagagttctataagcaacagaaaattgtgattatatgcatattaattagtgtgtattaatataattattagaagccagtgactaaggctagagatggggatttagaaattacatataagattcaacaaaaattgactaagcatctactttttgccagtagctcagtcaacattatgacatactttatttcatttaacactcataaaacatgttttactattagtttctgaggacagtgacaatgtcttttttcttttacttattcagaattaagcaaatayttattgagcacctaccatgtgccaggctctaggaatataatgagaaacaagaaaaacacaattcctgctcccacagaccatagactggcataaagattctcaacctctcctgagtactgtaatcatctgtgaagggatgttacagacagaggcaccccaacccgatgcattaattctggacctaattagtgttttccatagtgaggcccagttatgtttaattttttcaggacttcacaggcaattctgagactgaaggttaagaatcactgctaaagcaggtgtcttcaccagcatatctctgtacctaatgtagctgctgggcacacagtaggtactcaatatatatttgcctatcaatgaaaaaagaatacattactgttaccatttaagagttaaggagactgagggtgagagaagttaccttgcccagagatctacacagccagtagtagagctaggattcaaatgaaggtcttctgagacaaccaatcccatcaaccaaatgtagtggctaagaggaaagggatcatagataatataaaagaggaggctgcagcactgtgtgccacagaggtctggagtctggaagccaagggtgatgggagtcagatggaacaggtcttttcaaaagagccaattcccattcactgtctccactccctcacctgttagctgttgttttattttt

SEQ ID NO: 707745 - DNA, 1135 bp, Homo sapiens
gattcaaagatgactaagaagcttctagcttggacaaatggaaaaaagatggtgtcagtgacaaaaattagaagagagctagatcaaggaggaagaaaagaggcaaaagaagcaactttcaggtttagaaatgcagtatttgaggtgatggtagaacactgataagagttctataagcaacagaaaattgtgattatatgcatattaattagtgtgtattaatataattattagaagccagtgactaaggctagagatggggatttagaaattacatataagattcaacaaaaattgactaagcatctactttttgccagtagctcagtcaacattatgacatactttatttcatttaacactcataaaacatgttttactattagtttctgaggacagtgacaatgtcttttttcttttacttattcagaattaagcaaatacttattgagcacctaccatgtgccaggctctaggaatataatgagaaacaagaaaaacacaattcctgctcccacagaccatagactggcataaagaktctcaacctctcctgagtactgtaatcatctgtgaagggatgttacagacagaggcaccccaacccgatgcattaattctggacctaattagtgttttccatagtgaggcccagttatgtttaattttttcaggacttcacaggcaattctgagactgaaggttaagaatcactgctaaagcaggtgtcttcaccagcatatctctgtacctaatgtagctgctgggcacacagtaggtactcaatatatatttgcctatcaatgaaaaaagaatacattactgttaccatttaagagttaaggagactgagggtgagagaagttaccttgcccagagatctacacagccagtagtagagctaggattcaaatgaaggtcttctgagacaaccaatcccatcaaccaaatgtagtggctaagaggaaagggatcatagataatataaaagaggaggctgcagcactgtgtgccacagaggtctggagtctggaagccaagggtgatgggagtcagatggaacaggtcttttcaaaagagccaattcccattcactgtctccactccctcacctgttagctgttgttttattttt

SEQ ID NO: 707746 - DNA, 2742 bp, Homo sapiens
ttaaaagcctgttttggtttagaaatcatgcttgcttgccttttatattacataatagttagaggaatattgcccttcagtatcccaaacaaggcaagagagttgtcactggacatttccatggatctacaacttctgctgcaggaagcaataaaacaggccagaacaacagtgcacacacacacacacacacacacacacacacaccagaataggagtcaggtagtttgtgcagtagctcatcagccaactgggggcaagactcctttgctgcctgcctctgatatccacaatcagcccccagtgtgtcagcacctgcaggaccgtctcagccagagcagagacccacaagcagtgccatttataactaaatactgataaactagattaacagggagccaagagcaggtaaaaactttggcttagtctctgtctttgcgtgccctgagttgtctgtcttcattgtaagcacaagatttagagtaagatctgattctgaccaagagaaaggaagcagcttcaaggttagagcctagaacagccctcaactacacatgtccgtaactccctgcactcctgtttgtagaactcatagtcatttctttaatgtttattctcccgattagaatataagctccataaaggcagaaataaaactgtcttgttccctgtagtattttcatcaggtcatgcatagtatgacctcaataaatgtttgtttgaaaaaaaaaaaatcttagccagacacagtggctcatgcctttaatcccagcactttgggaagctgaggcagatggatcatttgagcccrggagtttgagaccagcctggccaacatgggaaaaccctgtctctactaaaaatacaaaaaacttagccgggcgtggtggtgcacgcctgtagtcccagctacttggaacactgaggcatgagaatcatttgaacccaggaggtgaaggttgcagtgagccgagattgcaccagtgcactctagcctggacgacagagtgagactctgtctcaaaaaaacaaaacaaaacaaaacaaaacaaaacaaaacaaaaaaacctctgtctcttcttcattatactaccatttgcaagtttcatgaggaccatcctaaaagccatcttcttgtgtcttatcctgtgtattcttcactatatccattcatttattctttcatttaatcaattatttaactaacatttatacaattacattgaggtagcaaatattactattaaaaatgtatttatttatttgagacagggtctcgctttgttgcccaggctcgagtgcagtggcacagtagcgactcactgcagcctcaacctcctgggctccagccatcctcccacctcaacctcctgagtagttgggactacaggcacataccaccatacctggctaatttttgtattctttgtagagatgaggttttgccgtgttgcccaggctaatctggaactcctgggctcaagcaatcctccagtctcagcctccccaagtgctgggattatagaagtgagccactgtgcccagccaaaaaatcttctacccttaagaagctcatgatctgtaagaggcccacaggttactaaatcacaatatgatatagaagtgccacaatagagtataaaagggatactatagacatagtagttaaaatagcaatgaagtgcttttttcccctactaaaattaacaaacataaaaataacatagtagtagtcaatcccaccgtgttccatcctaacagactcccagtttgcgtgcctcatccatgcaatcaggtgactcaagagaggctgacttcattctcaattccaaaagctgattccacacaaaccaaaggtcataatcccatccagtgggattgccagtgattggttcaagaatacaagtttaaaccaagggttggctgggcagggtggctcacgcctgtaatcccaacactttgggaggctgaggtgagaggatcccttgaaaccagaagttcaaggccagcttgggcaacatggcaagacctccggaggttgaggctgcagtaaactgtgttagtgtcacttcactccagcctgggtgacagaatgagaccctgtctcaaaataagataaaataaaataaaaataagccaagggtcaagcttaaagtgaattacattgccccaaggaccattctatgtccaggaagaagcacatgacctaaaaatggcccaatcagatttaaaatggaactttattccatcattagggtagcattctcccactcttgtgtttaaaatggaactttattccatcattagggtagcattctccccctcttgtgcagaacacaaacaaggaagtaggctgccccagcttgtgatctgagggatccctgaggacaatgacagacggtcaaaagcagggagggagatgtgagataactgcagtaaaatatggctagaacccaaattacagcatacctgggccctgccctacttctgagattttttaaagcagcaattaccatacattccttattgtttaagacaatgtgaattaacagttatttgttacttgcacacaaaatatcctaacagagcaaataaaggtattgtaaaactgcgtaacaagatggggaaatgttaacgcttatactactagtccctaaaaaatagaatacaagataatatacacataatggtaatagcaatattaaaaagtcagaatagttacaaaaatgctaacaataattg

SEQ ID NO: 707747 - DNA, 613 bp, Homo sapiens
atacagaaataatcgccagaaaatagaaattatttttatgccttaccttttcaaacagcttgagatttaatccacacagcacccaattcamccagttaaagtgtgaaatttaatggcttttagcatattcatagagttgtgccatcttcaccacaaccaatatttgaacattttcaacacgtcccaaaatattgtgtgtcttcacactcactcctcttttctgccccaatcttatccacctcaaccataaggaactactaatctatattcattgcaactctgcaatagatgtaaataaatttcgtattttatcagacttctcttgtcctttaaataaaaagtcactctattgaaagatacttcagataccatagaattcagacatttaatgtgtaaaattctatggtctttagtagagtcacaaagttgtgcaattcccaccataatctatttctggaaaattgttattgcccccaaatgaaaccatgtgattaattagaagccactgtttatttgcctattctgaacatttcctataaatacatcacacaatatgttgtatttggggtatttggtgactcttttctgttacttggcacacactttcaaggtt

SEQ ID NO: 707748 - DNA, 1087 bp, Homo sapiens
ccaacaggtaaagattatagagacaaaagagaagagggtccagaatggatccctggagaactaaaccatctgagattgaataggggaagacggatatagataggtggagcaagctgagaaatgctggggtaaggagaggaaaactaggataatatggggtcactgaagacaagaaaagagtacattgaaaatgattgtaccaaaagccactgtgaggtcaagtaaagaggagaacatacaaaagctcatggggtttgaccatttttattttattttattttatttatgtatttattcactactgatcagaaggcaagaccattttcaaacttctacaatttggttccatttcccctaaatgacctgatgtcttgttgaattctagctggagtcacacatcccagtttgctaagggcagttctccaaatagtcatgctgtgctcatgtcagaatgtaatttttaaaagtagttttatttcttttatttttctctttatatatttttgttttttcttaagaggtcacaccaaagaccaaatgtaattattaatagtgctctctttcattatcaaaagtgcatccgtttgcaagataaattacatggttactctctttctaacacaagccatttgtgccaggtgagcaggggtaactttcctcccaattcccgccattcttcttcctcttttggggcttcttcccagggtgctccccacacaccagaaatgcttctgcttctttctgacaaactcaagtctcacctctccatgcttcttcaattctcatccaaccaacggcctactctttctttctctttattttcttaacagtgtatttttattccgaacaatatccgatttatagaaaatttgaaaccatagaacaaaagacttttttctcctcatctctttgagaataagttgccaacatggtgtccrtggcccctaaatactttagcattttcttataaacaaggacactcttcctaccgaaatcaggaagttaacactgatgcattgttacagtataattctcaaactcattcaggtttcactaactgtcccagtaatgtctttacagcaaatga

SEQ ID NO: 707749 - DNA, 707 bp, Homo sapiens
gcctaacaatttctcagtcaatcccaaatgaaatggttcagcmctgatgcacgtcctcaatcagccattggcggtgggtgccccctctacgcccaggggtctgctcttggaagacgcagctttctgcaggtgagggggacctaagaactgacagctgcaggctctgctgactgtacaccctgcagctaaggccaaatgagtggcacatctctgtgttcaccgcagtcccattcttgtatgccacacgaatgctctatgtaattctctgtcaaaggggtataaaaagtggtccttctctatccagtgatttaagaaaccagacatgctgcagcagatctgacgctagattaataattatatcagaacttggagtactaaacagtcacacccaacgacagagagaatggtaacataaactgcctggcattgattaactgcaacagtcaaactagctttaattcagtgcaaacaacaacaaaaaccttatgatgtttcttaacattttaaaaattgctagtctaatactaaaaagtttattattttctcctaaccactaggacttcaatttaagtgaataatgatttattggatttaccctcattataaaattcagacatgtaccacataatgacattttgatcaacaatagactacatagacaatggtgacttcataagattataatatcatatttttactgtaccttt

SEQ ID NO: 707750 - DNA, 707 bp, Homo sapiens
gcctaacaatttctcagtcaatcccaaatgaaatggttcagccctgatgcacgtcctcaatcagccattggcggtgggtgccccctctacgcccaggggtctgctcttggaagacgcagctttctgcaggtgagggggacctaagaactgacagctgcaggctctgctgactgtacaccctgcagctaaggccaaatgagtggcacatctctgtgttcaccgcagtcccattcttgtatgccacacgaatgctctatgtaattctctgtcaaaggggtataaaaagtggtccttctctatccagtgatttaagaaaccagacatgctgcagcagatctgacgctagattaataattatatcagaacttggagtactaaacagtcacacccaacgacagagagaatggtaacataaactgcctggcattgattaactgcaacagtcaaactagctttaattcagtgcaaacaayaacaaaaaccttatgatgtttcttaacattttaaaaattgctagtctaatactaaaaagtttattattttctcctaaccactaggacttcaatttaagtgaataatgatttattggatttaccctcattataaaattcagacatgtaccacataatgacattttgatcaacaatagactacatagacaatggtgacttcataagattataatatcatatttttactgtaccttt

SEQ ID NO: 707751 - DNA, 2452 bp, Homo sapiens
attttcacataatttcttatttaagtaaatgttaattaagggaggctgaggtgggaggatcacttcagcctaggagcttgaggctagagtaagcagcgatagcaccactgcactccagcctaggcaacagaacaagaccctgtctcaaaaaaaaacaaaaaaacaaaacaacagcaataacaacaaaaaacctctctatctctctctgtctatatatatatatgaaaaataaagagaaaaaagtaattgtctatatatttgtccatattagtcatttttactgaatacatacaatgacaaaaatggcatatcaatgaaaacaatctgaaggggaacaaaaagtagactttgtaataccaatggaagaatttttgaatctaggtggaggggtggatgaagtggggttgtataaattgacttgaccacattcttaatcttgaagttgatatgataatattatccagaaaaatgccattcattcatattgagtaatatattacatgtaaatcacacaacacaatgtctggcacatgagcttggtgttttgtttcagctgtccatgtgagtcgttgatatcacctagatactcctcaaggaaaaactttgtaataaaatcagtcgtgcttgtttgctttggatactagcatatgaccatatttatcactagcagaattcattttggatccatgttagggatttctttctttttttttttttttttttttttttgagatagagtctcgctctatcacccaggctggagtgcagtggcgcaatctcggctcactgcaagctccacctcccgcgttcacgccattctcttgcctcagcctccctagtagctgggactacaggcacccgccaccaccccgacgcccggctaatttttttgtatttttagtagagacggggtttcaccgtgttagccaggatggtctcgatctcctgaccttgtgatccacccgcctcggcctcccaaagtgctgggattacaggcttgagccaccgcgcccggcccatgttagggatttctacatgaaacacaataaaacaccaattgccaaatatatccacccctccatacccaccctaatgaaatctcacttatctgcaagactcatcttgaacaccacctcctccatgaagtccttcctggtctcttctaaaagcagatatattttcttgctgtcttgagcatcttaaaagctttgacttttacccctctgacaataccgactttgttctgcctgctttgttactgtctctttgccttatcccctattagaatttaagactcttgaaactcaggacggaccttatctttacatttcctacaggctgagcacagggtgttgaacctaggagctcaataaaaatgtgttgagttgcagtgaatcgtgacccaccctggctaccaggccctcagccagctttagagtacaggacacaataggtccttgtattcactgctgtgcgcacccacaaacatacactaagcacctggaaacaaggggacacttagttacttggcaaatacttgccctcccagggtgtcttcccttttgaaaaggctccttggacagctggcctgctgctggttagatggggcactccctggaatggcccatcactgcagcaaatggccaaattcaccgtgccaggaaccaagagaagagaagggtccaagcatgagagtctcaatgccaagaatgtgctccagacttataaatgagagggaagcagggagcattgcgatgagggaaatgatgttgaatttgcactaaagcctcctctctctctcttcctcttttccgtctggtcccttccttctccctccctgctcccaatctcccattgtcacttggtcctgcagagcttggaattcacggctaatccttagggaggggcctctgctgcaggggggtcagggccatcgcccacttcctctgtgggatgcgctcacaagatgctgtggcagcactgttggctgctctttattaaatacaaattgtactgaccggtttccaggaacttcagtggaaagttgattcccccaaaccctcaagacatttcccagatcctgaaaggattattattatctttgttattatttacaaagcccacatcatttttgtaacattttctttaaaaagcaagatggaaagatagagcatgcataagcatgcatcttccagaatgcatccttaaattctgcttccttcacaggaataaaataacctgttggattctggttgggcagcaagacagagggaacaggcttaytcttgaagtccaaaactgacaaagtttctagatttagcaagtaaaaatacaggacacccatttgaatttgaatttcagataaataacgcataatcttctaggataggtatatcccatatattgcatgggacgtacttatcccagatgattacgcgttgtttatctgaaa

SEQ ID NO: 707752 - DNA, 2452 bp, Homo sapiens
attttcacataatttcttatttaagtaaatgttaattaagggaggctgaggtgggaggatcacttcagcctaggagcttgaggctagagtaagcagcgatagcaccactgcactccagcctaggcaacagaacaagaccctgtctcaaaaaaaaacaaaaaaacaaaacaacagcaataacaacaaaaaacctctctatctctctctgtctatatatatatatgaaaaataaagagaaaaaagtaattgtctatatatttgtccatattagtcatttttactgaatacatacaatgacaaaaatggcatatcaatgaaaacaatctgaaggggaacaaaaagtagactttgtaataccaatggaagaatttttgaatctaggtggaggggtggatgaagtggggttgtataaattgacttgaccacattcttaatcttgaagttgatatgataatattatccagaaaaatgccattcattcatattgagtaatatattacatgtaaatcacacaacacaatgtctggcacatgagcttggtgttttgtttcagctgtccatgtgagtcgttgatatcacctagatactcctcaaggaaaaactttgtaataaaatcagtcgtgcttgtttgctttggatactagcatatgaccatatttatcactagcagaattcattttggatccatgttagggatttctttctttttttttttttttttttttttttgagatagagtctcgctctatcacccaggctggagtgcagtggcgcaatctcggctcactgcaagctccacctcccgcgttcacgccattctcttgcctcagcctccctagtagctgggactacaggcacccgccaccaccccgacgcccggctaatttttttgtatttttagtagagacggggtttcaccgtgttagccaggatggtctcgatctcctgaccttgtgatccacccgcctcggcctcccaaagtgctgggattacaggcttgagccaccgcgcccggcccatgttagggatttctacatgaaacacaataaaacaccaattgccaaatatatccacccctccatacccaccctaatgaaatctcacttatctgcaagactcatcttgaacaccacctcctccatgaagtccttcctggtctcttctaaaagcagatatattttcttgctgtcttgagcatcttaaaagctttgacttttacccctctgacaataccgactttgttctgcctgctttgttactgtctctttgccttatcccctattagaatttaagactcttgaaactcaggacggaccttatctttacatttcctacaggctgagcacagggtgttgaacctaggagctcaataaaaatgtgttgagttgcagtgaatcgtgacccaccctggctaccaggccctcagccagctttagagtacaggacacaataggtccttgtattcactgctgtgcgcacccacaaacatacactaagcacctggaaacaaggggacacttagttacttggcaaatacttgccctcccagggtgtcttcccttttgaaaaggctccttggacagctggcctgctgctggttagatggggcactccctggaatggcccatcactgcagcaaatggccaaattcaccgtgccaggaaccaagagaagagaagggtccaagcatgagagtctcaatgccaagaatgtgctccagacttataaatgagagggaagcagggagcattgcgatgagggaaatgatgttgaatttgcactaaagcctcctctctctctcttcctcttttccgtctggtcccttccttctccctccctgctcccaatctcccattgtcacttggtcctgcagagcttggaattcacggctaatccttagggaggggcctctgctgcaggggggtcagggccatcgcccacttcctctgtgggatgcgctcacaagatgctgtggcagcactgttggctgctctttattaaatacaaattgtactgaccggtttccaggaacttcagtggaaagttgattcccccaaaccctcaagacatttcccagatcctgaaaggattattattatctttgttattatttacaaagcccacatcatttttgtaacattttctttaaaaagcaagatggaaagatagagcatgcataagcatgcatcttccagaatgcatccttaaattctgcttccttcacaggaataaaataacctgttggattctggttgggcagcaagacagagggaacaggcttactcttgaagtccaaaactgacaaagtttctagatttagcaagtaaaaatacaggacacccatttgaatttgaatttcagataaataacgcmtaatcttctaggataggtatatcccatatattgcatgggacgtacttatcccagatgattacgcgttgtttatctgaaa

SEQ ID NO: 707753 - DNA, 1333 bp, Homo sapiens
tgaaatgttttgtaaattttttttaatgtgctgctaggttttttgttttgttttgttctgaagagaagagtggtaccatatgttgcaggaagtcaaactggactttttgtggctactaaatttgcttttaatcttattgttctcaattttggaatcaagtatgaaaatctgcacaaatgcaatgtttacaagaactggttgattctgggaggcatctgctacagtctctttttatatggatatgtacatgtcctattctacaaaaatgattaaagataaaaacatacttgtatcccactgctactttagctgtcaaatttggtgtttcatcacattaaaagcaataaatcagtagttggtaatgtactttactaaataagttggggggtacaatttttaaaagtcttaactcttaaatacttgactttcggcaccatcagttaaatccttgactataatacaaatttgatatatacattacatttaccctcaaattattctcaaaactatattccttagaatttgattttaccctgctgactttaagagttataataatatcaaatgtgatgagctaatatagattttctttttaaataagaataacttcaagctcactctttcttaacatagtctgggatctctcagggagtaagttttaaaagaatactaatggcttgtaagaacaaacaggaataataatctgatttttaaatttgtrgttattttactcatgttgccttttaatttttgttattttggtttattttttgatgtagccttttaaaaaaggagtcttaaaaatgattttttttttaaaggcaagagaaatcttgtagtgctaactgccttgagctgccaattacctatttctgagaatttggtgactcttattggtaatgatggcatttacaacatttggcatttcccctttttcagctcagttaccatagaatacttccaagctttactacttcctctgtaagtcatttcagttatgccaggatatttgatgattttgtttatgtagaattaggtaacaaagccaattatgctatccttattattgaaggattaatcttatgacttaacataagctttggttatatttgggtgtagtctttggctaagtacccattaaggctagtagcaaacacttggaaggtggctaactgggactgggaatacgtgtctcaacttgagaaaccaaatagtgcgaagggactcagggtggccagacctgtgaccttggcctcatttgtatcttgttttcgctgaggtgatcagacacttagtaccctagaaatggactggaattattgaatcttcttct

SEQ ID NO: 707754 - DNA, 778 bp, Homo sapiens
tcagaattaatttctttctgccttattgccgttgtcaccaacaggcatttcttgagtgcctgtcacatggaaagcatcccagtggctagagctggaagctaagggtctggttcctagccttggggaattaaaacctttatctattaatacacaatgctttaggctttaaattccatctgcactctgttccaacaaaaaaattaaagtggacaggttcttccaccctgagtaaataacagtatagggttaaaatcttttgttatctaagtgtaagtcagcatctctcttcatcagtggaaacaacatatttacatccagagaaagttgttattgcagacgtgaatttggtttagtgaaagcctttgctttgctaaaaaataaaaattttaaaaattagaaaaaaattctaartaaggaaaataagttcttaaaaaatgatgctctatgtaatgaagatacctgttttaggctttgcttgtgtatttagcaactaggaagttagagaagcaattaaagccactttcttaaaataggaaagtgttaaacatacagaaaagatcaaagaatagtacagtgaacacggagatatactcctgctgcctatagttaacgataaatattttgccaaatttgcttcacttgtttgtgggttttgtttgtttttgttttttactgaatcatttcagtgtgaatgggcatcatttcacttcaaatctgaggctttgcaggttgtgtctcctaaaaataagaatattagagtctggggttaactgttgta

SEQ ID NO: 707755 - DNA, 577 bp, Homo sapiens
aaacagactggctcattttcatgggtgactgactgaaggaatttaagacttgcttcaataatcctcaattcatgaatctagatggtataaacacatattgataattttaaaactaaaataatcaaaaatgtacattaaaatatttttaaaataaactgaattattattcatgtaaagaatttgaagtgatataaaaatgttaaataaataatacaatgcaattcagtatattatttcaataacagtttttagtgtactctttgaagcagaaatattataacattctttgtcataatgagaagacaattttaaacatcttttccaaatattaaggttgtctggcatatgagactacatttatgtgactgtatgttgtatttcaatgatgaatgagttttacctagaaaagattaatagaagattttaataaaagtaaactatatgagagtcttacagttattgttgtaagagctaaaataaaagcttcacttatagaaaaaaatactaaaaggtttagtaactactcaatatraatttgcctgttactaaaatattttattattaggttgttgcaaaa

SEQ ID NO: 707756 - DNA, 3576 bp, Homo sapiens
gtggctttgcattgccttagataggaaataaatggccatttgaaatactttatctaccatctgtttcttggtgctctaaacttccatcttattgtcactaaaagatagtaaggctcactcagaccctgattttgtcacgtccttaagcctctaaccttaaggatctttttttctaggggatgccgtatacttgtgcacaatacttcaattagaccctgccaggtagtgccttataccttaaaaacactttcagactgggcgcggtggctcatgcctgtaatcccagcactttgggaggccgaggcgggcggatcacctgaggtcaggagttcaagactagcctggccaacatggtaaaaccccgtctctactaaaaatacaaaaattagctgggcatggtggtgcgcgcctgtaatcctagctactcaggaggctgaggcaggagaatcactcgaacccaggaggcagaggttgcagtgagccaagatcgtgccactgcactccagcctgggtgatggagagaggctccatctcaaaaaaacaaaaaacaaaaaacagaaagtcacttttgtatccattttctctttaacccttacaaaaggcatgtataggcatgtggggtattctcgttctgcagaggaagaaacataggctcagtgaaatcagagatgttaagtggtaacgttgctatcaaatccatgtctgtatgattcccaaatccttgcatggtaggcaggagtctgtgtcttctaagatttccctccttgccatccccatgtacacattctatataatccttaggagtgtgaatttgattgcttttactgcaatgattacatggcagtaaatattatatggcacagccgatgttaagagagtatacaggtgggcctggtctaatcacatgagacttttaaaaccagagagttcattatggccagtagcagtggcagaagtcagagagattaaaagaatgggcagggcttgctgcaatgtttttactttgatggaggagacgtgaggagctgagagcagttcacagccaatggccaggaacgaaatgggacctttgtcctgcaactggaaggaactgaacctgcccacaagaaagggcttaggcaggtctttcccagagcctccagactagaactcagcctggctgacaccttgcttcacctttgtgagagcctgaacagagaacccagccaggccatgctggactcagaagctacagaactgtgagctaatgaatgaatatagttgttcacctctaagtttgtggtgatgtgttatgaagcaatagaaaactaacacaccctgcttttttggtgagatcttgggacttgagacaagtctttgaacttttctggtcttaattttcacttgaaagaggattagatgtgatctttaaggttctttccagctcagatgactcttaagattcttaaaacagtttctcatgaaaagtaatctgtattttagggccatactatggatatgttgggaagatagagtttgtgactcctgattcgaaggccatcagctcatctgtggaaaactcagggagcacatggagggaatgaggctcttcaacgtcctgaggccctgtgctagagctcggargtaccacaggaataatgcaaggtgcctgcccttacactctgggtagggaggctgagcattggtgtccatatgaataagcagtgactacaaagtaaagtcccagaggagggagggagtcttggttgaaggatgtaaagcttgggctggattttaaagctaagtggtttgccaggctattggtgctggaacagcccaaatagaggtagcagcataaaggaaggcatgggacatgagtgagactgaccgtgtcggttatacctgctgattctaaagcccagggcaggcattgagtaaatgggaactgttagcaaatagattattgctggagtatttggagtggtgaagctggagagaggattttgtaaacaggatacctctatgctgaacacgttgagcatcactctgatataacctcgcttactttattttattttattttattttattttattttattttattttatatatttatgtatttatttttttgagactgagtctcactgtgtcacccaggctggagtacagtggcgccctctcagctgactgcaacttccgcctcctgggttcaagcaattctcctgccttagcctcccaagtagctgggactacaggcgcctgccaccaagcccagctaatttttgtatttttagtagagacgggattttaccacgttggccaggctggtctctaactcctgacctcaagtgatctgcccgcctttgcctcccaaagtgctgggattacaggcgtgacccactgcgcctggctcctgctaattttaaatccatgtaatcaatatttactaatcctttaatctagtgcttatccccccgaaggatagttttgttgagctttactttctgtagttaaaatgataaaaatcaataagaatatactgaatatattcttcccaatgacttcagaacttaaccctgctcccacctgccacctaacacaggatcctattaggctctcctgaagactcacttgtccaaaatataaccttaatgtgaattacagaatcacaaggctgaaataacaattactggattgcaaacttcctttcacttctcaatatcacctaaaacactcagcacggtttcctgcacacagcaggtgctcaatgtctaattaaatttaattggagataaattgaaatgagcacacaaaaaaggagcagggatcctattcagagcttcctgatggattgtgttcaggctttttgcacacaccaaacccgaatggctggaaagcatggagcagctacagcacacttcaggagaatgccacagttgacacccctgatactggagagaagtcattcagctgccagagggcagctgccgggaggaaatcccctcttcacacaaggaccgagctgttctatgagccaccagagattattaccactcagttattattactgtagttgactgctccatgagctgatggttaaattacattaacaattatggaaaatagtgtgacactaaagaattattaagtagttcatatgcattgctaatctcccaccgttatacagaataaaagaccagataagatagacagttggtagctgcaggtttatctgcttatttttggtgggaagatgttttccccctaaaatctaccattaatttattcattgaccaaaggtttattgaatacccactgtgactcaaacactgggctggcctctaggtttgaactgcaaaaaagatcaacatggtcccttgcccttatatgaagcttaaaatctagaagttagaaacttcaagagtgtaaagtattttgatggctaagggcaagatgctctgggagtgagtgcacagggaacaaacctagtccagggaggtgaggttctctaaggaaataatatcttaggtgacaactgaatatgaatgtgagttaacagggggagggagggaggaaagggtgggagagatttcag

SEQ ID NO: 707757 - DNA, 3576 bp, Homo sapiens
gtggctttgcattgccttagataggaaataaatggccatttgaaatactttatctaccatctgtttcttggtgctctaaacttccatcttattgtcactaaaagatagtaaggctcactcagaccctgattttgtcacgtccttaagcctctaaccttaaggatctttttttctaggggatgccgtatacttgtgcacaatacttcaattagaccctgccaggtagtgccttataccttaaaaacactttcagactgggcgcggtggctcatgcctgtaatcccagcactttgggaggccgaggcgggcggatcacctgaggtcaggagttcaagactagcctggccaacatggtaaaaccccgtctctactaaaaatacaaaaattagctgggcatggtggtgcgcgcctgtaatcctagctactcaggaggctgaggcaggagaatcactcgaacccaggaggcagaggttgcagtgagccaagatcgtgccactgcactccagcctgggtgatggagagaggctccatctcaaaaaaacaaaaaacaaaaaacagaaagtcacttttgtatccattttctctttaacccttacaaaaggcatgtataggcatgtggggtattctcgttctgcagaggaagaaacataggctcagtgaaatcagagatgttaagtggtaacgttgctatcaaatccatgtctgtatgattcccaaatccttgcatggtaggcaggagtctgtgtcttctaagatttccctccttgccatccccatgtacacattctatataatccttaggagtgtgaatttgattgcttttactgcaatgattacatggcagtaaatattatatggcacagccgatgttaagagagtatacaggtgggcctggtctaatcacatgagacttttaaaaccagagagttcattatggccagtagcagtggcagaagtcagagagattaaaagaatgggcagggcttgctgcaatgtttttactttgatggaggagacgtgaggagctgagagcagttcacagccaatggccaggaacgaaatgggacctttgtcctgcaactggaaggaactgaacctgcccacaagaaagggcttaggcaggtctttcccagagcctccagactagaactcagcctggctgacaccttgcttcacctttgtgagagcctgaacagagaacccagccaggccatgctggactcagaagctacagaactgtgagctaatgaatgaatatagttgttcacctctaagtttgtggtgatgtgttatgaagcaatagaaaactaacacaccctgcttttttggtgagatcttgggacttgagacaagtctttgaacttttctggtcttaattttcacttgaaagaggattagatgtgatctttaaggttctttccagctcagatgactcttaagattcttaaaacagtttctcatgaaaagtaatctgtattttagggccatactatggatatgttgggaagatagagtttgtgactcctgattcgaaggccatcagctcatctgtggaaaactcagggagcacatggagggaatgaggctcttcaacgtcctgaggccctgtgctagagctcggaggtaccacaggaataatgcaaggtgcctgcccttacactctgggtagggaggctgagcattggtgtccatatgaataagcagtgactacaaagtaaagtcccagaggagggagggagtcttggttgaaggatgtaaagcttgggctggattttaaagctaagtggtttgccaggctattggtgctggaacagcccaaatagaggtagcagcataaaggaaggcatgggacatgagtgagactgaccgtgtcggttatacctgctgattctaaagcccagggcaggcattgagtaaatgggaactgttagcaaatagattattgctggagtatttggagtggtgaagctggagagaggattttgtaaacaggatacctctatgctgaacacgttgagcatcactctgatataacctcgcttaytttattttattttattttattttattttattttattttattttatatatttatgtatttatttttttgagactgagtctcactgtgtcacccaggctggagtacagtggcgccctctcagctgactgcaacttccgcctcctgggttcaagcaattctcctgccttagcctcccaagtagctgggactacaggcgcctgccaccaagcccagctaatttttgtatttttagtagagacgggattttaccacgttggccaggctggtctctaactcctgacctcaagtgatctgcccgcctttgcctcccaaagtgctgggattacaggcgtgacccactgcgcctggctcctgctaattttaaatccatgtaatcaatatttactaatcctttaatctagtgcttatccccccgaaggatagttttgttgagctttactttctgtagttaaaatgataaaaatcaataagaatatactgaatatattcttcccaatgacttcagaacttaaccctgctcccacctgccacctaacacaggatcctattaggctctcctgaagactcacttgtccaaaatataaccttaatgtgaattacagaatcacaaggctgaaataacaattactggattgcaaacttcctttcacttctcaatatcacctaaaacactcagcacggtttcctgcacacagcaggtgctcaatgtctaattaaatttaattggagataaattgaaatgagcacacaaaaaaggagcagggatcctattcagagcttcctgatggattgtgttcaggctttttgcacacaccaaacccgaatggctggaaagcatggagcagctacagcacacttcaggagaatgccacagttgacacccctgatactggagagaagtcattcagctgccagagggcagctgccgggaggaaatcccctcttcacacaaggaccgagctgttctatgagccaccagagattattaccactcagttattattactgtagttgactgctccatgagctgatggttaaattacattaacaattatggaaaatagtgtgacactaaagaattattaagtagttcatatgcattgctaatctcccaccgttatacagaataaaagaccagataagatagacagttggtagctgcaggtttatctgcttatttttggtgggaagatgttttccccctaaaatctaccattaatttattcattgaccaaaggtttattgaatacccactgtgactcaaacactgggctggcctctaggtttgaactgcaaaaaagatcaacatggtcccttgcccttatatgaagcttaaaatctagaagttagaaacttcaagagtgtaaagtattttgatggctaagggcaagatgctctgggagtgagtgcacagggaacaaacctagtccagggaggtgaggttctctaaggaaataatatcttaggtgacaactgaatatgaatgtgagttaacagggggagggagggaggaaagggtgggagagatttcag

SEQ ID NO: 707758 - DNA, 2309 bp, Homo sapiens
ttaaagttttcaaaagtcaacaacgacaacaagaaaaaacaagccaattagaaaatgggctaaaggcatgaaccgatatttcactgaacaggatagattgatggaaaatgagaaaataaaaaaacttttatcagaggaatgccagtccttttaaattatcaagcccagagagacattaaaataagacagcaggcccggcacggtggctcacgcctgtaatcccagcactttgggaggccaaggcgggcggatcacaaggtcaggagaacaagaccatcctggctaacacggtgaaacccagtctctaccaaaaatacaaaaaattagccgggcgtggtagcacatgcctgtagtcccagctactcgggaggctgagrcaggagaatggcatgaacccaggacgcacaggttgcagtgagccaagagcgtgccactgcactccagcctgggcaacagagtgagactccatctcaaaaagaaaggaaaactgcaggtcctgcacatgtaccccggaacttaaaataaatacataagtacataaatagaattttaaaaaaatcttaattgtatgtgggtaggtccctttgattcaaagtgagatagaaggatgggcgcagtggctcatgcctgtaatcccagcactttgggaggcagaggcgggcagatcacaaggtccggagatcgaggccatcctggctaacacggtgaaaccccgtctctactaaaaatacaaaaagaaattagcagggcgtggtggtggtgggcgcctgtagtcccagctactcaggaggctgagacaggagaatggctggaacccgggaggcggagcttgcagtgagccaagatcacgccactgcactccagcctgggcgacagagagggactccgtctcaaaaaaataaaaaaaataaaaaaaaaggaaagtgagatagaaataattttttaaaacttactattcaaaatttgcaaaactaaataagagtaaaagaaatttacattttgtccctggattcacagaagacaaaaacattgtgtgggaaagctggagttgaggacgaacgagattctgaaaataaaaatccctggtacataagccaaaatttcagagtcaactacagattttcaaaggctatgaaataggtaacctcaagccaccgactccaatagataaaaggaaccaggtaatatctgtgttccagggagaaagaatagaaaactggctgagttctatcactgacaaaacttagtgcgaaggagggatctggaaggcgggagggtgaagggatccccggcttggagggtggggaggggctgtgcttcggcctccccctcctactgcccctccccaacaaaggagccctttgtgatgtgaagccccagctctgtgatgcgggcctgggccccagtccctagtctccacgaggatgcccagagctcagttgctagaaagcaatgcgcctattcacatggagaatcttccctttcctctaaaattacttagtgcctcatcactaaacacccccagctccacaccatgggtgttggatatcttcctcaccttggtgtttgccctggggctcttcttcctattactcccctacttctcttacctccgttgtgacaacccaccctcaccatcgcctaggaagagaaaggtaaggagctctcagtccagacccacagagcttgattctcttctttctttttattattagttccacctttccaaatccagtggagacttctgcgatgggaagtctcaggagagaccagaacagcatgcttccagggagaggcagggcagccaggggttggtaggggtagatcgtgtactgggatttccatcccaagctctcagtccatctgtgggggagccaggaggcatgaaggcaaaatcaaacccgtgggctcagcggccaggaccggtcatgagacgggggaggtctctggtcatgagacgggaggtctctgtccgaggccaggccctgagccctggctcatcagtcccttcctggggcaggtggctcgggacccagcctcttctgtgtggggtgatatggggcctgtgctgggcccccgagggcctcccaccggggcctggcatctcctctggtctcctggcaagcagaatgctacctgacagctcagtggtgcctgcgggcctgagcctgggtgttcctggagcagaggaacagggactgatggcgtccatggtggacctcatattgaaaatccctgtgtgtgtgcgtgtgtgtttgtgtgttatttttatttattttgttttttgtgcaggctgcagtgaaatggag

SEQ ID NO: 707759 - DNA, 2309 bp, Homo sapiens
ttaaagttttcaaaagtcaacaacgacaacaagaaaaaacaagccaattagaaaatgggctaaaggcatgaaccgatatttcactgaacaggatagattgatggaaaatgagaaaataaaaaaacttttatcagaggaatgccagtccttttaaattatcaagcccagagagacattaaaataagacagcaggcccggcacggtggctcacgcctgtaatcccagcactttgggaggccaaggcgggcggatcacaaggtcaggagaacaagaccatcctggctaacacggtgaaacccagtctctaccaaaaatacaaaaaattagccgggcgtggtagcacatgcctgtagtcccagctactcgggaggctgaggcaggagaatggcatgaacccaggasgcacaggttgcagtgagccaagagcgtgccactgcactccagcctgggcaacagagtgagactccatctcaaaaagaaaggaaaactgcaggtcctgcacatgtaccccggaacttaaaataaatacataagtacataaatagaattttaaaaaaatcttaattgtatgtgggtaggtccctttgattcaaagtgagatagaaggatgggcgcagtggctcatgcctgtaatcccagcactttgggaggcagaggcgggcagatcacaaggtccggagatcgaggccatcctggctaacacggtgaaaccccgtctctactaaaaatacaaaaagaaattagcagggcgtggtggtggtgggcgcctgtagtcccagctactcaggaggctgagacaggagaatggctggaacccgggaggcggagcttgcagtgagccaagatcacgccactgcactccagcctgggcgacagagagggactccgtctcaaaaaaataaaaaaaataaaaaaaaaggaaagtgagatagaaataattttttaaaacttactattcaaaatttgcaaaactaaataagagtaaaagaaatttacattttgtccctggattcacagaagacaaaaacattgtgtgggaaagctggagttgaggacgaacgagattctgaaaataaaaatccctggtacataagccaaaatttcagagtcaactacagattttcaaaggctatgaaataggtaacctcaagccaccgactccaatagataaaaggaaccaggtaatatctgtgttccagggagaaagaatagaaaactggctgagttctatcactgacaaaacttagtgcgaaggagggatctggaaggcgggagggtgaagggatccccggcttggagggtggggaggggctgtgcttcggcctccccctcctactgcccctccccaacaaaggagccctttgtgatgtgaagccccagctctgtgatgcgggcctgggccccagtccctagtctccacgaggatgcccagagctcagttgctagaaagcaatgcgcctattcacatggagaatcttccctttcctctaaaattacttagtgcctcatcactaaacacccccagctccacaccatgggtgttggatatcttcctcaccttggtgtttgccctggggctcttcttcctattactcccctacttctcttacctccgttgtgacaacccaccctcaccatcgcctaggaagagaaaggtaaggagctctcagtccagacccacagagcttgattctcttctttctttttattattagttccacctttccaaatccagtggagacttctgcgatgggaagtctcaggagagaccagaacagcatgcttccagggagaggcagggcagccaggggttggtaggggtagatcgtgtactgggatttccatcccaagctctcagtccatctgtgggggagccaggaggcatgaaggcaaaatcaaacccgtgggctcagcggccaggaccggtcatgagacgggggaggtctctggtcatgagacgggaggtctctgtccgaggccaggccctgagccctggctcatcagtcccttcctggggcaggtggctcgggacccagcctcttctgtgtggggtgatatggggcctgtgctgggcccccgagggcctcccaccggggcctggcatctcctctggtctcctggcaagcagaatgctacctgacagctcagtggtgcctgcgggcctgagcctgggtgttcctggagcagaggaacagggactgatggcgtccatggtggacctcatattgaaaatccctgtgtgtgtgcgtgtgtgtttgtgtgttatttttatttattttgttttttgtgcaggctgcagtgaaatggag

SEQ ID NO: 707760 - DNA, 962 bp, Homo sapiens
tcctacaagaagaggagatgaggacactgacaagcacagaaggcgaccatgtgaggacccagggagaagacgcgatctgcaagccaaggggaagcctcaggagaaaccaccctgtcaatgcctggatcttagatatccagcctccagaactgtgagaaaataaatttctgttgtctaagtcccccagcgtgtggcactttgttacggcagcccaaactgacccatgtgcctgggcaaagtggaagatgagtggggattctggcgagaggcaaatccagatctcagcaagccaggcagggaggccgacgtcgctcaacagaagcccaggagccggccctggccttgaccaggtactccctgctacactctctcacagatgttcccagcatcatggggcagggtcccaagggcaggatccctccctccaggacaatctcctgctgcttctgcaccgttttgcagatggaagagctccagggccctgagccctctgcggctcctctgctcacagcatgttcccacaaacctcattttgtaygggccctgtgctcggctctgggatgtgctgccaagccctttgcacgacacacgcttctttcccacaccttgcccctccagcaccccctgggtgccaggatcatgtgacctcttgcacccccagaagtcccacatcctgccccatggccactgatgcagagacgacagtgataactgacaatggacagcctttcccggggctcccaaatcacacttgctcaagctcaacataaaaccagagtggtagcaacttcaaatgtgaggaagctgagtctcgcagaggcagggcgaattctcaaaggcacagcgctgagatacttgcgttcacccttctgtgtatcacagaagaagcactgagctctctcacagcttcgtctgcaccacccagtgcccaggacccaggctccgtcattggaggagcatca

SEQ ID NO: 707761 - DNA, 962 bp, Homo sapiens
tcctacaagaagaggagatgaggacactgacaagcacagaaggcgaccatgtgaggacccagggagaagacgcgatctgcaagccaaggggaagcctcaggagaaaccaccctgtcaatgcctggatcttagatatccagcctccagaactgtgagaaaataaatttctgttgtctaagtcccccagcgtgtggcactttgttacggcagcccaaactgacccatgtgcctgggcaaagtggaagatgagtggggattctggcgagaggcaaatccagatctcagcaagccaggcagggaggccgacgtcgctcaacagaagcccaggagccggccctggccttgaccaggtactccctgctacactctctcacagatgttcccagcatcatggggcagggtcccaagggcaggatccctccctccaggacaatctcctgctgcttctgcaccgttttgcagatggaagagctccagggccctgagccctctgcggctcctctgctcacagcatgttcccacaaacctcattttgtacgggccctgtgctcggctctgggatgtgctgccaagccctttgcacgacacacgcttctttcccacaccttgcccctccagcamcccctgggtgccaggatcatgtgacctcttgcacccccagaagtcccacatcctgccccatggccactgatgcagagacgacagtgataactgacaatggacagcctttcccggggctcccaaatcacacttgctcaagctcaacataaaaccagagtggtagcaacttcaaatgtgaggaagctgagtctcgcagaggcagggcgaattctcaaaggcacagcgctgagatacttgcgttcacccttctgtgtatcacagaagaagcactgagctctctcacagcttcgtctgcaccacccagtgcccaggacccaggctccgtcattggaggagcatca

SEQ ID NO: 707762 - DNA, 600 bp, Homo sapiens
ctgcctcagcctcccgagtagctgggactacaggcayctgccaccatgcccggttaatttttttgtatttttagcagagacggggtttcaccttgttagccagggtggtctcgatctcctgacctcgtgatcctcccgcctcagcctcccaaagtgctgggattacaggcatgagccaccacgcccggctgatcctttttttttttaataaagacatgaggttagattgaggttattgttttgtctatgatatctaactgctccagaaccactgtactattgaattgatattgcacttttttcaaaagtcagttggttgtacttgtatggaactatttctgagttctcaattctgttttattgaactgtctgtccccctgccaataccacactgtcttgatttctgtagctatgtaaaaagttaaaaaattggggagaataattcctcccactttattcttctatttcagacttgttttgttgagctgtattatagaaaaaactattcgtgacacctgttaaaaaatagtaagacaaactttattcagagggattattgcaatagatacagagattactgcaatagggtcttgcagtaat

SEQ ID NO: 707763 - DNA, 600 bp, Homo sapiens
ctgcctcagcctcccgagtagctgggactacaggcacctgccaccatgcccggttaatttttttgtatttttagcagagacggggtttcaccttgttagccagggtggtctcgatctcctgacctcgtgatcctcccgcctcagcctcccraagtgctgggattacaggcatgagccaccacgcccggctgatcctttttttttttaataaagacatgaggttagattgaggttattgttttgtctatgatatctaactgctccagaaccactgtactattgaattgatattgcacttttttcaaaagtcagttggttgtacttgtatggaactatttctgagttctcaattctgttttattgaactgtctgtccccctgccaataccacactgtcttgatttctgtagctatgtaaaaagttaaaaaattggggagaataattcctcccactttattcttctatttcagacttgttttgttgagctgtattatagaaaaaactattcgtgacacctgttaaaaaatagtaagacaaactttattcagagggattattgcaatagatacagagattactgcaatagggtcttgcagtaat

SEQ ID NO: 707764 - DNA, 600 bp, Homo sapiens
ctgcctcagcctcccgagtagctgggactacaggcacctgccaccatgcccggttaatttttttgtatttttagcagagacggggtttcaccttgttagccagggtggtctcgatctcctgacctcgtgatcctcccgcctcagcctcccaaagtgctgggattacaggcatgagccaccrcgcccggctgatcctttttttttttaataaagacatgaggttagattgaggttattgttttgtctatgatatctaactgctccagaaccactgtactattgaattgatattgcacttttttcaaaagtcagttggttgtacttgtatggaactatttctgagttctcaattctgttttattgaactgtctgtccccctgccaataccacactgtcttgatttctgtagctatgtaaaaagttaaaaaattggggagaataattcctcccactttattcttctatttcagacttgttttgttgagctgtattatagaaaaaactattcgtgacacctgttaaaaaatagtaagacaaactttattcagagggattattgcaatagatacagagattactgcaatagggtcttgcagtaat

SEQ ID NO: 707765 - DNA, 600 bp, Homo sapiens
ctgcctcagcctcccgagtagctgggactacaggcacctgccaccatgcccggttaatttttttgtatttttagcagagacggggtttcaccttgttagccagggtggtctcgatctcctgacctcgtgatcctcccgcctcagcctcccaaagtgctgggattacaggcatgagccaccacgcccggctgatcctttttttttttaataaagacatgaggttagattgaggttattgttttgtctatgrtatctaactgctccagaaccactgtactattgaattgatattgcacttttttcaaaagtcagttggttgtacttgtatggaactatttctgagttctcaattctgttttattgaactgtctgtccccctgccaataccacactgtcttgatttctgtagctatgtaaaaagttaaaaaattggggagaataattcctcccactttattcttctatttcagacttgttttgttgagctgtattatagaaaaaactattcgtgacacctgttaaaaaatagtaagacaaactttattcagagggattattgcaatagatacagagattactgcaatagggtcttgcagtaat

SEQ ID NO: 707766 - DNA, 600 bp, Homo sapiens
ctgcctcagcctcccgagtagctgggactacaggcacctgccaccatgcccggttaatttttttgtatttttagcagagacggggtttcaccttgttagccagggtggtctcgatctcctgacctcgtgatcctcccgcctcagcctcccaaagtgctgggattacaggcatgagccaccacgcccggctgatcctttttttttttaataaagacatgaggttagattgaggttattgttttgtctatgatatctaactgctccagaaccactgtactattgaaytgatattgcacttttttcaaaagtcagttggttgtacttgtatggaactatttctgagttctcaattctgttttattgaactgtctgtccccctgccaataccacactgtcttgatttctgtagctatgtaaaaagttaaaaaattggggagaataattcctcccactttattcttctatttcagacttgttttgttgagctgtattatagaaaaaactattcgtgacacctgttaaaaaatagtaagacaaactttattcagagggattattgcaatagatacagagattactgcaatagggtcttgcagtaat

SEQ ID NO: 707767 - DNA, 600 bp, Homo sapiens
ctgcctcagcctcccgagtagctgggactacaggcacctgccaccatgcccggttaatttttttgtatttttagcagagacggggtttcaccttgttagccagggtggtctcgatctcctgacctcgtgatcctcccgcctcagcctcccaaagtgctgggattacaggcatgagccaccacgcccggctgatcctttttttttttaataaagacatgaggttagattgaggttattgttttgtctatgatatctaactgctccagaaccactgtactattgaattgatattgcacttttttcaaaagtcagttggttgtacttgtatggaactatttctgagttctcaattctgttttattgaactgtctgtccccctgccaataccacactgtcttgatttctgtagctatgtaaaaagttaaaaaattgggkagaataattcctcccactttattcttctatttcagacttgttttgttgagctgtattatagaaaaaactattcgtgacacctgttaaaaaatagtaagacaaactttattcagagggattattgcaatagatacagagattactgcaatagggtcttgcagtaat

SEQ ID NO: 707768 - DNA, 1255 bp, Homo sapiens
ctttggggactcagggagggtgggagaggggagaaagataaaaaagactacatattgggtacagtgtacactgcttggctgacaggtgcactaaactctcagaattcaccattatagagttcattaatgtaaccaaaaccacttgtaccccaaaagctattgaaactttttaagtatttcactataaacaaatgcaaggtaaaacttggagagtaaaataatccaaactagacttataggattctgggctaataatgatactcaagagatattaagattctgccaaaaataaaatttaatatatttctgtcattaaaaagtccaatagaatgctgactgtaacattaaaaaggacattggaaacaaaaaataaaatccaactgtagccaaaaaaaatggtgaaagagttaaacagacatttcacaaaagaagttataggaatggccactgagcatatgaaaagatgttcaacagcattagtcatcaggaaaatgcagattaaaatcacaaggagataccactacctacccattaaaatgactaaaattaaaaagactgacaataccaaatgttggtgaggattagttgtggaattatacagcatttgaaataatatatcttgttaccttttcttgaaagtgtcatcaatgactcagctgactatgatttattcaagtatctgatggattttccaagagagtttttwtatatattttgattaaaattattcttaaaatataaatttaagaaaaatatatcaggctaccatgagacttatttcccaaaacagtatgtcagaagacaaagacgcaacaacaagaaagtttcaaggaaagaatattggaacccagagttactgttcatatggaaggggagaaatataaagcattatagaaatgctagtgaagcaaagcaaaatggctgaagagaaggccccaccaactgacccccaccacccaacagtaacaccaaatttcacaactatctatacagaaaagaaccaaaaaccaggtaccagcttgacacagtggagtaaagcctcaagcaggctcttagagtctctgattccaggctttggctctttcatggcctttctggacctgccctgggccagaggggagtccactgcctaaagagtgagtcccaggccaggccgtatatgtcataagctgactaaagagcccttgggccttaagtgaacacaggtggtagcctggtagtactccccatggccccgtggtggtggtggccacag

SEQ ID NO: 707769 - DNA, 1255 bp, Homo sapiens
ctttggggactcagggagggtgggagaggggagaaagataaaaaagactacatattgggtacagtgtacactgcttggctgacaggtgcactaaactctcagaattcaccattatagagttcattaatgtaaccaaaaccacttgtaccccaaaagctattgaaactttttaagtatttcactataaacaaatgcaaggtaaaacttggagagtaaaataatccaaactagacttataggattctgggctaataatgatactcaagagatattaagattctgccaaaaataaaatttaatatatttctgtcattaaaaagtccaatagaatgctgactgtaacattaaaaaggacattggaaacaaaaaataaaatccaactgtagccaaaaaaaatggtgaaagagttaaacagacatttcacaaaagaagttataggaatggccactgagcatatgaaaagatgttcaacagcattagtcatcaggaaaatgcagattaaaatcacaaggagataccactacctacccattaaaatgactaaaattaaaaagactgacaataccaaatgttggtgaggattagttgtggaattatacagcatttgaaataatatatcttgttaccttttcttgaaagtgtcatcaatgactcagctgactatgatttattcaagtatctgatggattttccaagagagtttttttatatattttgattaaaattattcttaaaatataaatttaagaaaaatatatcaggctaccatgagacttatttcccaaaacagtatgtcagaagacaaagacgcaacawcaagaaagtttcaaggaaagaatattggaacccagagttactgttcatatggaaggggagaaatataaagcattatagaaatgctagtgaagcaaagcaaaatggctgaagagaaggccccaccaactgacccccaccacccaacagtaacaccaaatttcacaactatctatacagaaaagaaccaaaaaccaggtaccagcttgacacagtggagtaaagcctcaagcaggctcttagagtctctgattccaggctttggctctttcatggcctttctggacctgccctgggccagaggggagtccactgcctaaagagtgagtcccaggccaggccgtatatgtcataagctgactaaagagcccttgggccttaagtgaacacaggtggtagcctggtagtactccccatggccccgtggtggtggtggccacag

SEQ ID NO: 707770 - DNA, 2791 bp, Homo sapiens
ctctgccaaatttgcttctccttgctactttagctattttctgttccgcgggactctgtcaaatgtaaacaaagggtaggtgaaggagcatgattaatcgcaaagcttgtgagacaagcctgggctggtgaattggtggtgggaactggatattgcatcctttattttcctcttgccccgacatttgccccattaactcccagaggggcctctaatcaatggattttggccagtgaagtcaaatgagggcttatagagggttgccagggcaggattctctcaaacaaagcaagggctaaataatgtttccagattaaaacacagcactatctttgaatgaatgttttcactgaaaaaaaaataaaagtaacttaattatatatcacatttttaaggcaaggtctttatagccaaataaatgtttctaggaattcttaaagagggcatgtatgtacacagctttayatataaatcctcataaaatctcaattactcagaaagtttgtggcccaaatcaactgaattggataattaattaaacattaaccccaaattttctcatttaaaccactatcactgaatagtttttataaatgcattaaccatctgtcatgtcttactcagcatagtagtagaacgaccacacttgaattctttcttttgatcactgggaatcctctagttagttaggtttatctttttgaacatcaggttcaaaagatctatttctaagagagagatctagaaggtaaactgatcccaagaaatactagggaaattgtttaaagttcctcgatatgagttcttaaaattttgctccctctcctaaaggagggaaattcctgttagttgaagttaaaactgatgttgaatgcttaaaattccactctcttccactcacctaattcttatccacccaaaactatagtagaaaattttacttcaggaaattagaatagactgaattcccataatcatgaaaatgtggctgggcccggtagtgcatggctgtaatcccagtactttgggaggccaaggcaggcagattactcgaggtcaaaaaagaccagcctagccaacagggtgaaacccctgtctctactaaaaatacaaaaaaaaaagaaaaattagcctggcgtggtggtgggcacctgtaatcccagctactcaggaggctgagggaacagaatcacttgaacccaggaggcagaggttgcagtgagccgaggtcgcaccactgcactccagcctgggcgacagagctagactccctctcaaaaaaaaggtgacttgaaaacataatcactcatatcaacttaaaggaaaatatacagcacctcctaggtgatcactattatgttaagtgggtaaatgctttatgtttttttcacaactgaagccaatgctgaatgaagagcgtctgttctacattttgcaaggactggaatgttggtataatcgagacaagatggctggctcactgacagtttaggtgagagaaatgcacaccaaagccatctgttttgttacctcaccacaaggagaagggacacactcttatgaggaatactcactgcttgatataccttaacatgaatacagatattttaagggcttcatgcagaattagacaatatacctcactgtgttacctggcagtcaagaattactcactttcagagtgaattcactctggcctatgcataaatcagggcaaacaacaacaacaaaaaaccatcaaacatgcagaggaagatgtgaaagaccaatgtttctaacgtaattctcgtcaagctcgtcggtatgtaggaaaaatgtatgtaacactttattctagaaatttccatttaaagccaccgctctgagttccctgacactcctgcatagtctgaccttgcttaggaagactgagaatctgtggagctgctctagaaaaagggtgggcgggggtggataagcagccctcttatccctacttttcccttttactaagaacccaggatggttgaatgcaaggtccgtttttattctgaggatagaaaaaattcagggctttcccaggctatttcacccacactatctatctcatttggttttatctatgtttggttctagattcactaaagatagaaaagccgcatataacccttatctcttccttttgtgtggtgcagtgatgtaaaatcaccctatgggatccaaaagaatttggaattcaaatggagttgttttcagagagagaagaggcagagaaaaggatatcagaatgtaagcagatcctgtgaaattattcacatttatattgaactgtctgttttcagagtgcacgagagttcaaatgtgtaaagagtgcatatggaaagtgagttaccaaaggggcagacttttccattgatcaatttagtatcacttctcttctccaaatctaggcctctgtgaaactggagcttaccctttctaaatattttttcctttgctagatggcaaaatgttttttgtttgtgtgggtttttttttttttttgttttaattattgggtgaaacttaacctaaagtttactattttaaaatatgaaattctgtgacttttttagtatattcgcaaagttgtgtaaccattatcactatctaattccataacatttccattaccaaatagaaaccctgtaactgttcacaattactcccaattgctccctccttcacctatcccttggcaaccactagtctactttctgtctgtgtagatttgactcttcatacagtatgtcactttttgttttatctggct

SEQ ID NO: 707771 - DNA, 771 bp, Homo sapiens
tgtggaataagatctcttattttcatttataatatatttgtagaaaaatctatgtgttatttatggatacgtttatatgtgtgtagggtagaggaacaagaatattaaaacctctcttctgtctcctaggaggcttttggaaattctgctttccagttaagaaatcttcaggtgtagagaactggttgtcaaacttgagcatgaatcagaagctcctgagggtttctgaaaacacagattactgggtcccctgccagagtttcctattcagtaagtctgggatttgcctgagaatttacatttctaacaagttcctgggcaatgctgattctgcttatctgggaccacactttgggagackcaggcatagggggaaaggaaagcctaagggatgggcatgtaatccacaggactttttcaaattcgccaactatcaccaaacgtttttttcctatgaaacaaacccaaaatttattttatttcatttttaaatgtttttttcttccaatttgtattttaggttcactggtacatgtgcaggtttgttacatgggtaaattgtgtactttgagggtttggtgtacagattattttgtcaccaggttataaacatactaccctgataggtagtttttcgattctcactctcctcccatcctcaccctcaagttggctccagtgtctattgttccctccttagtgtccaggtgtactcagtgtttagcttccacttatgtgagaacatgcagcatttggttttctgtttctgca

SEQ ID NO: 707772 - DNA, 647 bp, Homo sapiens
ctcccaagtagctgggactacaggcatgtgcaaccacgcctggctaattttttttaaaatttttttatagagatggggtctgtctttgttgccgaggctggtctggaactcctgggctcacgcaatcattccaccttggcattccaatatgctgggattacaggcatgagccactgtgcccagccaaagcttagttttcatcaatggcagtagttctcagcgtagggagattttgctctccatcccccaaggtcacttacagggatatatggcaatgtctgaagacattctgagttttgacaattagagtgggtgtggggattttaccagcatctagtgggcagaagccacggaggccactaaacatgctacgaygcacaagatagcctccatgacaaaacgtcaacagtgtcactgtggaaaaacccagatctgtggtgttatttgcgctcatcctaaaatgactatttaccagatcttcttttttcagaaacaactatcaagatatttctggcaaggatctgattacctgaatctaccacatcattcttatatttacctgaaaggaatataggatgtctctccaaagattaatattctatatgcttcttctggggttctccccaaatatataacctatgtttgaa

SEQ ID NO: 707773 - DNA, 1443 bp, Homo sapiens
tgtttattcacggaaaactttaccactgccctgagcatgacttttgaagagggcaaaacttcagggcattgatacacaccataactagacaaacatctcttaccttctgcgggcattgattctatgaaatccagctgccaccaggttcctggtatgttgattggggaaaacttcctgtgcttaccttgggagtggtctgtgaagacttttgctgacaaatagcacatctctttactatgttttgaataaattcatctttttggtaggcatagtgagagtctgaaacctttaaaatccatcttttatgtagctgattttgttgctgacacaatactaaccaagtaaataaagaccaaggagtaggaattgtattgttagctaattcccatagtacagccccccttccttaatccatttgcccattttcttttggaatgcatatttttgaaaataaatgaaagtttcttgtattagaattggggcttctgagctgggtgtcagccgtgtgttaaccgtagtttttacagccctatcagcagaatcattgcctttagaaattttgtttttctgcactatgtggtctctacagtggattattytatcttactcagcagttgtgaagcctctcataactcggatattaattttccatgagatattttagttcccatgaagtcaagaatccattttttcaaatttcccctattatatgacagacaccaaacacatgtttattgtcagtatatagattcactttaagtcctgaaccaagagttgtagatccctagtagctgctattagcttgtctgcttgtgctgatttaattccaggcaaaacataagcgttcaagatttcctgagcagtcaccacagcataagaaccctgaaggtggcccttctcatcccaggtatatgcccctcagtaaaccttatcaaatatgcattttgaacgggaatatcagaaaaatcaggttgctgcctagtatcttctattactgttgtacactcatgatcatctatttgaccaggatctggtaaaagagtagctggtttttgaagattgcatcttccaagcacaagattaggattgggtaataatgctgattcataattaataagatagtgcaccgataaatgctgggtcttatgcacttgtaagatagttgtcatagcatgaagggtatgcagaagagtcaggtgacccaaggtaagggtttgagccttttcactaagtgtggcagctattgctgctgctcgggggcatccagacattcccaacagcatccagaagaactgggaaatgagctgtcggtctatagcctaaccccgccttgtgagttaaaattctactagcagcacttttattttcatgataaaacaagtggaaaggttttaaaaattttggaatctccaaagctaggggagagaccatagcgaatcttag

SEQ ID NO: 707774 - DNA, 1097 bp, Homo sapiens
  misc_feature 404, 405, 406, 407, 408, 409, 410, 411, 412, 413, 414, 415,416, 417, 418, 419, 420, 421, 422, 423, 424, 425, 426, 427,428, 429, 430, 431, 432, 433, 434, 435, 436, 437, 438, 439,440, 441, 442, 443, 444, 445, 446, 447, 448, 449, 450: n = A,T,C or G
  misc_feature 451, 452, 453, 454, 455, 456, 457, 458, 459, 460, 461, 462,463, 464, 465, 466, 467, 468, 469, 470, 471, 472, 473, 474,475, 476, 477, 478, 479, 480, 481, 482, 483, 484, 485, 486,487, 488, 489, 490, 491, 492, 493, 494, 495, 496, 497: n = A,T,C or G
  misc_feature 498, 499, 500, 501, 502, 503: n = A,T,C or G
tgacagtgtgttaggtgtcaggctgatcttctaggaactgaagtgttttccatggaggatggtggagagccaggtgtggaccgctcagtccctccgtctgtggatggtgacagtgtgttaggtgtcaggctgatcttctaggaactgaagtgttttccatggaggatggtggagagcctggtgtggaccgctcagtccctccatctgtggatggtgacagtgtgttaggtgtcaggctgatcttctaggagctgaagtgttttcttggaggatggtggagagccaggtgtggacctactcagtccctcccatgtggtgtcatttcacccggtcagcttcgggcttgggaatgtgaaaagggaccccgggggagaagcagaggctgtggtttatgctcgccctannnnnnnnnnnnnnnnnnnnnnnnnnnnnnnnnnnnnnnnnnnnnnnnnnnnnnnnnnnnnnnnnnnnnnnnnnnnnnnnnnnnnnnnnnnnnnnnnnnntcattcaacaaagtttatgaactgtctacggaggagaggcactgaagtgcagcgatgactcaacgcgtacttgagcttcaaaaggctgccaggtaaacaagtaattatataacggttccatgctagcagtcatcacgagatgcaccccagaaagtgagtaactcttggtgaacagaaggccagcactggggcgcctgtgtgatggatccctgtcggcagaaggagttgggagggggcccagagagaaggggtccagagggatgggggtcccagaaggaggggtcccaragggagggggtccagagggagggtggtcccagagggaggagtcccggagggaggggggcccagagggtggggtccctgagagaaggaggcccagagggaaccagatacacaggccacagggcaggaagttcccggcagagctatgagaagctggcctactccgtcctgttcataagacactactttaatttcctttcatttattctcatgtcagaataagtcaatgaaccaaaattgataaattccatgtctcttaggatggtgttttgcacgtgttaggtataaacaatgtacaattctagataa

SEQ ID NO: 707775 - DNA, 1097 bp, Homo sapiens
  misc_feature 404, 405, 406, 407, 408, 409, 410, 411, 412, 413, 414, 415,416, 417, 418, 419, 420, 421, 422, 423, 424, 425, 426, 427,428, 429, 430, 431, 432, 433, 434, 435, 436, 437, 438, 439,440, 441, 442, 443, 444, 445, 446, 447, 448, 449, 450: n = A,T,C or G
  misc_feature 451, 452, 453, 454, 455, 456, 457, 458, 459, 460, 461, 462,463, 464, 465, 466, 467, 468, 469, 470, 471, 472, 473, 474,475, 476, 477, 478, 479, 480, 481, 482, 483, 484, 485, 486,487, 488, 489, 490, 491, 492, 493, 494, 495, 496, 497: n = A,T,C or G
  misc_feature 498, 499, 500, 501, 502, 503: n = A,T,C or G
tgacagtgtgttaggtgtcaggctgatcttctaggaactgaagtgttttccatggaggatggtggagagccaggtgtggaccgctcagtccctccgtctgtggatggtgacagtgtgttaggtgtcaggctgatcttctaggaactgaagtgttttccatggaggatggtggagagcctggtgtggaccgctcagtccctccatctgtggatggtgacagtgtgttaggtgtcaggctgatcttctaggagctgaagtgttttcttggaggatggtggagagccaggtgtggacctactcagtccctcccatgtggtgtcatttcacccggtcagcttcgggcttgggaatgtgaaaagggaccccgggggagaagcagaggctgtggtttatgctcgccctannnnnnnnnnnnnnnnnnnnnnnnnnnnnnnnnnnnnnnnnnnnnnnnnnnnnnnnnnnnnnnnnnnnnnnnnnnnnnnnnnnnnnnnnnnnnnnnnnnntcattcaacaaagtttatgaactgtctacggaggagaggcactgaagtgcagcgatgactcaacgcgtacttgagcttcaaaaggctgccaggtaaacaagtaattatataacggttccatgctagcagtcatcacgagatgcaccccagaaagtgagtaactcttggtgaacagaaggccagcactggggcgcctgtgtgatggatccctgtcggcagaaggagttgggagggggcccagagagaaggggtccagagggatgggggtcccagaaggaggggtcccaaagggaggrggtccagagggagggtggtcccagagggaggagtcccggagggaggggggcccagagggtggggtccctgagagaaggaggcccagagggaaccagatacacaggccacagggcaggaagttcccggcagagctatgagaagctggcctactccgtcctgttcataagacactactttaatttcctttcatttattctcatgtcagaataagtcaatgaaccaaaattgataaattccatgtctcttaggatggtgttttgcacgtgttaggtataaacaatgtacaattctagataa

SEQ ID NO: 707776 - DNA, 1097 bp, Homo sapiens
  misc_feature 404, 405, 406, 407, 408, 409, 410, 411, 412, 413, 414, 415,416, 417, 418, 419, 420, 421, 422, 423, 424, 425, 426, 427,428, 429, 430, 431, 432, 433, 434, 435, 436, 437, 438, 439,440, 441, 442, 443, 444, 445, 446, 447, 448, 449, 450: n = A,T,C or G
  misc_feature 451, 452, 453, 454, 455, 456, 457, 458, 459, 460, 461, 462,463, 464, 465, 466, 467, 468, 469, 470, 471, 472, 473, 474,475, 476, 477, 478, 479, 480, 481, 482, 483, 484, 485, 486,487, 488, 489, 490, 491, 492, 493, 494, 495, 496, 497: n = A,T,C or G
  misc_feature 498, 499, 500, 501, 502, 503: n = A,T,C or G
tgacagtgtgttaggtgtcaggctgatcttctaggaactgaagtgttttccatggaggatggtggagagccaggtgtggaccgctcagtccctccgtctgtggatggtgacagtgtgttaggtgtcaggctgatcttctaggaactgaagtgttttccatggaggatggtggagagcctggtgtggaccgctcagtccctccatctgtggatggtgacagtgtgttaggtgtcaggctgatcttctaggagctgaagtgttttcttggaggatggtggagagccaggtgtggacctactcagtccctcccatgtggtgtcatttcacccggtcagcttcgggcttgggaatgtgaaaagggaccccgggggagaagcagaggctgtggtttatgctcgccctannnnnnnnnnnnnnnnnnnnnnnnnnnnnnnnnnnnnnnnnnnnnnnnnnnnnnnnnnnnnnnnnnnnnnnnnnnnnnnnnnnnnnnnnnnnnnnnnnnntcattcaacaaagtttatgaactgtctacggaggagaggcactgaagtgcagcgatgactcaacgcgtacttgagcttcaaaaggctgccaggtaaacaagtaattatataacggttccatgctagcagtcatcacgagatgcaccccagaaagtgagtaactcttggtgaacagaaggccagcactggggcgcctgtgtgatggatccctgtcggcagaaggagttgggagggggcccagagagaaggggtccagagggatgggggtcccagaaggaggggtcccaaagggaggggktccagagggagggtggtcccagagggaggagtcccggagggaggggggcccagagggtggggtccctgagagaaggaggcccagagggaaccagatacacaggccacagggcaggaagttcccggcagagctatgagaagctggcctactccgtcctgttcataagacactactttaatttcctttcatttattctcatgtcagaataagtcaatgaaccaaaattgataaattccatgtctcttaggatggtgttttgcacgtgttaggtataaacaatgtacaattctagataa

SEQ ID NO: 707777 - DNA, 1097 bp, Homo sapiens
  misc_feature 404, 405, 406, 407, 408, 409, 410, 411, 412, 413, 414, 415,416, 417, 418, 419, 420, 421, 422, 423, 424, 425, 426, 427,428, 429, 430, 431, 432, 433, 434, 435, 436, 437, 438, 439,440, 441, 442, 443, 444, 445, 446, 447, 448, 449, 450: n = A,T,C or G
  misc_feature 451, 452, 453, 454, 455, 456, 457, 458, 459, 460, 461, 462,463, 464, 465, 466, 467, 468, 469, 470, 471, 472, 473, 474,475, 476, 477, 478, 479, 480, 481, 482, 483, 484, 485, 486,487, 488, 489, 490, 491, 492, 493, 494, 495, 496, 497: n = A,T,C or G
  misc_feature 498, 499, 500, 501, 502, 503: n = A,T,C or G
tgacagtgtgttaggtgtcaggctgatcttctaggaactgaagtgttttccatggaggatggtggagagccaggtgtggaccgctcagtccctccgtctgtggatggtgacagtgtgttaggtgtcaggctgatcttctaggaactgaagtgttttccatggaggatggtggagagcctggtgtggaccgctcagtccctccatctgtggatggtgacagtgtgttaggtgtcaggctgatcttctaggagctgaagtgttttcttggaggatggtggagagccaggtgtggacctactcagtccctcccatgtggtgtcatttcacccggtcagcttcgggcttgggaatgtgaaaagggaccccgggggagaagcagaggctgtggtttatgctcgccctannnnnnnnnnnnnnnnnnnnnnnnnnnnnnnnnnnnnnnnnnnnnnnnnnnnnnnnnnnnnnnnnnnnnnnnnnnnnnnnnnnnnnnnnnnnnnnnnnnntcattcaacaaagtttatgaactgtctacggaggagaggcactgaagtgcagcgatgactcaacgcgtacttgagcttcaaaaggctgccaggtaaacaagtaattatataacggttccatgctagcagtcatcacgagatgcaccccagaaagtgagtaactcttggtgaacagaaggccagcactggggcgcctgtgtgatggatccctgtcggcagaaggagttgggagggggcccagagagaaggggtccagagggatgggggtcccagaaggaggggtcccaaagggagggggyccagagggagggtggtcccagagggaggagtcccggagggaggggggcccagagggtggggtccctgagagaaggaggcccagagggaaccagatacacaggccacagggcaggaagttcccggcagagctatgagaagctggcctactccgtcctgttcataagacactactttaatttcctttcatttattctcatgtcagaataagtcaatgaaccaaaattgataaattccatgtctcttaggatggtgttttgcacgtgttaggtataaacaatgtacaattctagataa

SEQ ID NO: 707778 - DNA, 1097 bp, Homo sapiens
  misc_feature 404, 405, 406, 407, 408, 409, 410, 411, 412, 413, 414, 415,416, 417, 418, 419, 420, 421, 422, 423, 424, 425, 426, 427,428, 429, 430, 431, 432, 433, 434, 435, 436, 437, 438, 439,440, 441, 442, 443, 444, 445, 446, 447, 448, 449, 450: n = A,T,C or G
  misc_feature 451, 452, 453, 454, 455, 456, 457, 458, 459, 460, 461, 462,463, 464, 465, 466, 467, 468, 469, 470, 471, 472, 473, 474,475, 476, 477, 478, 479, 480, 481, 482, 483, 484, 485, 486,487, 488, 489, 490, 491, 492, 493, 494, 495, 496, 497: n = A,T,C or G
  misc_feature 498, 499, 500, 501, 502, 503: n = A,T,C or G
tgacagtgtgttaggtgtcaggctgatcttctaggaactgaagtgttttccatggaggatggtggagagccaggtgtggaccgctcagtccctccgtctgtggatggtgacagtgtgttaggtgtcaggctgatcttctaggaactgaagtgttttccatggaggatggtggagagcctggtgtggaccgctcagtccctccatctgtggatggtgacagtgtgttaggtgtcaggctgatcttctaggagctgaagtgttttcttggaggatggtggagagccaggtgtggacctactcagtccctcccatgtggtgtcatttcacccggtcagcttcgggcttgggaatgtgaaaagggaccccgggggagaagcagaggctgtggtttatgctcgccctannnnnnnnnnnnnnnnnnnnnnnnnnnnnnnnnnnnnnnnnnnnnnnnnnnnnnnnnnnnnnnnnnnnnnnnnnnnnnnnnnnnnnnnnnnnnnnnnnnntcattcaacaaagtttatgaactgtctacggaggagaggcactgaagtgcagcgatgactcaacgcgtacttgagcttcaaaaggctgccaggtaaacaagtaattatataacggttccatgctagcagtcatcacgagatgcaccccagaaagtgagtaactcttggtgaacagaaggccagcactggggcgcctgtgtgatggatccctgtcggcagaaggagttgggagggggcccagagagaaggggtccagagggatgggggtcccagaaggaggggtcccaaagggagggggtccrgagggagggtggtcccagagggaggagtcccggagggaggggggcccagagggtggggtccctgagagaaggaggcccagagggaaccagatacacaggccacagggcaggaagttcccggcagagctatgagaagctggcctactccgtcctgttcataagacactactttaatttcctttcatttattctcatgtcagaataagtcaatgaaccaaaattgataaattccatgtctcttaggatggtgttttgcacgtgttaggtataaacaatgtacaattctagataa

SEQ ID NO: 707779 - DNA, 1097 bp, Homo sapiens
  misc_feature 404, 405, 406, 407, 408, 409, 410, 411, 412, 413, 414, 415,416, 417, 418, 419, 420, 421, 422, 423, 424, 425, 426, 427,428, 429, 430, 431, 432, 433, 434, 435, 436, 437, 438, 439,440, 441, 442, 443, 444, 445, 446, 447, 448, 449, 450: n = A,T,C or G
  misc_feature 451, 452, 453, 454, 455, 456, 457, 458, 459, 460, 461, 462,463, 464, 465, 466, 467, 468, 469, 470, 471, 472, 473, 474,475, 476, 477, 478, 479, 480, 481, 482, 483, 484, 485, 486,487, 488, 489, 490, 491, 492, 493, 494, 495, 496, 497: n = A,T,C or G
  misc_feature 498, 499, 500, 501, 502, 503: n = A,T,C or G
tgacagtgtgttaggtgtcaggctgatcttctaggaactgaagtgttttccatggaggatggtggagagccaggtgtggaccgctcagtccctccgtctgtggatggtgacagtgtgttaggtgtcaggctgatcttctaggaactgaagtgttttccatggaggatggtggagagcctggtgtggaccgctcagtccctccatctgtggatggtgacagtgtgttaggtgtcaggctgatcttctaggagctgaagtgttttcttggaggatggtggagagccaggtgtggacctactcagtccctcccatgtggtgtcatttcacccggtcagcttcgggcttgggaatgtgaaaagggaccccgggggagaagcagaggctgtggtttatgctcgccctannnnnnnnnnnnnnnnnnnnnnnnnnnnnnnnnnnnnnnnnnnnnnnnnnnnnnnnnnnnnnnnnnnnnnnnnnnnnnnnnnnnnnnnnnnnnnnnnnnntcattcaacaaagtttatgaactgtctacggaggagaggcactgaagtgcagcgatgactcaacgcgtacttgagcttcaaaaggctgccaggtaaacaagtaattatataacggttccatgctagcagtcatcacgagatgcaccccagaaagtgagtaactcttggtgaacagaaggccagcactggggcgcctgtgtgatggatccctgtcggcagaaggagttgggagggggcccagagagaaggggtccagagggatgggggtcccagaaggaggggtcccaaagggagggggtccagagggagggtggkcccagagggaggagtcccggagggaggggggcccagagggtggggtccctgagagaaggaggcccagagggaaccagatacacaggccacagggcaggaagttcccggcagagctatgagaagctggcctactccgtcctgttcataagacactactttaatttcctttcatttattctcatgtcagaataagtcaatgaaccaaaattgataaattccatgtctcttaggatggtgttttgcacgtgttaggtataaacaatgtacaattctagataa

SEQ ID NO: 707780 - DNA, 688 bp, Homo sapiens
aacttggcccacgttcgcatgcaattcaactgaaatccaattcagcattgctgaaaggtttgcaaacctccatgaaatgagctgtgaactcaatgtggcctttgggtatctaaggaagtttcccaacatttccaacaaacttaaacaggacttttaggacctggtgatgactctgttatattttaaagtataattcatccccaggaaatctatgaatcacatagagttggcccccagagataagttgtctacactttgaaaaattattttttatctctgtatgctcttaaattgggagaattctggttaattgatcagaagttagggagctttcaatacatgctgttttcacctcaccacaccactgcatacaatgaattccacaagctcggacatattagggagcatttgctataaagtggccccargaatctacacatttctaatggtaaacagttgagataatccaatatctttgcccaacacaatgggttggaacaacctgtcacataagacaaacttccacttctaatgaagataaaactgcgcttattctttcattcgttctttaggcaaagttccttcccgtctcatctgtgccttgccctccaccctctgctctcaccacaaagccctacttgtgccttctgataatcctcatccactctcccttctctaaccacttaac

SEQ ID NO: 707781 - DNA, 748 bp, Homo sapiens
ttttgaataaaacattttagcaagtattcttacaaaatctcagtggtttacacatgcacatctgacctaggagatctcaatccaaagttcaatatttcctacacgtgtggtaacactggatcctagagcttgtttgctgaaagttgtgctcttgttgaaagagttcaggtcaggcacccagtctctaacgctgtggaaacactgggttagaaacaggagccctgagcaaaactcttctcttccagctctgctgtgtcaccttcctcttgaaaatggggcatgacrggccaggtgcagtggctcacacttgtaatcccagcactttgggaggccgaggcaggtggatcacgaggtcaggagttcaagaccagcctgaccaaaatggtgaagccccgtctctactaaaaatagaaaaattagctgggtgtggttgtgcgtgcctataatcccagctactcaggaggctgggacgggagaattgcctgaacctgggaggtggaggttgcagtgagccgagatcacaccattgcactccagcctggatgacagagtgagactccatctcaaaaaacaaaaaacaaacaaaacaatgaggcataacaaatttgtccacaactgcacaactttttgtgagaatcaaatgagttacagatgcaaaagaacttcttaaacctttaccattttcaataattctaagcatgagcataacatgatggagaattaggaaatacatttgctcaaaggtgat

SEQ ID NO: 707782 - DNA, 606 bp, Homo sapiens
taaaacatttaaacaagactagggtgacatgaggcaaaattgtgaagagactagaagttggattttactgttcccctcacttctcgctcctctgctkcttctttttattcagtgacttttggtcttccagcctgccagacccccagcacaggccccccaagcaagccagccagtctcatagaactgcttcatatttaagacaatgatgtccattaaaatatgtcttatttcctcagagccatattgtctgataggtgacagcttattaatctgataaagtaattcatgcagctagaataatgattattgtgggaattgtgttactaggcccacataacctgtatttttaataaattccttctagagacaatgccttattccaaataaattgctctaatggtcagaattgctcaaatagttagaatctccctttgcgaccagttcaaagaagactatatgcatggtcagctctgacagaaagattgaacatcttcactttgtttccttttccttaacatttgttttaattggggggatgaatatatatctgtaaaacattttgacattaggttgaatcacttagtcaaaaaggatccttagaaaagc

SEQ ID NO: 707783 - DNA, 1262 bp, Homo sapiens
tatataaattttagaagacactagagaaaatatatttctaaaatgttctctagtgaagaaacaataatttttaagacagtttgacagtcacatagagagatggtgagttttacatggcctccttcaatgttgcataagtggtcaggctttcccatcccattcccttggatacagtaattgatgaaaaaaaaaagtgtatttgaggaaattattcacttcctgaagcagatgtaagggcctatatctcattctgcactcaagagtttaatattcttcttctttaaaaagaacactccgagtaaaattggcttcactgatgttattaaagtcttctctcaacccaaaaagcacagtaatggcagggatcttatgttgggcctataagataacatcctatcaaacaccaccagcgactactctcctgcacckcagagaatctcttcaggttctgtgtttcaaatgagcttgtgttttgccttctctttctaatcagcttgctttttctacagcctttgacaatttatgtgtgttttttatctgctgtctgcataactgcctaatctattattatcaagatttgaattgcattgtatgtttgattattgatctctatagatttattcctgaaaactgtctttgagatcttatttgaattcatgtttctaaatagagtctgtgggtcaactccatgtgagtctgctatatcaacttgcttttgaaaacaaaacgatgctggtgcttatgtttttacttgttcaaaatggaagttcagatattagatatacattcagttcattttctctgccttaatgtccagacatagcatttattacattgcagtaaataagatcataagatattttgaaaatatcatttttgtcttatttaaccaaccttgaagtcttgtgtactttattattttagtgattaaataatattcagattcattgttaatatttgctacttagatttagaacaattcaataaaaacacatatttagttttaacctcaataggcctttgagacaacataatctccattttacagaaaaataacatcctagatatttcacataaaatagctagtaattagcagaatgtagggccttcacgtgtcttacaaaacaaatgaaacatttttattgtttataatattctagtgatggatttcaaggattctgccatttatggatgtcttccttagctaatcaaagcaaataaactatgtttctttttaaattttcaagaaatgttttgatttc

SEQ ID NO: 707784 - DNA, 1262 bp, Homo sapiens
tatataaattttagaagacactagagaaaatatatttctaaaatgttctctagtgaagaaacaataatttttaagacagtttgacagtcacatagagagatggtgagttttacatggcctccttcaatgttgcataagtggtcaggctttcccatcccattcccttggatacagtaattgatgaaaaaaaaaagtgtatttgaggaaattattcacttcctgaagcagatgtaagggcctatatctcattctgcactcaagagtttaatattcttcttctttaaaaagaacactccgagtaaaattggcttcactgatgttattaaagtcttctctcaacccaaaaagcacagtaatggcagggatcttatgttgggcctataagataacatcctatcaaacaccaccagcgactactctcctgcacctcagagaatctcttcaggttctgtgtttcaaatgagcttgtgttttgccttctctttctaatcascttgctttttctacagcctttgacaatttatgtgtgttttttatctgctgtctgcataactgcctaatctattattatcaagatttgaattgcattgtatgtttgattattgatctctatagatttattcctgaaaactgtctttgagatcttatttgaattcatgtttctaaatagagtctgtgggtcaactccatgtgagtctgctatatcaacttgcttttgaaaacaaaacgatgctggtgcttatgtttttacttgttcaaaatggaagttcagatattagatatacattcagttcattttctctgccttaatgtccagacatagcatttattacattgcagtaaataagatcataagatattttgaaaatatcatttttgtcttatttaaccaaccttgaagtcttgtgtactttattattttagtgattaaataatattcagattcattgttaatatttgctacttagatttagaacaattcaataaaaacacatatttagttttaacctcaataggcctttgagacaacataatctccattttacagaaaaataacatcctagatatttcacataaaatagctagtaattagcagaatgtagggccttcacgtgtcttacaaaacaaatgaaacatttttattgtttataatattctagtgatggatttcaaggattctgccatttatggatgtcttccttagctaatcaaagcaaataaactatgtttctttttaaattttcaagaaatgttttgatttc

SEQ ID NO: 707785 - DNA, 2036 bp, Homo sapiens
tctagctggtgacgtttcctgaacaccaggggagaccaggctctgttctaggcacgggcagcagtgaggaagactgcacggcccctgaagctagtgctgggggacagggttggggtggcatggccctcatcaccagccgcctgcgagtctgtgccagagcagattggggtgacaacagactgcactgtgtggggtgaggggcagcatgtggctggcccccaaatgaggggagatatggttagggaggcaccttggcctgttggccatgggtgggagttacattctggccccagtgcaggaagatgaggacaaggcacaacattctttagtttgcagtctgtaaagttctctcagagttctgtgggaggcatggagtatagggcaagatggagagaggccagagactagttaggggctggcagagccttgggtgagggatggaggagcctcgggtgagggacagaggagccccgggtgagggatgatggaggagccctgggtgagggatgatggaagagccctgggtgagggatgacagaggagccctggttgagggatgatggaagagccctgggtgagggatgatggaagagccctgggtgagggacggaggagcctcagatgagggacggaggagccccaggtgagggacggagaaatcccaggagagggatgacggaggatccctggatgagggatggaggagccccgggtgagggatgatggaggagccccgggtgagggatgatggaggagtcccagatagtggatggaggagccccgggtgagggatgatggaggagtcctgggtgagagatgatggaggagccccaggtgagggatggaggagctctgaggggtgggagggctggactggagggtgtctaaccctaccaccctgcttgccaggcactgcttctgcccgagctcccccagtgccagttggagggtggaagcactagctgctatttggtctggaggttctcatgggacagtgttgttatgtgactctcatgatcccagcctgtgtctgtgtagccagccctctggtccacctagtggccaactgtccctggagctgcccattggcctcactgaccgtccgttctccagcagcatgggccccctgtctgctgggtagcccttgaccctgccattggccgtctgtgccacctgcccactgtgaaggcatgtgacttggatcctggtgaaggaggtggctgtgtggcggggtgggcaggtaaagaagcagcacagggtcacctccctggaggcccccatgacagtgagctgggtgcctggactgtcgtgtgtctgtgggtctgggcggccactgcacatctctccctgtctctgagcagcagctgggggcagaaccacagctctgcggacctgtttatctcagtgcttgaccagatgctctgggggcagggcctgtgtcctgcactgtgtggccctaggcaggcaggtcacttcctgtcgcaggtgtacatctggataaagatggttctgtctttgtgcctggtggcgttgtgttggggaccatgggactgcgggatagaggggagcagctccaggtgagctctggagtcagctagggtgagaggtccgttctagcctgggggctgtgagaaatgattcctcaggccagacacagcccttcttaaagttaagccagcaacgagaataactctctttggaggtcagagggcatagacctggagggagcctgtacctgagaggcccgagtctgtgggactcaaaggatgagcccagccttactgaagctgccctccccactcccctgccatgcactccctgcccccmagaaaaacactttatgggctgggcacggtggctcacacctgtaatcccagcactttgggaggctgaggcaggcggatcacaaggtcaggagttcgagaccagcctagccaacctggtgaaaccctgtctgtactaaacatacaaaaaattagctgagcgtgttggtgggtgcctgtaatcctagctacttgggaggctgaggcaggaga

SEQ ID NO: 707786 - DNA, 633 bp, Homo sapiens
tattaatattcacagcaagtttttcctacataagaaaaaatatttaagtatgtttggctttacaatagcatttgacaaatttgtatttctgagaagctgagaaatgtgttttgctttcaaaacacaatactagcctggcttccacctgtcatgactttataggtttaatcatgaactttataatcttttctcaattcaagcctgccctaagcaaacacttaaagaaaaaggagttctaggaagcttactttagcctaaccaaattgacaaaatataaagccatcacaggtgaaataaccaaactatgtaaaagctttcaaatgttttttgaaattccttaagtgagtttttcaattctagaagctctgattgatttcttcttaatcctccctcctggcggatcacttgaggccagtagttcaagcccagcctggccaacatggtgaaaccccatctctactaaaaatacaaaaattagccagatgtggtggcaggcgcctgtagtcccagctactcaggaggctgaggcatgagaatcgcttgamcctgggagacgacagttgcagtgagcagagatcctgccaccgcaccccagcctgggagacagagtgagactcggtctcataaaacaaa

SEQ ID NO: 707787 - DNA, 823 bp, Homo sapiens
accggaacagaaacccgcgtgcccaccatacacccaacactccgccttcccagcacctctaacgggccacagggactgtccagctggcccacttgtactggtagttaaatgtctactaaaatagggcaaaaatatgtatccataaatataatttagaagcaaaatattatgggggraactttggtgacaaatattgggaaccactgattttaaaaccagaacaagcactttgtcaaaagtttattgagatggatgctcgggatctgcttttctctaagtatgttctactttaaattttaaaagaatatggattgcattataatgaaaacaaaaatttaccacctggcataaaaggaaataaaaaaaggtgtcctggaaaaaacggaaattagagagatttatcagttcaactaaaaaaatcactttttaaaaaacccaagattttttttttttttttgagacagtctcgctctgtcacccaggctggagtgtagtggcgcgatctcggctcactgcaacctccgcctcccaggttcaagtgattctcctgccccagcctcctgagtagctgggaccacaggcgcgcgccaccacgcccggctaatttttgtatttttaacggagatggggtttcattattttggccaggctggtctcaaactcctgacctgtcaggtaatctgcccacctcagcctcccaaagtgctgggattagagacatgaggcaccacactcggccctaaaaaacccaagactttaaatgcccatcccgaagcgtcagcaccccacagtgcacactgacgcaggcccaggggctgcacgg

SEQ ID NO: 707788 - DNA, 900 bp, Homo sapiens
ttctaaaacaggaatgtattacattttggaaaataaatctttactaaaacccagaaacctaaactaacaattaaatttgtgacagtacagtgtggtatcatagtaattgatatgtaagacttgattaataaagtctatttatttaatcctatagtaactccattttctcattactccatcaacaaatatttactctgtcttctctatgaaagacattatgctaagtgatatgaggtacagagagaagaattagtcttcaagatattggcagtctggctagggtgcagttctcatgcattaattacagaaagtagcacatgggaaatgccagctgagtggtacagctaatgcgtctcatgagatgaaatcatagtcttgtgatgactggggaagtttgcccaggcgagttagaatttaagtgagagagccttacatattattagtatttaattacgatcgaaggagaacagataaaaaaaagtagaagcataagcaaggaatgaaaatggggggcayagagtattttgtagagctgcgttgtccaatatggtagccactagtcacatatggctacagagcacttcaactgtggctagtaagaattgagatgtacaattgtgaagattcagtatgaaaaataatatgaaatatctcattcatattagtcattattatctattaaaatgagaatgttttagctatattgggtaaatataccaatatattaacactaacttcacatatttattgttacattttataatatgactactagaaaatttaaattatatacacggttcatatttgcgacttgcattatatttctattggacagtgtcaagctattgagtaactgttggaaggttgagattattaaatacgtatttttaagaaaaggaa

SEQ ID NO: 707789 - DNA, 912 bp, Homo sapiens
caaaatctgtagataagaccaataggtagtcttccatttagtaaaatgccccattttttgactgtccaattctaccatccttctgcccttgctcaaatgccagcacgtccaggaagccgtgtcccatttatcctatgaggcattttttgttctttcacctaactcctaatatgtttttatctgagtacttttgtcaggtgtctctttcctatttgtactctgattatttgtgcatgaattttgtcttcactacagtctccttcaagaagaaattcacactttcattaatttatatatacaacattccagtcactgatggaccacgtatttattggtggtcccttaagattataatagagctgaaaattttctctctcctaatrtcatagtcaccattatgtcatagtgcaacacattcccttctctatggttatatatgtttagatacacaaatattctgttacaattgactacagtattcaatacagtaacgtgctgtacacgttgtgacctaggagctataggctataccgcatagccgagttgtgtagtgggctatgctatctaggtttgtataagcacactctatgatgttcacacaacaacagaattgcctaacaatgcgtttctcagaataaatcgctgtcattaagtgacacatgactatattcattaaacaaatgtgatttgacagtctactaggtgccaaggacctttcaggcattagtaatataatactagtaagtatttatatggtttatttcctggctctgcatcaaagacccatcaacaagtcaccacatgaaatcttactgtcacccttgagttccacattcaattctaccaagatggtcatcaagtctctctcatcaatttaaccattccccctatttccacgtccattttaccaaa

SEQ ID NO: 707790 - DNA, 454 bp, Homo sapiens
agagacaggattttgctatgttgcccaggctggcctcgaactccggggttcaagtgatcctcccgccttggactcccaagtgctgggattacaagtgtgagccactgctcccagcctacaaaagattttcatacctattatctcatctgagtcctccgtcctaccacctgaggttgctatgacaggatttagcccccctgccagtaatgggtatggccaagcatggcaggagttgtgcaagtgtcatggaactcaaatcactgccaccttccaccttagggagatacctcccccagagaacatcacgcttttaaaartgaatgtaagcccaggcgcggtggctgacatctgtaatctcagcactttgggaggccaaggcagatgcatcacttgaggtcaggagttcgagagcagcctggccaacatggtgaaaccccatctctattaaaaatac

SEQ ID NO: 707791 - DNA, 454 bp, Homo sapiens
agagacaggattttgctatgttgcccaggctggcctcgaactccggggttcaagtgatcctcccgccttggactcccaagtgctgggattacaagtgtgagccactgctcccagcctacaaaagattttcatacctattatctcatctgagtcctccgtcctaccacctgaggttgctatgacaggatttagcccccctgccagtaatgggtatggccaagcatggcaggagttgtgcaagtgtcatggaactcaaatcactgccaccttccaccttagggagatacctcccccagagaacatcacgcttttaaaagtgaatgtaagcccaggcgcggtggctgacayctgtaatctcagcactttgggaggccaaggcagatgcatcacttgaggtcaggagttcgagagcagcctggccaacatggtgaaaccccatctctattaaaaatac

SEQ ID NO: 707792 - DNA, 500 bp, Homo sapiens
gccaagctgcagggcaatggtgtgatctcggctcactgcaaactctgcctcctgggttcaagtgattatcttgcctcagcctcccaggtagctggggttacaggcacatgccaccatgcccggctaattttttgtattttgagtagagacaaggtttcaattcaccatgttgaccaggctggtctcatactcctgacttcaggtgttctacccacctcggcctcccaaagtgctgggattacaggcgtgagccactgcgtccagccaatttttgtatttttagtagagacagggtttcaccatgttggtcaggctggtctcaaactcctgacctcaggtgatttgcccacctcagcctcccaaaatrctgggattacaagtgtaagccactgcactgggcagagactataacatatgaaatgcggtctttgtttatatcttcatttttgaaactgtttttttgagactgttagggaatactaaatataaactagattttg

SEQ ID NO: 707793 - DNA, 500 bp, Homo sapiens
gccaagctgcagggcaatggtgtgatctcggctcactgcaaactctgcctcctgggttcaagtgattatcttgcctcagcctcccaggtagctggggttacaggcacatgccaccatgcccggctaattttttgtattttgagtagagacaaggtttcaattcaccatgttgaccaggctggtctcatactcctgacttcaggtgttctacccacctcggcctcccaaagtgctgggattacaggcgtgagccactgcgtccagccaatttttgtatttttagtagagacagggtttcaccatgttggtcaggctggtctcaaactcctgacctcaggtgatttgcccacctcagcctcccaaaatgctgggattacargtgtaagccactgcactgggcagagactataacatatgaaatgcggtctttgtttatatcttcatttttgaaactgtttttttgagactgttagggaatactaaatataaactagattttg

SEQ ID NO: 707794 - DNA, 1274 bp, Homo sapiens
gggagagagagaccgtggggagacggagagggtgagggagagggagagggagagggagagggagagctatcagttttctttcttgtgcattattttcacagtaatataaattatggacatcaaaatatcctcagggttaaaaatgttggagtccaagcattctatattcttgatttgtatggtttcaattatgactcagcaytttaggaaaacattggctctataatctgtcaccctcaccccatttaaataaaaacatacttttttggacacaaggatcaggcatacacatctacacagtggatcacatcatttttgggggcaaagtgaaaactgtttttatactcaaacatactgttgggaaactgtgaaataaaaatttctgatgtttgttaaaaattgggaagaaagacattaatactattgtagtagattttatggccatcgtaatagggttcagttcagaaattgatcataactctgaacacagacaacgaagaatttatagtcaataagcagaataaatcagtggataagaattattgaaaaacatttgataaaataccaaaggaggaagaggaactttttatagcagaagcctggttacaggttggctaaggacttaaatatcaaagaaagggaatcacgatattagtagacataagggatatgtggatttttactaaacagtattagcaggatttatgaaagtgagcctctcaaaccaggagcagggcaagaagtcaaggttggcttagtcaaaaagagggttcagttaagcttgactaacatttggtcataaagggagtgcttacaagaacccagatttttttcccatctgatctgaaaataaataatcaccaaaaaaggctttgtttgaaaaatgagtgcccacttcacctgagaaaacctccatcttcttctgtttacctttgaatttagtgtagaaaaagagcacttgtcattgccacagttttaattttgctttcactcttaaaaacagagagtcagggctgggtgtggtggttcatgcctgtaatcccagcattttgggcatggtgatgcaagcacacctgtaatcccagctacttgaaaggctgaggcaggagaatcacttgaacccaagggtcagaggttgcagtgaaccaaaatcacaccactgcactcagcctggtgacagagtgagactccatcaaacaaaacaaaacaaaacaaaacaaaacacaaaattagaaatttagttttattcaaacagcaacttacaaacacaaagg

SEQ ID NO: 707795 - DNA, 1274 bp, Homo sapiens
gggagagagagaccgtggggagacggagagggtgagggagagggagagggagagggagagggagagctatcagttttctttcttgtgcattattttcacagtaatataaattatggacatcaaaatatcctcagggttaaaaatgttggagtccaagcattctatattcttgatttgtatggtttcaattatgactcagcattttaggaaaacattggctctataatctgtcaccctcaccccatttaaataaaaacatacttttttggacacaaggatcaggcatacacatctacacagtggatcacatcatttttgggggcaaastgaaaactgtttttatactcaaacatactgttgggaaactgtgaaataaaaatttctgatgtttgttaaaaattgggaagaaagacattaatactattgtagtagattttatggccatcgtaatagggttcagttcagaaattgatcataactctgaacacagacaacgaagaatttatagtcaataagcagaataaatcagtggataagaattattgaaaaacatttgataaaataccaaaggaggaagaggaactttttatagcagaagcctggttacaggttggctaaggacttaaatatcaaagaaagggaatcacgatattagtagacataagggatatgtggatttttactaaacagtattagcaggatttatgaaagtgagcctctcaaaccaggagcagggcaagaagtcaaggttggcttagtcaaaaagagggttcagttaagcttgactaacatttggtcataaagggagtgcttacaagaacccagatttttttcccatctgatctgaaaataaataatcaccaaaaaaggctttgtttgaaaaatgagtgcccacttcacctgagaaaacctccatcttcttctgtttacctttgaatttagtgtagaaaaagagcacttgtcattgccacagttttaattttgctttcactcttaaaaacagagagtcagggctgggtgtggtggttcatgcctgtaatcccagcattttgggcatggtgatgcaagcacacctgtaatcccagctacttgaaaggctgaggcaggagaatcacttgaacccaagggtcagaggttgcagtgaaccaaaatcacaccactgcactcagcctggtgacagagtgagactccatcaaacaaaacaaaacaaaacaaaacaaaacacaaaattagaaatttagttttattcaaacagcaacttacaaacacaaagg

SEQ ID NO: 707796 - DNA, 2586 bp, Homo sapiens
cggcgggggggcggacgaggaggcgggggaggggaccggcgtccggcccccgaccctcgagacgccctagcgggaaggccggggagagcgagcggggccgtgcccggcggcgcggagcggcgcggcggaggcgacgggaatccggccggccccgaagacggggagccggcgcggcggggccggacgacgggccccggcggggaggagggcaccgagacccccccagacccgccgcgacgccgccgagaaccgcccccgcgcccgccgacacccacgtcgtcggggccgcggccggggaccgctccccgccgcccgccggccccacgacacgcgcacaccaacgacacgcccttctttctctctctctctctctctctctcccccccgtctccctcccgagttctccggctctcgcggccggcggggccgggcggcgaacgaacgagcgagcgaacgaacgggcacgcgggccccgcccgcgcacgcgccgcgtcgcggtgggggggtgggtgtgcggaggtaagcgcgcggcggcggcggcgccgccgcgggcctcgccctccgggctccgttaatgatccttccgcaggttcacctacggaaaccttgttacgacttttacttcctctagatagtcaagttcgaccgtcttctcagcgctccgccagggccgtgggccgaccccggcggggccgatccgagggcctcactaaaccatccaatcggtagtagcgacgggcggtgtgtacaaagggcagggacttaatcaacgcaagcttatgacccgcacttactgggaattcctcgttcatggggaataattgcaatccccgatccccatcacgaatggggttcaacgggttacccgcgcctgccggcgtagggtaggcacacgctgagccagtcagtgtagcgcgcgtgcagccccggacatctaagggcatcacagacctgttattgctcaatctcgggtggctgaacgccacttgtccctctaagaagttgggggacgccgaccgctcgggggtcgcgtaactagttagcatgccagagtctcgttcgttatcggaattaaccagacaaatcgctccaccaactaagaacggccatgcaccaccacccacggaatcgagaaagagctatcaatctgtcaatcctgtccgtgtccgggccgggtgaggtttcccgtgttgagtcaaattaagccgcaggctccactcctggtggtgcccttccgtcaattcctttaagtttcagctttgcaaccatactccccccggaacccaaagactttggtttcccggaagctgcccggcgggtcatgggaataacgccgccgcatcgccggtcggcatcgtttatggtcggaactacgacggtatctgatcgtcttcgaacctccgactttcgttcttgattaatgaaaacattcttggcaaatgctttcgctctggtccgtcttgcgccggtccaagaatttcacctctagcggcgcaatacgaatgcccccggccgtccctcttaatcatggcctcagttccgaaaaccaacaaaatagaaccgcggtcctattccattattcctagctgcggtatccaggcggctcgggcctgctttgaacactctaattttttyaaagtaaacgcttcgggccccgcgggacactcagctaagagcatcgagggggcgccgagaggcaaggggcggggacgggcggtggctcgcctcgcggcggaccgcccgcccgctcccaagatccaactacgagctttttaactgcagcaactttaatatacgctattggagctggaattaccgcggctgctggcaccagacttgccctccaatggatcctcgttaaaggatttaaagtggactcattccaattacagggcctcgaaagagtcctgtattgttatttttcgtcactacctccccgggtcgggagtgggtaatttgcgcgcctgctgccttccttggatgtggtagccgtttctcaggctccctctccggaatcgaaccctgattccccgtcacccgtggtcaccatggtaggcacggcgactaccatcgaaagttgatagggcagacgttcgaatgggtcgtcgccgccacggggggcgtgcgatcggcccgaggttatctagagtcaccaaagccgccggcgcccgccccccggccggggccggagaggggctgaccgggttggttttgatctgataaatgcacgcatcccccccgcgaagggggtcagcgcccgtcggcatgtattagctctagaattaccacagttatccaagtaggagaggagcgagcgaccaaaggaaccataactgatttaatgagccattcgcagtttcactgtaccggccgtgcgtacttagacatgcatggcttaatctttgagacaagcatatgctactggcaggatcaaccaggtaggtaggtagagcgcggcgaggccccgacgcggccggacggccggccggggggcctcgcgaggacgggcccggcgccccgcaagcgaggaggacgacggacggacggacgggccgcggacgggcggacgggagggagcgagcgggc

SEQ ID NO: 707797 - DNA, 1532 bp, Homo sapiens
ttcatcccaggaggatacccgcccaatgccaactggagcccttttgtatgaggtgtctgtcaacccctgttaggaggtttctcccagtcaggagtcacggggaacccacttgaggagacagtctgtctcttagcagagctggtgcactgtgctggcagaatccctctagtcaaaatcagctgctctcttcagagccagcaggcaggaatgatgaaatccactgaagctgcacccacagcctccccttcccccatgtgctctgtcccagggagatggaggttttctgtgtaagcctctgactagggctgttacctttccttcaaatatgacctgcccaatgaggaggactctaaagaagcagtctgccacagccactttgctgcacccaacccggaccttccagcctccttggcactgtcaggggaaaactgtctactaaagcctcagtaatggtggactccactccctccaactgacctcaattggcccaggtcaacttcagactgctgtgctggcagcgagaatttcaggatgaggaacgcattagctgtttgtgattttcatgtctgttgcagggatttgacccattgttagtgctagatttggagtcttaaaaaacagatttatcttactgaactcaaagtacaacttgaagatgtactcagctgtttacttaaattgcagcaggagaaaatgtatctttgcagatctatttttatgtcacttgcttttagacacgagattgtctctggcacagtaattcaacttagtctatgtcaaaaacatagcctgaaaatgctcaaaaaaaattatgaatagcggattgtattctatgtgttytcaaatttcttctatgatgtaaaatatataacataatgttttaccttggatttctaacctcagccctcagccattttcccaattttttttttttttgttttgagacggagtcttgctctgtctctcaggctggagtgcagtggagctatctcggctcactgcaagctccacctcccgtgttcatgccattctcctgcctcagcctcccaagtagctgggactacaggcacctgccaccacgcccgactacttttttgtatttttagtagagacagggtttcaccgtattatccaggatggtctggatctcctgacctcatgattcacccatctcagcctcccaaagtgctgggattacaggcatgagccaccttgccatgccccactttcccaaactattaaaagaccttccaaggtgggtcaaaagcatttttcagagaagattattcctaacagtaaaggataataacagatggataaaaatctcaaataaattatgcctctatttgcagaagcgtcactctccagagtctccaagatccagagaatttccatgaggtagagtagtttatggacatttagcaaagttggtcctgactgctgtctcagcctcttaatagatgtgcagctatagacaatttactggacttagaacagttatataaacctgggctgcaagaaaacgcataaca

SEQ ID NO: 707798 - DNA, 1924 bp, Homo sapiens
taaatcttctaaggcttctctgttcatccactaacattccagggcattcacagtgacagccaaagttcgcctcttctttctgctattcccatgaagctcttgtggtctgagtgcttttccattgtttttgggatctgaggaaatctgcacattttgtgagacttctatgttaagctgtcttgtaaaaatctgtgcctcatgtcagaagtttgtgagagcaaaagtgcaggcattggggtttggttcacatatttcagaaacaccaaggacaaatgtttcttcctcataattttcagtcctattatttcaaatgtgttcctgcaaaaaaatcagaaaaaaaatttatcagagcccaaagcacctcagcacatatgataaagttgaatcttctatttcactttattctttttttcatctctggtaatgtaggtcaaaaagttttctttcccttagtagaaactaacttagaaatgtgaactctctatgccaaacatgtcacctgtggaatagttkattgtatctactcatctcaaagaatttttaaggaccttaatccatagaaaaacttagaaacatgccaggaatagaacaaattcttaactgttacattatttcttaatgagttattttattaattaatcttatataaagcttagtgggactgtgatctgtacgttttccctgtcctgtttttacctatgtcaaattagcctataactttagcttcaggggtttcagaaaacatacttgaatttatgtgttatataaaaagtgaattggatggtatgcacatcacattaagaaaagttttagtttgtgtctaagttcactgcatagaaaaacttatcattagtgtttccatttactttcctcaacatttatctgaatgatagtataatttatttctaattgcttattatattgtagttttccacagcatattttacaatattcatgttgttcccatatgtaaaaatgtaaggcttttctttgttttaaaaataataaattataggccagtgctgtgtttcatgcttgtaatcacagcacattaaaaggttgagataggtggatcacgaggtcaggagttcaagaccagcctggccaacatggtgaaatcctgtctctactaaaactacaaaaaatatcgccggcgaggagcggtgactcaagcctgtaatcccagtactttgggaggccgagacgggtggatcacgaggtcagaagatcaagaccttcctggctaacacggtgaaaccccgtgtatactaaaaatacacaaaaattagccgggcgtgatggtgggcgcctgtagtcccagctactcaggaggctgaggcaggagaatggcgtgaaccagggaggtggaggttgcagtgagccgaggtctcgccactacactccagcctgggtgacaaagcgagactccatctcaaaaaattaaaaaaaataaataaattatagcctttccatttgtataaaaagaggagtaatatattaagaacataataaaaagtgtctctaatatcattgaaatctttattaaaattttcttctaaatgctctttatgggagattataatgtatttgttgtgcaattttgttactctaaccatatgctaagaattcaaaatctgctctttatgggagcccagttatggttgaacatgctagttatctagaaagagtcttcttccgttgcatgctttgtttattcggtatttcacaggctaatgtttatttaattttattttctaatatatatattcttgtatttccttgttaggataggctggcttacattatttaattgtgtttttagattctgcttatatattataattttgtatgactatattcaactgtgtacagttgaatatgaatcagtcaaatatgaatcaaccacacgtctattgccaacata

SEQ ID NO: 707799 - DNA, 544 bp, Homo sapiens
  misc_feature 2, 3, 4, 5, 6, 7, 8, 9, 10, 11, 12, 13, 14, 15, 16, 17, 18,19, 20, 21, 22, 23, 24, 25, 26, 27, 28, 29, 30, 31, 32,33, 34, 35, 36, 37, 38, 39, 40, 41, 42, 43, 44, 45, 46,47, 48, 49, 50, 51, 52, 53, 54, 55, 56, 57, 58, 59, 60,61: n = A,T,C or G
  misc_feature 62, 63, 64, 65, 66, 67, 68, 69, 70, 71, 72, 73, 74, 75, 76,77, 78, 79, 80, 81, 82, 83, 84, 85, 86, 87, 88, 89, 90,91, 92, 93, 94, 95, 96, 97, 98, 99, 100, 101: n = A,T,C or G
tnnnnnnnnnnnnnnnnnnnnnnnnnnnnnnnnnnnnnnnnnnnnnnnnnnnnnnnnnnnnnnnnnnnnnnnnnnnnnnnnnnnnnnnnnnnnnnnnnnnnaagaaattccttgagatcaggaattcaagaccagcctgggcaacatggcgagatcccatctcaaaaaaaaaaaaaaaaaaaaaaagaaaaagaaaagaaagcaatagctaacgatttattaagctgtcaccaaatgccaagcataatggcaggcattttccatggattattttattaaattctcacacataccagtgaaaccttataaagtyagtaggattgttgtgcccatttgacaaatggagaaattgaggcacaggaggctgggtacttgcccaaggatacccatactagcaagtggtcaagtgagagtcgtcacaaatgcagtgactccaaagctttaacttgaattattttttaaaaccagtgacttaaaactcagtgcttctttaggtctttgtacttccttatcttatgtcttgagggcattggtttgtatcact

SEQ ID NO: 707800 - DNA, 630 bp, Homo sapiens
tgccattttttcttacagctcagatcttcttttggagatttttctccttgcacttgaaaaacactttttggaaattcygtaagtgagaaaacattggtggtaaatcctttcagttttatcatacagaaaatatcttcttcatgtttgtaaaagatagttttcctatggatgcaattcttgggttcttttgtggttttttttgtttgtttgttttcttttgttgtgttgtgtttttgagacagagcctcattctgtcacccaggctggagtgcagtggcacgatcgcagctcgggttcaagcaattttcctgcctcagcctcctgagtagctggaatttcaagggggcaccaccacgcccagctaatttttgtatttttagtagagataggggtctcaccatgttggccaggctagtctcaaactcctggcttcaagtgatctgcccacttcggcctcccaaattgttggagttataggcgtgagccaacaaactggcattattcttgttttatatttccatctatacttcgaagattttaatattctaccatctttaggctccatcactgctgttgacaacacagctttcaatctaatcatgatttcttcttgggtaaattgcctttttt

SEQ ID NO: 707801 - DNA, 630 bp, Homo sapiens
tgccattttttcttacagctcagatcttcttttggagatttttctccttgcacttgaaaaacactttttggaaattctgtaagtgagaaaacattggtggtaaatcctttcagttttatcatacagaaaatatcttcttcatgtttgtaaaagatagttttcctatggatgcaattcttgggttcttttgtggttttttttgtttgtttgttttcttttgttgtgttgtgtttttgagacagagcctcattctgtcacccaggctggagtgcagtggcacgatcgcagctcgggttcaagcaattttcctgcctcagcctcctgagtagctggaatttcaagggggcaccrccacgcccagctaatttttgtatttttagtagagataggggtctcaccatgttggccaggctagtctcaaactcctggcttcaagtgatctgcccacttcggcctcccaaattgttggagttataggcgtgagccaacaaactggcattattcttgttttatatttccatctatacttcgaagattttaatattctaccatctttaggctccatcactgctgttgacaacacagctttcaatctaatcatgatttcttcttgggtaaattgcctttttt

SEQ ID NO: 707802 - DNA, 892 bp, Homo sapiens
aaccctgtctctactaaaaatttgaaaattagctagtcatgatggtgrgtgcctgtaatcccaggtacttgagaggctgaggcagaagaattgctcaaacctggaggcagaagttacagtgagctgaggtcacgccactgcactgcagcctgggtgacagagtaagactccatctcaaaaaagaaagaaagaaaagaaaaaagaaaagaaaagaaaatgtttttctcctggtagttttggatgacttgttgtaggattttgacatatctattcctacatattactgtacatatttttgacacataattagagagtttcacacatatgctcctgtagtagaatgggcaattaaattcaaataccataaactggtcacattcttctagcttgaatataatcagcattcatattaattttttaagtgacttaggtttaagcttaccatcctaagtctggcctcattgcagagttgaaccagccctctccagcaccattctcaatctgcaggggagagtctctggtctagcttggatgatgtcaggtgtgcatcctcacaatcagccaggtcctgggactgtcctccagtgtgggtgtcacagtttggcttctgcggatgctgagatcatgtttgggagcagggtgtttataagaaatcaacacctgcagaagggaggtggaagaagcaggactgggtgacgagagaagctgaactggcatgcagaccagacaaggactcagtcaatcctcagagttgtccccatgtgggtctttgtgccctgaatgatctgccactagatgcaggccaccatgggaagggcatgccctgagagaggagatgctctacagctgaggcagcccctgaaggagctgagagcactcccagcagctgggg

SEQ ID NO: 707803 - DNA, 892 bp, Homo sapiens
aaccctgtctctactaaaaatttgaaaattagctagtcatgatggtgggtgcctgtaatcccaggtacttgagaggctgaggcagaagaattgctcaaacctggaggcagaagttacagtgagctgaggtcacgccactgcactgcagcctgggygacagagtaagactccatctcaaaaaagaaagaaagaaaagaaaaaagaaaagaaaagaaaatgtttttctcctggtagttttggatgacttgttgtaggattttgacatatctattcctacatattactgtacatatttttgacacataattagagagtttcacacatatgctcctgtagtagaatgggcaattaaattcaaataccataaactggtcacattcttctagcttgaatataatcagcattcatattaattttttaagtgacttaggtttaagcttaccatcctaagtctggcctcattgcagagttgaaccagccctctccagcaccattctcaatctgcaggggagagtctctggtctagcttggatgatgtcaggtgtgcatcctcacaatcagccaggtcctgggactgtcctccagtgtgggtgtcacagtttggcttctgcggatgctgagatcatgtttgggagcagggtgtttataagaaatcaacacctgcagaagggaggtggaagaagcaggactgggtgacgagagaagctgaactggcatgcagaccagacaaggactcagtcaatcctcagagttgtccccatgtgggtctttgtgccctgaatgatctgccactagatgcaggccaccatgggaagggcatgccctgagagaggagatgctctacagctgaggcagcccctgaaggagctgagagcactcccagcagctgggg

SEQ ID NO: 707804 - DNA, 1709 bp, Homo sapiens
catgataaagtttacccaggtgccagttggcaaaggaaaaatgttaagagggaccagcctcagaatccaaagcagggcaaagcatcatatggatttaaagctgagaggcaatagattgataactggcacagaaaatacactctaatcaattataattctctcactgactactgtaggctcttgagtttatggctaatgacccaagtcatcagtaacccacatggcttcctgatagaaagaaagatttttagagatttggaattcttagagactcaatcgccaacacatataattaccaatactgctgatatgtagaagtgaatctaataagataagacaaaaatagtatggaaaacatgaatcctcatgtacctaaaatgtattactttacagttgcatgttgatatacccaatgtgagaagaaattatacaaaaatgaaatgtgtctttaagatatggccatagttctattcagctacaaggacataactacccttttttgatgtaacatttgaatcgttttctaaaaatttttaagacctgtattttatgtttgttttaaaagtggtttttgataccttaatctttatttcattttgttttgtctttatttcaatttgctactgtatcatctattgaaaaatcttattaaacacttcctggcactaggctcaaatgaaagtaagacgtaagtgattatgatattgctttctcttttcttggactcattggatgaaaggagacaattaaagtcagtaatttwtaaaaaaaactgattttttggagttgttttcgactttcaagaagatgaaatgtaaagtttttgaaaaagtacagaggagaagtcttggaccttttgcctctggctttcaaatgctgtttgtaggctttgtacctaggcaagcaatgagcctgttttttctattcactcggaagagtgaatgggattgattttcaatatatattaacttttgcctattcctctagaggttcttgcaggtactgataatgacttggcaagacatctgtcatttatgtaagagcaagtccaaaaaaataccacagtgtcatacttctataaagtaaactagaattccccaggacttcagctaagatggctaacttgtagttacagtcaatatggactgtggcctgcctttgacaatttcaacagcttaaagaagagttttagccagctagagttatcaggcaggttaatttctgcctgcatttaatgaaattatttatttctttcccttatgctccctaagttgtgttgataaagatgaatatgagatccacaccttctgagaattatatttaatatagtttttagtttttcttttacacacacacatatgtcaataaaaggaatgcctcttcctatcactaaaccacctgtgaaaggtaaaacactggaacattggaacttttaaatatctaggtgaatctatttttttctcatttctcaaatttaaatgtgctcttaaaatatgtaatttgtttctcttcatgaaagaaagcagatataatgagggcaatatcctttttagaagaaaaataattctatgaaatatatgttgcaatattctttacatgctgctgaaactttgtatttttaagaacagaaacaggagcataaaaatataactaaacttcaaaagcccttgtgacagaatgactggtgttgtataaccttttttgatctc

SEQ ID NO: 707805 - DNA, 1709 bp, Homo sapiens
catgataaagtttacccaggtgccagttggcaaaggaaaaatgttaagagggaccagcctcagaatccaaagcagggcaaagcatcatatggatttaaagctgagaggcaatagattgataactggcacagaaaatacactctaatcaattataattctctcactgactactgtaggctcttgagtttatggctaatgacccaagtcatcagtaacccacatggcttcctgatagaaagaaagatttttagagatttggaattcttagagactcaatcgccaacacatataattaccaatactgctgatatgtagaagtgaatctaataagataagacaaaaatagtatggaaaacatgaatcctcatgtacctaaaatgtattactttacagttgcatgttgatatacccaatgtgagaagaaattatacaaaaatgaaatgtgtctttaagatatggccatagttctattcagctacaaggacataactacccttttttgatgtaacatttgaatcgttttctaaaaatttttaagacctgtattttatgtttgttttaaaagtggtttttgataccttaatctttatttcattttgttttgtctttatttcaatttgctactgtatcatctattgaaaaatcttattaaacacttcctggcactaggctcaaatgaaagtaagacgtaagtgattatgatattgctttctcttttcttggactcattggatgaaaggagacaattaaagtcagtaattttwaaaaaaaactgattttttggagttgttttcgactttcaagaagatgaaatgtaaagtttttgaaaaagtacagaggagaagtcttggaccttttgcctctggctttcaaatgctgtttgtaggctttgtacctaggcaagcaatgagcctgttttttctattcactcggaagagtgaatgggattgattttcaatatatattaacttttgcctattcctctagaggttcttgcaggtactgataatgacttggcaagacatctgtcatttatgtaagagcaagtccaaaaaaataccacagtgtcatacttctataaagtaaactagaattccccaggacttcagctaagatggctaacttgtagttacagtcaatatggactgtggcctgcctttgacaatttcaacagcttaaagaagagttttagccagctagagttatcaggcaggttaatttctgcctgcatttaatgaaattatttatttctttcccttatgctccctaagttgtgttgataaagatgaatatgagatccacaccttctgagaattatatttaatatagtttttagtttttcttttacacacacacatatgtcaataaaaggaatgcctcttcctatcactaaaccacctgtgaaaggtaaaacactggaacattggaacttttaaatatctaggtgaatctatttttttctcatttctcaaatttaaatgtgctcttaaaatatgtaatttgtttctcttcatgaaagaaagcagatataatgagggcaatatcctttttagaagaaaaataattctatgaaatatatgttgcaatattctttacatgctgctgaaactttgtatttttaagaacagaaacaggagcataaaaatataactaaacttcaaaagcccttgtgacagaatgactggtgttgtataaccttttttgatctc

SEQ ID NO: 707806 - DNA, 1645 bp, Homo sapiens
ctattaggaaaaaaaatgaaatgatttttaaataattaaagggacgtcctaagtttgccaataattgttattactgaaaagcaaactgtagaaaactcctgttttagttaaacctgttatttattcaaataaatacaaaacagttttaagttgctgtgattctcacaatctcattctcttgcttatactggccccttggcttgcatgtctcttctttcttttttaattaaaatttacgttttcttcgtagctcaaatcaatttctaatttccctttaatagcttattcaaccaaagttagactttattcttcaagtaactgccttgttacattcaattttttttgtacaggacttattttcacaattagattgtaaaacactgcagacaatgtgtggttttatatttcctcatttatctggacctaacataactcatgattcagcatgtattaatgtttgctgtagataatattaagttaggatgaatctttgattaaacttaaataactgctttaatttattgctaattatgcttattatggaattattaggcatattttgtgtgagggaagggagagaaagtgaacaagagaaagatattcagagaaaaagagagtaataaagaagactatttttgaaagtgtaaaaaacttytgaaaccaatcttttttaaaaataattatcaaaatgaaatgtttttcatgaagatgatataatcttatttaataattcaagcactattgaaaatcataaaatgttttaaagatattttaaaatttttctgttattaaatcgatctctgtctctcttcatggctgcataaataagaacaaatgtgcatctgtttttacatgcagaggtataatttaatagacctgggagctttctatgcactattctcatttagcatgtctgttttaggtatactttgatatcgcaggttgaagacagtgctgaaaattagctagaagaaggtatgagagtcacaggtttatttataacaaacatgaataaaaataaaagatgccattgtggggatagtggaaataaagtcagaaataaaagggagttgtggaaggtccaggatgaacttgttggtcattttaagaactttagattttagtttaagttggtaagacaatactggagaaattttttagcggaggagactcatagtttattatttattttaaaataaattttgttgcatatatgtgtggaggagtagactaaagatgtcttaaaaagtactagaagaagtaaactggtatacatcttaaatcatatttcagtaatataaaattataaaaataaaaataaagaattgtccttatgatgtcagtcaagtcaaacacaaggttgtaaaactatctatgttgattaaaatcaaaatatctttcatccttagtagctttcttctcttttatgtgtatcactctttatgtgcatatgtatgtaacatttagttgctttactttttctttttttccttttgccatctccatgtcttttggagtgaaagagagcttcctgaaaattgattctgctctccatccagattcttatgttcacaccagaagcctttctcaggcaatggtttaattatagacagttcttgtttttcttctatgagccaaataaatg

SEQ ID NO: 707807 - DNA, 1645 bp, Homo sapiens
ctattaggaaaaaaaatgaaatgatttttaaataattaaagggacgtcctaagtttgccaataattgttattactgaaaagcaaactgtagaaaactcctgttttagttaaacctgttatttattcaaataaatacaaaacagttttaagttgctgtgattctcacaatctcattctcttgcttatactggccccttggcttgcatgtctcttctttcttttttaattaaaatttacgttttcttcgtagctcaaatcaatttctaatttccctttaatagcttattcaaccaaagttagactttattcttcaagtaactgccttgttacattcaattttttttgtacaggacttattttcacaattagattgtaaaacactgcagacaatgtgtggttttatatttcctcatttatctggacctaacataactcatgattcagcatgtattaatgtttgctgtagataatattaagttaggatgaatctttgattaaacttaaataactgctttaatttattgctaattatgcttattatggaattattaggcatattttgtgtgagggaagggagagaaagtgaacaagagaaagatattcagagaaaaagagagtaataaagaagactatttttgaaagtgtaaaaaacttctgaaaccaatcttttttaaaaataattatcaaaatgaaatgtttttcatgaagatgatataatcttatttaataattcaagcactattgaaaatcataaaatgttttaaagatattttaaaatttttctgttattaaatcgatctctgtctctcttcatggctgcataaataagaacaaatgtgcatctgtttttacatgcagaggtataattkaatagacctgggagctttctatgcactattctcatttagcatgtctgttttaggtatactttgatatcgcaggttgaagacagtgctgaaaattagctagaagaaggtatgagagtcacaggtttatttataacaaacatgaataaaaataaaagatgccattgtggggatagtggaaataaagtcagaaataaaagggagttgtggaaggtccaggatgaacttgttggtcattttaagaactttagattttagtttaagttggtaagacaatactggagaaattttttagcggaggagactcatagtttattatttattttaaaataaattttgttgcatatatgtgtggaggagtagactaaagatgtcttaaaaagtactagaagaagtaaactggtatacatcttaaatcatatttcagtaatataaaattataaaaataaaaataaagaattgtccttatgatgtcagtcaagtcaaacacaaggttgtaaaactatctatgttgattaaaatcaaaatatctttcatccttagtagctttcttctcttttatgtgtatcactctttatgtgcatatgtatgtaacatttagttgctttactttttctttttttccttttgccatctccatgtcttttggagtgaaagagagcttcctgaaaattgattctgctctccatccagattcttatgttcacaccagaagcctttctcaggcaatggtttaattatagacagttcttgtttttcttctatgagccaaataaatg

SEQ ID NO: 707808 - DNA, 596 bp, Homo sapiens
gtaggtcatagtctagaaaaaagaatgttacaggttctggcacttagctgagacttaataattatttgttgatgaattgatgtccatttgcgaattctttgacaaggaagggatggcactgacaagtggataagcctagagattcacagcatcaggagatactaggatgcctaggtcagygatcagcaccaaataggactctctgcaaataactgaatccctgtcaatatttgagttcaggctcctggggttcaagacagtgaccacatctaggaatcaagaagaagcacgatcataactgtggtgccaggggtcagaataggagcaagtcactcatttgttacaccatacatcctgcctgcatttattcagccatccagacacccatcccttcatctgtacttgaaatctttacatggaagataacacttgctatggcctgaattttgtgtcccctgaaaatttatatgctgaatcttaatcaccaaggtgatggtattagaaggtgaggcttttgggagaagattaggtcataaggatggagtcttcatggataggattagtgcttttgtaaaagaggcccaggagagagtctt

SEQ ID NO: 707809 - DNA, 1247 bp, Homo sapiens
tccaagaacagttgacagcagatcgagttcctctggagacctctctcctgagtttgtggacagccaccttcctgctgcttctttacatggtccctttctgtgcctgtgcacctctgatgtttccctatgtgttctaattccctcctcttagaaggacaccagtcagattgaatgaggacccaccaaaatgacsttattttcagttttagtgaactctttaaagggcctgtctctaaatacagacacattctgaggtactggaggttagggcttcaaacatataaattttgggggacgcgatgcagttcacaacaggaatgttaacttaaaaacacctcagatgattataaaagcacgaatctgaaaagcagtggttattcttcacccctgccttgtggaaaattatagggcttttgctagtccttggcagaaccaggaagctcccggctcttgctgctctaaactcattaggcacatctgtgtgtcataaccatcaaggtcagggaatgccatgtactttttaacctaatgtgatgactctttcctcctgcacttaactatctcattagcaactctcagaatgtgaaaacaacttgacttgggggctaaatagtatttacactcataatttttattttgccaggctcaacagacttttttttatgaattaacaatctctaatagagacattgacctccttccatttaataaaccaataagtgttacacttccatgtacaaagaatgcaaataacctgtgaccagtgcagcctagatgccagtgtgctgagtggccatgcccacggggttcagtgtgtgccatagtctgaatgtgtccccctcaaaacttcatatgttgaaacaattgccaatgtgatagtattaaaaggtggggactttaggaagtgatcaggttatcagggctccacactcgtggatgggatcagtgccttattagaaaggcatcacacagcattatccttttgtgctcagccttccaccatgtgaggacgcagcaataaggcaccatcttggaagcagagagggagctttcactggacaccaaatcagccagaaccttgatcttagacttcccagactccagaaccgtgagaaacaaatttctattgtttataacttacccagagtttggtattttgttctagcagcaggagcaggctaagattgtactagttaaattttgcaattatgggtaatttgcctgtgcctgtgtgatagaattgatca

SEQ ID NO: 707810 - DNA, 2142 bp, Homo sapiens
agagtgtcatcattatgttacttctaaaaatgcaatcatattatatatccttttataaattttacttttgtcactttataatactgccacgaataactggcaaatgtccaatttattgtattaatagctatagcctttcgtaaagtaaagacaccataatgtattgatctcattctctccttgatcttcattgacatcagtgtaatggaatctctcaatgtgacttcaatttacatttatgtaactaactactgtaaattttaatatctctgtgtctattggtcaattggatttgctgtcctagaaattgtttattttgatattttattcatatttctattgggtttttggttattttctgattaacttgtggctagtgtgggccttcaataagtcatctgcactgaaaacctttcaaatttttttttgcttaactatttggctgtaattatgtatttttctatataattattttccatttctatatagtcaaacattatattctttcatatttcaatattctctgttttaagaagttctgccctactattaggatatatgttttatctttaaaaatatcattgttttatttttccattaattctttaatgtagtaggtatatatttgtttatttgctgagagaagttttcaactttatttaatagctggcacttattaagttttttgcaatgatttgaactattattacgtattaaatttttacatctattgcaatctcatgtttttctgttctgctctaccgatctatttgattatttatttctagtatatcaatttgaatgcatcatgtcatagtgttttgtaatataagtattctttttctttttgttacatgttctactatatctaaatatttattcttttatattaactaactgattaaaaagtaataatgaatagttagtccaattctatcccttcttttaaaatattgggagtattgttataatttaattcatatattagttttagacaattatagatttctaaatttttaaataaacattttatattagtgcttatactaaattaaaacatgttgtaagatcttcattattaaaatattaaaactcctatttatcaaattgtttttttattttcacagcctaagaaactaagttgtaaactatgtaaccatgtgggaaaagaagttatcattgaggaagtaaagagaaactaggaaatactggtttgtttccctttccaggaaaacattaaatagctgttgctatatgttatcccttttaacatcatctttctaaaagtgaaataactttatattgaataaaaatttatgaatttactcataaatagtgataacaattaggaatctacaagttgattttttaggtcaaaacaagaacaaccatccataatgctttgaggccttttcttgtattttgatgcagtatagtcacccctcagtatccatgagttttgcattggtggattgaaaatatttcaaaaatattttaaaaatttgcacctttgctaaagtacaggcatttcttttatcctcattattccccaaccaatacagtataataactatttagacaatgtttgcattgtattattataactaacccagagatgatttaaagtatattggaggacgtccataggttatatgtattatgccattttatataagagacctgagcacctgtggattttggtatctgagactcgtcctggaaccaatatcctacagataccaagtgatgactctactgttttgtctttgtcgtatttgctttttcatttggcttatccttgtaacaacaaaatatgtgaagaagatcctttgyatctatttcattttctaactgatagtacagtttatttctctcagggatcccacttgcttgttttattttctcttttcacaggagaattttttcacataaaagatgcactgcattaactgatttatcatattccctaagcttgcctccactagtaccaatgtagttagcatattcagtttccattttgaagtttggagaaatatccaataccttagcattttttataagtaaaaagagaaactaaaattcaagttataactcttccatgtttgttcattttcattgtttcatttgttacaactttagtaa

SEQ ID NO: 707811 - DNA, 2142 bp, Homo sapiens
agagtgtcatcattatgttacttctaaaaatgcaatcatattatatatccttttataaattttacttttgtcactttataatactgccacgaataactggcaaatgtccaatttattgtattaatagctatagcctttcgtaaagtaaagacaccataatgtattgatctcattctctccttgatcttcattgacatcagtgtaatggaatctctcaatgtgacttcaatttacatttatgtaactaactactgtaaattttaatatctctgtgtctattggtcaattggatttgctgtcctagaaattgtttattttgatattttattcatatttctattgggtttttggttattttctgattaacttgtggctagtgtgggccttcaataagtcatctgcactgaaaacctttcaaatttttttttgcttaactatttggctgtaattatgtatttttctatataattattttccatttctatatagtcaaacattatattctttcatatttcaatattctctgttttaagaagttctgccctactattaggatatatgttttatctttaaaaatatcattgttttatttttccattaattctttaatgtagtaggtatatatttgtttatttgctgagagaagttttcaactttatttaatagctggcacttattaagttttttgcaatgatttgaactattattacgtattaaatttttacatctattgcaatctcatgtttttctgttctgctctaccgatctatttgattatttatttctagtatatcaatttgaatgcatcatgtcatagtgttttgtaatataagtattctttttctttttgttacatgttctactatatctaaatatttattcttttatattaactaactgattaaaaagtaataatgaatagttagtccaattctatcccttcttttaaaatattgggagtattgttataatttaattcatatattagttttagacaattatagatttctaaatttttaaataaacattttatattagtgcttatactaaattaaaacatgttgtaagatcttcattattaaaatattaaaactcctatttatcaaattgtttttttattttcacagcctaagaaactaagttgtaaactatgtaaccatgtgggaaaagaagttatcattgaggaagtaaagagaaactaggaaatactggtttgtttccctttccaggaaaacattaaatagctgttgctatatgttatcccttttaacatcatctttctaaaagtgaaataactttatattgaataaaaatttatgaatttactcataaatagtgataacaattaggaatctacaagttgattttttaggtcaaaacaagaacaaccatccataatgctttgaggccttttcttgtattttgatgcagtatagtcacccctcagtatccatgagttttgcattggtggattgaaaatatttcaaaaatattttaaaaatttgcacctttgctaaagtacaggcatttcttttatcctcattattccccaaccaatacagtataataactatttagacaatgtttgcattgtattattataactaacccagagatgatttaaagtatattggaggacgtccataggttatatgtattatgccattttatataagagacctgagcacctgtggattttggtatctgagactcgtcctggaaccaatatcctacagataccaagtgatgactctactgttttgtctttgtcgtatttgctttttcatttggcttatccttgtaacaacaaaatatgtgaagaagatcctttgtatctatttcattttctaactgatagtacagtttatttctctcagggatcccacttgcttgttttattttctcttttcacaggagaattttttcacataaaagatgcactgcattaactgatttatcatattccctaagcttgcctccactagtaccaatgtagttagcatattcagtttccattttgaagtttggagaaatatccaataccttagcattttttataagtaaaaagagaaactaaaattmaagttataactcttccatgtttgttcattttcattgtttcatttgttacaactttagtaa

SEQ ID NO: 707812 - DNA, 655 bp, Homo sapiens
gcaattgaagatccacaaaagaagtgaaaatagccttaatgggactgcctttagggaggagaactgagaatcatctctaatgatgacattccaccattgtgatttgttcctgtcccaccctaaatgatacatatattctccccccacccttaagaaggtactttgtaatattcttccctgcccttaagaatgtactttctatgcctatcccaaacctataagaactaatgataatcccaccacactttgctgactctcttttcggactcagcccacctgcacccaggtgaaataaacagccttgttgctcacacaaagcctgtttgctggtctcttcacacagacatgtgtgaaaatagctcttaccatcacccaacatgttaccagttcctttgtcccctgcctgtctttcccagcatgctgtaagctccagaagagcagaagctttcttgtattcacaggaaaatctccaactcctagaacagcatctgacacatcrtatagggcaccagcaaatatgtgccaaactactggatttatccttttattggttgagcactcaacaggcacctggggattttgctgagtgatgtgtacacaaatgatgaactggataaacagaatgtggtctatccatacaatggaatattccttg

SEQ ID NO: 707813 - DNA, 655 bp, Homo sapiens
gcaattgaagatccacaaaagaagtgaaaatagccttaatgggactgcctttagggaggagaactgagaatcatctctaatgatgacattccaccattgtgatttgttcctgtcccaccctaaatgatacatatattctccccccacccttaagaaggtactttgtaatattcttccctgcccttaagaatgtactttctatgcctatcccaaacctataagaactaatgataatcccaccacactttgctgactctcttttcggactcagcccacctgcacccaggtgaaataaacagccttgttgctcacacaaagcctgtttgctggtctcttcacacagacatgtgtgaaaatagctcttaccatcacccaacatgttaccagttcctttgtcccctgcctgtctttcccagcatgctgtaagctccagaagagcagaagctttcttgtattcacaggaaaatctccaactcctagaacagcatctgacacatcatatagggcaccagcaaatatgtgccaaactactggatttatccttttattggttgagcactcaacaggcacctggggattttgctgagtgatgtgtayacaaatgatgaactggataaacagaatgtggtctatccatacaatggaatattccttg

SEQ ID NO: 707814 - DNA, 2028 bp, Homo sapiens
attcaattatattgtattgcaactcatttttttttcagtcaccatatcctggatacttttgtagcagatatacacagtctatgagcctagaccacctcccttctccctgaagctcccttgcatgctccctgtcctaacttacatcggtgctaggcgactccttatgtttttatataacctcccccgcagaaagagttgactggttcaagctgtgtgagtcaacatctttccctggcatattasaaaccgaaatgagaggaatatgtttccctttgaagatgatatgaggatatttggcttaggtactctcaatagggaggaagccaacataaagccaatggcagaaacacaaagtgggtgctggcaaggtgagtcccagtagcgtcttagccgctggattgagctgttcttttctcagtttggttgatcagtcacattctacttccttaatttggaggagccagtagcttttctttttttcctcctaacctagtttgaattatatttcttgctggttatattcaaaagagtattaatacatcttgctatgctaatgtatcaatattgtccatttttattgggtggcttatagtttattaatatgtgaactcgtattttaaaactcttctatttataatcatttgcattattttgaagctttgactttagacaacgcggcaatgagcattcttttatatttgcacagctgttgaatatctctagggaaaaatcatagcagaaaaacagaaaaggcttagatgttttaaattttagtagattatatccaactactgtctcccaaattgtaccaatatttcccaagatagtggcagatagtgtggatatccttacagctagatgttgccaatagtttaaatctttgcaaatgcaataggagaacaataatttctagttttaacttgcattttaaaattattcctgtgcaggagcacctttaatatatttattacatgctgtaggacaaagatgagtattacactggagttcttgttggaaataatacaaatcagatgagagtggaacactatgtgaaaaatgctaaaagaaaaactatcaactgagaattctacacctactgaaaccattcttcaaaaatggaggtgaaataaaggcttttgttgacataagaaagttgaaagaattcattatcctcagagctctactatcagaaatgctgcagaaagtcctatgggaagaaggaaaatgacagcagagggaaatctggatctacacaaaggaatgaagagccccccctaaaagtaactgcatagataggtataaaatactttgaaaaattaattattcatatctctttagaagatacttgtgggctttcctgatatctattattgtttctaaacaataaattgtttaaagcaaaaaataataattacattgtgggattctaacatgtagaattaaaatatatgacaataatcatacaaatgtcataaatatgataatagtacaaatgtcataaaagaggaaatagaaatatactattataagattcttatgctatatgcaaagcagtataatatcatttgaacacagactgtgatgagtaaaacatgcataccatatgccctggagcaatctctaaaatgatgtcaaaaggattagagctaaaaagccaacaaagcggaaaaattggagccgtaaaaatactccattagttcaaaagaagacaggaaaaaaggagcaaagaacagatgtgacagaaaataaatggcaagataatagatttaaactaagcgatatcaatagtcacattacatgttcttagtctaaacactaatcaaaaagcagagaatgtcatattggataaaaatggaagatcaagctatatggaaactcactttaaatacaaatatatgttagtaaaagaatgagaatatatataatgttaatattaatcaaaagaaagttaaagtggtaatattatatcacataaattagattttatagcaaagaatattaccagggatgaaaaggacaatttcataa

SEQ ID NO: 707815 - DNA, 676 bp, Homo sapiens
tgcagcttcttataatgccattcaagaaaaagtttaaatgtcctattttcctgaggattccagaacccaagagagaaggataattgaacctagagaagagcagggatttggaggagggaagactggatttctaagcataagactgaagactgttggcgctgtagcatgtgctttctggagttacttaggttcctgacatctgtctgtaggggagccagcagcaccctgtggcgctccggctctgaagagttgctgacctcagggcctttgattagagaggtccttgcaaagggaagatgtccactctgcttggactacctagctaaaatacttcatatatccaaaatcaaatcccccaratcagtgaaatatttatttattgagacagggtcttgttctgtcacctaggctggagtgttgtggtttaatcacggttcactgcagcctcgatctgatggacttaagcgagcctcccacctcagcctccagagttgctgggactatagagtgcaccaccatgtctggagaattacattttttgttgttgttgttgtagagacagggttttgctctgttgttcaggctggtcttgaactcctgagcacaagcaatcctcccacctcagctgcccaaagtggtaggatattacaggtgtgagctaccatggctagccaaa

SEQ ID NO: 707816 - DNA, 975 bp, Homo sapiens
cccctcatcctttcttgaaagtctggaaccacagatcttcagtgatggttgtgggattactacagtgaggggaggggagggaatgcttgaggaagactatttaccatgccctggggcaaacggatgggtcttaaaatgagtgggtgtgcagttgggagrgtcggacacagtgacaaagatctggacatacagggacatttttggccattctttcagggtttatgaaactcaggaccagttttagactgttaatgtgtgaggtcctctctttctctttctctaaacaaagcaaacaaacaaaaagaaacatgccatgctgttggtgaatgttgggtgttgaaagagggaggaagaactgttcgatgcttggtagctgatggctcagttcagctgtctcttaaaagcatgttgtgattacgtttttcatgaataatacggacagtaagtaaacatgtttcaatggaaaaatgtaaacaccctttccccattcccaataaaataccactctataatttagatggcaaaaaatgtttttggtctgattttaatgagcagaacttttcttttcttgtgctgtctggctttctctgtcttggtctctgtctccttcctctctgtaaaccattccttccatctcccccactgccatcccaagccatttctagagcacttctgagattcctgtcagttccagttttcacgaagcccacgagaaattcctttcattgcatgggatataggatattcttgtggagtggcagcccaggaaggcaggcagtagggaaagaaaatgtttggagacttgcctttcctgtttgctgccaccatagagaggatgccagtggccacccagtggaaaccctccagagctgaatgctttctaagcgaatggctgtcctgacattctgggggagtgcattgacgaggcaaaatgagaagagaggagtgatttgggagatgaaatagaaagcaaca

SEQ ID NO: 707817 - DNA, 975 bp, Homo sapiens
cccctcatcctttcttgaaagtctggaaccacagatcttcagtgatggttgtgggattactacagtgaggggaggggagggaatgcttgaggaagactatttaccatgccctggggcaaacggatgggtcttaaaatgagtgggtgtgcagttgggagggtcggacacagtgacaaagatctggacatacagggacatttttggccattctytcagggtttatgaaactcaggaccagttttagactgttaatgtgtgaggtcctctctttctctttctctaaacaaagcaaacaaacaaaaagaaacatgccatgctgttggtgaatgttgggtgttgaaagagggaggaagaactgttcgatgcttggtagctgatggctcagttcagctgtctcttaaaagcatgttgtgattacgtttttcatgaataatacggacagtaagtaaacatgtttcaatggaaaaatgtaaacaccctttccccattcccaataaaataccactctataatttagatggcaaaaaatgtttttggtctgattttaatgagcagaacttttcttttcttgtgctgtctggctttctctgtcttggtctctgtctccttcctctctgtaaaccattccttccatctcccccactgccatcccaagccatttctagagcacttctgagattcctgtcagttccagttttcacgaagcccacgagaaattcctttcattgcatgggatataggatattcttgtggagtggcagcccaggaaggcaggcagtagggaaagaaaatgtttggagacttgcctttcctgtttgctgccaccatagagaggatgccagtggccacccagtggaaaccctccagagctgaatgctttctaagcgaatggctgtcctgacattctgggggagtgcattgacgaggcaaaatgagaagagaggagtgatttgggagatgaaatagaaagcaaca

SEQ ID NO: 707818 - DNA, 615 bp, Homo sapiens
acaaaaattctcagtcacctaagcttttaggttaagaaactagaggggaaaaaacacctagaccctaagcaagaagaaagaaagaaataataaagatgagtacagaagttarggatattgaaaaataaaaaacaatagaaaaaaatctatgaaaccaaaagttgtttctttgaaaagatcaacaaaattgataaacctctagctaagctaatgaagaaaaaaagaaagaagacaaaaattacctgtatttgaaatgaaacgggggccatgactatgaaacccacgtacactgagaaaaagggaatgctatgaacaattttatgtccataaatttgacaatttagataaactgggcaaattccttggaagaaacaaactaccaagctcattcgagaagtgggtaacaagaatagtttggataatatctatcaagaaattgagctgagcatggtgactcatgcctgtaatcccagtgcttttggccttaagcaattctgccactaaggggattcttcccaggaatgcaaggctgattcaacaattaaaagtcaaccaaagaaccctcatattaatggactaaggaagaaaagccgcatgatcatcttaataggttca

SEQ ID NO: 707819 - DNA, 615 bp, Homo sapiens
acaaaaattctcagtcacctaagcttttaggttaagaaactagaggggaaaaaacacctagaccctaagcaagaagaaagaaagaaataataaagatgagtacagaagttaaggatattgaaaaataaaaaacaatagaaaaaaatctatgaaaccaaaagttgkttctttgaaaagatcaacaaaattgataaacctctagctaagctaatgaagaaaaaaagaaagaagacaaaaattacctgtatttgaaatgaaacgggggccatgactatgaaacccacgtacactgagaaaaagggaatgctatgaacaattttatgtccataaatttgacaatttagataaactgggcaaattccttggaagaaacaaactaccaagctcattcgagaagtgggtaacaagaatagtttggataatatctatcaagaaattgagctgagcatggtgactcatgcctgtaatcccagtgcttttggccttaagcaattctgccactaaggggattcttcccaggaatgcaaggctgattcaacaattaaaagtcaaccaaagaaccctcatattaatggactaaggaagaaaagccgcatgatcatcttaataggttca

SEQ ID NO: 707820 - DNA, 615 bp, Homo sapiens
acaaaaattctcagtcacctaagcttttaggttaagaaactagaggggaaaaaacacctagaccctaagcaagaagaaagaaagaaataataaagatgagtacagaagttaaggatattgaaaaataaaaaacaatagaaaaaaatctatgaaaccaaaagttgtttctttgaaaagatcaacaaaattgataaacctctagctaagctaatgaagaaaaaaagaaagaagacaaaaattacctgtatttgaaatgaaacgggggccatgactatgaaacccacgtacactgagaaaaagggaatgctatgaacaattttatgtccataaatttgacaatttagataaactgggcaaattccttggaagaaacaaactaccaagctcattcgagaagtgggtaacaagaatagtttggataatatctatcaagaaattgagctgagcatggtgactcatgcctgtaatcccagtgcttttggccttaagcaattctsccactaaggggattcttcccaggaatgcaaggctgattcaacaattaaaagtcaaccaaagaaccctcatattaatggactaaggaagaaaagccgcatgatcatcttaataggttca

SEQ ID NO: 707821 - DNA, 1520 bp, Homo sapiens
tccatatagtcgtgatgataatgaaaaccagcatgtataaagccccttctgcatgccagggagctactatcacaagaacgcctcccaacaatgcaggaggtgaagtactgtttttattctaccaatttcacagacaaggaagctgaggcacaaagcgtttggacaacttcctgggactccaagtgagctttgacttcatagtctaagcctttgcttgttcagttatttaagaaaatacttaacagctattatatgccttgcactctaggcttacagtggggaagaaagcagatgtggttcctgcccccactgtgtagtgaacaggaccgccaatagacaattcaccgtctatactcatggcctatgctacatgcaataaggaaaggaacagggtcatgggaacatagttagatgaggcgtttaggaaaggatggtcagaggaggggaggtttcaatcaagatctgaaagaaaaggctgtcgtagtgtctcagacagaggcacagcatgtgccaaggccctgagacaggaaagagctgagtgagacaggatttgagtgaggccggagcagctggggctcccaagtcaggagaggattggaaggcaaggggtctaagtggctttgagggccagatgtggggacagaagccccgggggccatcaagcatggttcctcccattcgcagcaggctgggattagaaaaggaaagggtgttctgcgtgtggagcacctgctgttgggtgttgtattaggggcctaatctacagcgtggatttcatctcaaccacagctcagtgaggccagtcgtataagctctgtttcgcagatgagacacctgaggttgagaatgaagacatgacttgctcaggtccccagagacgagtaagagggctgagaagggagccagaaccctcggcctttggagcctgcatgggtccaccactctgtcctgccctccccagagcccagggctgcactaggaggaacccagatccgctgatgctggatgctggggtcttatgagggtggttacagggtagatgcaaagtgcagaggggctgggagcctgggccccttcagggcatagggaagctgcagcaccacctccaacctttgtcatggggtgtgagtgggcattgccctctggatgggaatccgggttttcgatgagctggggaggaacccggggtcccacagggcaggagctgcacaccagaggggaaaaggcctctttgtcttatgtgaaaggtgctccagggcagggcagggcagggcagggcagggcagggcagggcagctgagcctgacttgtgtctcctaggcttttgttctgccagaaccactcggggacagttttkcttttcaatcatttcattctgaatccattaacttttttctatatttctcaatgtacaaaatgattgataggagagagatgaaagagagacctatttcactgcaattgttgagcagctgaaggagatttctatctcatctggagaagaaggaggaggaggggga

SEQ ID NO: 707822 - DNA, 614 bp, Homo sapiens
tcactcataggtgggaattgaacaatgagaacacatggacacaggaaggggaacatcacacaccacggactgttgtggggtggggggagggggagggatggcattaggagatatacctaatgctaaatgaccagttaatgggtgcagcacaccaacatggtacatgtatacatatgtaacaaacctgcacgttttgcacatgtaccctwaaacttaaagtataaaaaaacaaaaaaaaaaaaacaaaaaaaaacaaatagaaagatggcctcctggtccatagtctacagtcctcctggatgacaaagagaaccactttctttgaagttcataaaaagggaagaatttagaaaataggccccacagtggtttatgaacttctagcatttcctttaaaagcttctacaaacattattagaaataaatttctcctgctttaatgccatattcaccatattaccatatgacactaagaacacaggacaggttgtcagtaatcaccccctcccttgcatcaccttaactcccactgggcacctgtctaaggcatcattttcatgtaggcattatgtgaaaaataaattttgaacacatggctcatgtgtttaaaatga

SEQ ID NO: 707823 - DNA, 614 bp, Homo sapiens
tcactcataggtgggaattgaacaatgagaacacatggacacaggaaggggaacatcacacaccacggactgttgtggggtggggggagggggagggatggcattaggagatatacctaatgctaaatgaccagttaatgggtgcagcacaccaacatggtacatgtatacatatgtaacaaacctgcacgttttgcacatgtacccttaaacttaaagtataaaaaaacaaaaaaaaaaaaacaaaaaaaaacaaatagaaagatggcctcctggtccatagtctacagtcctcctggatgacaaagagaaccactttctttgaagttcataaaaagggaagaatttagaaaataggccccacagtggtttatgaacttctagcatttcctttaaaagcttctacaaacattattagaaataaatttctcctgctttaatgccatattcaccatattaccatatgacactaagaacacaggacaggttgtcartaatcaccccctcccttgcatcaccttaactcccactgggcacctgtctaaggcatcattttcatgtaggcattatgtgaaaaataaattttgaacacatggctcatgtgtttaaaatga

SEQ ID NO: 707824 - DNA, 1112 bp, Homo sapiens
tgttaatttgtttctttaaaaagcagtttagtggtggggtggtatctcattgtggtttgaatttgcatttctctaatgatttatgattttgagcatcttttcatgcttaatgattaattggccatctgtatatgttcttttaaaatatctattcaaatcctttgcccatttgtgaatagggttgtttatctgaaagcccaagccagggcaattaggcaaaaacataaaataaaaattaaaaaacatgcaaattgaaaagggagacgtaaaattattcctgtttgcagatgataggatcttacatgcagaaaactctaaagtttcttcccaaatctgatagaactagtaaatgaattcagcaaaatagcaagacacaaaatcagaacacaaaaataagttgcatttctatagtactaattataaatctgaaaataaaattaagaaaatagctccttggatttttaagartttttattaaatatatttggtagcaaaaaagaggcaatagcaatgacataaaatatgcatttaaaatttagattttcattaagaaatctaaatttcataataaaattttaactcaccttaaatgataagttcactttacccttgagcaatataggtttaaattgccttggtctaactttatgcagattttgttccacctcctctgcctctgtcatccctgagacagcaagactaactcctcctcatactcctccttctgagcctactcagtgtgaagatgataagggtaaagatcttcatgatgattcaattctacttaatgaatagtaaatacattttctcttccttatgattttcttaaaatatttcttttttcttgcttactttattgtaagaatatagtatgtaatacacatagcatacagaatatgtgttaatctactgtttatgttattaataagccttccagataacagtgggctattagtagttaagttctggaggagtcaaaattaaatgcagattttcgactgtgcagggaataaataaccctaacccccaccccatattgtttaagggtcatctgaaaacagaataatttaattttggatatgctagggtttatctatcatttaagctttcat

SEQ ID NO: 707825 - DNA, 1112 bp, Homo sapiens
tgttaatttgtttctttaaaaagcagtttagtggtggggtggtatctcattgtggtttgaatttgcatttctctaatgatttatgattttgagcatcttttcatgcttaatgattaattggccatctgtatatgttcttttaaaatatctattcaaatcctttgcccatttgtgaatagggttgtttatctgaaagcccaagccagggcaattaggcaaaaacataaaataaaaattaaaaaacatgcaaattgaaaagggagacgtaaaattattcctgtttgcagatgataggatcttacatgcagaaaactctaaagtttcttcccaaatctgatagaactagtaaatgaattcagcaaaatagcaagacacaaaatcagaacacaaaaataagttgcatttctatagtactaattataaatctgaaaataaaattaagaaaatagctccttggatttttaagagtttttattaaatatatttggtagcaaaaaagaggcaatagcaatgacataaaatatgcatttaaaatttagattttcattaagaaatctaaatttcataataaaattttaactcaccttaaatgataagttcactttacccttgagcaatataggtttaaattgccttggtctaactttatgcagattttgttccacctcctctgcctctgtcatccctgagacagcaagactaactcctcctcatactcctccttctgagcctactcagtgtgaagatgataarggtaaagatcttcatgatgattcaattctacttaatgaatagtaaatacattttctcttccttatgattttcttaaaatatttcttttttcttgcttactttattgtaagaatatagtatgtaatacacatagcatacagaatatgtgttaatctactgtttatgttattaataagccttccagataacagtgggctattagtagttaagttctggaggagtcaaaattaaatgcagattttcgactgtgcagggaataaataaccctaacccccaccccatattgtttaagggtcatctgaaaacagaataatttaattttggatatgctagggtttatctatcatttaagctttcat

SEQ ID NO: 707826 - DNA, 1236 bp, Homo sapiens
ggcataagcactaagtctcttcttaattacaaggtcaattttagaaagcagcaggtgacattttcttattgataattagcaatgccatttatagtgaatagaggaacattccttcatggttatatagtttttaatttaaacttgctggctcactaaaagacttgcttcatctatggttataaaacttttaatttaaacttgctggctcactataaagattcgcttcatctattgtacaaacacatttttttcatatatcacttcccatctaccatatgcataccattgtttgtaagaaagacaataaggcagatcaaggggattaatttacagctattgctggggaggggccagggatttctgtatagatacaggtcacagggctgaactatagtaccatttgttctctataaaagtaatatgacccatattcaaagagaataggcataaattctgctaaagttcagaaaatttttaccatcactcctttctttctctgtgtcaaacccataggtttgcacaaagtaagatagccctgtatcataacatttatggagaactgacttggaatacctttttctgtattcatcattcttttgtggccatgtcgagagggactagattttcccatcaggcatgtaaatttctcatgacttaagaaacgaatgctgaaaaaatactaaaaatactaaccaaatttcaaagattcctgaaatgtttaaagaaaataatatagttggtgattgtataaatcacttaataataagccrtttaatatctcccaaggtaaatactaaatggctttccttttgcccaaattgtcatgatcattatacagtagaacaaagaaacaaaaaaaattcaaagttgtagaacacaaaattaacacagttgcatttgtatacactaaaaggaaattaagaaaacaatttaatttataatagcatcaagaacaagaataaacctaattaagatgaatgacttgtaactaaaaactacaaaacattgctgaaaaaaataaaaaaggacatcaataaatgaaaaaacattctattttaattaatcagaaggcttaatattgttaaaatgtcaacactgcccaaagcaatctccagatttaatgcaatacctataaaaaacccaaaagcattttttttgcagaaaaaaaaaaagccatcctaaaattcatttggaatttcaagggacaacaaatagccaaaaacgtcttgaaaaaaa

SEQ ID NO: 707827 - DNA, 1236 bp, Homo sapiens
ggcataagcactaagtctcttcttaattacaaggtcaattttagaaagcagcaggtgacattttcttattgataattagcaatgccatttatagtgaatagaggaacattccttcatggttatatagtttttaatttaaacttgctggctcactaaaagacttgcttcatctatggttataaaacttttaatttaaacttgctggctcactataaagattcgcttcatctattgtacaaacacatttttttcatatatcacttcccatctaccatatgcataccattgtttgtaagaaagacaataaggcagatcaaggggattaatttacagctattgctggggaggggccagggatttctgtatagatacaggtcacagggctgaactatagtaccatttgttctctataaaagtaatatgacccatattcaaagagaataggcataaattctgctaaagttcagaaaatttttaccatcactcctttctttctctgtgtcaaacccataggtttgcacaaagtaagatagccctgtatcataacatttatggagaactgacttggaatacctttttctgtattcatcattcttttgtggccatgtcgagagggactagattttcccatcaggcatgtaaatttctcatgacttaagaaacgaatgctgaaaaaatactaaaaatactaaccaaatttcaaagattcctgaaatgtttaaagaaaataatatagttggtgattgtataaatcacttaataataagccatttaatatctcccaaggtaaatactaaatggctttccttttgcccaaattgtcatgatcattatacagtagaacaaasaaacaaaaaaaattcaaagttgtagaacacaaaattaacacagttgcatttgtatacactaaaaggaaattaagaaaacaatttaatttataatagcatcaagaacaagaataaacctaattaagatgaatgacttgtaactaaaaactacaaaacattgctgaaaaaaataaaaaaggacatcaataaatgaaaaaacattctattttaattaatcagaaggcttaatattgttaaaatgtcaacactgcccaaagcaatctccagatttaatgcaatacctataaaaaacccaaaagcattttttttgcagaaaaaaaaaaagccatcctaaaattcatttggaatttcaagggacaacaaatagccaaaaacgtcttgaaaaaaa

SEQ ID NO: 707828 - DNA, 3303 bp, Homo sapiens
  misc_feature 2458, 2587: n = A,T,C or G
tgcatcaatatccagtgaaatccaccattggttggtaaaaagtggtgtccttcagaaaaggatccttgacaatgactattgctatacagaatggggtttgggttcagggagaaagccatcagtttttccagagtcctagtgtggaaggtaacttcagaacagagcaaaaaaaacaaaaaaacaaaaacaaacaaacaaacaaaaacaaaaacaattgcagacttttgactaacatggtcaaacatggtagaaatagggaaaagctgtgagtctgtgggtatttgggtgccagtggcagcaaaaataatttcagtctccattggttggtgagtttcaggctgttaatataatcatacagtttggaactgagtatggctacacatgcaggtaaaagatctcaggaatcacagccgctcatggaatacaggacataattataactatttgtgtggggagttcaaatatgtctttgtaatttaggctggaatgtatatgccaacacatttgtatcttgaatatataaaaccatatttgtgtctgaatcagcaccatcaataaaaaataccatattttcaaaatgtttatctatttataaagttgctccattattctttgactataatcttggatttaaaaggaaatattcaccctctgcccctaccttaaccaattttgtctgatggaagtgtttagcttggagaaaggtggtcttgtactgacactgaaaacattgacccagatggtcatttatgtcgcacttctaacccgacactacaatttggggaagatttttggccaaatcattagaatgctgccctgtgagtcaataggcttaggccaccatttacattttgtttcttcagtttttttctttttctttttatatatccatggattcctgtacacttttaatagcagcatattacaatcaggatattacagtgtaaagagccaagtctttggatacagatggacctaggttggatcccagcactactacttattaacagggaaatattgagctagttctctactttctctgagcctctgtttccttctctattaaatggggataataatacttgcctcaaggtttgttttgagaattagtgaggtaayagatagtacttggcatttattagacacaaaataaatattcattccatttcttctttaatactctttgtgattattaagctatctcagctggctgcatttatatttatgacattcaaaatatgaaagcattgttacaaaatcccaaatgtctagaattcagataaagatgttctctcatggaatgattcacatggaaaaactcattagatacgtctttccaaaataatcacattgataaactatgtattaaatgattttagttaaatacctacaacacattgtggaccattactaggtgctcatttattttaaggacagaaacaatacacacagggagagttagctgaacagcaattaaacacatttcatgtttcctgtgttgtacatcagcagtatttagagcaaagccttgaatctcatggggggccattcacatgcagtctgcagctcttcaacacctaaaatcttcatacaggatattatcattcagttctatgggccacatggtacatttcaataaaaaacactaaagcatggtggtcaaaaatacttgctctgtttttagacagttgacataactctttaacttgctgtgtgctctttggaaagttacttgtccccatgattcattttcttaatctgtaaaatggggatagtaataaatagtgtttacctccctggattattgtgaggattaaatgaaatactaccacaaaagttcttgatacattgagatcactaaataaattttatcattttttcatacctgcttccaaacaggatttgtagagatttatttcatataacaaatatataacagttaaaacaatgtggacaaaaagaacaaggatcctatagtaaaaggtggtaagtgtggaagtgaagtcttttactgtgctaagcccaatccagagctaagtcccctgagtccatgtccccacttaaaattttttcatgtatagctcctcatctgtaggaagaagaatattcaccctacaatgcatgcaaggacctccatgggtgacttctgcccacgtgggttgctagcagcactcactctttcatttctaaaattgaaacactatagatcaccattcattgtgtgtgtgtgtgtgtgtgtgtgtgtgtgtgtgtgtaagattctacgtttctgctctgcctcttgtatatctgtatatagtccctctctatctggaatactttctcctctgtttttaatcttccacaagtgaccaaacagtatgaaaaaggcttgagaaagtccgtgatcacattggaggaaggtttccaaaaaggccaacatgcttaaagcagtagaggctactggtgaggcagcagnttctagagagtgggcagtcaaactcctcaggggatctctatctggaaaggaagcagtccatacagagaaactcacagtgcacgaagccataaatatatacaggaaattggaggtgagtgaaatccagangggtttgtcacttccaagcccgaaccactaaattaatactgaatgttgatttatgttaatgacatttagtaatgtaattctctgtaagagcatctgtataatatttcagatattcccaggggtgcttagagaaggggagttagtcgaccatgtaatattgtgtaaaattaattaaacagagattttaatataaggaagctctgaattggaaaatacatctgttttgtatatgcacttttttccacctcacctgcagtgcttaggtttgcatagaatccctgtgttaaaagaatctggggtagagaaacctatgatcttatgctaatacagaaaataaagttataaggcttgagggcaggattacagctatgaaagtcatttacatatgttcattttcactaaaataaaacattacacaatacaacatatgtgaacatctataaatattatattagtgataaatattactatattactgatctctatcataatagttatttattttagacaatttgaaaattgcatttagacaattacagatttttaataatataatgagcaaacctgccactcaaaacaaaaactaggaagttgaccctatgctcctctataactccaaacacataatccccctcaatccatcacctcaggcaaccaatactctgaattccacatttatcactcccttcttttccatgttatgcactatatatata

SEQ ID NO: 707829 - DNA, 684 bp, Homo sapiens
ttctctcaaatgatccccctcaagtctaccacaatgagagttctaggaaagaggcataagcatagataacgttaggaacagtggctattttggttgaggaacaagacaagtaaatccactttatgattaagtaatttgagctctatgccccacttaggaaaggagaggttggagcaaagaggaattaaacaattcaaaaaataatattatatgagttgtcactggataaaaaggtcggtttggaggtggatttggttattgaraggaaggtgaaacttggagaaaggtttgaggttaaataagggttcatgtgagaagaaattctagatgaaaaacatgctggatgggattaatgacagatgagactttacagaagaaaagcttaggaaacttgaaacagtagcaatagaaactacttgaagagaaataaagattaaaaaaaaagacagcaacatcaagatccgtaggctacccaccaacatctttttatataagtatctggaattgctaaaggagacaaaagtagagagaaaataatttggagacctaatcttcaaagattttccaaaacgataaccataaacccatagggcctaaaacctcaatgaacccaaatagtaagaaaaacaaagttaactataaaaggcatatcataagcaaattacataaaatccataaaaggga

SEQ ID NO: 707830 - DNA, 571 bp, Homo sapiens
ttcaccattataaaaaagttgctctccacaatactggctgtcagtgtcccatacacaagatgatgtgtttaaaaggtgtgcgtgttacccaggcttggccaatcagaatttttcgtaagattgttacattaagtttaacaattgttagatttttaaattaatttttaaattaattgttgaattaaatttcctaaaattgttaagttgcctctggtagacattctagaaacatatataacagagacagacagacagacasacacacacacacacacacacacacagaggaaaagagatgagataagatatgaggtgatgagaaagagaaatgcagaaaaatagagagatgcataaagaaatgcagagatagaaaaatgcagataaatagtgacaacaaattagaaaaatagagagaaaggcaatgcagtgaaagagacacaacaaggggacagagacagaaaatgcagagagatatgcagaaagaaatatacaggggcaaagagacatggagaaaaggagacagatgcccagaaagaaatacaacagaaacagaagagagatgaagatctca

SEQ ID NO: 707831 - DNA, 571 bp, Homo sapiens
ttcaccattataaaaaagttgctctccacaatactggctgtcagtgtcccatacacaagatgatgtgtttaaaaggtgtgcgtgttacccaggcttggccaatcagaatttttcgtaagattgttacattaagtttaacaattgttagatttttaaattaatttttaaattaattgttgaattaaatttcctaaaattgttaagttgcctctggtagacattctagaaacatatataacagagacagacagacagacagacacacacacacacacacacacacagaggaaaagagatgagataagatatgaggtgatgagaaagagaaatgcagaaaaatagagagatgcataaagaaatgcagagatagaaaaatgcagataaatagtgacaacaaattagaaaaatagagagaaaggcaatgcagtgaaagagacacaacaaggggacagagacagaaaatgcagagagatatgcagaaagaaatatacaggggcaaagagacayggagaaaaggagacagatgcccagaaagaaatacaacagaaacagaagagagatgaagatctca

SEQ ID NO: 707832 - DNA, 3125 bp, Homo sapiens
tgaggcaggaggatcacttgagcccaggagttcaagaccagcctgggcaacatggcaaaacgctgtctctaccaaaaatacaaaaattagccaggcatggcagcatgctcctgtggtctcagctactcaggaggctgaggcaggaggattgcttaaacccaggaggtcgaggctgcagtgagccataatctcaccagtgcactccagcttgggagacagaatgagacctcgtctctaaaaaaaaataaaataaatttaaattttaaaacaaaattgcctcagactgaaatccattcctgagtaaagagtatgagcttttattacctggactttctagcgttgattttggttatctaatatcctttttaaaattttttcttccaagtttttgtttcagcagttgcaaataaacaattatattggctgggtacagtggctctcacctgtaatcttagcactttgggaggccaaggaaggcagattgcttgagctcaggagttcaagaccaacctgggcaacatggtgaaacaaaaaaatacaaaacttagctgggcatggtgacatgtgcctgtagtcccagctactctgcactccagcctgggcgacacagtgagaccttgtctcaaaaaaataaaataattacgttggcttatgatataatcctagaaagcagaacaaaattatacctaaaagagaatggcctttccaatacagtactgactaacaaggaaagagggctacaatatattgttatgtaggaaagagccagctgcaaaatgacattatagtggaattccatttgttaaattttttttaaaaagcatacatttgcaatgtgagtagttatctctgagatgtaggattactgagaacttttacatactatgccatttatttatgtattgtttggctgttttataagaagcaggtattttacgtaagcataaaaaaacaagaagaagctgggtgtggtggtgtgtgtgtctctagtcccaggtacctggaaggctgaggtagaaggatcacgtgagcccagaagttcaaggtcagcctggaaaatacgtgggaccctgtctccataaatcaataaattaaaatattttaaaacacagttcacagtgtcttctcagagcatgagctcctggaagacatggatgacagatgagcactcctctatatactgcctgctgccacaaataagaagcctctcaaaattaaaacactgatttttatagaccaaaaaataaaagaaaagaaaaaactagaggataaactcaaagttgatctcagacagagcaagttccaggaaagtgttgctggcttccaccttggaggacttctacctggaaatctgctcggtaccatattaagcagtttcaagagcccatcaaagccctggcaagttcatagtaaccagaggcacattctaacctataccagaactatggtgaaaatgtactttgctgggaaaggattctgagttactaaggcttctcaggaactactccattctctaatgaaaacactgatcatctaatgtgggcaattaacatgtatttagtaggtttttgcctcctgttgcatactgaggagatcccacaagacaccttctgcccagcattttcttgctaccatgaatgaatctataaaatattcacatgaatacaaacatgaactccagaataccccagtttaaatgaaaatgcattcactggtaaaagtaatgtattcattaaatagtgccacaaaactgctgcttaacagattcttctgaaactgaaggtcatgcaacaagaagcatttattctcgtgttcataagtctgcaggtctgctgggacagctcagcctcaggctgtgggtgtgcgagtcagttggggcagccctgctccatatgccacactttctattgggaacagcagaaaaccaagaaatgttcatggcaatgcagaagcacaagagggcaagccaaaacccacaagcatattttaagcctttgccaacatcatgttcgctgacatcccattggccaaagcaaatcacatggccaatcccaacatcaataggacagggaaatatagtccctccctagtgagaggaaacaaaaagtcccatagcaaaaggcagggacataggagggttgaagaattgtgaacaaaaatacaatctgtcaaaggtaacattaactcactgttaaccagttatacggtgacatttctgttttaatatttaactggtcttaaaagtaagacactaaaggaagaggacagaaggaaggggaaaagtgagatctagaaatgtgtagcattttggacattgcctaggacagaggaagggctagggaaggagccacagtggcagtccctggaaaagaacatcataaagcacagcatcttcacaattgaaatttgctgacgaaaatcagaaatgaagagcaagaagataagacagcaggaacacatagatacatgaaagatacaagaagtccaagagaatgacaagttttaagaaaaatcacatacagaaatgaagctgttccagcataatgtgtttctccatttgaaactggcattttttgtataatcatccctagtctattacctgtggtttactatttataatctgaaagagctgtgagccactagaacaatttctctgcaagaatccgctctacaagaaaaaagaaaagtgtgtgtgtatgggtgtgtgtgtgtgtacacacacagaattttttttcaaatcaggcagatcagaacctccctggaatttgaactccaaatgtagggaaacaaaattgaaaatagtaagagctcactcatccttatgtttgccctaaagaggctgtattagtccattttcacactgctgtaaagaactgcccaagattggataatttaaaaaggaaagaggtttaattgatcatagttcagcatggttgtggaggcctcaggaaacttacaatcatggtatggtggaaggcaaagggaaagcaaggcaccttcttcacaagccagcaggaaggagaagtgccaagtgaagggggawgagtcccttataaaaccatcagatctcatgagaactcactatcatgagaacagcatgggggaaactgcccctatgattcaat

SEQ ID NO: 707833 - DNA, 655 bp, Homo sapiens
gacagggtttcaccatgtcggccaggctggttttgaactcctgacctcaagtgatttgcctgcctcagcctcccaacgtgctgggattacaggtgtgmgccaatgagcccagctccacctctttcatgtttattcattctataagaagcagagcagttcgtagactgtcttcaggggctattaattactggagctattcttcacaggcttgagaagttatgcttgctctgagtctctataagtggattcatttttgctgagagtgaggaaagtgggttaagaagaaggagtacatcattatctcatgagtagatactttcctggaaggaaattcatcagttggtggaccgtggaatttgggaagccccggaggaatattggtctatttattaaaacgctgacttaatggtttattcctgatgatggttgtgtggtcagtagctcattctggggagctactggcagcctggacctagagaagaagcctgtttatgaactacaggtcgaatatccctaatctgaaaatctaaaactttttctaaaaatttatatttatttttttgagacagggtcttgcccctattacccaggctggagtgcagttgtgtgatcgcggctcactgcagcctcgacttcccaggctcaggtgattcta

SEQ ID NO: 707834 - DNA, 613 bp, Homo sapiens
acagcctcccggctagcgattgggtaatggccgactcaggaaaacacactcactttgtggatgccttgcctacttcacacatctaactgcaacagcatttgcaaggagagagaggaggggctcacagggaggtggtaactgaagtcaccacccagtgtttctgaatcatgttgtctcctgacctcaatgttgttttgaagattgatagaaccgtttccacacttgtccaaaagcccagaattgtccaggtgcctggcacatagtaggcactcaacacatagtgttaataaatgagagaccaaatgaatagctaagtcgaaaaacaatgaacatgacaacacagtttccaggtcttaaagcataaccgctgaatgtgaatttttaaggaagagagctgataatctgtatatttaacacgcagcttctgtgtgagtcttttcaggcaattttggggcatactgccttacccagcagttccaggctaattatcagaccaattatcagaatcacctggcatgttttatgactcatagatttttggaccctaccttggasttcctgaatcagggcccagatgcaggaatttcttttgcaagaacttctcaggtggttc

SEQ ID NO: 707835 - DNA, 613 bp, Homo sapiens
acagcctcccggctagcgattgggtaatggccgactcaggaaaacacactcactttgtggatgccttgcctacttcacacatctaactgcaacagcatttgcaaggagagagaggaggggctcacagggaggtggtaactgaagtcaccacccagtgtttctgaatcatgttgtctcctgacctcaatgttgttttgaagattgatagaaccgtttccacacttgtccaaaagcccagaattgtccaggtgcctggcacatagtaggcactcaacacatagtgttaataaatgagagaccaaatgaatagctaagtcgaaaaacaatgaacatgacaacacagtttccaggtcttaaagcataaccgctgaatgtgaatttttaaggaagagagctgataatctgtatatttaacacgcagcttctgtgtgagtcttttcaggcaattttggggcatactgccttacccagcagttccaggctaattatcagaccaattatcagaatcacctggcatgttttatgactcatagatttttggaccctaccttggacttcctgaatcagggyccagatgcaggaatttcttttgcaagaacttctcaggtggttc

SEQ ID NO: 707836 - DNA, 2859 bp, Homo sapiens
aaaaaaaaagtttctcggggtatgtttttaaaaaaaatattttattacatttaaaatgataccttttcatgaaaaatatttattttatgagtgataaattataagtttaaatatgaggtgaatttgttcccttcaactacctataatatctatagcatccagcatacagccctttgtacaaaatgtaacatttagaagctaaaatatacatcatcctcccccaaaataatgattttcttatagacacaagcaagattattctaaaatgcatatgtaaaggcaaagtaactggaatagctactttttttaaaaaaaaaagaaagaaactggcacaaatcagttcatctgatggcaaggcttattaacagtagccccctcttatctgcaggaaatatcttccgggacacccagtgggtgcctgaaaccatggatggcacccaaacccaggtgtactacgatttttcctatacatacatacctatgataaaatctaacttataaattaggcacagttacagattaacaacaataactaagaataaatagaacaattacaccaccataccagtatcactactcttgtgctttgggtacactactaaataaaataagggttccttgcaatgagacattgcagtgagatcgtgccactgtacgatttcactgttccttgaaagcgctgtgataacatagcagttgatctggtaaccaaggcagctactaagtgactgatgggtgggtagcatatacacagtggatatgctggacaaagggctgatttacatcccaggtgggatggaacaagatgctgcagggtttcatcacactatttagaatggtgtacaatttaaaacttaggatgaattgcttatttctcaaattttccatttaatatttttgagccagttgaccatgggtaactgaaactgcaaataagtggggactatcatatatagctacaataatcaagcctatgtacacagagatcacacatagatcaatggaatagaatatagaatccagaaatagatccaaacaaatatacccaactatttttgacaaagttgcaaaagtaattcaatggaggaaagatcgccttttcaataaatggaactgaaacacttagacatccataggcacaatctaagtctcacagcttatataaaaatcacctgtaaatggatcatggacttaaatgtaaaacataaaactatgaaatttctgggaaaaacaaaaaacagaataaaaattgttgggatctagggtagatttgaaacccaaagcacaattcataaaagaaaaaaattgataaattgaactccatcataattaaaaactttttgctcccattagggttacaaggacaagctacagaacgggagaaagtatctgcaaactaccatagccaacgagcagtaagtacaaatgcaattcagaaaatgatgctgggaaaatgacatgtggacatgctgtcaatgtgcttaaaagtacgaaggagggttacattaggatgttgaaaatcaactgggttttcattggtgctgagtttagaggtgtgtgtgggaatgcagagcctttcagtggctttattatctgggggaattccctcttttgtgtgagtctatgggagagacacggtcctacactcccctatgaaagcaaaaaggattagacattcccagtcactaaacactaataagacatggaggtgtgaaacatcctgtgcaatactccagccaggacattatgaatctggatggacagaccaaaggaatgggacagttccatatttcccacagtgaagatggtgactcttcgcatggtgagactccattttcttctctgctgccagcctttcttgggtcttactcactgctgaagtctaattctccagcttttccatcaactctgtgaactgcccaataacttccctgtaaattatttttctgctgaagttaatgcaagccattttctgttgtttgcaaacaggagcccttaggtggcacatactgttaaatgtttcctacaacaagatcatgttaaagtcactcattcccaggcagatctcacaaacaggtatttcctgcagccacccgggagtttctctcacctctaatatcaaagttgttttttatttgctgcccttttcaaagctgtctggctccaagcaaattattcctctggatcccatctgtcacgtggacataatgctatctatttcacaggtgaacttaaaatttttatgatagaatacatttatgtgggccaggcatggtggctcacgcctgtaatcccagctactagggaggctgagacacaagaatcgctgtaatcccagcactttgggaggctgaggcaggtggaggcaggtggatcacctgaggtcaggagttcaagatcagcctggccaacatggagaaaccctgtctctaataaaaatacaaaaattagccaggtgtggtggcacacacctgtaatcccagctacttgggaagctgagacacaagaatcgcttgagcccggcaggcagacgttgcagtgagctgagatcgtgccactgtactccagcctgggcaacagagcaagactctatcttaaaaaataaataaataaaagaatacatttatgtgattttttwaaaaaaaatccatcatcagtgcagaagggttataaagcaaaagaagaagaaaaaagcgacccccatccatcctacccagtgtcaccccccagaaggaaatacttcacagttgcttgtgatacgtaagggtttggtgttggacatctttgatgtcagactcccctcatccaaactctcctttacgttgagaaacaaaaacgatgcaagtgaaacatcagcta

SEQ ID NO: 707837 - DNA, 641 bp, Homo sapiens
agtagacttcatgtctttccctgacttacatatattcctgttaagggcaaaacatggctttaagaatggaaatttcagcccatgtgggatattctgtgtacataaatatggtacagtggagcagtgtttttttttttttaatttgtaattctcatttattgaggaaaatataagtagagggcagttttcartcccaccgttagtccttcttccccagattccttattccacttttgtctgtctgatgagtcactttcattctttaaccctgccctttgtatttttttaaaaaaataattaattttatggccagatatggtggctcacacctcccagcactttgggaggccacagcaggcagatcacttaaggccaggagttcgagaccagcctggccaacatagtgaaacactgtctgtactaaaaatgcaaaaattagccgggcatggtggtgcatgcctgtaatcccagctacttgggaggctgaggcatgagaatggcttgaaccagggaggcagaggttgcagtgagccaagatcatgccaccgcactccagcctaggcgacagaccgagacaatctcaaaataaaaataaaaaaaaagtctttttttggatacatagtaggtgtatatttataggg

SEQ ID NO: 707838 - DNA, 641 bp, Homo sapiens
agtagacttcatgtctttccctgacttacatatattcctgttaagggcaaaacatggctttaagaatggaaatttcagcccatgtgggatattctgtgtacataaatatggtacagtggagcagtgtttttttttttttaatttgtaattctcatttattgaggaaaatataagtagagggcagttttcagtcccaccgttagtccttcttccccagattccttattccacttttgtctgtctgatgagtcactttcattctttaaccctgccctttgtattttttwaaaaaaataattaattttatggccagatatggtggctcacacctcccagcactttgggaggccacagcaggcagatcacttaaggccaggagttcgagaccagcctggccaacatagtgaaacactgtctgtactaaaaatgcaaaaattagccgggcatggtggtgcatgcctgtaatcccagctacttgggaggctgaggcatgagaatggcttgaaccagggaggcagaggttgcagtgagccaagatcatgccaccgcactccagcctaggcgacagaccgagacaatctcaaaataaaaataaaaaaaaagtctttttttggatacatagtaggtgtatatttataggg

SEQ ID NO: 707839 - DNA, 577 bp, Homo sapiens
acagaggggtggaagccctgtgcagtgagggttagccccggctccctcctgagtgatgcagagctggctgctgtcaaccaccactgcccagacaggaagagcaagcgtgatggggcccatgtgccccgaccttcaactgaggaaacaaaacccctgatcaagccacctgggcctggcacctcctgcagcaagagctcagctgacatctccttcagggttcgagggatgggacaggaaggggctgaggcgctgggtgagggtcttgtctcctgcactacctctgctggtgtcatgagctggcgtccgtggtggcacctggggctgcaggatttgggctccgaagcaaaggtgcccccccrgcgaggatggagtggagcacaggggctgccgtttcagtggtgggtgagttgtacggtccccgggtaagactgggatgtgggattggttggcgaggcatgcacctcaaggtcagggttagtcttcaggactagcggggtctggctggccatcacaccccgcagatggggtttctcagggaagcgagggtacactgtgggagagggggcattctaccacg

SEQ ID NO: 707840 - DNA, 626 bp, Homo sapiens
tggattctataggcgacacttttcccctcatgagttataattatcatcatgtaactcttggtgttttcacattgggggattatgtcttccagtttgcagaaaattaggtagacaaatatatctggctaaatgtagcagatgaagacataaacggaataaaaaggggcaatttgttcgctatagtaaaaaacatgtaatactttacatttcactttgccattgaacatttctataaaatgcttttttttttcttaaaaaaaaggttttcctagagccaaatgacctttaaagaaattcactcacactagttctttctttagcttattagtcacctgggaccaccacattactaattaatgcataaagaatgcaatctaaaagcgccggtgctgcaggtactggagaaacgagcacctaagggaaggctgaggccaagacsggacctgagctacggggcaggagcctccgggtcggggcccactggacacaggccaagggctgcagggagcatgccgaggagatgctgggaacagaggcatccaggccatccagagaaatcagacagcatgtgggagcaaatacagaggtacggggtacagccaaagagggtccccaggatcctgtgg

SEQ ID NO: 707841 - DNA, 696 bp, Homo sapiens
ctgcagacatgaggcatattttagaaccagtctgaacctggagacaaattaaatcccctacaaatctgtatttcggttttgtttttgttttgtctgatgttctttccaggacaagcatactgggccaaaagtttgggacaggacagacagctgaggaaatcaaatggaaggaggaatagtaaagtttccatgtggtaagaatttggggctaaagcaaattagatcacacctgtcagatttgctgctgattacctcaaattgtctattaatttccatgaatgttctggacttgtggtccaaatgtttactttgaaacaaaataacagattaggaatttttgcattttttgtgatatgattccccaaagttagctgttaccttcctttcttctctcttcttctatcctgaaatcagacttaaacataaactcttagaacccagtggttatattttatcttaaagttcacatagcagttaattcaatgcttgacaaatgaacaagcttaaatctctaattgcattctaaatatactcatggaatttaaaaacctgatgataggagaaaaagcctatattttttacatctcaggttctactatacactagcytagggttagcaaatacgtagcctccaattaagtatccattgtgaacattactaatctgtcacaagagtttcccactgaaatggcaaga

SEQ ID NO: 707842 - DNA, 696 bp, Homo sapiens
ctgcagacatgaggcatattttagaaccagtctgaacctggagacaaattaaatcccctacaaatctgtatttcggttttgtttttgttttgtctgatgttctttccaggacaagcatactgggccaaaagtttgggacaggacagacagctgaggaaatcaaatggaaggaggaatagtaaagtttccatgtggtaagaatttggggctaaagcaaattagatcacacctgtcagatttgctgctgattacctcaaattgtctattaatttccatgaatgttctggacttgtggtccaaatgtttactttgaaacaaaataacagattaggaatttttgcattttttgtgatatgattccccaaagttagctgttaccttcctttcttctctcttcttctatcctgaaatcagacttaaacataaactcttagaacccagtggttatattttatcttaaagttcacatagcagttaattcaatgcttgacaaatgaacaagcttaaatctctaattgcattctaaatatactcatggaatttaaaaacctgatgataggagaaaaagcctatattttttacatctcaggttctactatacactagcctagggttagcaaataygtagcctccaattaagtatccattgtgaacattactaatctgtcacaagagtttcccactgaaatggcaaga

SEQ ID NO: 707843 - DNA, 730 bp, Homo sapiens
gtcttttgaatacttgtaagaactgaattatatgcatcattattaatttttcaaagttgatagtttaataagaactggccattcccaagcaacatattaaagtactattttttaacctatctttcttcctattagaccatgataataggtccagccagagactgtgtcatttttttaaataagccaagatatagaactatgcctataacagaagagatgcttgcatataattacatacagtaaatgctgaatacttgaattgatgaactcaagactaaagctgagccattttctttctgactactctcctgtaagtaccatgcatgtactatgcacatggaaacatctttgccattctttctttgtgaatgaaacattgagctttatagtagtgagtgaatgttaaagtattgacttayctgttttacttctatgaataagtttttatttgggctcaaatagtgaaatcgtggccactcttgaaatttacacagtagaaatatgggaggattatgatgaactcttgtgaagtgtttatttaacattactgccccaagagcataataataccaattggcaatgctagcctgagtaatttggtgtcataaagctttgcatggcagaacaaaagtggcttccaatatcctgtttattgttagtttccaggacaaaacgtttatcatttccaaggaaaagaaaatcacttttggaagttggaaatttttaatga

SEQ ID NO: 707844 - DNA, 1889 bp, Homo sapiens
ctcttaatgggaaaataactttaaaaagttatgatctagtatgtaataattttataataagagcatgcattaaatattataaaagctgaaagattttaagtttagggtatgtgcatttatcacctttaaatttataacttccaactgtaagcctgaataagatataaattcatttgtctttgagtgaattaaagtaaaatggtttattttgatcattaaactttcatatgatttacaacttcttggcaacaaacgcgtattttttattgtctaaaaggcataaaatacaactacctcagaaattatctcttgtccatctccatatacggcaaggattctggaggacaaaaaaagcactccagtttattgaagattacccaactccaatggtggtatcactatcagaagtcatctattgagtttcagcttgctgtactttctaccacttgttactagagcataccttcaacttcaataaatggaccttttgtcgtctctgatatttagctttactttatattaaggacatcctttaatctgtgaagtgactgtcaatagctacacacaaaaattcttaactcttctttacctcagttatggaagaaatagaaattgaggtgacagcctgcagtagacagcacaaaggatcatgaggaatcaagtggggttatttccacagccatttgctactctcagcttagaagactcttatgtcatgttgggttctttcttctaagggctggcatcacttgagagaagaaacagggcaaagaatgcagcatcctcagttgaggtcaggaatactgaaaagggatattaatggaytgagcgtcaaaatgtcgtgatggatgtctttccaagtatttaacagaggaagcaatttgcaggctggacaacctgatttctaaattctagcagtttctccttccactcaggatcctgactgctcaaaattaaatcacaataaagataaatgcaatgtgttaagttgtccctgaactattggaatcagataagaggtgtacagcattgtggggagatcacataagattgtgataactcaaatgctcaatttgtcaaatggctccttctgttggtgcagagagctgaagcattttcatgagcttcagatcaagatcttgagcaaatgctagaaataactattttgttttgtgggggaacaaagataaatgtgttctgaattatgaggaggaaaaactaggtgtgattaagcttacatatttccaatgcgtgtttcttcaggaataaaactacataaacattttatttgcctccagttctcattattctgcacactattttcagtcctggtaaaagtaacagcaatagcactttgcatttatacagcaccatttgtccaaaaactcagtaatattatggatagaaatagtttaatttattcttacagtgcatttttatgtaaataaagggttatatttcattttacctttttgtttttttgttttagatatagaataaattaaaatccaattggcaaagttttgcagagaacattacataataactgaaaactgcttccctattcaccattatacttccatcaaggacagggatttggcaaatactttggcaaaaaatatcacaatagaagtttaaaaatactccccctacctgcatttgagccattagcttacatgcagcttttcctaccaagccaccaagtctctcttgcaacactctttttgcttgaagaaatgcaaatctctgtgaacagttaattatattaaatttttaatgtcatttaagaccagattttgaacccaaaaaagatgcttactcaatcattaaattataagccaagcataggagccactttgtataagcaatgggctttcaaataatggtca

SEQ ID NO: 707845 - DNA, 615 bp, Homo sapiens
tttcataacctaaatgctcatcaaagcagttttctaaaaagaggagtatttgtttcctcttcaaactgcagttgtcacatttcttacctagcatcagagaactcaacaccaactgcagccatcaagaatgtagaaatgtcttcatttgcttttacatttgccttttccctcttctcccacatatagctatttttatrttccaatagtcatttctattggagtgtgcagcagtggttgtgagatgtgtatgtttcagttttcatcgtatgcagaattctcaagtcttcctctttgaactgccgtttcactaccacaggcagcttttcttggaaatctgacaatctgcaaaatataccttgccttgaagttcatgaacaaaactttattgatcacttagtctctcattctccaaatctaggaaatcatttagctctttcatagatgtctatatacttgaatgaatatttgcatacctattcatgtatatataatatattttttcaatctttacaaaggattcttagagggcagtttttgtgtcttattgatatttttattctctctaccccgtattgcttggtgaataaatggatgggtgaatgaatgaatattacc

SEQ ID NO: 707846 - DNA, 1012 bp, Homo sapiens
tgagtagctgggattacaggcgcccaccaccatgcccagctaatctttgtatttttagtagagacagggtttcatcatgttgaccaggcaacatggtggaagatactgtggtaggtgctttaaactgcatgtgttcctttatgatcacaactatataaattttctgaatccattttatttatgagaaaactcaggctcaaagagattgagtttcttaacaccacacatacatgtaagcagaatgaaatttcaatgtcaaattctttgtaatataatgtaaattatgggtgattttgtcagttttgtattctgagtttcagttataattgtttttgtttttttttttttttttttkttttttttttttttttttttgagacggcttgcttgctctgtcgcccaggctggagtgcagtagcatgatcttggctcactgcaagctccgcctcctggattcatgccattctcttgtctcagcctccccagtagctgggactacaggtgcctgccaccacgcctggctaattttttgtattttttagtagagacggggtttcactgtgttagccaggatggtctcgatctcctgacctcgtgatcctcctgcctcggcctcccaaagttctgggattacaggcatgagccactgcacccggcccagttataattgttaaatctttttttttccttgtgaattctacacaactctttcttgctctctgaatttccatggttcatactgtattttcagctggttatgaccaactttttctttatcttaagtattgagacagagattcgttgattcccttttcattattaatttgtgaaggaagttttcagtctttatgttgatggtaatttagttatttttggattggcataagattgtaatattcataacatcaggaaaaattgccaagaagtaatatatgagctctaccagaaaataaaatgtgttaaaagctgaagtaaaattatagtaaaccagtgttacaattacgcaagttaa

SEQ ID NO: 707847 - DNA, 650 bp, Homo sapiens
tggggtctaatacttctacagctctcttaccaatatcctagaatcccttgtttcattgtcattcagttgactctcacctgccaaagtcccaaccttggatggactgtgaaycttctctgcttatttaaatcaagacaaattggtgcctctattaatttagttcaccaatctatgtaagcagatactcaatattgctctcctgtctttgtcaactctccctcacattctttctatcacaaccctaaaatttgccccctcccttcaagtttagaacacctctttctcctctattgaataagttcatttattcattcaatatttatgggatatttattgggtgtctactgtattttgggctggaatgtagtgtgctacactgtgtggctgcactgtaagcaaaatacagaaacggataggaccctctgaagggagagagagaaattagtcaaatggtcacaaatcttatagactataatgatagctatgaatggagctataagcccatgtgtaagagcatgtcagctgggtgaagaggagttgaattgggagacaagacaggtttcaaagcaaagaaaatagaatgtgccagggcacatgttaatctcatagatggtccatcacgtgctctagtcttccacttcaagaaaaca

SEQ ID NO: 707848 - DNA, 608 bp, Homo sapiens
taaaacatttcaactcatcttatccattttcttacttttattctcttatttttagttgacatattaattgcacagatttaagggatgcagygatatattattacatgtatacaaggtgtaataatcaaatcaggataattagcatatccacacctcatatatttattatttctttgtgttgttaacacttaaaatccttttctagatttttgaaaatatatatgaaattattgttaatgaactctacattactacagaacattaaaatttattcctccaatctagttgtaactttatacctgttaaccaatgtatccttatcttcccctctccctacacttcccaccttctaatatccacaattctactctctacttctgagagatgatttttagttctcacatataactgagaacacatgaatgaaaacatgcaatatgcctttctgtgcctgacttatttcacttaacataatgtcctccaggtttacgcatgttgtattgagtgacaggattttattcttttttatgtctaaatggtattccattgtgcatatataacacatacttctaggcatctgttgatgaacatttaggttgattccatat

SEQ ID NO: 707849 - DNA, 1218 bp, Homo sapiens
tgaatttttgttgagttagcctcccactaatacagcactataagaagcagaaatacttgaaatgagtaaacaattaaacctttgttgactgacagacttgccaagttcagggagggatcagcatatcccctcgggttaactgtgaaatttgaacccagagcagcagatctcagtcccgtgtcaaatcacactgctctagatataccaccatggatacaccacaagttataagagatgccacaatctrtttatctttaatgtgattcagaagttggtgaataatttacatcttaaaagaagttcagctgatcccaagaagtgtgatagtctaattcccaagatggaagaaccctcaagcaggactactaaaacagaaaaatctgccagataatagagaaaagaatgtagttatgaaattttaaaatatattaaaaatcgcaacagtctcagaccctttgacatgggcataaaaaaacctgatacacctcattactctcagggggcatcattgtgattacagccatctagccaatagctcctggtgacagtgcaatcaaaaattataagttatattcagcttattttgtgaaagacatcagtaaaataagtaataatacattttgaaaaaacttccaagaagaagagttaaaaataaaaatctagaatttcaaagagccatctttagttatatgataaaatctgttatgtggaagagctcattctctgatatttcgttgtttgtgtttaacttttaacatcgccctctcagccctctgccaataaaggcagaatgtgcactgaatatagtgtcccagtgaattcgctgcccaaaaatattagagtttattacattgctttaagaaagcaagacgatattttccaatgaaggaaaagatctgcattgtactacataacacaaacaacggatagaagggtgaagaaagtagtcagagaggctagcagctttcctgacattctttattcatactattgccatgggttcaggtatcgtagacaggctttttttttttgccttagtaactttgtttggtatataagcaaaaagagacagataacaccagcctgaagtctccaggaaccagtgtggaaaattctgcggtacagatttgcttgactgaaaatgtatgcatatgtgctgtgtaaaattaatgacactgctaattatttaaatgttcataaaatattccaacttctact

SEQ ID NO: 707850 - DNA, 869 bp, Homo sapiens
catgaatcgagacagaccaaaagactcaaagttctaggcaagatagagtcctgggcagagaaggtacgagcaaggaaatgccacgaggagtgaaaggtttgggtaagaccagtctgatgcacagaaatggcctgggtaatggccaaggargtgtttgcaacagcaaaccaattaccagaagacaaagttttaatataaggagcaagtagaagaaatggaaatgtaagaaatatttgaaggcatcattaatcagactcaatgacttgtagaaggactgacttaaaaataatggcattgctctggcgcggtggctcacgcctgtaatcccagcactctgggaggctcaggcgggtggattacgaggttaggagattgagaccatcctggctaacacagcgaaaccccgtctctactaaaaaaaaaaaatagccaggcgtggtggcgggtgtctgtagtcccagctactcaggaggctgaggcagtagaatggcgtgaacccgggaggccgagcttgcagtgagccgagatcgcgccactgcactccagcctgggcaacagagcaagactccatctcaaaaacaagaacaacagcaacaaaaataatggcattgctttgaacctaggtgactaaatattagagtctaattagaaaaaaatatatattaagggcaaagccagtgtgaaatgcaaccacacaagtttgctttggctctatccaccctaaataccttccctccactgtaagaaccaccttttagtttcagccttaggttccacagcaagaacctctggagtgtgaacttgctgaggatccttaatagccactcctatttccccatggctcatgtgtgggtttccaacacaccacc

SEQ ID NO: 707851 - DNA, 822 bp, Homo sapiens
atagctcataaaagtggagtcttacagtgttcatttttctgtcactggtttatcttgcttagcatgatatcctcaagattcattcatgatgtagcatgtgacagatttccttcttttataaggctgaataatattcccttgtgtgtgtgttttatctgtagaaacatatataacatataacatataaaacacaaatgacatatataacatctgtatatgttatatgtggataacatatacataacatatatttcaggcaaatgggatcattaatcatttttatatatatatatatatatatatatatatatatatatatatatatataaacattttttattccattcatccatcagcatatatttakgtttttactgcctaaaacaatctgtttttactgtttttatggtaaaatataaatgatgctgcaataaaaacataagtgcaagtatctcttggagatccttatttgaaatgttttcaataaatatccagaaatggggttactaaatcgtaaggtggttctatttttaatttttgaggagcctccatactgttttacatagcacctactccattttacattgccaccaacagtgcactgggttccaattttccacatcctcacaaatatttgttattttctttcttttttcttttatttgcttttctctttatatatgcatatatttacactctcatatacatatataaatatgtacaaattctatataattctctatatataatattctccatataattctacatatacacattatattctatttataaatatacgtgtgtatgtatatgtttata

SEQ ID NO: 707852 - DNA, 822 bp, Homo sapiens
atagctcataaaagtggagtcttacagtgttcatttttctgtcactggtttatcttgcttagcatgatatcctcaagattcattcatgatgtagcatgtgacagatttccttcttttataaggctgaataatattcccttgtgtgtgtgttttatctgtagaaacatatataacatataacatataaaacacaaatgacatatataacatctgtatatgttatatgtggataacatatacataacatatatttcaggcaaatgggatcattaatcatttttatatatatatatatatatatatatatatatatatatatatatatataaacattttttattccattcatccatcagcatatatttaggtttttactgcctaaaacaatctgtttttactgtttttatggtaaaatataaatgatgctgcaataaaaacataagtgcaagtatctcttggagatccttatttgaaatgttttcaataaatatccagaaatggggttactaaatcgtaaggtggttctatttttaatttttgaggagcctccatactgttttacatagcacctactccattttacattgccaccaacagtgcactgggttccaattttccacatcctcacaaatatttgttattttctttcttttttcttttatttgcttttctctttatatatgcatatatttacactctcatatacatatataaatatgtacaaattctatataattctctatatataatattctccatataattctacatatacacattatattctatttataaatataygtgtgtatgtatatgtttata

SEQ ID NO: 707853 - DNA, 822 bp, Homo sapiens
atagctcataaaagtggagtcttacagtgttcatttttctgtcactggtttatcttgcttagcatgatatcctcaagattcattcatgatgtagcatgtgacagatttccttcttttataaggctgaataatattcccttgtgtgtgtgttttatctgtagaaacatatataacatataacatataaaacacaaatgacatatataacatctgtatatgttatatgtggataacatatacataacatatatttcaggcaaatgggatcattaatcatttttatatatatatatatatatatatatatatatatatatatatatatataaacattttttattccattcatccatcagcatatatttaggtttttactgcctaaaacaatctgtttttactgtttttatggtaaaatataaatgatgctgcaataaaaacataagtgcaagtatctcttggagatccttatttgaaatgttttcaataaatatccagaaatggggttactaaatcgtaaggtggttctatttttaatttttgaggagcctccatactgttttacatagcacctactccattttacattgccaccaacagtgcactgggttccaattttccacatcctcacaaatatttgttattttctttcttttttcttttatttgcttttctctttatatatgcatatatttacactctcatatacatatataaatatgtacaaattctatataattctctatatataatattctccatataattctacatatacacattatattctatttataaatatacgtgtgtatgtatatrtttata

SEQ ID NO: 707854 - DNA, 1011 bp, Homo sapiens
  misc_feature 92, 93, 94, 95, 96, 97, 98, 99, 100, 101, 102, 103, 104,105, 106, 107, 108, 109, 110, 111, 112, 113, 114, 115, 116,117, 118, 119, 120, 121, 122, 123, 124, 125, 126, 127, 128,129, 130, 131, 132, 133, 134, 135, 136, 137, 138, 139: n = A,T,C or G
  misc_feature 140, 141, 142, 143, 144, 145, 146, 147, 148, 149, 150, 151,152, 153, 154, 155, 156, 157, 158, 159, 160, 161, 162, 163,164, 165, 166, 167, 168, 169, 170, 171, 172, 173, 174, 175,176, 177, 178, 179, 180, 181, 182, 183, 184, 185, 186: n = A,T,C or G
  misc_feature 187, 188, 189, 190, 191: n = A,T,C or G
aaagtacagagtttaatgtacagtatgaggttagaaaactccccttttcttctcaactgcttaaaattatttaatttgtttgccagaatatnnnnnnnnnnnnnnnnnnnnnnnnnnnnnnnnnnnnnnnnnnnnnnnnnnnnnnnnnnnnnnnnnnnnnnnnnnnnnnnnnnnnnnnnnnnnnnnnnnnnagttaatgaattaaatatttgaacttccacttcttctcaacaactcagattttcctcttcctccaaaaaaacctgaaaacctgaagtttgaaaactgacctttgctaaattcaagttttttaatctccaacttctcttctttacagaaggcactactcttcttccatatcacagataaaaacctccctcagtagaataaataactcatccttcccaacagaagagacctggtaagaacttcatgcagtaacaatggacktttgatagatgcttgtttagtttctgcaaatgagaggatgcttcactggaagacagttcagttgctgtaaatagaattttaaacatctaattttaaaagattttaaaatattatgtcacctgtaataggagacataccacacttttaagctgaaaatcattttacccattcttcagatacacacaatccaagtgaaaggcaacaggcattgacctagtccctgttcatgtggctctttatgtgaagggtgtatgacagcaagacagagctgggcaggaaggtttcatatttggaaagtaagataacctctcaggtattctttcagtctctgaatctaggggatatgcacccctcactcacaattatagtccagatcaatcttgtagccaattcaaatctctggctgagtaaaaaagttttaggaccttcttgaaatgtctttccagaggtcataaaaccccaccaagcagcaccaaatcaggcttatttatgtacctcagctaacattctggttgcaatactactctttgtttcctgtcaccaagacattgccccatactc

SEQ ID NO: 707855 - DNA, 1011 bp, Homo sapiens
  misc_feature 92, 93, 94, 95, 96, 97, 98, 99, 100, 101, 102, 103, 104,105, 106, 107, 108, 109, 110, 111, 112, 113, 114, 115, 116,117, 118, 119, 120, 121, 122, 123, 124, 125, 126, 127, 128,129, 130, 131, 132, 133, 134, 135, 136, 137, 138, 139: n = A,T,C or G
  misc_feature 140, 141, 142, 143, 144, 145, 146, 147, 148, 149, 150, 151,152, 153, 154, 155, 156, 157, 158, 159, 160, 161, 162, 163,164, 165, 166, 167, 168, 169, 170, 171, 172, 173, 174, 175,176, 177, 178, 179, 180, 181, 182, 183, 184, 185, 186: n = A,T,C or G
  misc_feature 187, 188, 189, 190, 191: n = A,T,C or G
aaagtacagagtttaatgtacagtatgaggttagaaaactccccttttcttctcaactgcttaaaattatttaatttgtttgccagaatatnnnnnnnnnnnnnnnnnnnnnnnnnnnnnnnnnnnnnnnnnnnnnnnnnnnnnnnnnnnnnnnnnnnnnnnnnnnnnnnnnnnnnnnnnnnnnnnnnnnnagttaatgaattaaatatttgaacttccacttcttctcaacaactcagattttcctcttcctccaaaaaaacctgaaaacctgaagtttgaaaactgacctttgctaaattcaagttttttaatctccaacttctcttctttacagaaggcactactcttcttccatatcacagataaaaacctccctcagtagaataaataactcatccttcccaacagaagagacctggtaagaacttcatgcagtaacaatggacgtttgatagatgcttgtttagtttctgcaaatgagaggatgcttcactggaagacagttcagttgctgtaaatagaattttaaacatctaattttaaaagattttaaaatattatgtcacctgtaataggagacataccacacttttaagctgaaaatcattttacccattcttcagatacacacaatccaagtgaaaggcaacaggcattgacctagtccctgttcatgtggctctttatgtgaagggtgtatgacagcaagacagagctgggcaggaaggtttcatatttggaaagtaagataacctctcaggtattctttcagtctctgaatctaggggatatgcayccctcactcacaattatagtccagatcaatcttgtagccaattcaaatctctggctgagtaaaaaagttttaggaccttcttgaaatgtctttccagaggtcataaaaccccaccaagcagcaccaaatcaggcttatttatgtacctcagctaacattctggttgcaatactactctttgtttcctgtcaccaagacattgccccatactc

SEQ ID NO: 707856 - DNA, 598 bp, Homo sapiens
tttttgagtcagtgttttgctctgtcacctaggctggagggcagtggcatgatcattgcctcactgaactcctaggttcaagggatcttcctgcctcagtcttcaagtagctaggaatacaggtgtgtgccaccacactcggctaaatttttattttygtagagacagggtctcgctttgttgcccaggctggtctcgaactcctggcctcaagtgatccttccaccttggcttcccagagcactgggattacaggtgtgagccaccatgcctggctgttgtttaatggattcagaaagttctcactgctagaagaaagcaatgtatggaaaaaaaaaaacaacatggaacatagagacctttggttttagtttaactctaaagttgagatcattttcttcttttactttttaaatgcattttacataaaattggacaagtaatgtaaaaattctgaatcttgtaaaaattcaaaggagtatgaaatacttagcaaaagcatgtagagttaaataaaaattctcctttttttgtttttgttttttatttgagacagagtcttggtctgtaaccaggactgaagtgcacagctgattgc

SEQ ID NO: 707857 - DNA, 665 bp, Homo sapiens
ctttaccagccatgtaggcatccctcaattcagtcaagttgacacctaatattaaccatcacagtcatcttggcacttcagcaggaaataattcatcgatcctccctctaccaactcacaatcactttcatctcttgatttatttcctcagattcctaagtccccatatataatcctgaccactaaaggggttaaaacaactgaatttaccccttttacctaagacctacaygaggaacctgcttaacaagaccttgagaatggatataagaatagatagggatgggtgttagggtatggggatagacaattcagttatatttctttccctgatgacaaatccacactgatctttctcacctttgtacaactgtactgcagagttggagttataatacatatggtacacgttttagggggctgggaatggtggctcacgcctgtaatcccagaactttgggaggccgaggtaggcagataccaaggtccggagttcgagacccacctggccaatatggtgaaaccctgtctctactaaaaaaatacaaaaattagctgggcgtgctggcaggcacctgtagtctcaactaccagggaggctgaggcaggagaattgcttgaacctaggaggcagaggttgccgtgagctgagatcatgccactgc

SEQ ID NO: 707858 - DNA, 643 bp, Homo sapiens
tatgtctgaactaaaatttacttcacttcctcgtgtaagaatgccttgcttaaactcaatatataaaaatcagaattttaaaaattaaacaattagaaatgaagttattcactttacaaatactggatttatttttctaaattttttagttatctttactttttcacacatttatgttacctggcttgccatgtgggcctttgaagttccatatcccctgacagtaagggagatctgctctgagtgttgcctaagacatctacaaacaaacctggtgttttattccagttgaaaaaatgataattctgtgaagcatctggtcttctttttactagcagctctagtgtttgagcctatcgtttggaactgtggaaaattatttctctaagtagctctttaaaatggatccctgtctacakagagacttaagctatggctctttcctcagtggccttagctctaaatatgaagttctttctggactgaaactagagaaaagtaaaggtcagactgtatctctttagaatgttgaccgtttctttaccaataccctatttaatatactgatacttgtattgaagatgcagttatacagagggaaataaaagaataactggaggattagaaaaaatatttttataca

SEQ ID NO: 707859 - DNA, 593 bp, Homo sapiens
taaataataaatagatcaggagtgtcaagacattcaaatctgagaaatggtaggtagacgagagtgtggcaatcagagactgcaaatgttaagactggctcacaaaggaaactgggatttctagcggggaggagaaactggtaaggcaggatgtggtcaagaatagtcaatagggcctggctaatggtgtcagatgcagatgctatgaaagatgtggaactggtaattgcttaatcagagagtactggttaaaatacaggaaatctggggtaatgaggcagagaaccaggatactttgaggtcagggatgaaaactagaatttttttcttttttttttgcctgagaaacttgctgctttsaagaggcccatgtattaattgctttgatcttccttttcttacagctctttcaagggcagagccctccttatcctgaaggaatcttatccttagctatagtatgtactctctgctacaaaaaaggaagaaatcttgaggcctattggcattctccctgaacatcatgaaggtcctctgtgtgtgtgtgtgcgtgtgtgtgtgtgtgcatgcacgtgtgacggggtcttgctcta

SEQ ID NO: 707860 - DNA, 588 bp, Homo sapiens
gaacctgcgtggatcacctgagccactagtgacccagagatcctgagagtgaaaaacatgcatggtcctatacaccactgagttttgggatgacttgttacttagcactattatgacaattgctgactaatataccaggctcctggaagatttgttgtgaggttctcataaaatgatgaatgtgaaattgcattgtaagctgcttttaaaaaaggtacttagctggagtgaaagctctacaaaggcagaaattgttttgctactgtaactagatgagttcctggaataaaatagtagctcaataaataccatattaattgaattggatggatggatggatatatatatatatatatatatatattttaaccttggaacttctatcataggcatttttccttgggytgaaactactaatttctcttaagtacagataccccccgagaaagctaaaatgctgtattgtttatcacaatacttttggttcatgataattactgccagatacctggagtaattatagaaattgtagagaacaagaggtgaggggtgggagagctaagaaatggattttccagttttgcccat

SEQ ID NO: 707861 - DNA, 1018 bp, Homo sapiens
tcctgtatttcttctccaaccctggacaatttgtttagactgaacattctttttctccttgaaacatcagtagcaatgttacttgattcttacccagttagagaattacctttcagaaatattatgactcattcaccacaacatggagcacaggttgagaaatcagtcaatggctgatagtaaaatttaaattgttcctaaactacactcacacttttatcacaattaataaggcaacatgatacaactgcaaaaccataagaattatagtcaaatgaaagaatatctccaaatctccatgttacaacacatttccaagttaatttgggtatgttacttagactttctaaacccattagtaaatatcacctacattacaagattattatgaagtttaatacaggacgtaatgcacaccaaacaccacacattgtacatggcatgaaaaaaaggtagcttttatacttttgatttactgaagtagaatagcatactgtaaaaagaacagatcttaattgtacagtttgataaattctgacaagtatgtaaatacaggtataaaggtataattaccacctcaattaaaatagagaccaaggaaatacaatgtgagccacatgtatccttttaaattttctagtaactacatctgaaaagtaaaaaaggtaaaattattttaaatatattttatttgacacaatacatccaaaaattctcacttcaatatgaaatcaatttttaaaacattatcaataagatattttactttttcatactaatgttatatagtttgtatgtatagcacatcacaaytgggattagccatagttcaagtgatcactagccatatgtggctaacagctattatactggatggtgcaaatataaaccacagtccagaaaattttctcctgtccctttctggtctatctgcctactcccaccccaagactaccactactctgatttctacacacatagattagttttgcctgttcctgaagttcataaggaagga

SEQ ID NO: 707862 - DNA, 912 bp, Homo sapiens
cttcaaatattttacagagtttgactctttttcatgagcaatctgctaagagggagaatagcagaggctacacctgggccttttgttccacagcaagaggtttgaatctttattcaaacttaaaagtattttaagttctagaaattgttctagattcttttagagattagagattgtcctagagttgtataataatgtgaatagttaacagttgaactttactcttaaaaaacggttaatataaatttgacattgtgttcatttccagaattaaaaattaaatataaaaaaattagacagtaatgatgattatacaactctgtgaatacactgcaaaccactgaattgtatatgttaaatggataaaatatatggyatgcaaattatatctcaataaagtggctttaaaatttttttaaagtatgggaaactgcatgacataattttttaaatatcaaataataaacaatcccttgaccgggcatggtggctcacaccggtaatcccagcactttgggaggcggagactggcagatctcttgagctcagaagttcgagaccagcctggccaacatggtgaaaccccatatctgtaaaacaaacaaacaaaaatatacaaaattagctgggtgtggtggtgcgcacccatagtccgagctactcaggaggctgaggcaggagaatcgcttgaacccaggaggcagaggttgcagtgagccgagatcatgccactgcactccagcctgggcaacagagtgagactctgtctcaatcaatcaatcaatcaatcagtcaatcaacaatccctcaaatcacaatttaaaactccttattgaggtggaaataaggaaagaattttcatagattttataaaataaagaataagaaaataatacatgataatttcttaag

SEQ ID NO: 707863 - DNA, 1426 bp, Homo sapiens
tcttgctctgcccaggctggagtagcgtgatctcagctcactgcaacctccgcctcccaggttcaagcgattctcctgcctcagcttcccaagtagctgagactacaagcatatgccactacacccagctaatttttttttttttttttttttgtatttttagtagagacagggtttcactatatgttggccaggctggtctcaaactcctgacctcagttgatctgccctcctcggcctcctagagtgctgggattacaggtgcgagccaccgcgcccaatcccttgtactttcttaataaacttgcttttgcttttcactgtggactcatcctgaattatttcttgcgcgagatccaagaaccctctcttggggtctggatcaggacccctttcccgtaacacactaacacatacacactgaaactcacacatgcactaatatacactcccctactcccactggtgcacacacaccagcacactcacaatgacacgacacacccaagcacacacggacacaggcgcgcacacacggacacagcagtgtgtaactctgggtctccggtgggtctgagtggtctgctccacggtgggtctctcctgaggctggagcctcctctcagaaatgtttctgcccccagctgccatgtggcctaaaatcctgacaaattaggaaagattcctttaaaaccagcacttcggattttaggcttaagcaatatttggaaaatgtgaggctcagtcccccagctcgctgggctgtgggcctgtcacctggcgcgcgtgggggcaggcaggaggagggggctggctcgtggtatggggcgagcccgggcagatttggggcacaggcaggcacgcggacaccccaccgctgagagccagagagacagcagagggccgtggggatcaaagacagggctctggagggacccaatccccacccactctctctgcaaccctccccaagggacttcactcccgcaaacctcagtttccccatctgcacaatgggtgtgaacccgggacccacttcatgggctaatgcgaaacttaaatgacaccgtaccaattaagttataagccctggaagcccaagaaaagaaagcggtggtgcgatgggggaaaaaccaccatccccggcttcccgcgtgtaacggggccgaaaataaccagcattttccttttctctgcggctgaagcccacgcttcccagaggaccgggcctgcttatcaggagcagagcggctcgctcggctgtctccgccagaaggtgactgtgggggcccggctcccctcctgcctccagcccgactcccaccaggaacacaccrgctcctccccccgccgcccctttcaggtttccgccccacccccagcccgcaaacaattttgcatatatttaaatctcctctgcgagttc

SEQ ID NO: 707864 - DNA, 1081 bp, Homo sapiens
acatgatggcggaaggaggacaaggaaggaggctgactgcgtatccagcacgtgttccgtgccaagcctgtgcaggggccaaggaccggggtctctggacagcgccggttgctgggtcccacgctgggcgacagggcctttgcaatcaggccgacagggtttgaacccttgccgcggcactttccagatggccttggccactgtcccctctctgaccttcagatggagcccatggcacctccggagggggtgtgtgcttccaggaccaaatccacttgtgcgtggttaggcacgaggtggggggaggcggctcagccaccgggacctgtcctgcctccaccctctgtgcaacccctttccttgccttttgtctctgttgcttttggggggtgattagccgctagctcagcggctagaggattctctcccggaaaaggctccggagttgaggcccagacccccagggcaagacggaatctgctccccagggcactaactgagactcggttccctcactggtaaaatgagaaaactcacttatggtcaggggtccccgagttaatgccagtgaattccttggcagagcatcaagcacttggagaagcccccacccccggtcattgtgatgatggtttgtttgtttgtttgtttgttttgagacggagtctcgctctgtcgcccaggctggagtgcagtggcgcgatctcggctcactgcaagctctgcctcccgggttcacgccattcaggtgatgatgttttttatttatgtgcccacctgccccactccgtagggcccctcgaggccaggactgcacsgttcatctcggaattcgcttgttcctaacttaggggagtggcgccgagacaccgtgtagcgcccatgccaaggaggaagcgagacagcaggagcggaggaaagaaccccgggctgtgttgaggaagcctcctacttttgcctgaagtgaggttgttgttgttgttgttgttgttttttccacgtgccttattcatccacgtaacctcagcctctagtgcagcgtcctattttttggcttgtattattatttttaattggcaca

SEQ ID NO: 707865 - DNA, 1081 bp, Homo sapiens
acatgatggcggaaggaggacaaggaaggaggctgactgcgtatccagcacgtgttccgtgccaagcctgtgcaggggccaaggaccggggtctctggacagcgccggttgctgggtcccacgctgggcgacagggcctttgcaatcaggccgacagggtttgaacccttgccgcggcactttccagatggccttggccactgtcccctctctgaccttcagatggagcccatggcacctccggagggggtgtgtgcttccaggaccaaatccacttgtgcgtggttaggcacgaggtggggggaggcggctcagccaccgggacctgtcctgcctccaccctctgtgcaacccctttccttgccttttgtctctgttgcttttggggggtgattagccgctagctcagcggctagaggattctctcccggaaaaggctccggagttgaggcccagacccccagggcaagacggaatctgctccccagggcactaactgagactcggttccctcactggtaaaatgagaaaactcacttatggtcaggggtccccgagttaatgccagtgaattccttggcagagcatcaagcacttggagaagcccccacccccggtcattgtgatgatggtttgtttgtttgtttgtttgttttgagacggagtctcgctctgtcgcccaggctggagtgcagtggcgcgatctcggctcactgcaagctctgcctcccgggttcacgccattcaggtgatgatgttttttatttatgtgcccacctgccccactccgtagggcccctcgaggccaggactgcaccgttcatctcggaattcgcttgttcctaacttaggggagtggcgcygagacaccgtgtagcgcccatgccaaggaggaagcgagacagcaggagcggaggaaagaaccccgggctgtgttgaggaagcctcctacttttgcctgaagtgaggttgttgttgttgttgttgttgttttttccacgtgccttattcatccacgtaacctcagcctctagtgcagcgtcctattttttggcttgtattattatttttaattggcaca

SEQ ID NO: 707866 - DNA, 835 bp, Homo sapiens
tgggtcagaactcagggaagctaaaggagctgcaggacccagtgctgccccatggcataaggttagccagtgatcatgacatgatgtcccaccgcctattgcccaggaagaccttcagagtgtaaaagacatgtctccagcttccaaatctccaccttccaaatctaacccagaatgtctcttaggtccatggctaagccagaactatacaaggaacagaattctgggaaacagtaccaagttagcttagctaacctgacgtagtacaaagctgctgcgtctggtgtggaggttttaaaatatgtctatgaatactttgctatggggaaagacagtcacccttttgtgaggttattcaamcagtgtatggggaagctcataaagaggattgacatctgaaaaacaaagagtttgctttcaatccctaacagctgtttcaacattagtcgctactaccctcatcttttcactcaagtttctaattcagcaacagacatagatggagagcaactgagccctcttaccaaaaaccagcactaacttgacaactgtgtgtgtgtatgagccaccttggaagtctattctccaaccccaggcaagacttcaaatgactcttcccccaggtgacatattgctgactaccttaggagagacctcaaggcagaactgtttggttaagctacttcctgatcttcagagactgtgagataataaatgatggttgatttaagcctctaaatattagagtaatttgccgtatagcaataagtaactatacacctagtatcaattatttagagtaatcaagtactccaaaacaagtagtaaaagcttc

SEQ ID NO: 707867 - DNA, 792 bp, Homo sapiens
tgactaagttctcatgagatctgatgatttaataagtgtttgacagttcctccttcgcacactcacattccctcctgccaccttgtgaagaaggtgcctgcttccccttccacgatgattgtaagtttcctgagtcctccccagccacgtggaactgtgagtcagtggaacctcctttgtttataaattaccgagtgtcaagtagtatctttatagcagtgtgaaaatgaactaatacaataaccttccttattatactcaactaaagaaaacttttaaattacaaaatgacaattgcgagcctggagcattatttctaaaatgcttttcctcagagcagtatttttctattagcatattacagttatagtctgaaatttacattttaaaaacattacttcaaaatttttagaaaaataagtcacacacacatacacacacactataataaccattagttcctgagaacaatagatgaataaacatgagacctaccaagtagctcaatagttctttatggttttgaaattctacagattaatttttattttctcatatgtgagcaattgctttgtgttatttctctgtactctataaaataaaatatcaaaccttaaattttctcactgtatagtagatacattcctaattcacttgttaccatttacagttcacataaaacatggaacacaaacacattaaacatgtgagaatggtaaggatttagggaaacaggaactcycattggtagagggagtcaactggcacttttcaggaagaaacattttaata

SEQ ID NO: 707868 - DNA, 533 bp, Homo sapiens
tgccaaaataaaataaattggaaaacagaaaaatsaaagcccaagttgttttttaaaaaagtaataaaattgacaaagcttcagcctgatggatttgaaaatgtgaaaatacaaatcctaataccaataatgaaaaagataatataatttcaatcctttctcacattataaaagataataggatattataaaaaaatttgtgaatacatattaaaactcgaaaaaatagatattattttttaaagaaacatcttaccaaaactagtgttagaagaaattttaaaatatgagtaatcttatagttgttgactttttaactaaatactctcctggtcaaattaggtggctcacacgtgcaatcccagcatttttggaagtcaaaatgggaggactgctttacgccagacagttcaaaccagccttggcaacatagggagaccccatctctagaaaaaaagaaattagcaaggcatggtggcacacacctatagatacttaggaggccaccatgctacagcctggacaacaaagag

SEQ ID NO: 707869 - DNA, 609 bp, Homo sapiens
ttaaagtaattattgacaggtagagactttttatcattttgttaatttttttctcattgttttgtatttcctttgattctttatcttttgttgtattcctttgaaatttgttgtttttattctagtattatgctttgaatcctttttctctacagttttttctatccactgaaggttttgtktgtgtgtgtgtgtagttaccaagaggcttaagtgaaacatgttatagttataatgttctattttaaactgataacaagttatccatttaaactctataattttacttctcccccttacaaattatatactattaatgtcactccttacatctctttatattgtgtgtccattaaaaattcatgttattatagttactttcaaatttctgcttttagtttttgtaccacagttaaaaagtaacatccagtagtttttcctacctgtgggagacatatttcaatatctccagtggatgtctaaagcagtagagagtgccaaactctatatatacagagaaagattgtttggaaggctaagtcttccctcttaataagtaaaggtttttgctttataaaaattttttgagtcattttgcctaaataaatg

SEQ ID NO: 707870 - DNA, 609 bp, Homo sapiens
ttaaagtaattattgacaggtagagactttttatcattttgttaatttttttctcattgttttgtatttcctttgattctttatcttttgttgtattcctttgaaatttgttgtttttattctagtattatgctttgaatcctttttctctacagttttttctatccactgaaggttttgtgtgtgtgtgtgtgtagttaccawgaggcttaagtgaaacatgttatagttataatgttctattttaaactgataacaagttatccatttaaactctataattttacttctcccccttacaaattatatactattaatgtcactccttacatctctttatattgtgtgtccattaaaaattcatgttattatagttactttcaaatttctgcttttagtttttgtaccacagttaaaaagtaacatccagtagtttttcctacctgtgggagacatatttcaatatctccagtggatgtctaaagcagtagagagtgccaaactctatatatacagagaaagattgtttggaaggctaagtcttccctcttaataagtaaaggtttttgctttataaaaattttttgagtcattttgcctaaataaatg

SEQ ID NO: 707871 - DNA, 609 bp, Homo sapiens
ttaaagtaattattgacaggtagagactttttatcattttgttaatttttttctcattgttttgtatttcctttgattctttatcttttgttgtattcctttgaaatttgttgtttttattctagtattatgctttgaatcctttttctctacagttttttctatccactgaaggttttgtgtgtgtgtgtgtgtagttaccaagaggcttaagtgaaacatgttatagttataatgttctattttaaactgataacaagttatccatttaaactctataattttacttctcccccttacaaattatatastattaatgtcactccttacatctctttatattgtgtgtccattaaaaattcatgttattatagttactttcaaatttctgcttttagtttttgtaccacagttaaaaagtaacatccagtagtttttcctacctgtgggagacatatttcaatatctccagtggatgtctaaagcagtagagagtgccaaactctatatatacagagaaagattgtttggaaggctaagtcttccctcttaataagtaaaggtttttgctttataaaaattttttgagtcattttgcctaaataaatg

SEQ ID NO: 707872 - DNA, 650 bp, Homo sapiens
ttcaagagggtaagatcccaaaccaggagtgccagtgagcactgatgttgtgtccacaggtttaaatagctacacatgcatgcacaacacattaagtaagctattttataacttcacactggaaaaacttgctctttaaaggagctctggccaggcatggtggctcgcccctgtaatgccagcactctgctgtaatgcagcactctgtgggggctgaggcgagaggattgcrtaaggccaggagaatgagaccagtgtgggcagcacagcaagaccctgtttctctgtctctgttataaaaaaaaaaaaaaaaaaaaaagccctttgtagattttttgttaacaaaggacacttttagatataagtgggtccttgccctttgttttttcctatctggaaagactgggcttccaggttattttcttaaagaaatgcacaaaaccactgcgggaattcctacttaaattgattacagtggacccaaacacactcatccttcaaagctttcaatgccttggggcgctgactgtggggggtccccttgagtcacagtgatgcatcagatctctcatgcatcccagtgattactggggtacacaggtctccctggaggtcttgcttccctactccctcagctggcacccagagct

SEQ ID NO: 707873 - DNA, 650 bp, Homo sapiens
ttcaagagggtaagatcccaaaccaggagtgccagtgagcactgatgttgtgtccacaggtttaaatagctacacatgcatgcacaacacattaagtaagctattttataacttcacactggaaaaacttgctctttaaaggagctctggccaggcatggtggctcgcccctgtaatgccagcactctgctgtaatgcagcactctgtgggggctgaggcgagaggattgcataaggccaggagaatgagaccagtgtgggcagcacagcaagaccctgtttctctgtctctgttataaaaaaaaaaaaaaaaaaaaaagccctttgtagattttttgttaacaaaggacayttttagatataagtgggtccttgccctttgttttttcctatctggaaagactgggcttccaggttattttcttaaagaaatgcacaaaaccactgcgggaattcctacttaaattgattacagtggacccaaacacactcatccttcaaagctttcaatgccttggggcgctgactgtggggggtccccttgagtcacagtgatgcatcagatctctcatgcatcccagtgattactggggtacacaggtctccctggaggtcttgcttccctactccctcagctggcacccagagct

SEQ ID NO: 707874 - DNA, 895 bp, Homo sapiens
ccattagccaagtaaacacagtggttagaagtgaggaaatcatttgaggggttcggtggtagggtgataaagtatgcctttcaagcatttaacgttataactctttcaatttcccaaaataacaaaataagatggtaatttgaaattaagtgttttagcattgctattgctttttaattatttgtttacaagacttttaggtatttatttctaccatgtattttactatttacagttatcaaggaacagttaagaagttttgttctatgaatctatgatgcagtaatttgttcagtatkaattgatacctgcctctaggcatgtaaactgtgtgaaacgtaacaggtgtcctaattctagaaaaatgtgtggtaattgtttgtttgtcaaacagatgaataaatatctttagggcatagctggtcctcaggtggtgagcataaatggattaatgatgtgagtgactcggggagacacgcttgttttgcagcaccctcctccgccgatcgctgaagcagaacaaatactaattaacaggggcggcctggttggcaggttggctttctccagctgatttggcaaaatggtttattcctttccctccataaaccatccctcttagttattagacattttcatactgatgtttagttaatttctaattttcttaattaggatgcatttcatctcttgcaaaaatattataacgtttatagttaacatttttaaaaatttagaggggcctaagatttaagttttaatagttgacgcttgaatttcaaaaacatttgtttctcaaaatgtagataattcttccaatggaattattccaaagaatcgttcaccatcttttttttgtattcttacagtaacactaaccccactctggaaaaat

SEQ ID NO: 707875 - DNA, 2938 bp, Homo sapiens
  misc_feature 2433, 2434, 2435, 2436, 2437, 2438, 2439, 2440, 2441, 2442,2443, 2444, 2445, 2446, 2447, 2448, 2449, 2450, 2451, 2452,2453, 2454, 2455, 2456, 2457, 2458, 2459, 2460, 2461, 2462,2463, 2464, 2465, 2466, 2467, 2468, 2469, 2470, 2471: n = A,T,C or G
  misc_feature 2472, 2473, 2474, 2475, 2476, 2477, 2478, 2479, 2480, 2481,2482, 2483, 2484, 2485, 2486, 2487, 2488, 2489, 2490, 2491,2492, 2493, 2494, 2495, 2496, 2497, 2498, 2499, 2500, 2501,2502, 2503, 2504, 2505, 2506, 2507, 2508, 2509, 2510: n = A,T,C or G
  misc_feature 2511, 2512, 2513, 2514, 2515, 2516, 2517, 2518, 2519, 2520,2521, 2522, 2523, 2524, 2525, 2526, 2527, 2528, 2529, 2530,2531, 2532: n = A,T,C or G
ggtaaaaatgactttaaactcttgtcagcgcagttactggtgcatgcatcacagtcccactcaaataaacctgtcacaacacagagtcggccgctagagaagagtacaagggcaggcctctagcttttcattcgagcatcactaaacgtgcacagagtgcccaattatttcagcattattgagcaagcctacaggaggacccaagccttgctacattagattttctttagtaatttgctcaagtaccgctgaggacacttaaagggcttaaaacggtggctgcaaccagtttccttttctgggttgttaattcaggttttctctttcaaattaactctccctgcatgctgtgcagtggttctgggagaattgtttaacactaattttctcaattttcagctttttttgttcaacataactgctttaacagttactcacgtatatgttttgattagaaatgtatgatagcgaggccttattttattttttgagataaaaaaagccttttatgaggtttgttaaagaaatatgtttgcatatcaactattgaaagttacttatatactttcaccacttaaaaattaaattatttatattgcatgtgcaaaacctccaagtataagaaaggtagcatttattgactacacagctcatttgctccttcccccttttaaaaatatatatatgttaatagtaaatcttacgtaggtgttggcttttttctttttcttttttttttgagatggagtcttgctctgtcgcccaggctggagtgcagtggcacgaactcggctcactgcaagctccacctcccgggttcacgccattctcctgcctcagcctccccagtagctgggactacaggcaccagccaccacacccggctaatgtttttgtatttttagtagagacgggatttcaccgtgttagccagggtggtctcaatctcctgacctcgtgatccgcctgcctcggcctcccaaagtgctgggattacaggcgtgagcctccgtgcccagccggtgttggcttttttactgccgatttatgcctcctttctgtttctcttggggcaggggttggatatgggggcaaattcaatatctgtgtttaatttttcacagcagcaacaactccaggcccagcatttatcacatggacatggtctccccgtacctctgactccacacccttcagggctccagccccctgccattccacccatcggtagcagtgccgggcttctggccctctccagtgctctaggaggtcagtcccatcttccaattaaagatgagaagaagcaccatgacaatgatcaccaaagaggtgagtaactctcttggaatgccaatctgagatgacctacttgctgctgagggtaggttctggatgctattgtttattctctctgaatttagttttaccagtgactaaacaaaggatttccactggaaggtaaattaattactgcaagtagtcaattgccaaatgatattctagtggttggcaagagctaacatactccctagaggcagaggggcctatttctggttattgcctttgatttcttgctaccttctatgttccccaggtctaaatcagtaatgaaatcccatgatgctctgtttgaagtagcatgttgcattaatagttaactttgactgaatttattttggggaaatgtcttgctgataaatgctcacttgatatttgaccaaatcaattattatttataaacaaatgagcctatatagagcagtaaaaatctcacaggtaagaaaacaatttcagtagtcttagtaattaagaaggtacagaccaaattaatgaaatctgttggtttaactctctctctcacccagtctgtttagaagcatgaaattaactaatttcttcctagaagaccaacataattgtttatgcaattaattgatttaaaggccagttgtgctccttctaggttgatttccttcctccactaaggtagatgatggtgcagaaacattttgatgtgactgttgtttttctttggtgcttactgataatttttattagttgatgacagaaatgcagatgaaaaagtctctcccagcattcctttttgggaatttacttagcacaagggtggttcattggcttgaagggtgtgtttcataattaaaagctcatacccctgtttcagcatccttactrtgaattataatattaagtcagtgatttttatcacatatgcataaatatccatctctgatattaaaaacactgtaatttgtcatccagttatcttaatgctatggtacagagttgatgcatgattgtaaatactttgaaaaagtctataaggagcacagataataagaatgtccagcttggttctctgaaattgtgtcaaaggtagattggtactttatgaatttggttgtgcaggannnnnnnnnnnnnnnnnnnnnnnnnnnnnnnnnnnnnnnnnnnnnnnnnnnnnnnnnnnnnnnnnnnnnnnnnnnnnnnnnnnnnnnnnnnnnnnnnnnnaatgaattgcaagttgaatgttaaatgatgcttgcttcctttgggttttcgtgtggtcgggcttaatctcaggacagcaaccaaatgcgggtgcagactgtcttcatttccttccttcctcccttctcttttcttcctctggctctcttccttttttcttttctctttctttctcagtccatcctcttactcctccattattattaaattcttagctagatttagacagaaaactttttattttcatagtggaaattaatcagcatgctgttttaaagcaacacaagaaaaattagtaaagctttccctgactttaagagtgggtgaccttttcagttttaatgcagcaaatatttatagagtgctaacaatgtggcaagcacagggccgagtgtagtcattgtct

SEQ ID NO: 707876 - DNA, 996 bp, Homo sapiens
taactttgaatttcctgactcagccataaaacctgaaatcacatttcattaacactgattgcctactcagaggaaacatgaaaggggctatgaatctctgacggagatttaagagcaaggtttaacggttgatttcttcaattactccagaaacaaagtcttgttttcacgtatctgggaaggaccagctgacttctgagagggatgctttattctcggcagtaacaggcttctctgcatttggtacattatccaaagttgacccctaacaggtgtttaagtgaataggtatttgtttaaactcaactcttctagggcaaagaggcgtccaactgaagttcttcaagcaatgggaagtcatcttaaggaacagtgcttgcagcacagtggtcctggagtctcactcctgcccttgtggtgcctcctgctagtatctctcccagtccctgtgctgctgggacgaggaggaaggacacaagcttggtctgacagtcttccttcatggagccctcatggtcacaatgcctgcatttcacccttgactcagttcccaccactcattcattctcctgcaacttcccagcctcctgagaataaaaagttccctagctcatctcatactttctgccacataagatacagccagggtaccaagtatggtagttcctcttggaagaggcagggggggtgtctagtggagactgggtaatggccaactgctccgtaagtctagggagaaatgcagggccatccagaaacactagggcatgagtttcgttagatcctacctaaacagagtcccaaaattctgctgcctaaattttcaacaacttaactacttcgtaagtaccttcgtgtgtgtattttgctagayccaagtcaaatatgacatttatgtgagtttaaatcttcttccaaaataaccttcccaatgttctcatcaccccgcagggtgaagttaatgggctccctgcagcagatgccaagggtcgcgca

SEQ ID NO: 707877 - DNA, 598 bp, Homo sapiens
ggaaaaatgaagatttgttgcattgtcactggagagaagactggaggtagtcactcagagctaattgtgtgtgccgtatttaataaggttggtgcctaatggacttcatcacagggaagtctttattgcccaagagaccttgacatcagaaacattattggaagggtttctgtctacacatgtagccagctatttacctgcccagagttaacctaagatttttttcaaaaggttgattggttcagccattactttgatttcctgtctcctgtcaccttttgcagtaatcacataagtagtttttgttgtttttttttgttttagcaacctggaataagaaaatagtttttcatttgtactaagaggtgtttttcattaaacaacctgatcaaagtttctattttcaatttatatgctaataaagtatactttagaacttataaacatgcattacccagtgggattttattcctggatccaacataatctatggggtcagaggatctcttcagattaaaagagttagaggaaagtggttgtcaattgaaaagtatgaggccatatgcacaatgaggtagaggattagagcaatwaataa

SEQ ID NO: 707878 - DNA, 717 bp, Homo sapiens
tattactcatccacttatgagaaataatatttttgagataaaagagggactctagattttacaaaaataattttaaacacttttttaagcctgaagaaaaaaatgaagaattaagaaaactttttgagttaatatcatcactggagtacaatgtggatcgaataggaaagaaaagtcatgatttagaagaagaagcaactgggcatggatggttttcatattgtagaacatgttaaccacttattaattgatttaactctaattttacttgactaaaacctagatacaaattcattttaagtttgcattttcataattaaatgaattctattttaaaatgtatttcagaaactcacagcacaactttttagacatgtgtgtcatgggggcgggagtcagctgagctgctggggcaaggtgaaattttttttgaatgccaaaatattttttttttctttttgagaaagagtctggctctgtttcccaggctggagtgcaatggcacggtcttggctcactgcaacctatgcctacaagcaatcttcctgcctaagcctastgagtagctggcattacaggcatgtgccaccacgcccagctaatatgtgtatttttagtagagatggggactcgccaagtgatcaggctgactcttgaatcctgacctcgtgatctgctgtctacgtctccaaagtgacgtgagccaccatgcccggc

SEQ ID NO: 707879 - DNA, 717 bp, Homo sapiens
tattactcatccacttatgagaaataatatttttgagataaaagagggactctagattttacaaaaataattttaaacacttttttaagcctgaagaaaaaaatgaagaattaagaaaactttttgagttaatatcatcactggagtacaatgtggatcgaataggaaagaaaagtcatgatttagaagaagaagcaactgggcatggatggttttcatattgtagaacatgttaaccacttattaattgatttaactctaattttacttgactaaaacctagatacaaattcattttaagtttgcattttcataattaaatgaattctattttaaaatgtatttcagaaactcacagcacaactttttagacatgtgtgtcatgggggcgggagtcagctgagctgctggggcaaggtgaaattttttttgaatgccaaaatattttttttttctttttgagaaagagtctggctctgtttcccaggctggagtgcaatggcacggtcttggctcactgcaacctatgcctacaagcaatcttcctgcctaagcctactgagtagctggcattacaggcatgtgccaccackcccagctaatatgtgtatttttagtagagatggggactcgccaagtgatcaggctgactcttgaatcctgacctcgtgatctgctgtctacgtctccaaagtgacgtgagccaccatgcccggc

SEQ ID NO: 707880 - DNA, 2956 bp, Homo sapiens
catgttattaaacttgtttacataaataaatttcatatatataaatatatgtataacttgaataaaaagtaaaatgaacatttatgttttgatcacagattttttttaaaacaacggaatctgtctttgaagccttgaacacagctacttttctatttatttactgagcacttaatttggttttctgattcgaatcaacatttttctgtcattgcctttctctacatggttttgtgtctctttaattttgttgacattatgtcagcaaagatgtctagatctcttcttcaaagtctttaaatcgtcacacatctctccgcccctttccttttttctaaaactgcctgtttcctttttctcctcaactcagatattaaagatgttttcttctctttttctacattgaaagatctccttgatgctttttgtgtgtacttttttttctctgatagactgtggtcaatgcatatcaaaatgtattttttgtctttttcaaacgtatgtgttttacttttttaacttggttacttatctctgggttatggcttatatttagtaataggttattttacctagcataccaacatggatatgagtagtttatttacaaaaagtgtacagttaggccaggtgtggtggctcacacctgtaatcccagcactttgggagagcaatgtgggtggatcatttgaggtcaagagttcaagaccagtctgaccagtgaaacctcatctctacttaaaatacaaaatgagccagacgtagtggtacacacctgtaatcccagccacttgggaagctgagacaggtgaatcacttgaattcaggaggcagaggttgcagcgagctgagatcactccattgcactttggcctgggcaacaagaatgaaattccatccaaaacaaaacaaaacaaaacaaaaacactgtatgtttataatatcactttacctgccatatatgacataaaattgttcttcatattatttatctaagattataatttcatatagaatgcttttaaactatgttcagttgaaactgaaaggaacatagtttatagatttgtttccttgatatgccataacatatatttaaacaattattaaatatttactcttaaaaatacttgacttactaattctgtacatttctgcagatataaacgcctcctggaaatgacaataaatatgtgaaatgtatttggaaatgaagacgttggttgccatggagacttaaaaacagatcaactgaaaatggatattctgattaagaagctaaaacagaaggtaattttaaaaaaattatattatcttaaggtctagattacgtgtgtgagatgtgcgggtttgttatataggtaaacatgtgccatggtggtttgctgcacctatcaatccatcacctagatattaagccctgaaggcattagttattgatgttgatgctctccctcctgaccccaacaggccccagtgttttttgttcccctccccgagtccatgtgttcttatagttcagctcccacttataagtgagaagatgcagtgtttggttttttcttcctgcagtagtttgctgaagatatcagcttcgggttcatccatatccttgcaaagagcacgatctcattcatttttatggctccatagtattccatgctgtatatataccacattttctttatcccattatcactgataatgtccacctgggttgattccatgtctttactattgtgaatagtgctgcagtgaacatacaaatgcatgtatctttataatagaataatttatmttcccatgtatggtaattttaaatcagttttggtattaaaaatcatgcattttggaaaatattgataatggaaaaacccaaattctgccaaaatatgttgagaaaatagagggtaaatatatcttttcaaactttaaatgcctcaggctcttagttaatcttccccagatctgggaagacctagaaggggagagattgggctaccttaatgagggccatttcaatctcttgtcctgcagcagccatttcaaaatacgtcaaaaaatatatttgggggtaaaatattttgatttccttcagcctcttctctctgtgatgctgcaccagaatcagattagaaaggaagccacattataagtgttaataaaacccatctgatgagatttgatagtttgaagggtgtgtttcccagaccctttagatagaatgtggggccaaagaaaacaaggtcttattcctctatataaatctgtcagtgctttaagcagtgaaagaaagatttttcatttaattttacagacttgaaactaatgaaaaggatagcttgtaaaatataaatctctttttctataaaaaggacatgttgttgattctcttagaccttgaaccctggccagtgatttgaaaccaagcagtacctatctccggatctctagtaccaaattaattcggggtgggggggtaacaggtttattgagaaataatgaacacaccatgcaattcattcatttaaagtatacaattcattaactttagtattttcagagttatgccgtcatcattacaattaattttagaacattttcatcaccctaaaaacaaaccccacatcatttagccatcttcactagttttcccttcctccctcagccctagggaaccacccagcttctttgtatagatttgcctataagcctctgaaataaaaagcaagtggtctgctgggactggcttatttcacttagcataatttttcatgctgcatctgtgctgtagcaggtatggatgccgggtttttgctccttagttcagctacatctgggttcttctctcgtgaccaggaaaaattaagcatgcagacacattgaggagggcagaatttattatgtgaaaggacagctctcagcaaagagaggggtcctgcaaacaggtttccac

SEQ ID NO: 707881 - DNA, 2956 bp, Homo sapiens
catgttattaaacttgtttacataaataaatttcatatatataaatatatgtataacttgaataaaaagtaaaatgaacatttatgttttgatcacagattttttttaaaacaacggaatctgtctttgaagccttgaacacagctacttttctatttatttactgagcacttaatttggttttctgattcgaatcaacatttttctgtcattgcctttctctacatggttttgtgtctctttaattttgttgacattatgtcagcaaagatgtctagatctcttcttcaaagtctttaaatcgtcacacatctctccgcccctttccttttttctaaaactgcctgtttcctttttctcctcaactcagatattaaagatgttttcttctctttttctacattgaaagatctccttgatgctttttgtgtgtacttttttttctctgatagactgtggtcaatgcatatcaaaatgtattttttgtctttttcaaacgtatgtgttttacttttttaacttggttacttatctctgggttatggcttatatttagtaataggttattttacctagcataccaacatggatatgagtagtttatttacaaaaagtgtacagttaggccaggtgtggtggctcacacctgtaatcccagcactttgggagagcaatgtgggtggatcatttgaggtcaagagttcaagaccagtctgaccagtgaaacctcatctctacttaaaatacaaaatgagccagacgtagtggtacacacctgtaatcccagccacttgggaagctgagacaggtgaatcacttgaattcaggaggcagaggttgcagcgagctgagatcactccattgcactttggcctgggcaacaagaatgaaattccatccaaaacaaaacaaaacaaaacaaaaacactgtatgtttataatatcactttacctgccatatatgacataaaattgttcttcatattatttatctaagattataatttcatatagaatgcttttaaactatgttcagttgaaactgaaaggaacatagtttatagatttgtttccttgatatgccataacatatatttaaacaattattaaatatttactcttaaaaatacttgacttactaattctgtacatttctgcagatataaacgcctcctggaaatgacaataaatatgtgaaatgtatttggaaatgaagacgttggttgccatggagacttaaaaacagatcaactgaaaatggatattctgattaagaagctaaaacagaaggtaattttaaaaaaattatattatcttaaggtctagattacgtgtgtgagatgtgcgggtttgttatataggtaaacatgtgccatggtggtttgctgcacctatcaatccatcacctagatattaagccctgaaggcattagttattgatgttgatgctctccctcctgaccccaacaggccccagtgttttttgttcccctccccgagtccatgtgttcttatagttcagctcccacttataagtgagaagatgcagtgtttggttttttcttcctgcagtagtttgctgaagatatcagcttcgggttcatccatatccttgcaaagagcacgatctcattcatttttatggctccatagtattccatgctgtatatataccacattttctttatcccattatcactgataatgtccacctgggttgattccatgtctttactattgtgaatagtgctgcagtgaacatacaaatgcatgtatctttataatagaataatttatattcccatgtatggtaattttaaatcagttttggtattaaaaatcatgcattttggaaaatattgataatggaaaaacccaaattctgccaaaatatgttgakaaaatagagggtaaatatatcttttcaaactttaaatgcctcaggctcttagttaatcttccccagatctgggaagacctagaaggggagagattgggctaccttaatgagggccatttcaatctcttgtcctgcagcagccatttcaaaatacgtcaaaaaatatatttgggggtaaaatattttgatttccttcagcctcttctctctgtgatgctgcaccagaatcagattagaaaggaagccacattataagtgttaataaaacccatctgatgagatttgatagtttgaagggtgtgtttcccagaccctttagatagaatgtggggccaaagaaaacaaggtcttattcctctatataaatctgtcagtgctttaagcagtgaaagaaagatttttcatttaattttacagacttgaaactaatgaaaaggatagcttgtaaaatataaatctctttttctataaaaaggacatgttgttgattctcttagaccttgaaccctggccagtgatttgaaaccaagcagtacctatctccggatctctagtaccaaattaattcggggtgggggggtaacaggtttattgagaaataatgaacacaccatgcaattcattcatttaaagtatacaattcattaactttagtattttcagagttatgccgtcatcattacaattaattttagaacattttcatcaccctaaaaacaaaccccacatcatttagccatcttcactagttttcccttcctccctcagccctagggaaccacccagcttctttgtatagatttgcctataagcctctgaaataaaaagcaagtggtctgctgggactggcttatttcacttagcataatttttcatgctgcatctgtgctgtagcaggtatggatgccgggtttttgctccttagttcagctacatctgggttcttctctcgtgaccaggaaaaattaagcatgcagacacattgaggagggcagaatttattatgtgaaaggacagctctcagcaaagagaggggtcctgcaaacaggtttccac

SEQ ID NO: 707882 - DNA, 2956 bp, Homo sapiens
catgttattaaacttgtttacataaataaatttcatatatataaatatatgtataacttgaataaaaagtaaaatgaacatttatgttttgatcacagattttttttaaaacaacggaatctgtctttgaagccttgaacacagctacttttctatttatttactgagcacttaatttggttttctgattcgaatcaacatttttctgtcattgcctttctctacatggttttgtgtctctttaattttgttgacattatgtcagcaaagatgtctagatctcttcttcaaagtctttaaatcgtcacacatctctccgcccctttccttttttctaaaactgcctgtttcctttttctcctcaactcagatattaaagatgttttcttctctttttctacattgaaagatctccttgatgctttttgtgtgtacttttttttctctgatagactgtggtcaatgcatatcaaaatgtattttttgtctttttcaaacgtatgtgttttacttttttaacttggttacttatctctgggttatggcttatatttagtaataggttattttacctagcataccaacatggatatgagtagtttatttacaaaaagtgtacagttaggccaggtgtggtggctcacacctgtaatcccagcactttgggagagcaatgtgggtggatcatttgaggtcaagagttcaagaccagtctgaccagtgaaacctcatctctacttaaaatacaaaatgagccagacgtagtggtacacacctgtaatcccagccacttgggaagctgagacaggtgaatcacttgaattcaggaggcagaggttgcagcgagctgagatcactccattgcactttggcctgggcaacaagaatgaaattccatccaaaacaaaacaaaacaaaacaaaaacactgtatgtttataatatcactttacctgccatatatgacataaaattgttcttcatattatttatctaagattataatttcatatagaatgcttttaaactatgttcagttgaaactgaaaggaacatagtttatagatttgtttccttgatatgccataacatatatttaaacaattattaaatatttactcttaaaaatacttgacttactaattctgtacatttctgcagatataaacgcctcctggaaatgacaataaatatgtgaaatgtatttggaaatgaagacgttggttgccatggagacttaaaaacagatcaactgaaaatggatattctgattaagaagctaaaacagaaggtaattttaaaaaaattatattatcttaaggtctagattacgtgtgtgagatgtgcgggtttgttatataggtaaacatgtgccatggtggtttgctgcacctatcaatccatcacctagatattaagccctgaaggcattagttattgatgttgatgctctccctcctgaccccaacaggccccagtgttttttgttcccctccccgagtccatgtgttcttatagttcagctcccacttataagtgagaagatgcagtgtttggttttttcttcctgcagtagtttgctgaagatatcagcttcgggttcatccatatccttgcaaagagcacgatctcattcatttttatggctccatagtattccatgctgtatatataccacattttctttatcccattatcactgataatgtccacctgggttgattccatgtctttactattgtgaatagtgctgcagtgaacatacaaatgcatgtatctttataatagaataatttatattcccatgtatggtaattttaaatcagttttggtattaaaaatcatgcattttggaaaatattgataatggaaaaacccaaattctgccaaaatatgttgagaaaatagagggwaaatatatcttttcaaactttaaatgcctcaggctcttagttaatcttccccagatctgggaagacctagaaggggagagattgggctaccttaatgagggccatttcaatctcttgtcctgcagcagccatttcaaaatacgtcaaaaaatatatttgggggtaaaatattttgatttccttcagcctcttctctctgtgatgctgcaccagaatcagattagaaaggaagccacattataagtgttaataaaacccatctgatgagatttgatagtttgaagggtgtgtttcccagaccctttagatagaatgtggggccaaagaaaacaaggtcttattcctctatataaatctgtcagtgctttaagcagtgaaagaaagatttttcatttaattttacagacttgaaactaatgaaaaggatagcttgtaaaatataaatctctttttctataaaaaggacatgttgttgattctcttagaccttgaaccctggccagtgatttgaaaccaagcagtacctatctccggatctctagtaccaaattaattcggggtgggggggtaacaggtttattgagaaataatgaacacaccatgcaattcattcatttaaagtatacaattcattaactttagtattttcagagttatgccgtcatcattacaattaattttagaacattttcatcaccctaaaaacaaaccccacatcatttagccatcttcactagttttcccttcctccctcagccctagggaaccacccagcttctttgtatagatttgcctataagcctctgaaataaaaagcaagtggtctgctgggactggcttatttcacttagcataatttttcatgctgcatctgtgctgtagcaggtatggatgccgggtttttgctccttagttcagctacatctgggttcttctctcgtgaccaggaaaaattaagcatgcagacacattgaggagggcagaatttattatgtgaaaggacagctctcagcaaagagaggggtcctgcaaacaggtttccac

SEQ ID NO: 707883 - DNA, 2956 bp, Homo sapiens
catgttattaaacttgtttacataaataaatttcatatatataaatatatgtataacttgaataaaaagtaaaatgaacatttatgttttgatcacagattttttttaaaacaacggaatctgtctttgaagccttgaacacagctacttttctatttatttactgagcacttaatttggttttctgattcgaatcaacatttttctgtcattgcctttctctacatggttttgtgtctctttaattttgttgacattatgtcagcaaagatgtctagatctcttcttcaaagtctttaaatcgtcacacatctctccgcccctttccttttttctaaaactgcctgtttcctttttctcctcaactcagatattaaagatgttttcttctctttttctacattgaaagatctccttgatgctttttgtgtgtacttttttttctctgatagactgtggtcaatgcatatcaaaatgtattttttgtctttttcaaacgtatgtgttttacttttttaacttggttacttatctctgggttatggcttatatttagtaataggttattttacctagcataccaacatggatatgagtagtttatttacaaaaagtgtacagttaggccaggtgtggtggctcacacctgtaatcccagcactttgggagagcaatgtgggtggatcatttgaggtcaagagttcaagaccagtctgaccagtgaaacctcatctctacttaaaatacaaaatgagccagacgtagtggtacacacctgtaatcccagccacttgggaagctgagacaggtgaatcacttgaattcaggaggcagaggttgcagcgagctgagatcactccattgcactttggcctgggcaacaagaatgaaattccatccaaaacaaaacaaaacaaaacaaaaacactgtatgtttataatatcactttacctgccatatatgacataaaattgttcttcatattatttatctaagattataatttcatatagaatgcttttaaactatgttcagttgaaactgaaaggaacatagtttatagatttgtttccttgatatgccataacatatatttaaacaattattaaatatttactcttaaaaatacttgacttactaattctgtacatttctgcagatataaacgcctcctggaaatgacaataaatatgtgaaatgtatttggaaatgaagacgttggttgccatggagacttaaaaacagatcaactgaaaatggatattctgattaagaagctaaaacagaaggtaattttaaaaaaattatattatcttaaggtctagattacgtgtgtgagatgtgcgggtttgttatataggtaaacatgtgccatggtggtttgctgcacctatcaatccatcacctagatattaagccctgaaggcattagttattgatgttgatgctctccctcctgaccccaacaggccccagtgttttttgttcccctccccgagtccatgtgttcttatagttcagctcccacttataagtgagaagatgcagtgtttggttttttcttcctgcagtagtttgctgaagatatcagcttcgggttcatccatatccttgcaaagagcacgatctcattcatttttatggctccatagtattccatgctgtatatataccacattttctttatcccattatcactgataatgtccacctgggttgattccatgtctttactattgtgaatagtgctgcagtgaacatacaaatgcatgtatctttataatagaataatttatattcccatgtatggtaattttaaatcagttttggtattaaaaatcatgcattttggaaaatattgataatggaaaaacccaaattctgccaaaatatgttgagaaaatagagggtaaatatatcttttcaaactttaaatgcctcaggctcttagttaatcttccccagatctgggaagacctagaaggggagagattgggctaccttaatgagggccatttcaatctcttgkcctgcagcagccatttcaaaatacgtcaaaaaatatatttgggggtaaaatattttgatttccttcagcctcttctctctgtgatgctgcaccagaatcagattagaaaggaagccacattataagtgttaataaaacccatctgatgagatttgatagtttgaagggtgtgtttcccagaccctttagatagaatgtggggccaaagaaaacaaggtcttattcctctatataaatctgtcagtgctttaagcagtgaaagaaagatttttcatttaattttacagacttgaaactaatgaaaaggatagcttgtaaaatataaatctctttttctataaaaaggacatgttgttgattctcttagaccttgaaccctggccagtgatttgaaaccaagcagtacctatctccggatctctagtaccaaattaattcggggtgggggggtaacaggtttattgagaaataatgaacacaccatgcaattcattcatttaaagtatacaattcattaactttagtattttcagagttatgccgtcatcattacaattaattttagaacattttcatcaccctaaaaacaaaccccacatcatttagccatcttcactagttttcccttcctccctcagccctagggaaccacccagcttctttgtatagatttgcctataagcctctgaaataaaaagcaagtggtctgctgggactggcttatttcacttagcataatttttcatgctgcatctgtgctgtagcaggtatggatgccgggtttttgctccttagttcagctacatctgggttcttctctcgtgaccaggaaaaattaagcatgcagacacattgaggagggcagaatttattatgtgaaaggacagctctcagcaaagagaggggtcctgcaaacaggtttccac

SEQ ID NO: 707884 - DNA, 748 bp, Homo sapiens
tggtgaaacctcatctctaccaaaaaaaaaaaaaaaaaaaaaaaacccacaaaaagtagcctagtatgatggcgcgcctatagtgccagcttctcaggaggctgacgtgagagaatcgcttgagcctggaaggtggaggtttcagtgagctgcgatcacagcactgcattcaagcctgggtgatggagcgagactgtctcacacacacacacacacacacacacacacgattctgagaaagaagaaaaggcattattgcgactctaaccacaatttttaattagcctctcagctagtagtatctagaatttttatgcacaaaatactataataatcctgaaaagttactttayttaaaaaaaaaaacccacaatttattctgtatacaaatagccaaagacataattgaagctggggagaagaaaccactgaaatttaattctgcttctcaggtttcatatcacataagaaacagatacacatttcttctaagttgttcgacctaatgacataatgctattcataacattttcttatccttttagtgtttatggaatctgtagtaatgtccccatttcatttatgatattgatactttgtagcttgtctcttttttccttgattaatctggctaaagatttttcagttttattaatcttttcaaagaaccagctttttgtgttactaacgtttttatgatatttaaaaataaatattaatgatagaatagtttttgatttatagaaaa

SEQ ID NO: 707885 - DNA, 639 bp, Homo sapiens
tctgtgaatttgatcctgtcattatgacgctagctggttatttcatgtgttaaaagctgctttaaattttgtatttttactttttactgatacataatattttatattttaagggaggtggatgtgatattttgttacatgcataggttgtataatgatcaagtcgggatagttgaggtatttatcactttgattatttattatttctatgtgttgggaataattcaagctactcttttctagctattttgaaatacataatacactgttgtaactatagtcactctactctgctgttgaacaatagaagttgtaccttttatctaactgtatgtttgtacctgttaacctacctctcttcatccctgcttcacccacccacccttctcagcctctagtatctatcatctgtttttaaaagtcctgcccattttttctttctctcctacccctttttccttccttctttccatcartaaagatgtaataagtatcttctctctggtagatactgtaccagatgcttccatatttttttcatcagcccaggtgtttttggtttgttttgttttcctattaaagcttcactgtcaatgatgatggcaaagagccctgaataaagcaccataacagtcgttt

SEQ ID NO: 707886 - DNA, 812 bp, Homo sapiens
caggggaggaagggagggatgaatatgtggagcacagggtatttttaggttaatgtaattttctgtatgatactgtaaggatggagaaagatgtcattatacatttgtcaaaacccacaaaatgtgcaatgcaaagaatgagccctaatgtaagctatggactttagttaataatactatatcaatattagctcttttttttttttttttttttttttttttttagacagagtctcactctgtcacccagtctgragtgcagtggctgcaatcttggctcactgcagcctccatctcctgggctcaagtgattcttctgcctcagcctcctgagtagctgggactacaggcgcccaccaccacgcttgtctaattactgtatttttagtagaagcggggtttcaccatgttggtcaggctggtcttgaactcccgacctcaagtgatccccttgcctcggcctcctgaagtgctgggattacaggtgtgagccactgtgctcagctattggctcattcttaaaacacagaaaaaaatagattaaaatattatcctgaaaaaatatatttattaaccaaaacaaaggtcattgttcccagccacagttctgcttttgaaatattcatttccacaattaccccttggttacttcatgctgcatgaagtgcctgacagcaacctctagaaattttcaagcagatcattttcatattgtgtaacagtaatttgatcactgattcagtaaaactcccaagtctcatcatttttacatttttacattttgattaaataatttcaccatcctaataaat

SEQ ID NO: 707887 - DNA, 1539 bp, Homo sapiens
aaaattgtagttttcattatattcagaaatgacctgtcatagtgaatttttcaataattatatgtctccctaggtttattgctatttgaataacccctattcctattatctcttttcattgttcaaattacctttgtacattgtgatcaagttatcaggtgacaaatcccgcattataattataataatatgcataaatatttagctttgtatttattttactctttcttatttgtaatatctcaagggccttcaaattttagaccaaaagtcaatcaaagtgttttcctaaaatttatgtttctgctttcctccctatttagtttaagaatatataaggaagaataacagtttaacataatttccaaaacttcatgcctgtattgctggattaaatccagtttttcaaatagaaatgagaatattttgcctaatatttataggttggtctttcaaaaatctttatttacaagtataaataaaaattctctgaaaaataatttaaagaaaagagattagatggagcagtttgcaaaccagggagatgcagcctttggtgtaaaatgaggtgtgttccagacaataaaggaagatttatcatttatagaggaagttctggcccagggttcccacttaaggcctgcttatgcaaatgaaggattcaaacttacttagttctaattggataatgcttgctgagttctgattttagacaaagatcacagtgtactggttggtttaggtggcataaacaggaacaggtagctaagaaatcccaaaattaaggacacatgggttttccagtacctcaaggtgtgtgtgtgtgacctctaatcagtaaatggccacttaggtccagtttgaatctaggccactcaagattcatcttgagagattggctccctcagcgttcacacaaataaaatgagaagatagcttttattttcaccactaagtttaaaataataagccagataaatgtttcataaaataattttgaagcattttctccaggagcttgaaagttttatattaaataagaatttgttctttctcacttgttcagtggagttaatttttcaagctatgaaaaatgcagtggctcatgcctgtaatcccagcactttgggaagccaaggcaggtggattgattgagctcagaagttcagaccagcctgggcaacatggtgaaaccctgtctctacaagaaatacaaaaattagccgggcagtggtggcaccggcctgtagtcccagctactcacgaggctgaaacaggagaacacttgagccgggaaggcagaggaggttgcagtgagcagagatggtgccactgcactaaagcctcggcgatgggagtgaaatatactcactcactcactcactctctttctctctctctctctgtctccctctgyctctgtctctctgtctctctctttctctctctctccatatatatacatataaaaaaatgatggcgatgatagtgaacatatttaaatgaaatttttgtttcactcaaaagttttgatttcaa

SEQ ID NO: 707888 - DNA, 939 bp, Homo sapiens
gagactgcaactgtcaacagattcaatatcttttttcagaaggctggaaaatgaagggaataatagagataaaatcagcttagcttcagtgggaaaaaaaaaacaaaactttttttttaaaacggagaaaacataagtttatagttcaagcatatagagccaatgaaagaagaaaggttgaagackcaatatttatttcactttcttgggagagcaggtagaaaaacgggaagatttggagactataacattaattttactatttgtagctctttaccaaagttttttcattttttagaatttcttgtaggcctttatgcaggtgtgacagcattaagaaatcaaactttgccttttaatggtaaaattttcttaacaaacagtatttgatattatatgtatgtaagtcataaatgcactggcctatcttatgacttgactttattgctacttggtgtgttgatagaccaaatattatagaagttgtggtttaaattcctactttgaggcttaaacatggaaatctttgtataacaaagattaaatacaaaacaaaattacatattgaatttcaaaataaaaattcaatgactgttaattgctattaatattataaatattatttcatgtatctccaaaggcagaaatacaatacaaataatattataaaaaagtaagaattactttaattgttgcacaaatttttcaaatttggaggctcaaataatggttctaacatattcactggtaaaacgagtcaagttaagaaagatattatgaattaattgtgcctagatttaatgatattatttattaggtaagaagaaattactgaactatcatgaaacagcctactgggctgcatgtactttgttcagtacttggttcatactctcttcttaaatggcatatttcatcctcatctctaaaagaaaaaaa

SEQ ID NO: 707889 - DNA, 887 bp, Homo sapiens
tctttataactgtgatctaactggaaggacttctcacttgtattttgtttctccacatttttcaccactgcagaaccattcatccacccaaagtcaaacattaaatggactagagtaatatttaaattaaaatagaaacatcgccataaagttttaaaatacaattatgatttttaaattgcattatccaaagtgggacatcatagcatgcaatgtctcaagtttcagtaacttaacgtttactgatcatgtagtaggcaggtccccttagaatccatgacccccgtacattcttattatggcataattttaaaagggtatgttatgtacgaactaattaaaagtgaattgggccaggcacagtggctcacacctataatcccagcactttgggaggctgaagcggatggatcacctgaggtaaggagttcgagaccagcctagtcaacatggtgaaactcagtctctatcgaaaagtacaaaaattagctgagtgtggtggcacgygcctgtagtcccagctactggggaggctaaggtgggggaattgcttgaagcctgggaggcagaggttgcagtgagtcgagatcgtgccactgcactccagcctaggcaacagagtgagacactgtcaaaaaaaaaaaaaagtgaattgcatatggttaatatgatgttatagcttcataaaaggaagtcttccctgggtggataggtcagtgtgtgtgtgtctgtgtgtgtgtgtgtgtgtgtgtgtgtgtgtacacatatgtgtagtcagtacactataatgaatagtaatagtctgaactgacaaagaaatgtttattgcagctttatttacaatagtaaaacaaataacatatataaccaacagtagaaaaataaat

SEQ ID NO: 707890 - DNA, 1954 bp, Homo sapiens
caccttctatttttctcaacatttgtagaattctctgaatagaggtaatacacatttttcattatatgtgcacttcatacctccagtaatattgtaaattcttatttcctaatatgtttcgctggtataaaagatgcaattaagttttatatactgaccatgtatccaccaagcatgataaacttattagtttaaactatatataaattattttgggttctctacgtgaattaatcatgttttaccaaataactaggatttctgctttcatttctaggtcttatatctttttattcttctttccttactacatacttgttatttctgactatgtgctagaccctattttgtaaaactttagatataatttaagtccagattattttatcattctccaaagaaaactcacttgcttctgctaagcatctgagaaaaccagcaatccagatgtattaatccaatttcaggattctgtctgaagattttctgaaccaaaattatgactgcactgtcttgactcaatttctaacaaaaattctcatctcaattgtagaaccattaggtaatggttctaccccatctaccccatctaaaccaatcccccacagataccaaggaatgactgtatatacttatttatactgtaacctaggcaaaaatcatttgaggtagagttcacaaaaatatcctttagcacaatgggtgacagggatcaaatattcaataaaatataaatgactatgaacttcaaagaaggaaatccatacagaaacagtagctccatcattaccatcaggtaaaagttttggttaggcaatttaattagttatcctttttaatgcaatggctaggtaaatatattcatatgctctatacagattacagacatgtacatcattatatatgcatagagttggacttccatatctgtggtttctgcttccacaaattcaaccaacaatagatcaaaaacagtaattttaaaaatataacaacaaaacaatacaaacaaaaaatacagtataacaactatttatatagcatttacattgtatttgatactattaatataagcaatctaaagatttgaagtatacaggaggatgcacataagttatgtgcaaatactgccattttatatcaagggcttgagcatctgtagattttagtatccatattgaggcctgaaaccaatcccccacagataccaaggaatgactgtatatacttatttatactgtaacctaggcaaaaatcatttgaggtagagttcacaaaaatatcctttagcacaatgggtgacatggatcaaatattcaataaaatataaatgactatgaacttcaaagaaggaaatccatacagaaacagtagctccatcatttatcagtgaggaaaagtgtatccaaataagaaagtgcctagaccactttttccacaattatggcttcatatgtcttgattacaacataaagattcaataaactgggactggtatatcataaccaccctctcccagtgaaataatgatgaaagaaacaagacacacagtatatccaacagtaatcctcatacaagataacttaggagacacactgtagacatctcaactactaccctataatgaggattcaagagaaagtccactgctccaaactaccaactctgtgctattattcttctcctctgtgagtccttattttcaaaatttcaacttttatgttagatacagggggtatatgtgtrgtactattacctggctatattgcttgatgctgacatttggggtatggatcctgttacccaggtggtaaatatagtatccaacaggtagatttttccacccatgcaccctcactcccttcaccgtctagtagtccacagtgtctactgctcctacgtttatgtcgatgggtacccaatgtttagctctcacttataagtgagaacatga

SEQ ID NO: 707891 - DNA, 937 bp, Homo sapiens
cagtacatcccagcaatattaatgtttgtagattaaaactgattcccatttattccattctacacatttgtttaactaatttactttaccagtccttattaacagacattctcattccttgttacttctttcctaaaatatgctaatagtttctttgcagactatttcctctcatcactttgccaagctcaactctgacttctctaaaaccctcaatagcccctaatggcctttgtctgttcaaaaggcgatataaccaagtggtcaagtgtatgggttctgaggtaggataaccctgtgctcaaaccctagctctcctccttatgaatccctaagcctcagtttccttaccttccaaaatgaaggtatctattttcactcagtattgagcgaaagagaaagaggggccagccgggagggggcaggattgagcagcggttaagagcatcagggacaagactagctgtagtcaaatcctggccctaccacttactcgggaaaatacttaatctttacgtgcccgagtttcctcatctacaaaaaataaatacggatagttattgtctatgcttcatgggrttttaggcagactaaataaacttattcatgaaaagcatttagaactgtgcctcgcacacggtaggcacttactaaatatgagcatcaggtcaaattgaaggggctatgttgtctgagatataaactcagggtttgtcctcgcgtgccgggaaagtttaggacacagacacacaggaggagtttaggagcggacgttcaataagtagaagaaaagaaaaagagaaacagcttcctctatagaggaaggggtctcagaggggtggggaccggctgctggtgaatgcgctgagttctatagtccagtttgaggaggcggtgtctgatttacctagggctcacagattggttcgataaggca

SEQ ID NO: 707892 - DNA, 1079 bp, Homo sapiens
aaggctactctatctcagtctctctctctctctctttctctttctctctctctctctctatatatatatatatgtatttttttttctttgagttggagtctcgctctgtcacccaggctggagtgcagtggcgcgatctcggctcactgcaacctctgcctcctgggttcaagcaattctcctgcctcagcctcctgagttgctgggactacaggcacgtgccaccatgtctcactaatttttttgtatttttagtagagatggagtttcacattggccaggccggtctcgaactcctgacctcaagtgatccacccacctcggcctcccaaagtgcttggattacagatgtgagccaccgtgcccagccagaaaggctactatattatatagctttgtggtagactcctgtgggcctcttagatttaacaaaggtaagaattcccacttaattatttgaaaaaacatttcacttttattaaaaatactgctgtttgaaaaaggtgcttctccagtggcattcagtattggtggcctggcatggtgggtactacccaatgaagactgtactatatatttataggccatacttatgaacacgtgtatatatatttatataagatctacctatctaggatggaaactcgggtgaaaataaaatagggtgaaggtaaaaagtacgtagcacttccagttgtgagccaagattgtaactagagagcagccaggagcttcctgtcagtaaccrtgttttcaataaatactctctcatgtacaacaaataaataaaaagctgctgctcatatctgaaatgttctcaagtgaaactgatgtcaggaatttattttcccttgcctaatcttacaggattaaaatttgggttattggctgggcgtggtggctcacgcctgtaatcccagcactttgggaggctgaggcgggtggatcacgaggtcaggagagccagaccatcctggctaacacagtgaaaccccgtctctactaaaaatacaaaaaattagccaggcatggtggcgggtgcctgaagtcccagctacttgggaggctgaggcaagaga

SEQ ID NO: 707893 - DNA, 1079 bp, Homo sapiens
aaggctactctatctcagtctctctctctctctctttctctttctctctctctctctctatatatatatatatgtatttttttttctttgagttggagtctcgctctgtcacccaggctggagtgcagtggcgcgatctcggctcactgcaacctctgcctcctgggttcaagcaattctcctgcctcagcctcctgagttgctgggactacaggcacgtgccaccatgtctcactaatttttttgtatttttagtagagatggagtttcacattggccaggccggtctcgaactcctgacctcaagtgatccacccacctcggcctcccaaagtgcttggattacagatgtgagccaccgtgcccagccagaaaggctactatattatatagctttgtggtagactcctgtgggcctcttagatttaacaaaggtaagaattcccacttaattatttgaaaaaacatttcacttttattaaaaatactgctgtttgaaaaaggtgcttctccagtggcattcagtattggtggcctggcatggtgggtactacccaatgaagactgtactatatatttataggccatacttatgaacacgtgtatatatatttatataagatctacctatctaggatggaaactcgggtgaaaataaaatagggtgaaggtaaaaagtacgtagcacttccagttgtgagccaagattgtaactagagagcagccaggagcttcctgtcagtaaccatgttttcaataaatactctytcatgtacaacaaataaataaaaagctgctgctcatatctgaaatgttctcaagtgaaactgatgtcaggaatttattttcccttgcctaatcttacaggattaaaatttgggttattggctgggcgtggtggctcacgcctgtaatcccagcactttgggaggctgaggcgggtggatcacgaggtcaggagagccagaccatcctggctaacacagtgaaaccccgtctctactaaaaatacaaaaaattagccaggcatggtggcgggtgcctgaagtcccagctacttgggaggctgaggcaagaga

SEQ ID NO: 707894 - DNA, 473 bp, Homo sapiens
aaaaaaaaaaaawaaaaatatatatatatatattctggctaaacatatggataaatattagaaatagaataaataaaaaatgttcactttatgtctttttttttttttttgagacagggtcttgctctgtcactcaggctggagtgcagtggcatgatcatggctcactgcagcctcgacctccaggctcaagcaatcctcccacctcagcctccctattgggtgggaccacaggcttgtgctgccgtgcctaatttgtctttttttcttttctttttattttttatgtttatttttttttgagacagagtttcagtcttgtcacccaggctggagtgcaatggtgcaatctcagctcactgcaacctctggctcactgcaacttccacctcccgggttcaagtgattctcctgcctcagcctcccaagtagctggaattacaggcgcctgccaccatgcctagctaattttt

SEQ ID NO: 707895 - DNA, 473 bp, Homo sapiens
aaaaaaaaaaaaaawaaatatatatatatatattctggctaaacatatggataaatattagaaatagaataaataaaaaatgttcactttatgtctttttttttttttttgagacagggtcttgctctgtcactcaggctggagtgcagtggcatgatcatggctcactgcagcctcgacctccaggctcaagcaatcctcccacctcagcctccctattgggtgggaccacaggcttgtgctgccgtgcctaatttgtctttttttcttttctttttattttttatgtttatttttttttgagacagagtttcagtcttgtcacccaggctggagtgcaatggtgcaatctcagctcactgcaacctctggctcactgcaacttccacctcccgggttcaagtgattctcctgcctcagcctcccaagtagctggaattacaggcgcctgccaccatgcctagctaattttt

SEQ ID NO: 707896 - DNA, 473 bp, Homo sapiens
aaaaaaaaaaaaaaaawatatatatatatatattctggctaaacatatggataaatattagaaatagaataaataaaaaatgttcactttatgtctttttttttttttttgagacagggtcttgctctgtcactcaggctggagtgcagtggcatgatcatggctcactgcagcctcgacctccaggctcaagcaatcctcccacctcagcctccctattgggtgggaccacaggcttgtgctgccgtgcctaatttgtctttttttcttttctttttattttttatgtttatttttttttgagacagagtttcagtcttgtcacccaggctggagtgcaatggtgcaatctcagctcactgcaacctctggctcactgcaacttccacctcccgggttcaagtgattctcctgcctcagcctcccaagtagctggaattacaggcgcctgccaccatgcctagctaattttt

SEQ ID NO: 707897 - DNA, 473 bp, Homo sapiens
aaaaaaaaaaaaaaaaaatatatatatatatattctggctaaacatatggataaatattagaaatagaataaataaaaaatgttcactttatgtctttttttttttttttgagacagggtcttgctctgtcactcaggctggagtgcagtggcatgatcatggctcactgcagcctcgacctccaggctcaagcaatcctcccacctcagcctccctattgggtgggaccacaggcttgtgctgccgtgcctaatttgtctttttttcttttctttttattttttatgtttatttttttttgagacagagtttcagtcttgtcacccaggctggagtgcaatggtgcaatctcagctcactgcaacctctggctcactgcaacttccacctcccgggttcaagtgattctcctgcctcagcctcccaagtagctggaattacaggcrcctgccaccatgcctagctaattttt

SEQ ID NO: 707898 - DNA, 608 bp, Homo sapiens
ttttttaaaagaattttggccaggcatggtggctcatgcctgtaatcccagcacttggggaggctgaggcagggagatcatgaggtcaggagttcaagaccagcctggccaatttagtgaaacaccatgtctactaaaaatacaaaaattagccacacatggtggcatgtgcctgtcatcacagctacttgggaggctgaggctggagaatcgcttgaacccaggaggcagaagttgcagtgagccaagattgcgccactgcactccagcctaggcgacaagagcaagactccatctcaaaaaaaaaaaaaaaaaaaaraattttgctgactagggagtcacagaaaagtggacccaatgagaatccacagctggtccagagttttataataaattacatatcttttcagcattagctgatatgtaactagatgtagctttccttcaataaccgtatcatctagctaatttgaggtatgagagtcgtaaattggaatatactgtcaacctaaaaggaagaagctgagccgaaactaaaactaatataagtagagagtttatttgcaccaagcctgaggactgcaacccaggagcatagattcaagttg

SEQ ID NO: 707899 - DNA, 666 bp, Homo sapiens
cagcgtcacctaatatactcatgaacaaacctgcacatgtaccctctgaatttaacataaaagttgaaattataaaaaataaataattaaaatgttaaaaaattttttgaagaatcctgcttttgcattctagaacttttcagaaaccgcagcagaggttcattttgtccaggcttggtgtaaattagcatcaaatagatggactgaattgctccattttggtgtggacagttatcaagagcttggaaaagaagtctgtgcacaagagcctgcaatatgccaagagtcagtcagctgagaagatcttttgtaaatatatacttcgctatgcagaatttcttttagagataccrgactacttggaataaaggagatgtatctgggcctccacttcaaactcaaaacaagatctcattcaaacactaaaaatatttggccaagcttgttcctaataatgcctctggattttgagatttgggcctgtcagatcataaacaacagtgattaagtatccactaggtacaatgtgtaagtgagattggggttctagggggaggtacaagaaaagcttatgatatggtccttcacctctgagagcttatggcccagtggaaaaaggactaccacataattgcttacaagaaatgctggactagagcatgcttt

SEQ ID NO: 707900 - DNA, 661 bp, Homo sapiens
tttagattttagtatatgtttaaatagatcatactgatgttgccatgtcgtcatggcagtgcaatcaaggagagyctgatgatttctccccgaaaggtcaatagagctttactctttatccattaaagaccaaccatcatacataggagagctgacttgatttttgagtgttgttaacattagtattttttaaagtacctttttggatagaggttttaaaaaaactaacatgcaaattatgtaatatataatttaaccccttttatgattcagaagtatccatttcagctcacaaaaaatttaagctctccctctccctctccgtctccctctccccacggtctccctctctctctctttccacggtctccctctgatgccgagctgaagctggactgtactgctgccatctcggctcactgcaacctccctgcctgattctcctgcctcagcctgccgagtgcctgcgattgcaggcgcgcgccgccacgcctgactggttttcgtattttttttggtggagacggggtttcgctgtgttggccaggctggtctccagctcctaaccgcgagtgatccgccagcctcggcctccggaggtgccgggattgcagacggtgtctggttcactcagtgctcaatggtgcccaggctggagtgc

SEQ ID NO: 707901 - DNA, 661 bp, Homo sapiens
tttagattttagtatatgtttaaatagatcatactgatgttgccatgtcgtcatggcagtgcaatcaaggagagcctgatgatttctccccgaaaggtcaatagagctttactctttatccattaaagaccaaccatcatacataggagagctgacttgatttttgagtgttgttaacattagtattttttaaagtacctttttggatagaggttttaaaaaaactaacatgcaaattatgtaatatataatttaaccccttttatgattcagaagtatccatttcagctcacaaaaaatttaagctctccctctccctctccgtctccctctccccacggtctccctctctctctctttccacggtctccctctgatgccgagctgaagctggactgtactgctgccatctcggctcactgcaacctccctgcctgattctcctgcctcrgcctgccgagtgcctgcgattgcaggcgcgcgccgccacgcctgactggttttcgtattttttttggtggagacggggtttcgctgtgttggccaggctggtctccagctcctaaccgcgagtgatccgccagcctcggcctccggaggtgccgggattgcagacggtgtctggttcactcagtgctcaatggtgcccaggctggagtgc

SEQ ID NO: 707902 - DNA, 1488 bp, Homo sapiens
gattagacatttttaratgtgctcattaatttgcaacccattctgctcaggaattttagaatagctcttgatatttagtgaatggtgaagttatgtaagaaaaaaaatgctgatcaaaatcgaccctactagaatttatttttattgctctctcttctgccacttgctatagatgctgagcttggaacaggcacatcatcttgagtatggaaaaatggctgctaaagcagacatattccaggattattttaaattttattgtctttgtgaaggatgtacaaaatatgaagctttaacatcaaataagtcacttattatattaatattgaataataattttcaaaggaccataagatattgatgacatcctcctgttaaaaaggcttttgtgattcaaaacactgaaattttaccattcatcactttgagatgccaacttcaaagattaagaaatcctcctcattgcccttaagtatgggataaaaatactatttaaaaatagaaatgtataatttttatactgtgaaaatttagaagtacatattctgagctaataattggtagcattttatgtaccattacctacaagacattataggaaacactttgtgaatcactattttgattgcttggatgttgtcacagataggataaactgaaataaacattgagcaatttatgaggactagtgaaaaaaatatctttttggaattaatagaaagaaataagagtatttaccaaatgatcttgcagtcaactttgtggttataggatgcttaaaatctacatctgaaaagcatattaaaattgagtgctctcattttgtgtactaagcccttctgcttcatttaattatttgtacttacattttaactttgaaattattctttcattcattcattagatttcatgtatcattgaatgctccaattatttcttcttcacttcgtcaaatgtcacttaatgattaacatattgacctagtcaatgataatacttactgaccactatgtggtaaaaacgttaaaaatataaaattggtcaagaaggtgtatcaaatattacaaatgtactactttcactcaaatgcatgatattgcttttactgcacactctggcatttttgttgtcgttgttgtccctatactggatatctacaggaactagtccagacattctgacacatctgcaaacctgaatgtggaaagagttaacagcccatgaggatctcatgttttaatctcttgccacttttaagttcttgaataaatgatcatttattttaagcttattttaaatggaaaacaatctgtatttcaattcatattcttaactcctgcttaatttattacgattgtcaaactcataatctagttatttatcttatctgtattcccaccagacctcatatggaaataaactccaaggtggcaagatattagtctttttgttaatttttgtctccttactgcacagaaaatttcctgg

SEQ ID NO: 707903 - DNA, 1488 bp, Homo sapiens
gattagacatttttagatgtgctcattaatttgcaacccattctgctcaggaattttagaatagctcttgatatttagtgaatggtgaagttatgtaagaaaaaaaatgctgatcaaaatcgaccctactagaatttatttttattgctctctcttctgccacttgctatagatgctgagcttggaacaggcacatcatcttgagtatggaaaaatggctgctaaagcagacatattccaggattattttwaattttattgtctttgtgaaggatgtacaaaatatgaagctttaacatcaaataagtcacttattatattaatattgaataataattttcaaaggaccataagatattgatgacatcctcctgttaaaaaggcttttgtgattcaaaacactgaaattttaccattcatcactttgagatgccaacttcaaagattaagaaatcctcctcattgcccttaagtatgggataaaaatactatttaaaaatagaaatgtataatttttatactgtgaaaatttagaagtacatattctgagctaataattggtagcattttatgtaccattacctacaagacattataggaaacactttgtgaatcactattttgattgcttggatgttgtcacagataggataaactgaaataaacattgagcaatttatgaggactagtgaaaaaaatatctttttggaattaatagaaagaaataagagtatttaccaaatgatcttgcagtcaactttgtggttataggatgcttaaaatctacatctgaaaagcatattaaaattgagtgctctcattttgtgtactaagcccttctgcttcatttaattatttgtacttacattttaactttgaaattattctttcattcattcattagatttcatgtatcattgaatgctccaattatttcttcttcacttcgtcaaatgtcacttaatgattaacatattgacctagtcaatgataatacttactgaccactatgtggtaaaaacgttaaaaatataaaattggtcaagaaggtgtatcaaatattacaaatgtactactttcactcaaatgcatgatattgcttttactgcacactctggcatttttgttgtcgttgttgtccctatactggatatctacaggaactagtccagacattctgacacatctgcaaacctgaatgtggaaagagttaacagcccatgaggatctcatgttttaatctcttgccacttttaagttcttgaataaatgatcatttattttaagcttattttaaatggaaaacaatctgtatttcaattcatattcttaactcctgcttaatttattacgattgtcaaactcataatctagttatttatcttatctgtattcccaccagacctcatatggaaataaactccaaggtggcaagatattagtctttttgttaatttttgtctccttactgcacagaaaatttcctgg

SEQ ID NO: 707904 - DNA, 1488 bp, Homo sapiens
gattagacatttttagatgtgctcattaatttgcaacccattctgctcaggaattttagaatagctcttgatatttagtgaatggtgaagttatgtaagaaaaaaaatgctgatcaaaatcgaccctactagaatttatttttattgctctctcttctgccacttgctatagatgctgagcttggaacaggcacatcatcttgagtatggaaaaatggctgctaaagcagacatattccaggattattttaaattttattgtctttgtgaaggatgtacaaaatatgaagctttaacatcaaataagtcacttattatattaatattgaataataattttcaaaggaccataagatattgatgacatcctcctgttaaaaaggcttttgtgattcaaaacactgaaattttaccattcatcactttgagatgccaacttcaaagattaagaaatcctcctcattgcccttaagtatgggataaaaatactatttaaaaatagaaatgtataatttttatactgtgaaaatttagaagtacatattctgagctaataattggtagcattttatgtaccattacctacaagacattataggaaacactttgtgaatcactattttgattgcttggatgttgtcacagataggataaactgaaataaacattgagcaatttatgaggactagtgaaaaaaatatctttttggaattaatagaaagaaataagagtatttaccaaatgatcttgcagtcaactttgtggttataggatgcttaaaatctacatctgaaaagcatattaaaattgagtgctctcattttgtgtactaagcccttctgcttcatttaattatttgtacttacattttaactttgaaattattctttcattcattcattagatttcatgtatcattgaatgctccaattatttcttcttcacttcgtcaaatgtcacttaatgattaacatattgacctagtcaatgataatacttactgaccactatgtggtaaaaacgttaaaaatataaaattggtcaagaagktgtatcaaatattacaaatgtactactttcactcaaatgcatgatattgcttttactgcacactctggcatttttgttgtcgttgttgtccctatactggatatctacaggaactagtccagacattctgacacatctgcaaacctgaatgtggaaagagttaacagcccatgaggatctcatgttttaatctcttgccacttttaagttcttgaataaatgatcatttattttaagcttattttaaatggaaaacaatctgtatttcaattcatattcttaactcctgcttaatttattacgattgtcaaactcataatctagttatttatcttatctgtattcccaccagacctcatatggaaataaactccaaggtggcaagatattagtctttttgttaatttttgtctccttactgcacagaaaatttcctgg

SEQ ID NO: 707905 - DNA, 1488 bp, Homo sapiens
gattagacatttttagatgtgctcattaatttgcaacccattctgctcaggaattttagaatagctcttgatatttagtgaatggtgaagttatgtaagaaaaaaaatgctgatcaaaatcgaccctactagaatttatttttattgctctctcttctgccacttgctatagatgctgagcttggaacaggcacatcatcttgagtatggaaaaatggctgctaaagcagacatattccaggattattttaaattttattgtctttgtgaaggatgtacaaaatatgaagctttaacatcaaataagtcacttattatattaatattgaataataattttcaaaggaccataagatattgatgacatcctcctgttaaaaaggcttttgtgattcaaaacactgaaattttaccattcatcactttgagatgccaacttcaaagattaagaaatcctcctcattgcccttaagtatgggataaaaatactatttaaaaatagaaatgtataatttttatactgtgaaaatttagaagtacatattctgagctaataattggtagcattttatgtaccattacctacaagacattataggaaacactttgtgaatcactattttgattgcttggatgttgtcacagataggataaactgaaataaacattgagcaatttatgaggactagtgaaaaaaatatctttttggaattaatagaaagaaataagagtatttaccaaatgatcttgcagtcaactttgtggttataggatgcttaaaatctacatctgaaaagcatattaaaattgagtgctctcattttgtgtactaagcccttctgcttcatttaattatttgtacttacattttaactttgaaattattctttcattcattcattagatttcatgtatcattgaatgctccaattatttcttcttcacttcgtcaaatgtcacttaatgattaacatattgacctagtcaatgataatacttactgaccactatgtggtaaaaacgttaaaaatataaaattggtcaagaaggtgtatcaaatattacaaatgtactactttcactcaaatgcatgatattgcttttactgcacactctggcatttttgytgtcgttgttgtccctatactggatatctacaggaactagtccagacattctgacacatctgcaaacctgaatgtggaaagagttaacagcccatgaggatctcatgttttaatctcttgccacttttaagttcttgaataaatgatcatttattttaagcttattttaaatggaaaacaatctgtatttcaattcatattcttaactcctgcttaatttattacgattgtcaaactcataatctagttatttatcttatctgtattcccaccagacctcatatggaaataaactccaaggtggcaagatattagtctttttgttaatttttgtctccttactgcacagaaaatttcctgg

SEQ ID NO: 707906 - DNA, 320 bp, Homo sapiens
cattttattttggttgaagaataaatatgtttttatgtgtgaaaggtttgtrtgtatacattaaacacattttgatacgtgtttgtcttatttccccagcatgctgaaaattttgtaagggtagaaatgggatctcttcggccgggcgcagtggctcacgcctgtaatcccagcactttgggaggccgaggcgggcggatcacaaggtcacgagttcgagaccagcctgcccaatagggtgacaccccctctctactaaaaatacaaaaattagctaggcgtggtggcacgtggctgtagtcccagctactcaggaggct

SEQ ID NO: 707907 - DNA, 320 bp, Homo sapiens
cattttattttggttgaagaataaatatgtttttatgtgtgaaaggtttgtatgtatacattaaacacattttgatacgtgtttgtcttatttccccagcatgctgaaaattttgtaagggtagaaatgggatctcttcggccrggcgcagtggctcacgcctgtaatcccagcactttgggaggccgaggcgggcggatcacaaggtcacgagttcgagaccagcctgcccaatagggtgacaccccctctctactaaaaatacaaaaattagctaggcgtggtggcacgtggctgtagtcccagctactcaggaggct

SEQ ID NO: 707908 - DNA, 1305 bp, Homo sapiens
agtataagcaatggaaggagatgtacgtagcctctcttaaaaagcaccaagaagaccagcacagcacttagaacttcagcccttaataaatatggtattgatatgaatagcaagaagaaggaatcgcttagagagagtgttgttttactggcaggtaaaagctcagctgaattattcggtttagttctctgatcttcaaactagagaaggtgttcatggtggacttaggagttagctattgcaaatgtgtttatctccaggtccagataaaccatttcccagatgaaagaacttaaagctagaataggaaaacctctgaatgtgagctttaaatgaatttcagaatgggaaaattgtcagaaaacaggacataagcaaatattattcttattttcaaaaatgaggaagagtacattctggaaaccagattataagtgagacattattccccagtataatttgagcattattattaaacatatggtttatacatatttagagaagaaacatatcttttacaaacctggagaaattcataaagatgtagtttatttcaaactaactgcatttcctattttgagagagtcattaaattactcataaagagtatgttcaaatttaatgagtcttgatttaaaggtgtctaaaagattcgctagtctcctttcagacaaggtggataagtatgggttaaatattatgtttattgtgtttgtatctggttggactgatggtctcgaaaactggcaattttgctccctgttcactcggtttccaccagcatgatgcatgagttggccctgggtagcttaccatgttcacccatgaccttaatgaaagcataaaagcagtgctttgcaaatgcaaatgacaaaaaaattgtaaatgatagcaaacagactacacaagtgttgtcaaggccaccatacatcttattccctttacaaataccttaaatttctttcccagtcctgaagcyctgatcataaggtatgcacagatttactaagaagctttgatgacccattgtgtttttgcattgactgaagccagtccatggatcccaggttaaggcccctggtcctttatgctaggagtgagaaatataccacaggagtttataagtagctcacagtggagtgggagaggcaagacatgaaaacagttttagaacacagtagtctataatgaggagttcaaaagggaagaaaccaatgttgttagaattaagcagcaggtttaggctttctgtatggagccccagatttactgggcagctgccagtaacattcagcgtcatgagtg

SEQ ID NO: 707909 - DNA, 1043 bp, Homo sapiens
cttcacagccatccccattgggtgggtcttgaccatctcctgccattatcttggacacgcacctaactgcggccgcactgaatgctgcaccttcctcttttccatccccattccttcccacgcaagctgatcactctgtgatgtcttcattccagaaacagctctatcattgcctttgtccaccctcccaggcagtggctgtcagtcaccctccccagcctccctcagcaccctgcacttaaccctgttatgwcacaggtgactttgttttgtaataattgttggcagttatgtcctgccaactgcactgtgagtggctggggagcaggagccttgcccaattattttgacatccagagggtcccacgcagcgtctggtacagcatccaaaggatgtatcacttttttcttcttaattctaagattgttatagattttccaaagagatatgttcttgagcctacagttctggaggtgcaattagaggtgaaatatggggcggggctggggggctgaagagggatagaatttgtactgtggatgttcacagaaagaacactttgaaggtgctcagttccattcccttggctttttctgtttcaaaatggtagtgattacctgagttgtgggtcactgtacaggcatttgaaagttggctcttaatgatgtggcatcctgaagtcccctcatctgtagtctacagatggcttgtgatcagctgttcctggaagaacttcagcaatgaattttaaaaggcagtctttttccaacactgtcacttaaaggttctattctttccagatgttggctcaattaaaggcagcccttagatgacagtaacttgtcaggggaggtcaggatttgggatcgtttggcagcccatttctccagaacaaacatcatagtcaatgcccttttctttgtaacatgaaagaaacaagatcaatgattgttcaggtttgctatttcaaagagagtgagagggaacaatagcctagcagttttaaaatcaactgtatccctctcaaaatcatagaggagtg

SEQ ID NO: 707910 - DNA, 1043 bp, Homo sapiens
cttcacagccatccccattgggtgggtcttgaccatctcctgccattatcttggacacgcacctaactgcggccgcactgaatgctgcaccttcctcttttccatccccattccttcccacgcaagctgatcactctgtgatgtcttcattccagaaacagctctatcattgcctttgtccaccctcccaggcagtggctgtcagtcaccctccccagcctccctcagcaccctgcacttaaccctgttatgacacaggtgactttgttttgtaataattgttggcagttatgtcctgccaactgcactgtgagtggctggggagcaggagccttgcccaattattttgacatccagagggtcccacgcagcgtctggtacagcatccaaaggatgtatcacttttwtcttcttaattctaagattgttatagattttccaaagagatatgttcttgagcctacagttctggaggtgcaattagaggtgaaatatggggcggggctggggggctgaagagggatagaatttgtactgtggatgttcacagaaagaacactttgaaggtgctcagttccattcccttggctttttctgtttcaaaatggtagtgattacctgagttgtgggtcactgtacaggcatttgaaagttggctcttaatgatgtggcatcctgaagtcccctcatctgtagtctacagatggcttgtgatcagctgttcctggaagaacttcagcaatgaattttaaaaggcagtctttttccaacactgtcacttaaaggttctattctttccagatgttggctcaattaaaggcagcccttagatgacagtaacttgtcaggggaggtcaggatttgggatcgtttggcagcccatttctccagaacaaacatcatagtcaatgcccttttctttgtaacatgaaagaaacaagatcaatgattgttcaggtttgctatttcaaagagagtgagagggaacaatagcctagcagttttaaaatcaactgtatccctctcaaaatcatagaggagtg

SEQ ID NO: 707911 - DNA, 2032 bp, Homo sapiens
caaatctatttttgtggttccttacttaggttttgttctccatccacttcatttctctcaccacctacacacatgcgcacacacacacacgcgcgcgcgcatgaatgtaagtcccatgaggacaaggattcttatgtcttattaaccacttattcctagtaactaaaagagtgcctggaatatagtagatgcttaataaatatactttgattacatgaatattatatgttgttaaatgtttcaaattataaagaactcaaacctctgggatttgaaagatctttctacacctttagatattctagcagaatcacgttgtgttagtggtttcagaatggaaaagatttatatcttttaccttcctgatgtcactcggattcgttcctcacaactacaattcacatcttccatcttctcatggaagtatttttccacgcactgctcctcaaaatcatgaagttttttcagatcctccttactgaggtagagttctatagaaataagtatgaaacacagaaagaatcattattcacctcagggcatgagtggcttttcttccacttgtattgaaaatgagaaactatagcctgttgtgataagtttgtcaccttgtcaaactatttctaatattaatgcagaaacagcaccaataaacaactgggagctgggcgcagtggytcacgcttgtaatcccaacacttttggaggctgagcaggggtggatcgcttgagctcaggaattagaaaccagcctgggcaacacaggcagaccctctctctacaaaaaaatttcaatattagctaggcgcctgtggtcccagctacacaggaaactgaggcagaaggatggcttgagcctgggaggtcaaggctgcaggagctgtgatcacgccactacactccagcatgggctaaaaagcgagaccctgtctcaaaaaaggaaaagaaaagaaagaactggaaacaccagcctgggtctctcctactcattctttgaaaatgactcatatatagaattctttctcttcaatattttcacaggttagaatgctttcacatttaagaaaaattcactgcgtttatatgaaaatggggaatctgtcttcttttctctctgccaacactttctaaaattaattaaattttaattgattcatattagatgtacctatttttgagatacatgtgataatttgatacattcatataatcacatcagggcaattggtggcacaagcctgtagtcacagctactcaggaggctgaggcagatctccttaaatatttacctgtcctttaagatagaaacatttgaattattctcttctagctattttgaaatgtataatcaattaattttaactgtagtcaacctactgatggcagggcatggtggctcacacctgtaatcccagcactttgggaggccgaggtgggcagatcacttgaggtcaggagttcaagaccagcctggccaacatggtgaaaccctgtctctactaaaaatacaaaaattagctgggtatggtggtgcatacctgtgattccagctacttgggaggctgaggcaggaggatcacttgaacccaggaaacagaggtagaagtgagctgaaatgacaccactgcactccagcctgggcaacagagtgagactccatttcaaaaaaaccccaaaaaacaaaaaggctctctttataaaatttagtcaattcccatctcttatgtatatccaagctttccatttccatattaggtcttgccatggtgaaaatttacagtgatcatggccattcaatataggaaatgaattaacattctccatgggaccctcatttgtatggtatattaataggatcctcatgtaaatttctgcttttacctcactgcctatttgcctgctagctggttgtatgcaatttagaaaggcggacaagaaatatttgatttcacatgatgttgcttagagggatggggaggcagagggaacagataggggtcaagcagcaacaggagagttacaatgggaatat

SEQ ID NO: 707912 - DNA, 642 bp, Homo sapiens
aaaatacaaaaattagctgggcatggtggcaggcgcctgtaatcccagctatttgagaggctgaagcacaaaaattggctgaacctgggaggtggaggctgcagtaagctgggatttcaccactgcactccagcctgtgtgacagagtgagaccctgtctcaaaaaaaaaaagtcattataaaatgctttgtctcctgtattgttttgtcctttgatatttctagtgtctctgctcggtaaatgtttcgaagagtacatgaatggttaaagggatgaattaataaatcctggcattgcctcattggcaagaaattcttgttgaagccaagtgtttggccttccttgactgtgtccrtgactcagtctcagagccactgcaagcaatagatgctggagggagggagagaaagacagagagagagagggagacagacagaaagagagagagagagaaagagagagacagaaagagagagagaaagagagaaaaagagagagagaaagggaggaagacacagagaaagacagagagagaacgagagaaagacagagagagaaagagagagaaagagagagtaagacagagagagagagaaagagaaagacagagaaagagggaaatagaaagagagagtgaacaa

SEQ ID NO: 707913 - DNA, 611 bp, Homo sapiens
tggaaaggtgggaggtgcagagtggatgacagcaggacacatatgacagcagactgctgagctgctctgtgtgaggacgcagggctgtcctggagcctgtcctaggtttggtcctgctcccaggcctttgtccagcgcgcacctgacatggcctcctctcctatccatttcctttcctctcttccacayttgcctcccatggagacttcctaaaatacttctggaaacaaacgctctcctcctttcacactaaaaaacaaatctgtctaaaaccaggtttatcttcctttttgaaactagctccttctcggtttttctgtctctgggcatggtcctgctattcttccagtcactgaggtctaaaaacacacattcctcctgtcttgccatcaccctcaaaccctgtatgtgcaaagcataaaactgcaggccatagtagttggaagggactttggatattgtctaatttactggccacaaatccaggcatctcctttagagcaacctttatagcaatcagatctctgaccaatgatcttccagattatttttcattcttctctaattgcttaaaaattatttatattgaatgaaaatctgcctccctgggc

SEQ ID NO: 707914 - DNA, 600 bp, Homo sapiens
tcgaaaatgctgggattacaggcatgagccaccatacctggccaggtttctgcttcttaattcattccctgttccttggtctgagcaattaggtcctgcctgtggttgcgcacttggtttatctgggcacgctcaggttacatgaccttcaacctgggaaaacaactcacaactttgttacataaatgtggagtcagattggtcggatgcaattacaagactcatggcctgggtcccaagcagcaggcaatggagaactttcccctcccaattctatcccacctccttatgacaaggagccctgacacagaaaccagaaagaaaccaagartttcctgaagggactacccaaagggaacctagccaactgatgatgcgccagttttaaagaagaggcaactcctttgcagcagggactgcgtgccccttgcaagagagaaattgagtcattattcaaagattagagtttgagcagtaatgaagtagaaaatgtgctaaacatctggcacaagatcaacagatactggttatggacaatgatgatgctctgccagccctatgtagtgtcatttagtaagcatagcaatggtttctagacat

SEQ ID NO: 707915 - DNA, 600 bp, Homo sapiens
tcgaaaatgctgggattacaggcatgagccaccatacctggccaggtttctgcttcttaattcattccctgttccttggtctgagcaattaggtcctgcctgtggttgcgcacttggtttatctgggcacgctcaggttacatgaccttcaacctgggaaaacaactcacaactttgttacataaatgtggagtcagattggtcggatgcaattacaagactcatggcctgggtcccaagcagcaggcaatggagaactttcccctcccaattctatcccacctccttatgacaaggagccctgacacagaaaccagaaagaaaccaagagtttcctgaagggactrcccaaagggaacctagccaactgatgatgcgccagttttaaagaagaggcaactcctttgcagcagggactgcgtgccccttgcaagagagaaattgagtcattattcaaagattagagtttgagcagtaatgaagtagaaaatgtgctaaacatctggcacaagatcaacagatactggttatggacaatgatgatgctctgccagccctatgtagtgtcatttagtaagcatagcaatggtttctagacat

SEQ ID NO: 707916 - DNA, 1358 bp, Homo sapiens
tgaagcactttcttaagactgacctaacgctggattatttcccgtccaatgcctgcatgctgcttgaattgctccacccacacctccatgaccaagggcgccagagtgctgcaactggggcgtgggccgctctctgcttttcctgtctgactctgacaagtcctccctcactgaatgtagaatcgttgccaagtttctgagaagtgtcgattccctgttaacatggatatcagttctgcctcacatttcccacttgaggttgaggcgtactggagacaacacctcagaccatctgaaccccatcagtggacgaaaatggggctgttaatatactctaaaagccatactaaaaatgctctgagggaactggctaagaatagtgggcctggtgattgtctatcacgcaaggctttgttttgtactgttcagaaatctgtcacctttctgcctgcccttgtttcctgaatgaaatgcttctggggttatttatgaaaggagtgatcctggggcaggcaggaggcagtgggcttcatggctccttgaagttattactgatcttgaccttctctttggctacctttagacaaagaatacgccaatcaatacttggggctctaagttttacaattgatatttatttgtatcatctctttgtctaggaatgtaaaagtgattctaaactaagatgtgtaataaaaatcaatcagatttattgtacctacaaaaaggtgtcctcataaatgactaaggcttttgaaaatgacatgcctgtggctgacacactgccattttcaataaacattttaactgggtgggagtgggaaaatgaagattgagttgggatgctggcattatttaatatagcaacaaggggcagggtgcagtggctcatgcctgtaatcccagcactttgggaggctgagccgggtggatcacttcaggtcaggagttggagacgagcctggccaacatggtgaaaccctgtctgtactaaaaatacaaaattgagtcgggcgtggtggtgcgcacctgtcatcccagctactcgggagactgaggcaggagaatcgcttgaggccgagattgcagtaggccaagattgcacaactgcacttcagcctgggcaacggagcgagactccgcctcaaaaataaataagtaaataaaaataaataaataatrtagcaacaaggaaaaggacacaaaatgaagaatgatagagtgacaaataagtgtttttcatgtttttccgtggaggttcctgagactggcctgggcaacggcatgaaatttcttttaacttttgtgttttgttttaaaaattcttttaaatttactattatacatcatactttaaa

SEQ ID NO: 707917 - DNA, 588 bp, Homo sapiens
ggaaatacaaagggctctgctagcacctaagcatggtatgagatcagccaaggttactctattctgggatcatgatcaccaagaattcaatctcttgctcttaccagtcctgttacctttctctcccttccacagatgtagattccaaaggcattccttaataaatacscagcatgctaacttccatctcaccgtatgtacaatagagaaaccgcctgaaagccccctgaaaccgccatctaagtggcatgaaattcctacatcatagtggtaagactcacaaaaggatatcattcagtttttctttcaaaaggggattgacttctgtgttacaatttatataatttgtttctgttaccagcaaacaggtttatccaaatgcaactaaataaatataataggaatctttggcaaaagttttaatattttaatgacaactttcctcaaactctaagtggtaaactaatagaatcacaccagcagtgtgtagggttggaaattaggtcaatgtaggatgctcttccaatccttggaaggttgagagtgtacccttactgacttcagtgaatatcaaaattagaataagca

SEQ ID NO: 707918 - DNA, 639 bp, Homo sapiens
attgctagctcctagaatcagggaagaaatgatcaagaaataaagtgcaattttcatgagccttgatgagaggctattatcattgttacagcatggagagaataatttagttagagacttggaacctgaagtaaagtcataaaatgcaaatgagaagtgacgtttctagtaaatggcaagcattacagagtttcactggtrtctagaatgcataaatgggatgatataagagaaaatattttaaaacatgtgggagctaaagtaataataatttaacagccctataaatggctgtttaaaagtttgtctttgttttggtcaaatagttttcacaaagtaaaaaactcatccagaaactttcagagattaacctcacagcacctcagagaataaattagagtaaaaaaaacacatgtggtaattttaaactgtttaaatgtgtgcttctccattttaattattataaacacccatggatttctttctattataccactaaactttaatttatttgaaataacaggaaatgggcaaaattgcatatacataaaagctgaacttttaactaataattacagaacttactactctgtaataattgagatccctttaaaattctactccaatctacaagacttt

SEQ ID NO: 707919 - DNA, 639 bp, Homo sapiens
attgctagctcctagaatcagggaagaaatgatcaagaaataaagtgcaattttcatgagccttgatgagaggctattatcattgttacagcatggagagaataatttagttagagacttggaacctgaagtaaagtcataaaatgcaaatgagaagtgacgtttctagtaaatggcaagcattacagagtttcactggtgtctagaatgcataaatgggatgatataagagaaaatatttyaaaacatgtgggagctaaagtaataataatttaacagccctataaatggctgtttaaaagtttgtctttgttttggtcaaatagttttcacaaagtaaaaaactcatccagaaactttcagagattaacctcacagcacctcagagaataaattagagtaaaaaaaacacatgtggtaattttaaactgtttaaatgtgtgcttctccattttaattattataaacacccatggatttctttctattataccactaaactttaatttatttgaaataacaggaaatgggcaaaattgcatatacataaaagctgaacttttaactaataattacagaacttactactctgtaataattgagatccctttaaaattctactccaatctacaagacttt

SEQ ID NO: 707920 - DNA, 639 bp, Homo sapiens
attgctagctcctagaatcagggaagaaatgatcaagaaataaagtgcaattttcatgagccttgatgagaggctattatcattgttacagcatggagagaataatttagttagagacttggaacctgaagtaaagtcataaaatgcaaatgagaagtgacgtttctagtaaatggcaagcattacagagtttcactggtgtctagaatgcataaatgggatgatataagagaaaatattttaaaayatgtgggagctaaagtaataataatttaacagccctataaatggctgtttaaaagtttgtctttgttttggtcaaatagttttcacaaagtaaaaaactcatccagaaactttcagagattaacctcacagcacctcagagaataaattagagtaaaaaaaacacatgtggtaattttaaactgtttaaatgtgtgcttctccattttaattattataaacacccatggatttctttctattataccactaaactttaatttatttgaaataacaggaaatgggcaaaattgcatatacataaaagctgaacttttaactaataattacagaacttactactctgtaataattgagatccctttaaaattctactccaatctacaagacttt

SEQ ID NO: 707921 - DNA, 312 bp, Homo sapiens
aagcataagtatagttatacatgacattcagtaatatggaatgttggttgttcaaataacttctccaggaatccaaatggaatattattgataaagcctttgggtgtcaaaaacccattaagaactcatccttgaaacaaagttcagattgacggtttgcccttcctgcctaatcctatatgacaacgagatggccactattaaattaagagagaggcataacagtgacaaagcatttaatatatcaggattkagcagtatatttaggaatatattacattgtgattactgggatatgaaactgactgaaag

SEQ ID NO: 707922 - DNA, 1462 bp, Homo sapiens
tgccattcaatatctgtgagtatgcattatcaagggcctactctgtgccttctcctgacattccccgctccccctcccattcctagactcatcatttcattagtactgtagggaggatggccagcattgctttgatgaggactgagcctgaacactgcaccagaactgctttctcagaattatataagctaggacagaatgcaggagcctcgatttcagacagcacagactgacaaaatggagtgctcagatcatgttgtcttgcttgtgtagttaaaatagcaaaactaaactaaaacaaatcgcctaacaaaaatgtttatttatacacattctaacaccttagataagaaaaagaatcctgttttatcattgcactgttgtcatgtcactgcgtcactcccccttctctgggctctgatgtgaggccagtctgccttacagtcatcagcagcaaggaaattacagaagagaaggcagaagggttggggaagaacttggtgatttgagttcgtaagtcaccaagtggtaactgccctgtttcttctctcgtgtctctggggcctggatgtttgggggtgctgggcattgcttctgcctgtgaaactgcagttttggggttactgtatcccttctccctacaaatttctgtacaatttatgagtacaagacagtgtcatcaacacaaacagtaaagaaagaaacagtcctgttgattacatagagagcacgatcaagatacaaagcgttttctagtcgagaagacttccctattgtgttttgtgtgataatatataatttatcacacaaatttaataatttaataaggaattaaaattgtgcataccttttgaaccttgatatacacatattacatgctatttatttaaatgctaaaatcgttttattctaaacattaaataatactttagcaaatataatttaaataatgaggcaggtgctgtccgcattctgtgtcctctcagatccgttccctgtcctccttctgctttgctctgtgccacagtgagaccgacctcccagcctcctttcttgggctcctctgccagctgggttacagctagcttgaacatgggaggcaagagatgggaggacaggaagaaaggagacccccaggtgtttctccccgcctctgccacaggtggcatcttcagcagtygctgcatcttcttcttgactccagctctcatcagatgtgcttaccatggtcccagtttgctccagtgaccctaaaccctgagcaccagtaacatcacctccttttgtccttacagcctagggctggtaggggtttctgctattgctaagctctgagttgcttcaccatcttcagtttggcttatcagctcttctgtcacttggaaacccaaatctcagcattaaattgcctgttttcaatactttgaatggttctgttttccattctgttgaaccctgcctc

SEQ ID NO: 707923 - DNA, 2382 bp, Homo sapiens
cggcacccctggagcctctggactcaaactgagttacacaactagctttccttgtccatcagattgcagatgacagaccatgagtcctctggcttccataatcacataagccaattcctgcaatatatttctatgtctatatcaatatgaatatctatcattgcaaacactctcatctgccaaagctgatatatgccacccctactcaaggaagcagtgtggcttctacctgccaaatctcatgtgaataaccctcatcagcagagcttaaacagtatccagagttctgctggcaagggattttgggaaattcagtttccatgcttccagaccttataatacaaggagaccagaggtgaatggaatgcatgctgtttgccaaagacagtatccaacatgaaaccattaaggaaaagaatcagcattatttgaagaatagatagagtgaaaaaagtacaagttatagtaggtctctgagaatacagaggaaaaaaaccttagaaaaagatgaggggrtgtatagtagatgtgaatggcagagcctagtgctccaatctcattcctgagaggtgagaagcaatactgaagactatagtagaaataaattgtcctcatttgaaaaaatatgaggaggtagattgaaattcaattgaaaaattcacacttagatgttcctagcaatgttagataatttcaagtattataaaagaaacaggtcaataagcagctcaagcagatttttttaaactaatttgcaaatgcagaaaatttatatgctataaatgaatgtaaatttacacacaaaactttctataactcattatcttgatataaagtctattgtcactaatggttaaaaaataggtgtgttgaaatgagctaattttagatttgtctgatgttcctttgggttatatttttaggcatctttctgtcaggtgctcttctccattctcaaggattctcttttccctcctttttccccagatgacatacacacaaagaaagtatccatgtcctcatgataagacagaggtcagagagtggcctctgagctgcatagatcctcatgtgctaccctggaaagtaaattccttatttcacccagttattggacatgccacacctgtgtttacaaagttactgctgtcttcattggttttggggagatattgtgcagaaataccccactgaagtctctgactttggtatagcctgctttcaagaggtcccagcattctgaagcttccttttctggacctcaggccttttttggttcacagttctttttgcccgactgttttcccaaccagaagtctcctagatgccaaacaaaggcaatggtaatcttgaatctaactaagggctctctgtcaagatacctccctcaggtatttttactatgtcacttggttgacatcatttttcttttagacaattgccaaacacagagtttctctatgtttttcagttttctggtctgctcttcaaaaagtgagacactaggctttctgcttaggaattttttttaactttctatttttattatgtacattgccatgcctctttgagatctgaccatggggtagggatgaatgaagaggaaagaacaaatagaaatatctaacaacaacttggtccttctcaaaccttcctctttcctattttctggaactttcctacaccaaagcaaacttcactctctattttggtgcagagtaaaacagtgatcagatttgcaaaatctactctgatatctaaaaggaagatttggaatttatggaatgcaatgaagcttacctttcaaaattagtgtgtcattatacagactgtgtttttaatttaaaactcaaagctgaataatcacttttttttttacctttagacccttctctacccgtgagcaatgatgactgtcagtggctgtgagagctgtgagaaatctaggaaaaaatatatggcttaaatatctcaaaaattattcctgtacatgctcaaaggaacaaaattacaattagacttgtcctatacaaaatggaagaaagtggaactataaataatattgtgagataaaatatcataattcatgaattccatatgaattcaatagtaaagtatgatcaactatataagaggtcagaaaatatacaactcatattctgctcctgaaaaactcaaaatcactgagtgacagactaatttactaatttaaatttaagtatgagaaaatagcgttatgaagactttcctcagtattctattccaatgaaatgcttcaacttaagtataattgttttataaacaaaatattattgaattcaaataaaattattcttaaaaatatacataacataaaaatataatttaatgacaaaaagaact

SEQ ID NO: 707924 - DNA, 1659 bp, Homo sapiens
gaattatctgaaggctcccaaattgtctgcagtatcattacttgctgactgtttttcaccaactacctatctagtttccacagacaagggctcattgtaaaatgtcagaattatcctgctagaaatgcaaaagactcagaaaacttcatacgcatggactctaaatgtttcatgggttttgtttttgtttttgtttacattaagctacagatggggtggagagatgccctgtgatctgtcaggaactgcctgcaaaaactacttgccagctaataattagcattttttcatgggtgctggaaaaagaagtgacattcctgggagaaagaccatygactttattactcttagcaacagcagtagctagcatttcagcagtttcttgcaccagttcgactacctgcacacatagtaagcattataggagagagactccaagcttacagaacctgaattttttatggtgaatagcaagcatgcctgccctttgctctagagagaggcactatctccatcttccaaggctgttcactgtacaaacatttttgaaatgacagaatgaaataatgtcagttagttcctctgctcataagacatgtagaaatgtgagaagcccgtggagaattgtctaccagcatgaccttgacactgagcactcacagcaaacatgtttctattgtgcttggcatcatgctgctagatggtttaaatgactccggatcgccaaggtccttatctggacaaaccactattgcacagtccaaaaatatttttccgagtttctcaagccatctataggtattcatttcctcttttttaaggtcagtaaaatttctgaaacttttgtcttttaccattttccagaataatttggggattcccattacaaaatacttctgcaatgtagaacatctctatttcactagcattaagatagtattccaaaatatggtccataactatcacgggtttgaggtagacataggcttagtgtagaccatgaaagcatttcaataatgatgcttcctgcatctccctcaagtaaacctgttaactcaagttactatttactcaagtaaacctgttaacactgacatgttaacatggtatgaatcctagctttaatgcttactagtttttacttggatgattaacttcttcctctaccttagtctcctcattgtgaaatgggataacaatattcactcttcctaccttacacaatttttgagaaagtcaaatgacataacatttatgaaagcattttataatcaagaaaagatcttaaaggtgctttaatactctaataagtatctcctgcagcttgcttgtgcctcagggatgccaaacctaatcttttcatgccctgagaagctgggttattatagtgtatcaggcatagttgtagggtaatcagttgtttgcaattagattcatgtgttattgatgtccaggggacatatatttaccatcaaggatttagggggaggttgtaaggtaaaatgagtagagagttggagggaatataatgttatttctaggtcagaggccatttctggatatgtaaaatagccaatgttttatgataccacatattggcttttggtgaagttttagctgagattcagtgaataggaaagagataaagcatccttttgt

SEQ ID NO: 707925 - DNA, 1659 bp, Homo sapiens
gaattatctgaaggctcccaaattgtctgcagtatcattacttgctgactgtttttcaccaactacctatctagtttccacagacaagggctcattgtaaaatgtcagaattatcctgctagaaatgcaaaagactcagaaaacttcatacgcatggactctaaatgtttcatgggttttgtttttgtttttgtttacattaagctacagatggggtggagagatgccctgtgatctgtcaggaactgcctgcaaaaactacttgccagctaataattagcattttttcatgggtgctggaaaaagaagtgacattcctgggagaaagaccatcgactttattactcttagcaacagcagtagctagcatttcagcagtttcttgcaccagttcgactacctgcacacatagtaagcattataggagagagactccaagcttacagaacctgaattttttatggtgaatagcaagcatgcctgccctttgctctagagagaggcactatctccatcttccaaggctgttcactgtacaaacatttttgaaatgacagaatgaaataatgtcagttagttcctctgctcataagacatgtagaaatgtgagaagcccgtggagaattgtctaccagcatgaccttgacactgagcactcacagcaaacatgtttctattgtgcttggcatcatgctgctagatggtttaaatgactccggatcgccaaggtccttatctggacaaaccactattgcacagtccaaaaatatttttccgagtttctcaagccatctataggtattcatttcctcttttttaaggtcagtaaaatttctgaaacttttgtcttttaccattttccagaataatttggggattcccattacaaaatacttctgcaatgtagaacatctctatttcactagcattaagatagtattccaaaatatggtccataactatcacgggtttgaggtagacataggcttagtgtagaccatgaaagcatttcaataatgatgcttcctgcatctccctcaagtaaacctgttaactcaagttactatttactcaagtaaacctgttaacactgacatgttaacatggtatgaatcctagctttaatgcttactagtttttacttggatgattaacttcttcctctaccttagtctcctcattgtgaaatgggataacaatattcactcttcctaccttacacaatttttgagaaagtcaaatgacataacatttatgaaagcattttataatcaagaaaagatcttaaaggtgctttaatactctaataagtatctcctgcagcttgcttgtgcctcagggatgccaaacctaatcttttcatgccctgagaagctgggttattatagtgtatcaggcatagttgtagggtaatcagttgtttgcaattagattcatgtgttattgatgtccaggggacatatatttaccatcaaggatttagggggaggttgtaaggtaaaatgagtaragagttggagggaatataatgttatttctaggtcagaggccatttctggatatgtaaaatagccaatgttttatgataccacatattggcttttggtgaagttttagctgagattcagtgaataggaaagagataaagcatccttttgt

SEQ ID NO: 707926 - DNA, 886 bp, Homo sapiens
tcaggtgcttcagggtccaggtcatagtccagctgccctgccgcaggcctgtgctcccacctaccacagactgggacacagaacccaacatcagtggagcctcgtgtacacccctagtttttctagcttgcctgctgcagccagaccattatctccccagaatgctcttcatgactgcttaatgaccagaaagacttgagtttttatatccaatgtcaagagtaaattattaaccacctaggaaaacagaattttggagtagtcttgtactttgagatacataaatatatacatacctaccaacatacatacactcatatatgcctggaaatatgtatgtatatgtatattttactcccttcttcaaatatctttagtggatccttagtccttggtgaataaaatctaaaataagttcttagcttagcattcaaaactggccactatctggcctgacaactaactcccttgatgtattctgttaatacgtagctgaactctttgttgagctgtttaccatctttcaaatcccagttctggtatcaactcccaagaagacagtctttcctcatttcgacactctattctgagcaaccataatactttgtatatatctccctaatcacattacatattgtgttgtaggtttttgtatatttgtctaatcytcttctcctggccctgcattataaacagtaggtagaaagcttgttattaaaaacagaattaatagcacaatgtgcttttgaaaacggaaagcacagagttttggggatgctttgcatttagagccgtcttcactggcattgacgtcatagccgcagctaacagggcttattctttgtcaggcaatgagccaagcatgacatgtgaactattttaagtc

SEQ ID NO: 707927 - DNA, 886 bp, Homo sapiens
tcaggtgcttcagggtccaggtcatagtccagctgccctgccgcaggcctgtgctcccacctaccacagactgggacacagaacccaacatcagtggagcctcgtgtacacccctagtttttctagcttgcctgctgcagccagaccattatctccccagaatgctcttcatgactgcttaatgaccagaaagacttgagtttttatatccaatgtcaagagtaaattattaaccacctaggaaaacagaattttggagtagtcttgtactttgagatacataaatatatacatacctaccaacatacatacactcatatatgcctggaaatatgtatgtatatgtatattttactcccttcttcaaatatctttagtggatccttagtccttggtgaataaaatctaaaataagttcttagcttagcattcaaaactggccactatctggcctgacaactaactcccttgatgtattctgttaatacgtagctgaactctttgttgagctgtttaccatctttcaaatcccagttctggtatcaactcccaagaagacagtctttcctcatttcgacactctattctgagcaaccataatactttgtatatatctccctaatcacattacatattgtgttgtaggtttttgtatatttgtctaatcctcttctcctggccctgcattataaacagtaggtagaaagcttgttattaaaaacagaattaatagcacaatgtgcttttgaaaacggaaagcacagagttttggggatgctttgcatttagagccgtcttcactggcattgacgtcatagccgcrgctaacagggcttattctttgtcaggcaatgagccaagcatgacatgtgaactattttaagtc

SEQ ID NO: 707928 - DNA, 1287 bp, Homo sapiens
  misc_feature 6, 7, 8, 9, 10, 11, 12, 13, 14, 15, 16, 17, 18, 19, 20, 21,22, 23, 24, 25, 26, 27, 28, 29, 30, 31, 32, 33, 34, 35,36, 37, 38, 39, 40, 41, 42, 43, 44, 45, 46, 47, 48, 49,50, 51, 52, 53, 54, 55, 56, 57, 58, 59, 60, 61, 62, 63,64: n = A,T,C or G
  misc_feature 65, 66, 67, 68, 69, 70, 71, 72, 73, 74, 75, 76, 77, 78, 79,80, 81, 82, 83, 84, 85, 86, 87, 88, 89, 90, 91, 92, 93,94, 95, 96, 97, 98, 99, 100, 101, 102, 103, 104, 105: n = A,T,C or G
atatannnnnnnnnnnnnnnnnnnnnnnnnnnnnnnnnnnnnnnnnnnnnnnnnnnnnnnnnnnnnnnnnnnnnnnnnnnnnnnnnnnnnnnnnnnnnnnnnnnnggcttgagatgcagatattgttaagcttcaaaagaacaaccaaaccccaagttaagttccttaggtctttcattttccctagaaaaaaaaggcacagtcttcagtttaggactgggaatattcacctcacctttcggattaagctggagtcagccagaaaggaaaggtgtgactcagtgatttggtgactcaaagagaagttgtgcttgccatctggcgctccgaggggaggtgaggcctctgtccacaccctgctcgtcactggccactcctcagccacagcctcttgtccactcagacaggctctcagactgtgcttcatgtccatgccaaagcatggcttgtgacattttatcttctgacatttgattttgtcccttgtgaaggggataggtatgattttgaagaattagtttcaccattcccagttgcctttttggagtggaaagaattgaaagtacagacagtctggtactattaacttgaagacacgacttaggctcagaaagatttggcttaattcatggcttattagctgtgtgacctcaggcaaaccacttaacgtctctgtgtcacaggtccctgtgtataaaattagaggtttgcaccagacggattctaagttcccctctggctctaaagatcccgagccaaacccaacaggagatatattttatttttatttatttatttagtttgagatggagtttcgctcttgttgctcaggctggagtgcaatggcatgatctcggctcactgcaacctctgcctcctgggttcaagtgcttctcctgcctcagtctcctgagtagctgggactacagacacgtaccacctggctaatttttgtatttttggtagagatggggttttgccatgttgtccagctggtctcgaactcctgacctcaggggatctgcctgccgcggcctcccaaagtgctgggattacaggcatgagccaccaygcctggccccataggagatacattttagaccaacggagtcctgcccattcctgccttaatggaagacccagttttgcatccttaagagtagcgaacagtacctgtgcaggagacaaaggctggggaaggaagggattctagtcttcactcttgaagaacatgaggaacttgttagaaaagatgagttttatacaccttaatttttctggattccc

SEQ ID NO: 707929 - DNA, 1207 bp, Homo sapiens
tacctagacttaatgattaacgttttaaatatttgtattggtacagtcattttagtgatttcagctttataatattttctctagtggggcaactttcacgtcagttttttctcctaagagcttcttatctactttcacttactaattccctaaataaactttaaaaccactgttaagctgtccccaaaattcattgagaataaaaagaattctgttggctaataaaataattggcaaggaattgatgttttcaaccagaaaagtgcatattctctttttttaagagactaattagaacttctttatatttctcaatatgcttagttactttacccaaattatacaatgaaatggaaaagtgagatttgtactcatgtattttttactgaaggtacagtactctttataacattacattctaacatttggcaaagggcctaaaatgtactgataagatctagaataygaagcactgtgccaaatgctgtgatagaaaaacaatattgtatgaactggtttttgcattcaaggcacattttttgaaaaacaaaaatcaagtctatgacacatgcaattaattagaaaacaatgaaagagatcagtggaattgttttgcaatagtggttgctcatggacctctgtgaattgaatgactgaatgcaaggtgagcttttactaaatttcctttttcttgttggccactcagcctcttttttgactactgcactttttactgctcatgcttatttttgctctggcttctggatgcctgtggctatgtattcaccaattttaaataaacagtctatatcctccagctggatgccctgctttttgagaaatgtctgtggttttattgcaacaagtactaatggaacttggtccaattacataaacttattaaatattatatgaataacattgccaccacaactgatgtatgttgtgattcactcccaactcgactgacaataaatagccatttccccagacaggcttttgcagatgactacctcggttcctcagttggctgctgttccctcagaaagtggacttggctccacagctgcagaaactacagtataaccaggatgctgatgaaaagcaagcctgaagcagggcagaaagggaatcattgatcacggcataaaatttcttcccatcttcaggtgtagggaggagacacaggctaacatcaggggcaaaa

SEQ ID NO: 707930 - DNA, 916 bp, Homo sapiens
tcctgtaaccatctcagtatgcaaaacaagtatttaataaaatttaacaaccatgtaagataaaaactttcagaaaactagaaatataaggaaaacgtattcacttaataaagtggtaagatattatacatattctccctatagtcaggaacaagacaatcatcacatctattcaactttcatcattattattccaagacagtggaataaaacaaaaataaaaaataaataaagggaagaaagtgcagtaggttgaataataacaacccraagatattgagtcctaatccctggaacttgaagggccgtgcccatgggcaaggtggttctcttcagccacgggcaattccctgagagggactcagctgagagctatcagctgctgaccaacctatcagctggggaagtaagaacttcagttctaaaagggagatctggacagtggacgaccagcttccacccttccgtaccaggtcagactgacaacaggctgtttccagaagtccccttgaaatctattaaattgtttgcaggtggtttaatggtttagaagaaaacaaagtttattccatatatattttacattagaaatgtaaaaataaattaagactttaacaaaaatcttttgtatttttaataatggttacattcttaaatgatctgtgtatgctaaaatggctgggtgaatctcattatcttggttagcatgcaattattagatccagggcatcctggctaatatattttcatgtcactggcatatcgtgttttatgttgtttcatttatatttttctcattattattttgatgcattgcatcaccaaatgacaaaaaggaattactggctcaaacatggtgcactgatgcatgaaagtagtgatgaaaatagaacctaattacaactaagaataacga

SEQ ID NO: 707931 - DNA, 916 bp, Homo sapiens
tcctgtaaccatctcagtatgcaaaacaagtatttaataaaatttaacaaccatgtaagataaaaactttcagaaaactagaaatataaggaaaacgtattcacttaataaagtggtaagatattatacatattctccctatagtcaggaacaagacaatcatcacatctattcaactttcatcattattattccaagacagtggaataaaacaaaaataaaaaataaataaagggaagaaagtgcagtaggttgaataataacaacccgaagatattgagtcctaatccctggaacttgaagggccgtgcccatgggcaaggtggttctcttcagccacgggcaattscctgagagggactcagctgagagctatcagctgctgaccaacctatcagctggggaagtaagaacttcagttctaaaagggagatctggacagtggacgaccagcttccacccttccgtaccaggtcagactgacaacaggctgtttccagaagtccccttgaaatctattaaattgtttgcaggtggtttaatggtttagaagaaaacaaagtttattccatatatattttacattagaaatgtaaaaataaattaagactttaacaaaaatcttttgtatttttaataatggttacattcttaaatgatctgtgtatgctaaaatggctgggtgaatctcattatcttggttagcatgcaattattagatccagggcatcctggctaatatattttcatgtcactggcatatcgtgttttatgttgtttcatttatatttttctcattattattttgatgcattgcatcaccaaatgacaaaaaggaattactggctcaaacatggtgcactgatgcatgaaagtagtgatgaaaatagaacctaattacaactaagaataacga

SEQ ID NO: 707932 - DNA, 916 bp, Homo sapiens
tcctgtaaccatctcagtatgcaaaacaagtatttaataaaatttaacaaccatgtaagataaaaactttcagaaaactagaaatataaggaaaacgtattcacttaataaagtggtaagatattatacatattctccctatagtcaggaacaagacaatcatcacatctattcaactttcatcattattattccaagacagtggaataaaacaaaaataaaaaataaataaagggaagaaagtgcagtaggttgaataataacaacccgaagatattgagtcctaatccctggaacttgaagggccgtgcccatgggcaaggtggttctcttcagccacgggcaattccctgagagggactcagctgagagctatcagctgctgaccaacctatcagctggggaagtaagaacttcagttctaaaasggagatctggacagtggacgaccagcttccacccttccgtaccaggtcagactgacaacaggctgtttccagaagtccccttgaaatctattaaattgtttgcaggtggtttaatggtttagaagaaaacaaagtttattccatatatattttacattagaaatgtaaaaataaattaagactttaacaaaaatcttttgtatttttaataatggttacattcttaaatgatctgtgtatgctaaaatggctgggtgaatctcattatcttggttagcatgcaattattagatccagggcatcctggctaatatattttcatgtcactggcatatcgtgttttatgttgtttcatttatatttttctcattattattttgatgcattgcatcaccaaatgacaaaaaggaattactggctcaaacatggtgcactgatgcatgaaagtagtgatgaaaatagaacctaattacaactaagaataacga

SEQ ID NO: 707933 - DNA, 916 bp, Homo sapiens
tcctgtaaccatctcagtatgcaaaacaagtatttaataaaatttaacaaccatgtaagataaaaactttcagaaaactagaaatataaggaaaacgtattcacttaataaagtggtaagatattatacatattctccctatagtcaggaacaagacaatcatcacatctattcaactttcatcattattattccaagacagtggaataaaacaaaaataaaaaataaataaagggaagaaagtgcagtaggttgaataataacaacccgaagatattgagtcctaatccctggaacttgaagggccgtgcccatgggcaaggtggttctcttcagccacgggcaattccctgagagggactcagctgagagctatcagctgctgaccaacctatcagctggggaagtaagaacttcagttctaaaagggagatctggacagtggacgaccagcttccacccttccgtaccaggtcagactgacaacaggctgtttccagaagtccccttgaaatctattaaattgtttgcaggtggtttaatrgtttagaagaaaacaaagtttattccatatatattttacattagaaatgtaaaaataaattaagactttaacaaaaatcttttgtatttttaataatggttacattcttaaatgatctgtgtatgctaaaatggctgggtgaatctcattatcttggttagcatgcaattattagatccagggcatcctggctaatatattttcatgtcactggcatatcgtgttttatgttgtttcatttatatttttctcattattattttgatgcattgcatcaccaaatgacaaaaaggaattactggctcaaacatggtgcactgatgcatgaaagtagtgatgaaaatagaacctaattacaactaagaataacga

SEQ ID NO: 707934 - DNA, 916 bp, Homo sapiens
tcctgtaaccatctcagtatgcaaaacaagtatttaataaaatttaacaaccatgtaagataaaaactttcagaaaactagaaatataaggaaaacgtattcacttaataaagtggtaagatattatacatattctccctatagtcaggaacaagacaatcatcacatctattcaactttcatcattattattccaagacagtggaataaaacaaaaataaaaaataaataaagggaagaaagtgcagtaggttgaataataacaacccgaagatattgagtcctaatccctggaacttgaagggccgtgcccatgggcaaggtggttctcttcagccacgggcaattccctgagagggactcagctgagagctatcagctgctgaccaacctatcagctggggaagtaagaacttcagttctaaaagggagatctggacagtggacgaccagcttccacccttccgtaccaggtcagactgacaacaggctgtttccagaagtccccttgaaatctattaaattgtttgcaggtggtttaatggtttagaagaaaacaaagtttattccatatatattttacattagaaatgtaaaaataaattaagactttaacaaaaatcttttgtatttttaataatggttacattcttaaatgatctgtgtatgctaaaatggctgggtgaatctcattatcttggttagcatgcaattattagatccagggcatcctggctaatatattttcatgtcactggcatatcgtgttttatgttrtttcatttatatttttctcattattattttgatgcattgcatcaccaaatgacaaaaaggaattactggctcaaacatggtgcactgatgcatgaaagtagtgatgaaaatagaacctaattacaactaagaataacga

SEQ ID NO: 707935 - DNA, 644 bp, Homo sapiens
tttatcttttttctattaatttgtatgacttaaaaatatatatctaagatagttgacttcatgttttgtatgtgtcacagatatatttttctgcraattaaccttgtttatgatgttctttgctgtataggaagtttaaatttttataattaaatgtacaactcttgtcttttgcaagctctatttttagtcttatttttagtaaatccttttttattgcaagacctaacaatattgaccaaataatagtagtaataatgagagtaataacaataattacaactgttacatctatctatttagtacatgttatttgcaagagatctcaccagacatcgaaattacggaattatatttcattcaattattagtccagcaacctaggtgaccttatcttgcaaatgaggaaattgaggctcagagaggtttatcagtttgaccttgcccaaggtcactgtgatctgcttgactccgtagccttggcaggactgagggacaggtgctgagtccggagggcgggcgagacaggtgggctggaaagccaactgggattggatggtgtgcgtagctcctttccctgtggtaacagaaattcctagtcattgctctggggaagaagtgcattttattgactaatcttccaa

SEQ ID NO: 707936 - DNA, 600 bp, Homo sapiens
aaccccatctccctctactaaaaatacaaaaattagccagacgtggtggctggctcctgtaatcccagctacttgggaggctgaggcaggagaatctcttgaacccaggaggtggatgttgcagtgagccgagatgcgccattgcactccagccagagcaatagagcaagactctgtctcaaaaacaaacaaacaaacaaacaaacaaaaaacagtgtcgtttattccagtctaacagttgaagtagtctctttagtgtgttctcagtctctccagggaaaggaaaaaaaaaagcacagttttttggagagctggccccttcccttttaatttcaccaagatagggtctgggtatatgaggaaaattgccctgtcttagtggtggtgatgagaaggaggattcggatgggtgtaatactcttattctgtcttctctgtggtgacatctttgctctgatggacttcagtacagtagtctctggacactgaatttacaactcattttttttwaatttattaatgctcctggatgcagtggtcatactcacccctccccacaggccccagtccctctgcccctgccctaacaacatgcaatcc

SEQ ID NO: 707937 - DNA, 1535 bp, Homo sapiens
tgcacatcatgtctaagttgattatattacagtcagagtgaagctccagagtccttgtctcttacttagagtgtaagtcccttgagagcaggcccatgttcttcttattctccatattatctacagcacatgcccaacacagggtaggttgtcatactttttttttttttttttgagatggagtcccgctctgttacccaggctggagtgcagtggcgtggtctcggctcacacaacttccgcctcccgggttcaagckattctcctgcctcagcctcccaagtagctgggattacaggcatgtgccaccacgcccagctaattttgtatttttaggagagacggggtttctccatgttggtcaggctggtctcgaactcccaacctcaggtgatctgcccactttggcctcccaaagtgctgggattacaggcttgagtcactgtgtccggccacttttttaaataaataaatctcgggtgtacctccccctgatcccaatagaaagggtttcagagaatgggaagccctggtctctggaggtttaatctccttctcttcgaatggtacaggattttccattcaaaactggcttgataatagggttgccagatttagcaaataaaaatacaggatgtctattaaatttgaatttcgataaacaactaatttttattttaagtacatctcatgcagtatctgatgcatactgatactaaagaattctgttatttatttgcaattcaaatgtaactcatcatcctgtataatatctggaaactctgcatggggatctcttggaaagaacatattgctccttctgaagcgattctgatccatcgcttctggttactccctgtccttttcctttcacgcagaatatgaaaatggtaaccctgagcaaaatttgtcctgtcttcttacactgccgctctcttcagtcagtagctgaactcattcttctgttttgattgattaaaaacacataccaaaagtgactatgaattatagatttgtttcataattacctagctagttctactcagttactcacaaatgacttcatgctttcaaagctttagtaatattcattatcagatacatttttctattctaaagccttaaaatgataaattacttaccaaagaaaatctaaaagtaaaaaagcaaagatagaaatggaacagaacagagccctcagaaataacgccgcatatctacaactatctgatctttgacaaacctgagaaaaacaagcaatggggaaaggattccctatttaataaatggtgctgggaaaactggctagccatatgtagaaagctgaaactggatcccttccttacaccttatacaaaaattaattcaagatggattaaagacttaaatgttagacctaaaaccataaaaatcctagaagaaaacctaggcattaccattcaggacataggcatgggcaaggacttcacgtctaaaacaccaaaagcaatggcaacaaaagccaaaattgacaaatgggatctaattaaactaaa

SEQ ID NO: 707938 - DNA, 1535 bp, Homo sapiens
tgcacatcatgtctaagttgattatattacagtcagagtgaagctccagagtccttgtctcttacttagagtgtaagtcccttgagagcaggcccatgttcttcttattctccatattatctacagcacatgcccaacacagggtaggttgtcatactttttttttttttttttgagatggagtcccgctctgttacccaggctggagtgcagtggcgtggtctcggctcacacaacttccgcctcccgggttcaagcgattctcctgcctcagcctcccaagtagctgggattacaggcatgtgccaccacgcccagctaattttgtatttttaggagagacggggtttctccatgttggtcaggctggtctcgaactcccaacctcaggtgatctgcccactttggcctcccaaagtgctgggattacaggcttgagtcactgtgtccggccacttttttaaataaataaatctcgggtgtacctccccctgatcccaatagaaagggtttcagagaatgggaagccctggtctctggaggtttaatctccttctcttcgaatggtacaggattttccattcaaaactggcttgrtaatagggttgccagatttagcaaataaaaatacaggatgtctattaaatttgaatttcgataaacaactaatttttattttaagtacatctcatgcagtatctgatgcatactgatactaaagaattctgttatttatttgcaattcaaatgtaactcatcatcctgtataatatctggaaactctgcatggggatctcttggaaagaacatattgctccttctgaagcgattctgatccatcgcttctggttactccctgtccttttcctttcacgcagaatatgaaaatggtaaccctgagcaaaatttgtcctgtcttcttacactgccgctctcttcagtcagtagctgaactcattcttctgttttgattgattaaaaacacataccaaaagtgactatgaattatagatttgtttcataattacctagctagttctactcagttactcacaaatgacttcatgctttcaaagctttagtaatattcattatcagatacatttttctattctaaagccttaaaatgataaattacttaccaaagaaaatctaaaagtaaaaaagcaaagatagaaatggaacagaacagagccctcagaaataacgccgcatatctacaactatctgatctttgacaaacctgagaaaaacaagcaatggggaaaggattccctatttaataaatggtgctgggaaaactggctagccatatgtagaaagctgaaactggatcccttccttacaccttatacaaaaattaattcaagatggattaaagacttaaatgttagacctaaaaccataaaaatcctagaagaaaacctaggcattaccattcaggacataggcatgggcaaggacttcacgtctaaaacaccaaaagcaatggcaacaaaagccaaaattgacaaatgggatctaattaaactaaa

SEQ ID NO: 707939 - DNA, 450 bp, Homo sapiens
caagtgcaaatcccacgaggcaggaggatgctccgtattctttcctattcaaggcacagaggaaagatcagtattgccgtactgtggggaaggggggaagagtggtgcaaagtgaggtcagaaggcagggaggagcagggtgtgggttttatttctaatcacagtgggaagccatttgtacctcatgcccgggaatgacccttcaagaatgtcattctggcttctatacgagaggatacgagtagaaacaggactgccarttaggatgctactgcagcagcctgagaatggaaatgatggtggcctgggttgaatttgtagtgatggagatgtgagaaattggttcaagatacattttggaattgatatcgataggatgtgccaatagattgatgtggaaagtgaagaaaaagtggaatcaaggaggattttaatttcaggttttttggc

SEQ ID NO: 707940 - DNA, 450 bp, Homo sapiens
caagtgcaaatcccacgaggcaggaggatgctccgtattctttcctattcaaggcacagaggaaagatcagtattgccgtactgtggggaaggggggaagagtggtgcaaagtgaggtcagaaggcagggaggagcagggtgtgggttttatttctaatcacagtgggaagccatttgtacctcatgcccgggaatgacccttcaagaatgtcattctggcttctatacgagaggatacgagtagaaacaggactgccagttaggatgctactgcagcagcctgagaatggaaatgatggtggcctgggttgaatttgtagtgatggagatgtgagaaattggttcaagatacattttggaattgatatcgataggatgtgccaatagattgatgtggaaagtgaagaaaaartggaatcaaggaggattttaatttcaggttttttggc

SEQ ID NO: 707941 - DNA, 649 bp, Homo sapiens
tggtccagtccttatgctcacaggcattctccagtgttttgctaacaaaaaygagcaaatgcttaacatccttttgatgttttaacttcctccttcgttctggatccccaagggcatgctggctgtcatctggaggcaatcagagatggtaagaatgcccggtataaagagaattggcaacggtaactccctgtagcaaggtgggttccctgacagaagaggaaaaggagggagagctgcatttgctggtaagagaggctcactgggacttgggatactctgaatcacatgaatttccccaaaccaattcttctaggccaactacttctttctgatcaatgccataacttttgcaatagacctgatgaggctatgaactcaactaatgttttaattcaacatcctacagaatgaaactttgagtgttaggaagcagcagggaataccaagctggtcatcaaatctgagtgagtgggaaactggagcagggagatgaagtcagcagggctgagagccagtcatatgcaggaacagattggagagtaacgttctggagaagtcaagtggaggcaggaagtcaaatgaagtgggctgtgatcctgacatggacttttttttttttttttgagacagagtattgctctgttac

SEQ ID NO: 707942 - DNA, 649 bp, Homo sapiens
tggtccagtccttatgctcacaggcattctccagtgttttgctaacaaaaatgagcaaatgcttaacatccttttgatgttttaacttcctccttcrttctggatccccaagggcatgctggctgtcatctggaggcaatcagagatggtaagaatgcccggtataaagagaattggcaacggtaactccctgtagcaaggtgggttccctgacagaagaggaaaaggagggagagctgcatttgctggtaagagaggctcactgggacttgggatactctgaatcacatgaatttccccaaaccaattcttctaggccaactacttctttctgatcaatgccataacttttgcaatagacctgatgaggctatgaactcaactaatgttttaattcaacatcctacagaatgaaactttgagtgttaggaagcagcagggaataccaagctggtcatcaaatctgagtgagtgggaaactggagcagggagatgaagtcagcagggctgagagccagtcatatgcaggaacagattggagagtaacgttctggagaagtcaagtggaggcaggaagtcaaatgaagtgggctgtgatcctgacatggacttttttttttttttttgagacagagtattgctctgttac

SEQ ID NO: 707943 - DNA, 649 bp, Homo sapiens
tggtccagtccttatgctcacaggcattctccagtgttttgctaacaaaaatgagcaaatgcttaacatccttttgatgttttaacttcctccttcgttctggatccccaagggcatgctggctgtcatctggaggcaatcagagatggtaagaatgcccrgtataaagagaattggcaacggtaactccctgtagcaaggtgggttccctgacagaagaggaaaaggagggagagctgcatttgctggtaagagaggctcactgggacttgggatactctgaatcacatgaatttccccaaaccaattcttctaggccaactacttctttctgatcaatgccataacttttgcaatagacctgatgaggctatgaactcaactaatgttttaattcaacatcctacagaatgaaactttgagtgttaggaagcagcagggaataccaagctggtcatcaaatctgagtgagtgggaaactggagcagggagatgaagtcagcagggctgagagccagtcatatgcaggaacagattggagagtaacgttctggagaagtcaagtggaggcaggaagtcaaatgaagtgggctgtgatcctgacatggacttttttttttttttttgagacagagtattgctctgttac

SEQ ID NO: 707944 - DNA, 1302 bp, Homo sapiens
tatgtcacttttggagagcaatgtgtacatgtcttttgacctagaagttctaattcctgtatgttattattgtttgctaattctagaaatgtattctaagcaaacaataataacatacaagatttagccagaaggattttcatcgtagggttgttgactaacaagacaaacataaatgttcatccaggaacacagaatcacggtgaagccacccaatagaaatctacacaaaacatgtgcatgtgttgggggcaggggkatatcactactgaaagatgttacaatagtcatgatacactagcaaatggaaaaaaaggttatgaaacattatgcagtatataaccaccatttatgttggggatacacacacgattgagaggatattcgtgaaaatattaacaaaggttgtgagagtccaagtgatttttgtcttttctctggattctaagtcttcaataaataggaataacttttgtaaaaagttatgaaattaaaaaaacagaacaaaaacttccaaggaagggaggcagcagccaatactgctttaatgcacagagcaactgattctcccccgagaagcacttggcaccttgggctcacaacacactcagccattccatcctcaggtcctgagacgggaacaggagcacatcgggatgggcagaacccctagtcgcatatcacactacaatctcaaaccctggcacctgcttggaaagcactccaacagtccactagcccttacgaaacacaagaaggaatcgcctgcacttgccagttctctccatgttaacaagatggcagttcaaaagaaggtatacagcaaggggtgagaggtgtctgcaatgcacaaaaatatgtaaatttcaaggcatggaaaaaggtactaaccccatggggagcaattgagaatattaataaaaattattaatgcaattatcttttaacccagcaattccacttctgggaatttatctgaccttctacatacaaagttacacaaatagcactatttataacagcaaaagtgcagaagcaaacaaaatgtcccttacatggggactggttaaataagtcatggtctattcacacgagaaaatacttgatgtactaataaggaaagagaggaggatatatggtaaaatgaaaaaagcaaagggtggaatagtatatagtatatatttaccttatgtacaataaaaaaaagaatacgaatatatacttacattaataggtcctagagatgagaagagcacttaaggaaacagggaacgaagttgacggacaaacaaaaatgggagc

SEQ ID NO: 707945 - DNA, 1302 bp, Homo sapiens
tatgtcacttttggagagcaatgtgtacatgtcttttgacctagaagttctaattcctgtatgttattattgtttgctaattctagaaatgtattctaagcaaacaataataacatacaagatttagccagaaggattttcatcgtagggttgttgactaacaagacaaacataaatgttcatccaggaacacagaatcacggtgaagccacccaatagaaatctacacaaaacatgtgcatgtgttgggggcaggggtatatcaytactgaaagatgttacaatagtcatgatacactagcaaatggaaaaaaaggttatgaaacattatgcagtatataaccaccatttatgttggggatacacacacgattgagaggatattcgtgaaaatattaacaaaggttgtgagagtccaagtgatttttgtcttttctctggattctaagtcttcaataaataggaataacttttgtaaaaagttatgaaattaaaaaaacagaacaaaaacttccaaggaagggaggcagcagccaatactgctttaatgcacagagcaactgattctcccccgagaagcacttggcaccttgggctcacaacacactcagccattccatcctcaggtcctgagacgggaacaggagcacatcgggatgggcagaacccctagtcgcatatcacactacaatctcaaaccctggcacctgcttggaaagcactccaacagtccactagcccttacgaaacacaagaaggaatcgcctgcacttgccagttctctccatgttaacaagatggcagttcaaaagaaggtatacagcaaggggtgagaggtgtctgcaatgcacaaaaatatgtaaatttcaaggcatggaaaaaggtactaaccccatggggagcaattgagaatattaataaaaattattaatgcaattatcttttaacccagcaattccacttctgggaatttatctgaccttctacatacaaagttacacaaatagcactatttataacagcaaaagtgcagaagcaaacaaaatgtcccttacatggggactggttaaataagtcatggtctattcacacgagaaaatacttgatgtactaataaggaaagagaggaggatatatggtaaaatgaaaaaagcaaagggtggaatagtatatagtatatatttaccttatgtacaataaaaaaaagaatacgaatatatacttacattaataggtcctagagatgagaagagcacttaaggaaacagggaacgaagttgacggacaaacaaaaatgggagc

SEQ ID NO: 707946 - DNA, 636 bp, Homo sapiens
tgtttcgagtgtactcttggacccagcacaatctgctttccacgtgtaacaagaatcatcgacttgaaacatacataaaatgaagccttccaaatggcttcccaccacactcagggttaaagcataaccccttgccagctcctacaaggctctgtgtatgcaatctgcccccacctgcctctccagcctcrttccccatcaccctcctctggtctgcagccacatggtctctccttgcagctctactggccctcagggccttcccccattctgttccctctacatcagatcttttcaactgaggctgagaggagagtcggcaatattgaagacatttttggtcatcactgctaaggagagagtgctactggcatctactgggtggaggcagggatgctggtaaataccctacaatgcatagggcaggccatcacagcaaagaatcatctgggccaaaaggtcagtagtgctgctgctgagacactctacatggaagaaatagtcccccacccctctcttagaattgcagattcctttttattcttcaggattcattataaatgttacctccttagagagaccttctctgatcatatgatttaaattaggtcttcccattcaaacccccctgtccat

SEQ ID NO: 707947 - DNA, 618 bp, Homo sapiens
tgaaaatagcaacaaggttgcctatatatcaattgtgtgtcagctgatggtaataatatctaacatttattgcaactattaataatactaataattattaattcatcttcaatatgtgacaagcatttttctactcacttttgttcattatctcagttaatcctccccagattctcataacatagatacttgtgttattcctagtttacaatgtaggaaactggaatttggagaagttaagtgacttcacgaagttaccagttaataatttgcagtagcaaaataatagttaataatttattatatatttcaaaatagctagaagagaagaattgtaatgttccaaacacaaagataaatatttgaggtgatatatattccagtttccctgatttgatcattacacattatatatatgtgtcaaaatatcacatgtaccctcaaaatatgtaaagctatgacatatcaataaaaaatacaaagaaaatcacaaagttgtgacatgaaccgtggtttgtctggcttcaaagctcatgtttaygttcacttcagaaatctttttttagtaaagagaaatagcatgtttgggtttgttaacagcaaatccaaaatagaaaa

SEQ ID NO: 707948 - DNA, 609 bp, Homo sapiens
gaagctttcaccaggtgataaaatccagaaggactgggtagtggactctccagaaggatgaacttcaaccaatgcatgacagaaggcagaagggaatagaagatacatttcctctccattttttcctgtgatggattaccccaaggcattgctttctagctagtctatctggagttgttccacgtggccagttggctgtcttgtctcactgaagcttgtgaagcagtggctaactcagtaatgcattaccttgtattcaagtctcatctttctctgtctcattaccatcttcttttactcttgctaccctagaattttatctcgcaacaaaacattaacacttgaccctttccttgggttctgctttctaccaccctgagctaagatacatactagtcaaaagctagaatagagggctgtacattttattttataatttggcatacatgcataaaactactagcagactggatgatgatgatggctgatgatgataattaatagcttgcatctgtggtacacatactttgcttcagatactgtatgaggtgctttgcatatggttgtgaatcctcacaaccatactaygaggtaggtagtattattatc

SEQ ID NO: 707949 - DNA, 1236 bp, Homo sapiens
gttcctttggaaatcacaaagccaaaaattggtaaaaagaaatcagaagactcagtgcactgtgacatacaaaaaacaatgtgcttttaacataccacaatggaaagaaaaattctgagtttttttkattagaacatttggcatttgaaagaagaaaactaaattattataaaattatggaatgtactcaacaaaaaagtgacataattaaaaaaataataggttggataatatgaaaatatactatatactcacctatttataaaatctctatatttgatatcttgttattagaatccaaactactccaactagtaaaacattcagatgtatttatactacataaatgagacctatatttttataagtgacacctgaaatgtattttctgagagcatattttgatatttactactggtactaaagtaaaagtacatatacatacgtatatatatatatatatagagagagagaaagagagagagagcacgtgagttatgtaaatatacatataccatatctctatatagtgtgcatatgtatatgtgtgtgtatatatgtatacgtatatatatatttgtgtatgtatatgtgtatatatatggtacaagtatatcttcccagctattttttcaatttaaaaaaagtttcataccatcaatttgaaaaaattctaaatttaaaattaatttttatacaaatttaaactagacattaaaaaccaaatattttcattcattaaataagtagacatttattgaatgccagctatgaagcagctattatgtttggagctggtgacataaataggagttagacattatccctgtctttaagaaatgtacactctagctaaatgaatatataaataacttattataatgtatgttaatgactccagtaaaccttagaaaatgatcatgacaaatcagagaaaagtgtattgtactttgtctagttgggtcatctttacttgaagatgaaatatgaactatgtcttaaaggataactagcattttgaatgcagagaaggaatggagggaatcacagataacggcatgagcaaaaggatacagatctggctggaatgttaggtgtgtcgtagggcctagagtaaagatggattaggagggagaggaaggagacaaggctagatggagagtggggcagatatttctgggacacacactacagcctccttgaccacctctaattcaacagcagctcttctagtca

SEQ ID NO: 707950 - DNA, 1236 bp, Homo sapiens
gttcctttggaaatcacaaagccaaaaattggtaaaaagaaatcagaagactcagtgcactgtgacatacaaaaaacaatgtgcttttaacataccacaatggaaagaaaaattctgagtttttttgattagaacatttggcatttgaaagaagaaaactaaattattataaaattatggaatgtactcaacaaaaaagtgacataattaaaaaaataataggttggataatatgaaaatatactatatactcacctatttataaaatctctatatttgatatcttgttattagaatccaaactactccaactagtaaaacattcagatgtatttatactacataaatgagacctatatttttataagtgacacctgaaatgtattttctgagagcatattttgatatttactactggtactaaagtaaaagtacatatacatacgtatatatatatatatatagagagagagaaagagagagagagcacgtgagttatgtaaatatacatataccatrtctctatatagtgtgcatatgtatatgtgtgtgtatatatgtatacgtatatatatatttgtgtatgtatatgtgtatatatatggtacaagtatatcttcccagctattttttcaatttaaaaaaagtttcataccatcaatttgaaaaaattctaaatttaaaattaatttttatacaaatttaaactagacattaaaaaccaaatattttcattcattaaataagtagacatttattgaatgccagctatgaagcagctattatgtttggagctggtgacataaataggagttagacattatccctgtctttaagaaatgtacactctagctaaatgaatatataaataacttattataatgtatgttaatgactccagtaaaccttagaaaatgatcatgacaaatcagagaaaagtgtattgtactttgtctagttgggtcatctttacttgaagatgaaatatgaactatgtcttaaaggataactagcattttgaatgcagagaaggaatggagggaatcacagataacggcatgagcaaaaggatacagatctggctggaatgttaggtgtgtcgtagggcctagagtaaagatggattaggagggagaggaaggagacaaggctagatggagagtggggcagatatttctgggacacacactacagcctccttgaccacctctaattcaacagcagctcttctagtca

SEQ ID NO: 707951 - DNA, 1236 bp, Homo sapiens
gttcctttggaaatcacaaagccaaaaattggtaaaaagaaatcagaagactcagtgcactgtgacatacaaaaaacaatgtgcttttaacataccacaatggaaagaaaaattctgagtttttttgattagaacatttggcatttgaaagaagaaaactaaattattataaaattatggaatgtactcaacaaaaaagtgacataattaaaaaaataataggttggataatatgaaaatatactatatactcacctatttataaaatctctatatttgatatcttgttattagaatccaaactactccaactagtaaaacattcagatgtatttatactacataaatgagacctatatttttataagtgacacctgaaatgtattttctgagagcatattttgatatttactactggtactaaagtaaaagtacatatacatacgtatatatatatatatatagagagagagaaagagagagagagcacgtgagttatgtaaatatacatataccatatctctatatagtgtgcatatgtatatgtgtgtgtatatatgtatacgtatatatatatttgtgtatgtatatgtgtatatatatggtacaagtatatcttcccagctattttttcaatttaaaaaaagtttcataccatcaatttgaaaaaattctaaatttaaaattaatttttatacaaatttaaactagacattaaaaaccaaatattttcattcattaaataagtagacatttattgaatgccagctatgaagcagctattatgtttggagctggtgacataaataggagttagacattatccctgtctttaagaaatgtacactctagctaaatgaatatataaataacttattataatgtatgttaatgactccagtaaaccttagaaaatgatcatgacaaatcagagaaaagtgtattgtactttgtctagttgggtcatctttacttgaagatgaaatatgaactatgtcttaaaggataactagcattttgaatgcagagaaggaatggagggaatcacagataackgcatgagcaaaaggatacagatctggctggaatgttaggtgtgtcgtagggcctagagtaaagatggattaggagggagaggaaggagacaaggctagatggagagtggggcagatatttctgggacacacactacagcctccttgaccacctctaattcaacagcagctcttctagtca

SEQ ID NO: 707952 - DNA, 1236 bp, Homo sapiens
gttcctttggaaatcacaaagccaaaaattggtaaaaagaaatcagaagactcagtgcactgtgacatacaaaaaacaatgtgcttttaacataccacaatggaaagaaaaattctgagtttttttgattagaacatttggcatttgaaagaagaaaactaaattattataaaattatggaatgtactcaacaaaaaagtgacataattaaaaaaataataggttggataatatgaaaatatactatatactcacctatttataaaatctctatatttgatatcttgttattagaatccaaactactccaactagtaaaacattcagatgtatttatactacataaatgagacctatatttttataagtgacacctgaaatgtattttctgagagcatattttgatatttactactggtactaaagtaaaagtacatatacatacgtatatatatatatatatagagagagagaaagagagagagagcacgtgagttatgtaaatatacatataccatatctctatatagtgtgcatatgtatatgtgtgtgtatatatgtatacgtatatatatatttgtgtatgtatatgtgtatatatatggtacaagtatatcttcccagctattttttcaatttaaaaaaagtttcataccatcaatttgaaaaaattctaaatttaaaattaatttttatacaaatttaaactagacattaaaaaccaaatattttcattcattaaataagtagacatttattgaatgccagctatgaagcagctattatgtttggagctggtgacataaataggagttagacattatccctgtctttaagaaatgtacactctagctaaatgaatatataaataacttattataatgtatgttaatgactccagtaaaccttagaaaatgatcatgacaaatcagagaaaagtgtattgtactttgtctagttgggtcatctttacttgaagatgaaatatgaactatgtcttaaaggataactagcattttgaatgcagagaaggaatggagggaatcacagataacggcatgagcaaaaggatamagatctggctggaatgttaggtgtgtcgtagggcctagagtaaagatggattaggagggagaggaaggagacaaggctagatggagagtggggcagatatttctgggacacacactacagcctccttgaccacctctaattcaacagcagctcttctagtca

SEQ ID NO: 707953 - DNA, 1400 bp, Homo sapiens
ctctctcctgggtgccaggtaggcccagaaaccacctgatgtcagcaaggcctggccacccactggtggggaggaagtgggcgggtgcccagggacagatgagccgggcagacgtgccctgaggcagcacagtcagggctgacgtgggcattatgcacctcggggctttcagagctggctccggtcccgtttgcccacatcaagcaggtcagagtggagagggccaggggcgctggggtcaaggcatgcactgaccaggcgtctgtccccactcctcaaaacacagccaggagatgagcgcactggggtggtggcctgtggaagaggggcagggtctgtgtccagatgtggccggagggtggggtcgactgtgtgcggtacgtgtgtatggaggtgactgtgtgtctggcatgtgaatgtaagattttaggaaggtgagtgagcttgtgcacaggtgtgtgtgtgtgcacgtgtgtggctaagcatgtgtgagtgagtaggcatctgtgtgccgtgtgtgggagccgggcagggggcagcgtgtatggctgagtgtgccagcacattgctgagcatgtactcgtgtgcgtctgggtgtgtgaatgacaaaataagtgtatatggttaattacatgagtgtgtgagtgagtgtggggaggggatgtgtgtatccttgattgtgggagtcagagtgtgtgtatgtgtgtgtgtgtatgtacatgcgctgttgtgaagagttctgcaagaacccctccccttttttaaattttattttttgagatggagtcttgctctgttgcccaggctggagcacagtggtgcgaccttggctcactgcaacctcygcatcccggcttcaagcaattctcctgcctcagcctcccgggaagctgggattacacacgcgcaacaccacgccccgataatttttgtattttttttttagtagagacggggtttcaccatgttggccaggctggtcttgaactcctgaactcaggtgatccacccgcctgggcctcccaaagtgctgggattacaggtgtgagccaccgtgcccagccaagaaaccccttttgcatacagagctttgctcctttgcacgaaaatgcttatgaacaggtggggtcagctggtggatgtgtttaaaattttgacagaaatggccaaggagctctttagaaagggcagaggggagcggtgatatccaagttgatccctgaccagtcagaacaggtgtcagctgcaaatacccaagccagctgagccagccctggtcactccaacttctgctcccaccagcagcatccaagaaggcttgaccttgagtcattctcaggccatccccaaagcaaacagtgaatggtgagctttataataacaaagtcaacatattataa

SEQ ID NO: 707954 - DNA, 825 bp, Homo sapiens
ccagcgggaggagggatgaggcctggggggcctggctctggcacaatgcagagcattgagctcatgccagccttggctttgggtttggacaaatacagtaatctgggcaggactcacacaaagacctgggggccaggtcaggcgaggggcgtcaggttacccctgtgggctgcagccacacaggcggcttggggggtgtattttttttccctaaagattatcattaaatgagccctcaccgaggcctcagcaggcaggtttcattacaggaaaaactgaggtataggggtttgcaggcctaacgggacacgctgtcactgtgataggaacagcattagcaataataacagctgtccttccggactggttcccaagggctaggccctaggtgaataataagccttttctcgatcctttctgcagcccgagaggaaagccccatgctatccccatttcatagatgggaaaactgaggcttgaggacactttgcggcctccaagggctgttctcttcattcctccagcagagtggatatgagacggtgcagggtctggaatgtctgggcagaaggaagagctggagcaaaggcctggaggctggagagcgctgtcggggggcaagtggggcagtgtcccactgcggggtttcatctcagctctgccatgtcttggctacgtgacctctgacaccctactgggcctctttgaycccagactcacctgtagaatgggtgtgtgagaagaaaaccttctggagcggggtgttgaggagagaacagtgcctgacacatcataataataatgctgaatagatgttattttcat

SEQ ID NO: 707955 - DNA, 3059 bp, Homo sapiens
tatcacaaaagtttttaattttgctgaatcaacgtacctgggttttgttttgttttgttttttttggtggtgttgactgtgctccaagtccattttttagtgaaaatttatcatatttctatattatcaaaactatcttcaaaagaaaattcaaagctttaaaaataaatatgtttttacagggcacagtaactcatgcctgtaatcccagtgctttgagaggccaaggtcaggggattgctggaagccaagagttcaagaccggcctgggcaatagaataagaccctgtctctacaaaacaatttttttaaattagctgagggcatgattgtacactcctgtagctctggctactgggaaggtttaggtggaatgagcccttgaggccagaagtaggagttccatattacaaggagctatgatcaagccactgcactccaatctgagtgacagaatgagaccttgtctcaaaaaaaaatttttttaataaaaataaatgtgttttgtcacttcttatgccttacttcttgtataatatgataaaagtagtaagttttccctatggacaaaatactatgtttaaaatcttatgtctttcaaagtctttaattatattgtactccaagtcacaatagtctttgctgtaacatctagaattttcttcccacctgaaatttccttttgtctttaaatttcaatttcaaatgtaattaatttccaaacttacatattatattataacttcattttttgatctggatcaaaagtaaccacaacacattatgatttgtatgtttataaaaaggtatcctttatgttctgctggtagtagtccccataaagtgcacatattcagaaaaacctcagacatgagccaactgcataatatatttgtaatcagttgtttaaatcatgctatcgtatgtgattttagcattagtctgtacttttctaaacatcaagaaaatcctaagaatttgccatatttctatacatcttaatcacaaaatagtaaaatttaaatcactctttttgttgattctgaaatatttattaaaacgaagaacctggtrtgcaggatttttgtttaaaatgaaatgtaatgtgttacattatttttgaaaaatagaaaattcatggaattttttttaacatcttccaatcctttacccctaaccccgcatctagcccctggtaaccaccattctactctgtacttttgagttcaactttttgtatcccacatgtgagatcatgtagtgtttgtctttctgagcctagcttatttcaatttcacttaaggttctccaggctcattcatgttgttgtgaatgacagaatttccttcctttttaagattgaataatattccattgtgtatatgtaaaccactttttctttattcattcatctactgatggacatttaggttggttgcatgtcttggctattgtgaataatgcagtgaacacgggagtgcagatatcttttcaacatactgatttaatttcctttggatatatacccagtagtggaattgttagatcatatcatctgtttttgattttttgaggatttacatttctacccacagtgtgtaagagttcccttttcaccacatcctctccagcacttactgtctttcatctttttgataatggccattctaacaggtgtgaggtgatagaattgttactgttattatagtaggggtatattatcatcaactggctcttgataaagtggtcactggaatcctaattgccaaatttgttgctattttttcagtatttgcctgctcatgcttattgcatttgtttttgaccatttcgtcctccttgcattctcacctcccctaactttgctaccaccacttacttttgactctcttttttcttgtttaactgttgtttacagtcatctttatcagtcgtggatgtgtgtattcctctgaaatccgaggttttggcttttacaaactatacccaaatgaagggtctcacttacatggcttcaggaaccatctttaccagggtttcccaacccccaggccacagacaggtatcagtccatggcctgttaggaaccgggccgcacagcaggaggtgagcgggcagccagcagcatactgtctgagctccacctcctgtcagatcagtggcatcattagattgtcacaggagcacgaatcctattgtgaactgcacatgtcaggggtgttggttgcactctccttatgagagaatctaatgcctgatgatctgaggtggaacagttcatcctgaaaccattctcccaccctctctatggactacgaaatctgtcactagtaccaaaaaggttggggaccactaattgttgcaacagtgaatcataatttatctccagccccagcctgtttccccttaccaataattttctaaatggtttaataatttaaaaattatgaaacatgatgtacagagaagttaataaaacaaagttacattgtatgtgtacaaatattatacataaaacttctaaccaaggttaagacagacaaaattgcctgtactcaagaagtctattcagtcacaccctgttccctatcctgacttttatgacaatcactcttttgcctttccttatgattgtgtcatcttcctatacatttctgatctatacagtttagttttcccagcttctcagttttgcatatcgccaactcttcaatctttcaaaatagaaaagtctaagtaagtataaaactaaataaaaggtaatttgagtcatttttcaaacttttttgagtctataataacatttctcttctccctaccactccgttagttcatctgcttaccccttacctgaactgttgttgtaacctcccatccagtttccttttctccagcttcagctcttctacagattaaaaaagctgtctctctaaaacatagaaatttcattgactaccttttaaataccaatcatatcgaaactccttagcataaaatcctttttattattgcccaaactgaatttgtagcttcatctctcaccattatctccccatcct

SEQ ID NO: 707956 - DNA, 3059 bp, Homo sapiens
tatcacaaaagtttttaattttgctgaatcaacgtacctgggttttgttttgttttgttttttttggtggtgttgactgtgctccaagtccattttttagtgaaaatttatcatatttctatattatcaaaactatcttcaaaagaaaattcaaagctttaaaaataaatatgtttttacagggcacagtaactcatgcctgtaatcccagtgctttgagaggccaaggtcaggggattgctggaagccaagagttcaagaccggcctgggcaatagaataagaccctgtctctacaaaacaatttttttaaattagctgagggcatgattgtacactcctgtagctctggctactgggaaggtttaggtggaatgagcccttgaggccagaagtaggagttccatattacaaggagctatgatcaagccactgcactccaatctgagtgacagaatgagaccttgtctcaaaaaaaaatttttttaataaaaataaatgtgttttgtcacttcttatgccttacttcttgtataatatgataaaagtagtaagttttccctatggacaaaatactatgtttaaaatcttatgtctttcaaagtctttaattatattgtactccaagtcacaatagtctttgctgtaacatctagaattttcttcccacctgaaatttccttttgtctttaaatttcaatttcaaatgtaattaatttccaaacttacatattatattataacttcattttttgatctggatcaaaagtaaccacaacacattatgatttgtatgtttataaaaaggtatcctttatgttctgctggtagtagtccccataaagtgcacatattcagaaaaacctcagacatgagccaactgcataatatatttgtaatcagttgtttaaatcatgctatcgtatgtgattttagcattagtctgtacttttctaaacatcaagaaaatcctaagaatttgccatatttctatacatcttaatcacaaaatagtaaaatttaaatcactctttttgttgattctgaaatatttattaaaacgaagaacctggtatgcaggatttttgtttaaaatgaaatgtaatgtgttacattatttttgaaaaatagaaaattcatggaattttttttaacatcttccaatcctttacccctaaccccgcatctagcccctggtaaccaccattctactctgtacttttgagttcaactttttgtatcccacatgtgagatcatgtagtgtttgtctttctgagcctagcttatttcaatttcacttaaggttctccaggctcattcatgttgttgtgaatgacagaatttccttcctttttaagattgaataatattccattgtgtatatgtaaaccactttttctttattcattcatctactgatggacatttaggttggttgcatgtcttggctattgtgaataatgcagtgaacacgggagtgcagatatcttttcaacatactgatttaatttcctttggatatatacccagtagtggaattgttagatcatatcatctgtttttgattttttgaggatttacatttctacccacagtgtgtaagagttcccttttcaccacatcctctccagcacttactgtctttcatctttttgataatggccattctaacaggtgtgaggtgatagaattgttactgttattatagtaggggtatattatcatcaactggctcttgataaagtggtcactggaatcctaattgccaaatttgttgctattttttcagtatttgcctgctcatgcttattgcatttgtttttgaccatttcgtcctccttgcattctcacctcccctaactttgctaccaccacttacttttgactctcttttttcttgtttaactgttgtttacagtcatctttatcagtcgtggatgtgtgtattcctctgaaatccgaggttttggcttttacaaactatacccaaatgaagggtctcacttacatggcttcaggaaccatctttaccagggtttcccaacccccaggccacagacaggtatcagtccatggcctgttaggaaccgggccgcacagcaggaggtgagcgggcagccagcagcatactgtctgagctccacctcctgtcagatcagtggcatcattagattgtcacaggagcacgaatcctattgtgaactgcacatgtcaggggtgttggttgcactctccttatgagagaatctaatgcctgatgatctgaggtggaacagttcatcctgaaaccattctcccaccctctctatggactacgaaatctgtcactagtaccaaaaaggttggggaccactaattgttgcaacagtgaatcataatttatctccagccccagcctgtttccccttaccaataattttctaaatggtttaataatttaaaaattatgaaacatgakgtacagagaagttaataaaacaaagttacattgtatgtgtacaaatattatacataaaacttctaaccaaggttaagacagacaaaattgcctgtactcaagaagtctattcagtcacaccctgttccctatcctgacttttatgacaatcactcttttgcctttccttatgattgtgtcatcttcctatacatttctgatctatacagtttagttttcccagcttctcagttttgcatatcgccaactcttcaatctttcaaaatagaaaagtctaagtaagtataaaactaaataaaaggtaatttgagtcatttttcaaacttttttgagtctataataacatttctcttctccctaccactccgttagttcatctgcttaccccttacctgaactgttgttgtaacctcccatccagtttccttttctccagcttcagctcttctacagattaaaaaagctgtctctctaaaacatagaaatttcattgactaccttttaaataccaatcatatcgaaactccttagcataaaatcctttttattattgcccaaactgaatttgtagcttcatctctcaccattatctccccatcct

SEQ ID NO: 707957 - DNA, 1535 bp, Homo sapiens
acacatgcacacacatgtttactgcggcactgttcatgatagcaaagacttggaaccaacccaaatgcccatcaatgatagactggatcaagaaaatgtggcacatatacaccatggaataccttgcagccataaaaaaaaatgagttcatgtcctttgcagggatatggatggagttggaaaccatcattatcagcaaactaacagaaaaacagaaaaaccaaacactgcatgttctcattcttaagtgggagttgaacaatgagaacacatggacacagggagaggaacatcacacaccggggcctgtcgtggggtggggggctaggggagggatagcattaggagaaatacctaatgtagatgacgggttgatgggtgcagcaaaccaccatggcacgtgtatacctatgtaacaaacctgcaygttctgcacacgtaccccagaacttacagtataataaaaaaaaagaaaaagccctaggtactaattatttatcccacccttttaaatgctgaaggagaacattaataagcagacagatgggagtactaacaatacaagacccaaataacatattcgttcttacctgatgtggactgcttcatcatgttatgcattaagagacaaagtataaaaagtaaaaacatgtagaatttatttaaataatatttaagacatctgacacactcagcacaagtttaatagttaacaaaatctttttttataacatctaaatctactttaatggaatcttaactttgcattatcaataaagagatcggattttagaatttctctgtgtgtattaaacaatgctggtcccccaaaaacatttagtaatgagaaaaggaaagcgataagttattatacaatttacaaagaataaagcataaaaatgcagtatagttaataagaaaacaggaaactgtcatgttcatagtctgatgaaaggttttgacaggaaacagcagagtttcttactgtatgatagtaaaaattcaaacactaaaaaaacactatttataaaagattacagctattccacgcaagttatcattgaaattctacagcagggataacctgtaaagatgaatattctgaagccccaaaggacttcatcatcattaaggatacataagtatttttaaatttttcattagtctactttattggctaaaccagtagatattaagacagaaatttcttttgtgaaatagagaagtgtcatggttttagagttttgtagtctttaaatgtaggttctttataagtgataaagaaatctgtgccgagaaaatatgatcacctgggcaagtgtctgtgtggctagaggagacaatgtgctgtgtgtctgctttcttttagcacatcataggacactggtaacttaaaaaattacagttgatttttttttacacttggttttaaagagacgtaacaagttatccttcaattttaacattggggtaatggaattaataatacaatcttataattatataatgctttacagttaaaagtgctttcatgc

SEQ ID NO: 707958 - DNA, 607 bp, Homo sapiens
tgcattctttattgccaactttgcagagttctcacaggaatttagcaagtacatttctgttggattgaggcaggatttttatcttttgcctgttgcctttttctccggaattctgaaaactaaaataacaacacaaagaagcaacagcaaaagccacagcagcaatactgcagacctccatctaaactagctactaaggttctttctgcatctggtcccacctgctctgcttttccttttgtattgcacaatwtaagattataggatgcagcccattagcttccatttgcttagggggggtccctctctccttccccacccccatctgcatgcacatgtgctcagccagatgcatgctcacacacgtacacacattatgctttatcccatcatgcttcctggaaattaagatttcaacattgattcctagaaaaaatgttagagacagtcctctgcagaagtaggcattttagtcttctggcacactaagactctgggtgttacatccaagaagggtatacccaagagaaagaatgaatatacatatcattgggtgaatggtctctgtttagttccgtatatgtaatagttaatgataagctatttc

SEQ ID NO: 707959 - DNA, 612 bp, Homo sapiens
tgaacatcagagggttctcccttctctaaacaatcccaagtagccactctgctactctgtcatatccctaccttaatgttctctttgtagcacttatcatctacaacgtccctatttcttaagtctgtatgtcatatgtggtgcagcttctcttctccatgggagccaggacggttctttcttgctgactggmggttctctcgccagtacccctctgccagtccaggtccccctccccatgcttcatcatgcagtccactcctctatggaacctctacagattcttccaaacacagctttttctctcttttctctccaactcccacatattccttaccaactccttacataattacacagcctagtgatattatctctttattaataaataatgtttataattaccttgctgtttattgagggctctgtgctggtgattatgttaaggattttaatacagataatttcatttaatcttcacaacagctctaggaagccagttttatcatcaccattttatagatgaagaaactgtgccaaggccacagccagcaagtgtggcagaggcaatctgactccaaaacccaggctgtttacattatccctatcatt

SEQ ID NO: 707960 - DNA, 662 bp, Homo sapiens
agattttggttttcttatactgaagattacttggactcagaacctgtaccaagtcactgccctgctcagtgggctcatattaaaactacttctttccagccctcccctctagtctctcactccactaatttttctctggcctccaggaaaatgaaatcaaagatttctaaccatgtttattaataaattaatgtatagcttgaaggaaatggacatggcttgtggactataaagcattactcttacaaaccaggagcagaactggacacctagcagacagactacacatctctgattaactaacttgttgtgcctgcaccaatgacacaataccttctggttctagtgacaattgtatgagccaattcctggaataaatttcttcgtatatataatttctgtttctctgtagaaccctcatacaatactgctatcatatatatttatcaacctactgttagtatctgctggactttagtttctactgaatgagcttggaatttcttcaatggctccattmtatatgaattagcaaactttaattttgccagggcactcttccattctttacctatatcagcaattgagtcatcaaaaggaggctccacatactgaacattgtgaattgactctctcagtctttctcttaaaatctgtgtata

SEQ ID NO: 707961 - DNA, 619 bp, Homo sapiens
attaataattagagcctaaagacttgggcataagtttygctatctggttcactcctcaactaacctgtgcttttcctacatcaagggaaacacacaaacctccaagccatgtaggtttgctcctcttcagtttaaagataatattccttaacacagaagagaagacaaatggaaagttaagagctttgctttctcttaattttcttgtaatagcatagcttgccactaaaagtgagctgtttcttccccgtttctcttgcttgccctgaactaagcttacagtgggctctgtcctttctgacactgacaccttcttgagagcagggctcctctttggcagctctctttggtcatgagcccctcctgccaccttcagcacatgttcatgtcaaaaagaaattgtcttcagagacagtccatgcagaaaaattcttggcattcgagagaaaactccaggtaccaaattggagcccagattgttagggatactgactaatagctttgtagttaactagtctcaagttcaaatcctagttcttacaatctacagccgtatatccttgggaaataaaaatatctctctaagccttagttttctcatctgaaaaaaaaaaagaaa

SEQ ID NO: 707962 - DNA, 619 bp, Homo sapiens
attaataattagagcctaaagacttgggcataagttttgctatctggttcactcctcaactaacctgtgcttttcctacatcaagggaaacacacaaacctccaagccatgtaggtttgctcctcttcagtttaaagataatattccttaacacagaagagaagacaaatggaaagttaagagctttgctttctcttaattttcttgtaatascatagcttgccactaaaagtgagctgtttcttccccgtttctcttgcttgccctgaactaagcttacagtgggctctgtcctttctgacactgacaccttcttgagagcagggctcctctttggcagctctctttggtcatgagcccctcctgccaccttcagcacatgttcatgtcaaaaagaaattgtcttcagagacagtccatgcagaaaaattcttggcattcgagagaaaactccaggtaccaaattggagcccagattgttagggatactgactaatagctttgtagttaactagtctcaagttcaaatcctagttcttacaatctacagccgtatatccttgggaaataaaaatatctctctaagccttagttttctcatctgaaaaaaaaaaagaaa

SEQ ID NO: 707963 - DNA, 2696 bp, Homo sapiens
  misc_feature 948, 956, 971, 972, 973, 974, 975, 976, 977, 978, 979, 980,981, 982, 983, 984, 985, 986, 987, 988, 989, 990, 991, 992,993, 994, 995, 996, 997, 998, 999, 1000, 1001, 1002, 1003,1004, 1005, 1006, 1007, 1008, 1009, 1010, 1011, 1012: n = A,T,C or G
  misc_feature 1013, 1014, 1015, 1016, 1017, 1018, 1019, 1020, 1021, 1022,1023, 1024, 1025, 1026, 1027, 1028, 1029, 1030, 1031, 1032,1033, 1034, 1035, 1036, 1037, 1038, 1039, 1040, 1041, 1042,1043, 1044, 1045, 1046, 1047, 1048, 1049, 1050, 1051: n = A,T,C or G
  misc_feature 1052, 1053, 1054, 1055, 1056, 1057, 1058, 1059, 1060, 1061,1062, 1063, 1064, 1065, 1066, 1067, 1068, 1069, 1070: n = A,T,C or G
acaccactacacttgaagtacgctacttgaaaatttgttttaacaacatgattgtgtaattaaaatgttagttattcagctttcaggtacctgctgagaagctcaccagtttaacttggcaacactattttctttaagtgagttacaggcttctgtgggccatgagaaatgatgctttttgtaaatctcctgctccacggtgaaaagccaagatctgctgcctaatgaggtattatttttggaggcaagcaagcaagctctgaccattgggttattatttgcaatattgctctggaaacccattaccaaaggagcaataggtatatggaaaggaaaagaaattactttggctcagagctaacagtgtaacagcgacatcgaactagaggaaacggggtctgggatcctgtgcatcaattggtaggtaatgagagcctgaactcctaaaggagaaacccacagtagagccctgcattagcatatgccaatttatatcaggctctaatgtaggcagagaggcttctaaatgaataattgctgagggggcaatggtgggagtcatctttcgaagagttgttttatttttttctctggccactgcaaatatgagcttaataatcctttcagtgggtactgtgttatcataaaataatctaaatgctactaaatggtatttaaaatgatttccagacactggcagacttgactgaatggcaattcgctgctaatgcatctctagtacagcatgtgagaagcacggtaatgaggccacattgttgggatcgaaatccttcaccatggttatttttgcttccaactttgacccccagccagtttgtggcattatgcctcacctctcacttatttccaccttttttacaggtaccctgttcacgatcctgggtctatggcaatgaataagcaatggtgtaccactgtttcagtatnccatttgntacatttggtgcagnnnnnnnnnnnnnnnnnnnnnnnnnnnnnnnnnnnnnnnnnnnnnnnnnnnnnnnnnnnnnnnnnnnnnnnnnnnnnnnnnnnnnnnnnnnnnnnnnnnnagctaaaaagatgaaggtattggcaatgcacttttgttcatcatgtctctcccctgatatatgtactccaatcacayaaggtacagtggaagttgaggtggaaacaaaagtttcagaagctctgaattcctcattgaatcatgtgctgcctgagtgagacatacaaggagatatgcttaatgaccccggcactgtagtatgacactgaatggtttatcagcaccctggaaatcagggcattcatgccaagaaaaggcacattgcctgtgtgtttctctattgagacacagaataattcagagaggagagagacactgtttatattaaaaatgctttatttgggtagcttttttgaaaggaagataatggagtgcttccaggtcttaatttttgttgttgtttgtttttctttttcctgtggtaaattgcacataatataaaattcttgtttttagaaataatttgaaatcaattccaagctacaatctctgcctctcttgctcccccaccatggggaatagaggtgggaagcacagagcatcttccactttcctttccagattacagcaaaatgtcaagaagtggtaaaggagggctggaggcacaagaacatttacatctcacgctgctgacaggcagccagctggtgatggtgcctcagagcagccatgcagagagaaaaccacctcagagcatgggaggctggtgggatcacaggccaccatgctcctggcaaggatgcgatgagaatagtggatttggagaacagcaaatccgccaccttgaatatcactgacagaactctgcaaatagacattgaataaacttggagaagagggtcatgtggatccttccaaaacactttctccatgtgattttcctgaagaggaattagccaaagaagataaggacctggatctcccacacaactgagacaatgcacaggcatacaaaattggggttaataagggtgagttatcccaaaaaaatacggtagcctgctcagacaagcactctggttgagggtatcaagtttgtattcttaattcctggaatgttgtcaattaatgtcaagtaatcaccaaataaaatctgagtcaactggaacagagacttaagctacctcatgctatagacaaatttatttggcataagattgatggagcgcatgaaattcactcacctcatcaagccaggatttcaaaagtcaaaatatttttcaggttagagtgagaatcccctgaaaggtgatgagggatggctggaattaacccagtagtacatatcagggctgagggaacaaagctacaatacaatccatctgaggaggaaattttcccttaggttagggaaataacattaattagaatatttatgttgggtttaggttataaattcaggcatagaaatttctctttccatccccacccaatgatatctgaggaatatgaaaaatataggccagtaatgattaaaattgtggatgtcatctgttgaggtcctctcaaaccctgtgacagtgacactgggaacaattcatttggaagagaattaggtaacacatgccctttgacctacaggttccatttcttttattattattattattatactttaaattttagg

SEQ ID NO: 707964 - DNA, 659 bp, Homo sapiens
tcccagccatcccagcagtgctgctccctgctccccatagaaaatcctagactaagggctctaaaacagctcatgtcctcagactaagcaaccycactcctggaagcaagcccaagaacaaagagcaacagtctgccatccttacgtcaatcatacagcacccagcccccaccccaggacagccgacgccagcacagccaggggaagggacaagcaccagaatttccctgcaaataaaccccaaaataagcaaacgtaaatatgaatgtgggcaaggtcttccactaaaaatcccaccgtggctcacgcctgtgatcccagcactttgggaggccgaggcgggcggatcacgaggtcaggagatcgagaccatcctggccaacacggtgaaaccccgtcgctactaaaaatacaaaaaaattagccagacgtggtggtgggtgcctgtagccccagctgctcgggaggctgaggcaggagaatggcgtgaacccggcaggcggagcttgcggtgagccgagatagtgccactgcactccagcctgggcgacagagcgagactccatctcaaaaaaaaaaaaatcccgccaaaagggactacacagctattgctaacactttcatttcagggctttctacttcctctgaagttaagtgca

SEQ ID NO: 707965 - DNA, 1238 bp, Homo sapiens
taaccttgtgaatttagcacaattctaacgagagcaaaaascagcgacataattaattttctaaacagagagaaaaatactgctaaggcaaatccaaggtgttccctggattttagacaaaatcagtggaaaggaaccacactgaaaactatcttggccttctgatttgctttctgttacaaagcattatccatagctaaatatgcaaactgatatattcaaactcaaattcacaatgtaaaaattgtcaatccactcattttgcaactgcaggcatactatgaacatctactacactttttgctgccccctactttgtccaacctatggataccacaacagacctaactcagaacccaaaacaggaataaaatttggcctatattcgatggttgggacgtagagtctaggtaactatgtcagaatcaccacttctctttgaggcttctctcattcatccatccctctgttgctttcctcttttcttctctcttgaagctatctactcaagtcttgctgactacaaacctaattttcctattttctcatggtcttcttttttaaaaacattttattagagatgggatggtctcaccatcttacctaggctggtcttgaacccctgacctcaagtgatcctcttgtgtcagcctcctgagtagctgggactacaaatctgcaccacggcgggcttcttttggttttgaatcacttccatgcccttgtaggtcttttgctagtatttctacaggacagctttctcccaaaatgcaatttcttttctgaaaccctgtttctaccctactcctaggtccagccttcattccccagagctatagcccaggctaagcctttgaccttctgcttaatctgagaagaaaatttggactcttataatattttcagctaaaaatattctagtgagcaacttaagtcatttttttttctttctctgaaaggaaataaaaagtttgaaagagtaataccaaactaagtaggcatagttacttccaaattccttaaataatgatgatttccaacatttcacaggaaacattatcaaataatccagataaaaagatatgctgcacagtaagtatataaatgtagcaactgccacaaatgaaatcatttcttagcactaaatcttttaaagtgaaaaacaacagtttagtgtgttggtacaaaagcctgtttgagccatgtgcagtttgtgacaaaatctactgaaactgcaa

SEQ ID NO: 707966 - DNA, 1238 bp, Homo sapiens
taaccttgtgaatttagcacaattctaacgagagcaaaaaccagcgacataattaattttctaaacagagagaaaaatactgctaaggcaaatccaaggtgttccctggattttagacaaaatcagtggaaaggaaccacactgaaaactatcttggccttctgatttgctttctgttacaaagcattatccatagctaaatatgcaaactgatatattcaaactcaaattcacaatgtaaaaattgtcaatccactcattttgcaactgcaggcatactatgaacatctactacactttttgctgccccctactttgtccaacctatggataccacaacagacctaactcagaacccaaaacaggaataaaatttggcctatattcgatggttgggacgtagagtctaggtaactatgtcagaatcaccacttctctttgaggcttctctcattcatccatccctctgktgctttcctcttttcttctctcttgaagctatctactcaagtcttgctgactacaaacctaattttcctattttctcatggtcttcttttttaaaaacattttattagagatgggatggtctcaccatcttacctaggctggtcttgaacccctgacctcaagtgatcctcttgtgtcagcctcctgagtagctgggactacaaatctgcaccacggcgggcttcttttggttttgaatcacttccatgcccttgtaggtcttttgctagtatttctacaggacagctttctcccaaaatgcaatttcttttctgaaaccctgtttctaccctactcctaggtccagccttcattccccagagctatagcccaggctaagcctttgaccttctgcttaatctgagaagaaaatttggactcttataatattttcagctaaaaatattctagtgagcaacttaagtcatttttttttctttctctgaaaggaaataaaaagtttgaaagagtaataccaaactaagtaggcatagttacttccaaattccttaaataatgatgatttccaacatttcacaggaaacattatcaaataatccagataaaaagatatgctgcacagtaagtatataaatgtagcaactgccacaaatgaaatcatttcttagcactaaatcttttaaagtgaaaaacaacagtttagtgtgttggtacaaaagcctgtttgagccatgtgcagtttgtgacaaaatctactgaaactgcaa

SEQ ID NO: 707967 - DNA, 1238 bp, Homo sapiens
taaccttgtgaatttagcacaattctaacgagagcaaaaaccagcgacataattaattttctaaacagagagaaaaatactgctaaggcaaatccaaggtgttccctggattttagacaaaatcagtggaaaggaaccacactgaaaactatcttggccttctgatttgctttctgttacaaagcattatccatagctaaatatgcaaactgatatattcaaactcaaattcacaatgtaaaaattgtcaatccactcattttgcaactgcaggcatactatgaacatctactacactttttgctgccccctactttgtccaacctatggataccacaacagacctaactcagaacccaaaacaggaataaaatttggcctatattcgatggttgggacgtagagtctaggtaactatgtcagaatcaccacttctctttgaggcttctctcattcatccatccctctgttgctttcctcttttcttctctcttgaagctatctactcaagtcttgctgactacaaacctaattttcctattttctcatggtcttcttttttraaaacattttattagagatgggatggtctcaccatcttacctaggctggtcttgaacccctgacctcaagtgatcctcttgtgtcagcctcctgagtagctgggactacaaatctgcaccacggcgggcttcttttggttttgaatcacttccatgcccttgtaggtcttttgctagtatttctacaggacagctttctcccaaaatgcaatttcttttctgaaaccctgtttctaccctactcctaggtccagccttcattccccagagctatagcccaggctaagcctttgaccttctgcttaatctgagaagaaaatttggactcttataatattttcagctaaaaatattctagtgagcaacttaagtcatttttttttctttctctgaaaggaaataaaaagtttgaaagagtaataccaaactaagtaggcatagttacttccaaattccttaaataatgatgatttccaacatttcacaggaaacattatcaaataatccagataaaaagatatgctgcacagtaagtatataaatgtagcaactgccacaaatgaaatcatttcttagcactaaatcttttaaagtgaaaaacaacagtttagtgtgttggtacaaaagcctgtttgagccatgtgcagtttgtgacaaaatctactgaaactgcaa

SEQ ID NO: 707968 - DNA, 673 bp, Homo sapiens
tagatgttctttctttttaaggctactgtgaatggaattgaatttttgtatagctctcaacttggctgttgttggtgtataggagtgctgctgatttttgtacattggttttgtatcctgaagctttgctgaagttgtttatcagatcaaagagcttttaggcagagatcgtgagcaaccacctacttttaaaagaactgttttcttaacatattttatctttttagttttaatcatgaaccatgctacctattgatagtatgcaatttatcctaagcccagcataaaaaactaaagttgggggaaaaagcaattttttgatgtgttcctttatttttgttgatatcaacaggttttgtctgtgaacagaaagatgtactcaaagcatctaagaggtcttagagatcatctgttrtaactcacagatgagcaaagtagaagctgagatttaatgttcaacattaaattaatgtggaggaggttacttaaagttacacaattagttaaagaagtagtaaacacgagaactttgagttctcgcttcttagctaggaatcaaattgtacaaaaaacaaaaaaataaatttttatgtttacaagtcagttctttaaaaattcttgaaaataggaattgaaaatctatcttaattcaaatgtttctaggaaaagctta

SEQ ID NO: 707969 - DNA, 1285 bp, Homo sapiens
tgacaatataggaaaatatgtagaagctaaagggataataaagtacaatacgtgatgtttaaatatgcatagcatgttatttttacctataatattctcttcatcctgcytcacaattaagcttaactcattaaaagttattgggaaatggagaatcatacttaagggactattcaagagaatttcagcttatactctcaaagcctagataaaagtattctatatttgtacaagctaccctcaggcagttgtttatgttcagcaaagagttatgtaaccttttgatttcagttacctctttcattaaagaaacaattctgaataccattatttatttccttttggaatctcaccaggtgaaacgatcattctaattctatgtatgttggctaccagaaaactttggcattggttttgcagtttatacatcctgtttgtgttctctcacattgtgagcagtcttcctatttgcttatacaatagctctctccacatctacactcccccttgtttttcttgtgtaatttcttatgtcattagagcttacctattgaaaatttttaattaacgccacaatgcagccaatgcgtttagttttttggcgatgtgctttggaggaatcctttttacagtaacataaataatcaagtattaatttgaatccccccaaaactattttcatacatgagaaatcaatttcaacgaaaagagaaagttaagaagttttcacaaaaacaacctcaatacaactaaaaggacttgctattggaaattaaggtacaaataatcgaactgtacaatcacaggagtttatagagcaaaaagacaatgctgagtgctatcatacttgattgacataagtgcattgatgtgatgtgagtagtagttgcaattaggagaactattgaatgatacaatgcgaactcatcttctcccccgacaaacaggagacaggaacacttgccacttcggtggaagtcaagggcagattgtcattgcagaagtgctcaatcatttccttctgtgggaggactcatgcttccacttcttactgctttatagaagaatgtgaaagattggagatttttattagcttttaagaaagaatcctcagtacattgaaaagatgatttaataatatctgccatcaaaattgtaataattagctgatgatgatatgacattaaaaatacaagaacttgaaaacataggcacagctccatatatagaatgctatggtgccattatttttcagttttgataaaagtctgcagagggtatagga

SEQ ID NO: 707970 - DNA, 1285 bp, Homo sapiens
tgacaatataggaaaatatgtagaagctaaagggataataaagtacaatacgtgatgtttaaatatgcatagcatgttatttttacctataatattctcttcatcctgcctcacaattaagcttaactcattaaaagttattgggaaatggagaatcatacttaagggactattcaagagaatttcagcttatactctcaaagcctagataaaagtattctatatttgtacaagctaccctcaggcagttgtttatgttcagcaaagagttatgtaaccttttgatttcagttacctctttcattaaagaaacaattctgaataccattatttatttccttttggaatctcaccaggtgaaacgatcattctaattctatgtatgttggctaccagaaaactttggcattggttttgcagtttatacatcctgtttgtgttctctcacattgtgagcagtcttcctatttgcttatacaatagctctctccacatctacactcccccttgtttttcttgtgtaatttcttatgtcattagagcttacctattgaaaatttttaattaaygccacaatgcagccaatgcgtttagttttttggcgatgtgctttggaggaatcctttttacagtaacataaataatcaagtattaatttgaatccccccaaaactattttcatacatgagaaatcaatttcaacgaaaagagaaagttaagaagttttcacaaaaacaacctcaatacaactaaaaggacttgctattggaaattaaggtacaaataatcgaactgtacaatcacaggagtttatagagcaaaaagacaatgctgagtgctatcatacttgattgacataagtgcattgatgtgatgtgagtagtagttgcaattaggagaactattgaatgatacaatgcgaactcatcttctcccccgacaaacaggagacaggaacacttgccacttcggtggaagtcaagggcagattgtcattgcagaagtgctcaatcatttccttctgtgggaggactcatgcttccacttcttactgctttatagaagaatgtgaaagattggagatttttattagcttttaagaaagaatcctcagtacattgaaaagatgatttaataatatctgccatcaaaattgtaataattagctgatgatgatatgacattaaaaatacaagaacttgaaaacataggcacagctccatatatagaatgctatggtgccattatttttcagttttgataaaagtctgcagagggtatagga

SEQ ID NO: 707971 - DNA, 1285 bp, Homo sapiens
tgacaatataggaaaatatgtagaagctaaagggataataaagtacaatacgtgatgtttaaatatgcatagcatgttatttttacctataatattctcttcatcctgcctcacaattaagcttaactcattaaaagttattgggaaatggagaatcatacttaagggactattcaagagaatttcagcttatactctcaaagcctagataaaagtattctatatttgtacaagctaccctcaggcagttgtttatgttcagcaaagagttatgtaaccttttgatttcagttacctctttcattaaagaaacaattctgaataccattatttatttccttttggaatctcaccaggtgaaacgatcattctaattctatgtatgttggctaccagaaaactttggcattggttttgcagtttatacatcctgtttgtgttctctcacattgtgagcagtcttcctatttgcttatacaatagctctctccacatctacactcccccttgtttttcttgtgtaatttcttatgtcattagagcttacctattgaaaatttttaattaacgccacartgcagccaatgcgtttagttttttggcgatgtgctttggaggaatcctttttacagtaacataaataatcaagtattaatttgaatccccccaaaactattttcatacatgagaaatcaatttcaacgaaaagagaaagttaagaagttttcacaaaaacaacctcaatacaactaaaaggacttgctattggaaattaaggtacaaataatcgaactgtacaatcacaggagtttatagagcaaaaagacaatgctgagtgctatcatacttgattgacataagtgcattgatgtgatgtgagtagtagttgcaattaggagaactattgaatgatacaatgcgaactcatcttctcccccgacaaacaggagacaggaacacttgccacttcggtggaagtcaagggcagattgtcattgcagaagtgctcaatcatttccttctgtgggaggactcatgcttccacttcttactgctttatagaagaatgtgaaagattggagatttttattagcttttaagaaagaatcctcagtacattgaaaagatgatttaataatatctgccatcaaaattgtaataattagctgatgatgatatgacattaaaaatacaagaacttgaaaacataggcacagctccatatatagaatgctatggtgccattatttttcagttttgataaaagtctgcagagggtatagga

SEQ ID NO: 707972 - DNA, 692 bp, Homo sapiens
gttgatttgaaatttgcctccatgcaatctccatgcattgtttctaactcttccctgtgaatatatactgagttctcatatttcttgtatatttaggtcttgcaactgtgattttaaaatgagcttattttatataaaaaactctcaccgatcccagttttatttaataccttttgaaattgtgcaactagtgcatgtgtgtcataaaaatcatcacaacaatctacaagggcataaatgtaagcggtagtaactatctgccrcttgctagtgattactgcctgttagagtttggcaagcatgtttccagtcttttcctatgctcatatccataccttcaaacatgtacgtgttactatctcagtctgtttgcattgctataaaggaatacctgagactgggtaatttgtaaagacaagaggtttattcagctcagggttctgcaggctttacaagaagcatggtaccacctcaccaggtatgcttctggtgagtactcaggaagcttccaatcttgccagaaggggaaagggagctggaatgtcacagggtgaaagaggaggaaaaagagagaaaggaaatgccagtctcttttaaacaaccagctgtcatgtgaacagagcaagaattcattcattgcagtggggaccggaccaagctattcatgagggatcaactcccatgatccaacc

SEQ ID NO: 707973 - DNA, 692 bp, Homo sapiens
gttgatttgaaatttgcctccatgcaatctccatgcattgtttctaactcttccctgtgaatatatactgagttctcatatttcttgtatatttaggtcttgcaactgtgattttaaaatgagcttattttatataaaaaactctcaccgatcccagttttatttaataccttttgaaattgtgcaactagtgcatgtgtgtcataaaaatcatcacaacaatctacaagggcataaatgtaagcggtagtaactatctgccgcttgctagtgattactgcctgttagagtttggcaagcatgtttccagtcttttcctatgctcatatccataccttcaaacatgtaygtgttactatctcagtctgtttgcattgctataaaggaatacctgagactgggtaatttgtaaagacaagaggtttattcagctcagggttctgcaggctttacaagaagcatggtaccacctcaccaggtatgcttctggtgagtactcaggaagcttccaatcttgccagaaggggaaagggagctggaatgtcacagggtgaaagaggaggaaaaagagagaaaggaaatgccagtctcttttaaacaaccagctgtcatgtgaacagagcaagaattcattcattgcagtggggaccggaccaagctattcatgagggatcaactcccatgatccaacc

SEQ ID NO: 707974 - DNA, 583 bp, Homo sapiens
gaactttgtcatttctgtattttctaaaagcctgtaaaaacaaacatgctatttccctcattgcagtaatgtccattagaaaacacaaagcaaactgtattttcaaccaagcacatggattgcctgcagtttcctctcattggggtttgttcttcctccatcacagttgtgagaaggctgtgtgtgatcagtatttttgtcctatctctatgaaagatgactttcacattctccagtttgggctggtcactgatgaagtcactgctggaaatggctcagccgtgctgggcagcagasggggcagatgtctttctgttttattcttcatttttaatgtgccccgtggcaagccttagttccttctctctgttggtcttgaacctttacctttattcttcgcttactcccattgtttttttttcctgctgtcacttacggtgggctcggggaacaatgttgcaggaacatagagcttttgagggaaatgtaaatcgccggcgacactgagtcccgtctgttttctcatcggaaagcagcatttcagagagctgaactggcgacactgcttggcgaagacacgccg

SEQ ID NO: 707975 - DNA, 998 bp, Homo sapiens
atgtgcttcccttttctttttttggcctaagcattctatgtttccctgttcttttttgcctgccttaataaaatagaatgtcagtcctctaaggatgacaatgcagggagaattaaaatataggtaggatggccagattgggcaactataacgtaggtccagcagggctgtcccctctgtgaaggaattactcattccttggccacattcgagggggctagatttgcttttattaattgaactagcaggtgacagcagtagagtaatacagacttatctaatacaacacaaatagaggctcagagatccatcccagggggagagtctctattaccaaatttggaggatccgggcttagtattcttagaggagctagtggattttcttgctagtattacagctggctagtatgtaagtattagaaggttagtttccttaraaatgatctaaaataggaattataggcaagagaaggaaaggctaacaaggctaacatgtactttttaaaaatccaggtttttcttatttcccaaggtcattgggaaattcaaatcagaacaagatgtgaaatcacaattcaaatagtaaagaattaaactagctggtgacaaatagatgtatattatagtctgatttaatagtcataaatcctaatatctggttggaaagcttttttggctttgcttgtaaaatgtgttgtttgtgtttattgctggagttaggtcatggtgtggctgctaggactctgggttctcaagtaagaggaagcttacattcttcacaagcttccccacaatgtgatcttaaatgctttatcatgtttgctgtctgagatgtgataaaaatgcccatatagggtttggtaaggagcacatgaattaatatacggaaagcatttagaaagtagcttggctcaggctaagtgctcagaattgttctgtgttatttaccattaagcagatagaatattaaatattttcaacactcatccataaaag

SEQ ID NO: 707976 - DNA, 607 bp, Homo sapiens
tgaagtgtaattcattgaatgtggagaaagaaagaaaagagagaaagagaaggacagaaagagaagaagaaaaggaagagtgggagagagaaaaaattgggggggagagaaaaagagagaatagaatgaaagagatcaactttgtaagcccttgctctctcaaagatgatctcacaatcactttcccataatcttkctgtaacaccaatcagactctatttaccaaggaacccaacttaagacagtaattcaataaaggactatgcagtcaaaaaaaaaaagtgatttgagatcacaaatcaatgaaggaagtacggtttttgttgctttgtttaatctgctttttcatttgtttactcagtagactcactagaactaatcaagtaacatggtctttctttggtatttggtatctagtgggaaatctataaatgtttattctatcttggcaatttataaatatatgtcctataaaagttaaatgtgtatctcccttatcttttgtggtctttctttttctgagagctgtagcagcaagagtcccaggcaggtagttacccttttatctaggattgggcctgtaagtattactgagacttttaggtag

SEQ ID NO: 707977 - DNA, 509 bp, Homo sapiens
aaatgtagaactttttattgtgttattttttgttgtttgtggtagcactcaagaactagtaagagcatgaagctacaaaatattgagtatcattgaaaatttaatgtatgtaaacatttatatataaattgtaatatacatgtaagttatgtgtataaacatttatcaaacttattttaatggtgtttatkcagagtaaaaaggttgggtaatgataaagttgattttcacctttaaaagagtgaatggagatgtaaagtgtgtgtatgtttagtgtctactttttttaaaaaagagtagaatggagatgacaacgtgtgtgtgtgtgcgcgtgtgtgtatgttttagaaatctttgatgaaagcaacatgatgttattatgattaacttaagcacaaaatgaatgttttgaaaatctgtgatatagtcccgaataaaaagaaaaaagggaaaactgctttcttagaaactggaattagggctcctccaatgtacactgtcactaatgg

SEQ ID NO: 707978 - DNA, 2369 bp, Homo sapiens
  misc_feature 1581, 1582, 1583, 1584, 1585, 1586, 1587, 1588, 1589, 1590,1591, 1592, 1593, 1594, 1595, 1596, 1597, 1598, 1599, 1600,1601, 1602, 1603, 1604, 1605, 1606, 1607, 1608, 1609, 1610,1611, 1612, 1613, 1614, 1615, 1616, 1617, 1618, 1619: n = A,T,C or G
  misc_feature 1620, 1621, 1622, 1623, 1624, 1625, 1626, 1627, 1628, 1629,1630, 1631, 1632, 1633, 1634, 1635, 1636, 1637, 1638, 1639,1640, 1641, 1642, 1643, 1644, 1645, 1646, 1647, 1648, 1649,1650, 1651, 1652, 1653, 1654, 1655, 1656, 1657, 1658: n = A,T,C or G
  misc_feature 1659, 1660, 1661, 1662, 1663, 1664, 1665, 1666, 1667, 1668,1669, 1670, 1671, 1672, 1673, 1674, 1675, 1676, 1677, 1678,1679, 1680: n = A,T,C or G
tttttaaaattagcaaaggggaaccgttgaagcaagatatttaagaatgccatcttctttcatttttacacaagaaaattttgattagrtttgtctggcacgattgctgatcattaaagaaactcctcatcacctaaaatggatgatgttagtaacaggatatggatgttagtaacaggatattaatttaggtacccatagcactgtacttaaacattgtgatagaaacctttccctgtttgagaaggatttcttttttctcctgaattctacatgcatattccttatacaccataatacggaattcttctatgttgctcatatttctgtgaacttttcatatgtcctggctatttgattatggaaaagctggtgagcctcatgctgtactcagcactttaacacagaattggagatgctgctgcatgtggctgaagtcaacaaccacatggggatagcctttgtcagttgactgaaacaagaaagtctgataatgggttttcaaatgctgtgtacattatatgaaaagctattgtgatttctaaataggaaataccccatttttctagggtttctaatttggatcttcttattctttctcaccgttattatgttcagggactctctttctaattgtatggttttggacagtgacaaaagataagaatatatttttctgtgggttcagttgccccccttccattgtatttctgtaagttgctgggaaagcatgaatgtgaaagctgttggtaaactctgaggttatggtgagcaatgagtgtgcttgccaacaccttgcaaaaaagtgtttcttgcaatggagataagttgtgttcaaaataaatggccgagagaatagctgattttgatagatgaaaaagcagggccaggcgcagtggctcatggctgtaataccagcactttgggaggcggaggcaggtggatcacttgaggtcaggcattcaaaacccacctggccaacatggtgaaaccctgtctctactaaaaatacaaaaaaaaaaaaaaagttagttaagcatggtggcaggtgcctgtaatcccagctaccctggctgggaggctgaggcgggagaatcacttgaacccgggaggtggaggttgcagtgagcaaagatcatgccactgcactccagcctgggcaacagagtgagactccatctcaaaaaaaaaaaaaaaaaaaaaagaaagaaagaaaagaaaagaaaaagcagaagaccgaatgcccagtggagaggtgacctacaaatactctttaagttgatcagctagcaaacatttgccagacttctttctttcctacagcaaattattgcattttcctgtcctgatgaggcaacaatagaaagaacagagaaagaacagtgtagtcagtagaaaatgcagtgatacaaagttgtaactgtggttttctggcacctttgctaactgtacacccagtcagcctgtcttgagccatttccccaactgtaagaattgtgatgtttgttgctctttatgccgtagaaactagtgagactatatgaggtaatgagactgtgtggtaaaaatgctatgggttannnnnnnnnnnnnnnnnnnnnnnnnnnnnnnnnnnnnnnnnnnnnnnnnnnnnnnnnnnnnnnnnnnnnnnnnnnnnnnnnnnnnnnnnnnnnnnnnnnnatatggggaagagaccctttttggtttcaccatattataagtattactaagcatgtgttgatttatggtaataatttacatttattaaagcacttactatagcatactataatgtgacaagcactgttctaagccctttgattttctacctcagttaaccctcacagtaaccctgtaaggtagatacttttattgtctccattttacagatgaggaatcagaggcccagaaaggacataacttgccccaaatcacacagtttaagtggcagaactggaattcaaaacctgcagggtctagctccggggtctgttctttaaagatgcccattaggaaaaaaaaatggcttagctttttgagaagctcttattcaaagagagctgtgataaggtcgaagccttgtagaagatataataagcattaaacacagaaatatgtttagctatttacattacagatgactaaaagattcctactgttgtggccatgagtaggagttgttattggagttccaagtttggatatggtgaaatcgtcgtctcttttcctttctaattatacttgaaggctttgtggagattagcttttatgagctctccatgttgttctatatgccaggtatttggtgtggcttaaggcagtggttccaaatcagagctgtgcctcccagactcacctggagccttctg

SEQ ID NO: 707979 - DNA, 2369 bp, Homo sapiens
  misc_feature 1581, 1582, 1583, 1584, 1585, 1586, 1587, 1588, 1589, 1590,1591, 1592, 1593, 1594, 1595, 1596, 1597, 1598, 1599, 1600,1601, 1602, 1603, 1604, 1605, 1606, 1607, 1608, 1609, 1610,1611, 1612, 1613, 1614, 1615, 1616, 1617, 1618, 1619: n = A,T,C or G
  misc_feature 1620, 1621, 1622, 1623, 1624, 1625, 1626, 1627, 1628, 1629,1630, 1631, 1632, 1633, 1634, 1635, 1636, 1637, 1638, 1639,1640, 1641, 1642, 1643, 1644, 1645, 1646, 1647, 1648, 1649,1650, 1651, 1652, 1653, 1654, 1655, 1656, 1657, 1658: n = A,T,C or G
  misc_feature 1659, 1660, 1661, 1662, 1663, 1664, 1665, 1666, 1667, 1668,1669, 1670, 1671, 1672, 1673, 1674, 1675, 1676, 1677, 1678,1679, 1680: n = A,T,C or G
tttttaaaattagcaaaggggaaccgttgaagcaagatatttaagaatgccatcttctttcatttttacacaagaaaattttgattagatttgtctggcacgattgctgatcattaaagaaactcctcatcacctaaaatggatgatgttagtaacaggatatggatgttagtaacaggatattaatttaggtacccatagcactgtacttaaacattgtgatagaaacmtttccctgtttgagaaggatttcttttttctcctgaattctacatgcatattccttatacaccataatacggaattcttctatgttgctcatatttctgtgaacttttcatatgtcctggctatttgattatggaaaagctggtgagcctcatgctgtactcagcactttaacacagaattggagatgctgctgcatgtggctgaagtcaacaaccacatggggatagcctttgtcagttgactgaaacaagaaagtctgataatgggttttcaaatgctgtgtacattatatgaaaagctattgtgatttctaaataggaaataccccatttttctagggtttctaatttggatcttcttattctttctcaccgttattatgttcagggactctctttctaattgtatggttttggacagtgacaaaagataagaatatatttttctgtgggttcagttgccccccttccattgtatttctgtaagttgctgggaaagcatgaatgtgaaagctgttggtaaactctgaggttatggtgagcaatgagtgtgcttgccaacaccttgcaaaaaagtgtttcttgcaatggagataagttgtgttcaaaataaatggccgagagaatagctgattttgatagatgaaaaagcagggccaggcgcagtggctcatggctgtaataccagcactttgggaggcggaggcaggtggatcacttgaggtcaggcattcaaaacccacctggccaacatggtgaaaccctgtctctactaaaaatacaaaaaaaaaaaaaaagttagttaagcatggtggcaggtgcctgtaatcccagctaccctggctgggaggctgaggcgggagaatcacttgaacccgggaggtggaggttgcagtgagcaaagatcatgccactgcactccagcctgggcaacagagtgagactccatctcaaaaaaaaaaaaaaaaaaaaaagaaagaaagaaaagaaaagaaaaagcagaagaccgaatgcccagtggagaggtgacctacaaatactctttaagttgatcagctagcaaacatttgccagacttctttctttcctacagcaaattattgcattttcctgtcctgatgaggcaacaatagaaagaacagagaaagaacagtgtagtcagtagaaaatgcagtgatacaaagttgtaactgtggttttctggcacctttgctaactgtacacccagtcagcctgtcttgagccatttccccaactgtaagaattgtgatgtttgttgctctttatgccgtagaaactagtgagactatatgaggtaatgagactgtgtggtaaaaatgctatgggttannnnnnnnnnnnnnnnnnnnnnnnnnnnnnnnnnnnnnnnnnnnnnnnnnnnnnnnnnnnnnnnnnnnnnnnnnnnnnnnnnnnnnnnnnnnnnnnnnnnatatggggaagagaccctttttggtttcaccatattataagtattactaagcatgtgttgatttatggtaataatttacatttattaaagcacttactatagcatactataatgtgacaagcactgttctaagccctttgattttctacctcagttaaccctcacagtaaccctgtaaggtagatacttttattgtctccattttacagatgaggaatcagaggcccagaaaggacataacttgccccaaatcacacagtttaagtggcagaactggaattcaaaacctgcagggtctagctccggggtctgttctttaaagatgcccattaggaaaaaaaaatggcttagctttttgagaagctcttattcaaagagagctgtgataaggtcgaagccttgtagaagatataataagcattaaacacagaaatatgtttagctatttacattacagatgactaaaagattcctactgttgtggccatgagtaggagttgttattggagttccaagtttggatatggtgaaatcgtcgtctcttttcctttctaattatacttgaaggctttgtggagattagcttttatgagctctccatgttgttctatatgccaggtatttggtgtggcttaaggcagtggttccaaatcagagctgtgcctcccagactcacctggagccttctg

SEQ ID NO: 707980 - DNA, 2369 bp, Homo sapiens
  misc_feature 1581, 1582, 1583, 1584, 1585, 1586, 1587, 1588, 1589, 1590,1591, 1592, 1593, 1594, 1595, 1596, 1597, 1598, 1599, 1600,1601, 1602, 1603, 1604, 1605, 1606, 1607, 1608, 1609, 1610,1611, 1612, 1613, 1614, 1615, 1616, 1617, 1618, 1619: n = A,T,C or G
  misc_feature 1620, 1621, 1622, 1623, 1624, 1625, 1626, 1627, 1628, 1629,1630, 1631, 1632, 1633, 1634, 1635, 1636, 1637, 1638, 1639,1640, 1641, 1642, 1643, 1644, 1645, 1646, 1647, 1648, 1649,1650, 1651, 1652, 1653, 1654, 1655, 1656, 1657, 1658: n = A,T,C or G
  misc_feature 1659, 1660, 1661, 1662, 1663, 1664, 1665, 1666, 1667, 1668,1669, 1670, 1671, 1672, 1673, 1674, 1675, 1676, 1677, 1678,1679, 1680: n = A,T,C or G
tttttaaaattagcaaaggggaaccgttgaagcaagatatttaagaatgccatcttctttcatttttacacaagaaaattttgattagatttgtctggcacgattgctgatcattaaagaaactcctcatcacctaaaatggatgatgttagtaacaggatatggatgttagtaacaggatattaatttaggtacccatagcactgtacttaaacattgtgatagaaacctttccctgtttgagaaggatttcttttttctcctgaattctacatscatattccttatacaccataatacggaattcttctatgttgctcatatttctgtgaacttttcatatgtcctggctatttgattatggaaaagctggtgagcctcatgctgtactcagcactttaacacagaattggagatgctgctgcatgtggctgaagtcaacaaccacatggggatagcctttgtcagttgactgaaacaagaaagtctgataatgggttttcaaatgctgtgtacattatatgaaaagctattgtgatttctaaataggaaataccccatttttctagggtttctaatttggatcttcttattctttctcaccgttattatgttcagggactctctttctaattgtatggttttggacagtgacaaaagataagaatatatttttctgtgggttcagttgccccccttccattgtatttctgtaagttgctgggaaagcatgaatgtgaaagctgttggtaaactctgaggttatggtgagcaatgagtgtgcttgccaacaccttgcaaaaaagtgtttcttgcaatggagataagttgtgttcaaaataaatggccgagagaatagctgattttgatagatgaaaaagcagggccaggcgcagtggctcatggctgtaataccagcactttgggaggcggaggcaggtggatcacttgaggtcaggcattcaaaacccacctggccaacatggtgaaaccctgtctctactaaaaatacaaaaaaaaaaaaaaagttagttaagcatggtggcaggtgcctgtaatcccagctaccctggctgggaggctgaggcgggagaatcacttgaacccgggaggtggaggttgcagtgagcaaagatcatgccactgcactccagcctgggcaacagagtgagactccatctcaaaaaaaaaaaaaaaaaaaaaagaaagaaagaaaagaaaagaaaaagcagaagaccgaatgcccagtggagaggtgacctacaaatactctttaagttgatcagctagcaaacatttgccagacttctttctttcctacagcaaattattgcattttcctgtcctgatgaggcaacaatagaaagaacagagaaagaacagtgtagtcagtagaaaatgcagtgatacaaagttgtaactgtggttttctggcacctttgctaactgtacacccagtcagcctgtcttgagccatttccccaactgtaagaattgtgatgtttgttgctctttatgccgtagaaactagtgagactatatgaggtaatgagactgtgtggtaaaaatgctatgggttannnnnnnnnnnnnnnnnnnnnnnnnnnnnnnnnnnnnnnnnnnnnnnnnnnnnnnnnnnnnnnnnnnnnnnnnnnnnnnnnnnnnnnnnnnnnnnnnnnnatatggggaagagaccctttttggtttcaccatattataagtattactaagcatgtgttgatttatggtaataatttacatttattaaagcacttactatagcatactataatgtgacaagcactgttctaagccctttgattttctacctcagttaaccctcacagtaaccctgtaaggtagatacttttattgtctccattttacagatgaggaatcagaggcccagaaaggacataacttgccccaaatcacacagtttaagtggcagaactggaattcaaaacctgcagggtctagctccggggtctgttctttaaagatgcccattaggaaaaaaaaatggcttagctttttgagaagctcttattcaaagagagctgtgataaggtcgaagccttgtagaagatataataagcattaaacacagaaatatgtttagctatttacattacagatgactaaaagattcctactgttgtggccatgagtaggagttgttattggagttccaagtttggatatggtgaaatcgtcgtctcttttcctttctaattatacttgaaggctttgtggagattagcttttatgagctctccatgttgttctatatgccaggtatttggtgtggcttaaggcagtggttccaaatcagagctgtgcctcccagactcacctggagccttctg

SEQ ID NO: 707981 - DNA, 2369 bp, Homo sapiens
  misc_feature 1581, 1582, 1583, 1584, 1585, 1586, 1587, 1588, 1589, 1590,1591, 1592, 1593, 1594, 1595, 1596, 1597, 1598, 1599, 1600,1601, 1602, 1603, 1604, 1605, 1606, 1607, 1608, 1609, 1610,1611, 1612, 1613, 1614, 1615, 1616, 1617, 1618, 1619: n = A,T,C or G
  misc_feature 1620, 1621, 1622, 1623, 1624, 1625, 1626, 1627, 1628, 1629,1630, 1631, 1632, 1633, 1634, 1635, 1636, 1637, 1638, 1639,1640, 1641, 1642, 1643, 1644, 1645, 1646, 1647, 1648, 1649,1650, 1651, 1652, 1653, 1654, 1655, 1656, 1657, 1658: n = A,T,C or G
  misc_feature 1659, 1660, 1661, 1662, 1663, 1664, 1665, 1666, 1667, 1668,1669, 1670, 1671, 1672, 1673, 1674, 1675, 1676, 1677, 1678,1679, 1680: n = A,T,C or G
tttttaaaattagcaaaggggaaccgttgaagcaagatatttaagaatgccatcttctttcatttttacacaagaaaattttgattagatttgtctggcacgattgctgatcattaaagaaactcctcatcacctaaaatggatgatgttagtaacaggatatggatgttagtaacaggatattaatttaggtacccatagcactgtacttaaacattgtgatagaaacctttccctgtttgagaaggatttcttttttctcctgaattctacatgcatattccttatacaccataatacrgaattcttctatgttgctcatatttctgtgaacttttcatatgtcctggctatttgattatggaaaagctggtgagcctcatgctgtactcagcactttaacacagaattggagatgctgctgcatgtggctgaagtcaacaaccacatggggatagcctttgtcagttgactgaaacaagaaagtctgataatgggttttcaaatgctgtgtacattatatgaaaagctattgtgatttctaaataggaaataccccatttttctagggtttctaatttggatcttcttattctttctcaccgttattatgttcagggactctctttctaattgtatggttttggacagtgacaaaagataagaatatatttttctgtgggttcagttgccccccttccattgtatttctgtaagttgctgggaaagcatgaatgtgaaagctgttggtaaactctgaggttatggtgagcaatgagtgtgcttgccaacaccttgcaaaaaagtgtttcttgcaatggagataagttgtgttcaaaataaatggccgagagaatagctgattttgatagatgaaaaagcagggccaggcgcagtggctcatggctgtaataccagcactttgggaggcggaggcaggtggatcacttgaggtcaggcattcaaaacccacctggccaacatggtgaaaccctgtctctactaaaaatacaaaaaaaaaaaaaaagttagttaagcatggtggcaggtgcctgtaatcccagctaccctggctgggaggctgaggcgggagaatcacttgaacccgggaggtggaggttgcagtgagcaaagatcatgccactgcactccagcctgggcaacagagtgagactccatctcaaaaaaaaaaaaaaaaaaaaaagaaagaaagaaaagaaaagaaaaagcagaagaccgaatgcccagtggagaggtgacctacaaatactctttaagttgatcagctagcaaacatttgccagacttctttctttcctacagcaaattattgcattttcctgtcctgatgaggcaacaatagaaagaacagagaaagaacagtgtagtcagtagaaaatgcagtgatacaaagttgtaactgtggttttctggcacctttgctaactgtacacccagtcagcctgtcttgagccatttccccaactgtaagaattgtgatgtttgttgctctttatgccgtagaaactagtgagactatatgaggtaatgagactgtgtggtaaaaatgctatgggttannnnnnnnnnnnnnnnnnnnnnnnnnnnnnnnnnnnnnnnnnnnnnnnnnnnnnnnnnnnnnnnnnnnnnnnnnnnnnnnnnnnnnnnnnnnnnnnnnnnatatggggaagagaccctttttggtttcaccatattataagtattactaagcatgtgttgatttatggtaataatttacatttattaaagcacttactatagcatactataatgtgacaagcactgttctaagccctttgattttctacctcagttaaccctcacagtaaccctgtaaggtagatacttttattgtctccattttacagatgaggaatcagaggcccagaaaggacataacttgccccaaatcacacagtttaagtggcagaactggaattcaaaacctgcagggtctagctccggggtctgttctttaaagatgcccattaggaaaaaaaaatggcttagctttttgagaagctcttattcaaagagagctgtgataaggtcgaagccttgtagaagatataataagcattaaacacagaaatatgtttagctatttacattacagatgactaaaagattcctactgttgtggccatgagtaggagttgttattggagttccaagtttggatatggtgaaatcgtcgtctcttttcctttctaattatacttgaaggctttgtggagattagcttttatgagctctccatgttgttctatatgccaggtatttggtgtggcttaaggcagtggttccaaatcagagctgtgcctcccagactcacctggagccttctg

SEQ ID NO: 707982 - DNA, 2369 bp, Homo sapiens
  misc_feature 1581, 1582, 1583, 1584, 1585, 1586, 1587, 1588, 1589, 1590,1591, 1592, 1593, 1594, 1595, 1596, 1597, 1598, 1599, 1600,1601, 1602, 1603, 1604, 1605, 1606, 1607, 1608, 1609, 1610,1611, 1612, 1613, 1614, 1615, 1616, 1617, 1618, 1619: n = A,T,C or G
  misc_feature 1620, 1621, 1622, 1623, 1624, 1625, 1626, 1627, 1628, 1629,1630, 1631, 1632, 1633, 1634, 1635, 1636, 1637, 1638, 1639,1640, 1641, 1642, 1643, 1644, 1645, 1646, 1647, 1648, 1649,1650, 1651, 1652, 1653, 1654, 1655, 1656, 1657, 1658: n = A,T,C or G
  misc_feature 1659, 1660, 1661, 1662, 1663, 1664, 1665, 1666, 1667, 1668,1669, 1670, 1671, 1672, 1673, 1674, 1675, 1676, 1677, 1678,1679, 1680: n = A,T,C or G
tttttaaaattagcaaaggggaaccgttgaagcaagatatttaagaatgccatcttctttcatttttacacaagaaaattttgattagatttgtctggcacgattgctgatcattaaagaaactcctcatcacctaaaatggatgatgttagtaacaggatatggatgttagtaacaggatattaatttaggtacccatagcactgtacttaaacattgtgatagaaacctttccctgtttgagaaggatttcttttttctcctgaattctacatgcatattccttatacaccataatacggaattcttctatgttgctcatatttctgtgaacttttcatatgtcctggctatttgattatggaaaagctggtgagcctcatgctgtactcagcactttaacacagaattggagatgctgctgcatgtggctgaagtcaacaaccacatggggatagcctttgtcagttgactgaaacaagaaagtctgataatgggttttcaaatgctgtgtacattatatgaaaagctattgtgatttctaaataggaaataccccatttttctagggtttctaatttggatcttcttattctttctcaccgttattatgttcagggactctctttctaattgtatggttttggacagtgacaaaagataagaatatatttttctgtgggttcagttgccccccttccattgtatttctgtaagttgctgggaaagcatgaatgtgaaagctgttggtaaactctgaggttatggtgagcaatgagtgtgcttgccaacaccttgcaaaaaagtgtttcttgcaatggagataagttgtgttcaaaataaatggccgagagaatagctgattttgatagatgaaaaagcagggccaggcgcagtggctcatggctgtaataccagcactttgggaggcggaggcaggtggatcacttgaggtcaggcattcaaaacccacctggccaacatggtgaaaccctgtctctactaaaaatmcaaaaaaaaaaaaaaagttagttaagcatggtggcaggtgcctgtaatcccagctaccctggctgggaggctgaggcgggagaatcacttgaacccgggaggtggaggttgcagtgagcaaagatcatgccactgcactccagcctgggcaacagagtgagactccatctcaaaaaaaaaaaaaaaaaaaaaagaaagaaagaaaagaaaagaaaaagcagaagaccgaatgcccagtggagaggtgacctacaaatactctttaagttgatcagctagcaaacatttgccagacttctttctttcctacagcaaattattgcattttcctgtcctgatgaggcaacaatagaaagaacagagaaagaacagtgtagtcagtagaaaatgcagtgatacaaagttgtaactgtggttttctggcacctttgctaactgtacacccagtcagcctgtcttgagccatttccccaactgtaagaattgtgatgtttgttgctctttatgccgtagaaactagtgagactatatgaggtaatgagactgtgtggtaaaaatgctatgggttannnnnnnnnnnnnnnnnnnnnnnnnnnnnnnnnnnnnnnnnnnnnnnnnnnnnnnnnnnnnnnnnnnnnnnnnnnnnnnnnnnnnnnnnnnnnnnnnnnnatatggggaagagaccctttttggtttcaccatattataagtattactaagcatgtgttgatttatggtaataatttacatttattaaagcacttactatagcatactataatgtgacaagcactgttctaagccctttgattttctacctcagttaaccctcacagtaaccctgtaaggtagatacttttattgtctccattttacagatgaggaatcagaggcccagaaaggacataacttgccccaaatcacacagtttaagtggcagaactggaattcaaaacctgcagggtctagctccggggtctgttctttaaagatgcccattaggaaaaaaaaatggcttagctttttgagaagctcttattcaaagagagctgtgataaggtcgaagccttgtagaagatataataagcattaaacacagaaatatgtttagctatttacattacagatgactaaaagattcctactgttgtggccatgagtaggagttgttattggagttccaagtttggatatggtgaaatcgtcgtctcttttcctttctaattatacttgaaggctttgtggagattagcttttatgagctctccatgttgttctatatgccaggtatttggtgtggcttaaggcagtggttccaaatcagagctgtgcctcccagactcacctggagccttctg

SEQ ID NO: 707983 - DNA, 2369 bp, Homo sapiens
  misc_feature 1581, 1582, 1583, 1584, 1585, 1586, 1587, 1588, 1589, 1590,1591, 1592, 1593, 1594, 1595, 1596, 1597, 1598, 1599, 1600,1601, 1602, 1603, 1604, 1605, 1606, 1607, 1608, 1609, 1610,1611, 1612, 1613, 1614, 1615, 1616, 1617, 1618, 1619: n = A,T,C or G
  misc_feature 1620, 1621, 1622, 1623, 1624, 1625, 1626, 1627, 1628, 1629,1630, 1631, 1632, 1633, 1634, 1635, 1636, 1637, 1638, 1639,1640, 1641, 1642, 1643, 1644, 1645, 1646, 1647, 1648, 1649,1650, 1651, 1652, 1653, 1654, 1655, 1656, 1657, 1658: n = A,T,C or G
  misc_feature 1659, 1660, 1661, 1662, 1663, 1664, 1665, 1666, 1667, 1668,1669, 1670, 1671, 1672, 1673, 1674, 1675, 1676, 1677, 1678,1679, 1680: n = A,T,C or G
tttttaaaattagcaaaggggaaccgttgaagcaagatatttaagaatgccatcttctttcatttttacacaagaaaattttgattagatttgtctggcacgattgctgatcattaaagaaactcctcatcacctaaaatggatgatgttagtaacaggatatggatgttagtaacaggatattaatttaggtacccatagcactgtacttaaacattgtgatagaaacctttccctgtttgagaaggatttcttttttctcctgaattctacatgcatattccttatacaccataatacggaattcttctatgttgctcatatttctgtgaacttttcatatgtcctggctatttgattatggaaaagctggtgagcctcatgctgtactcagcactttaacacagaattggagatgctgctgcatgtggctgaagtcaacaaccacatggggatagcctttgtcagttgactgaaacaagaaagtctgataatgggttttcaaatgctgtgtacattatatgaaaagctattgtgatttctaaataggaaataccccatttttctagggtttctaatttggatcttcttattctttctcaccgttattatgttcagggactctctttctaattgtatggttttggacagtgacaaaagataagaatatatttttctgtgggttcagttgccccccttccattgtatttctgtaagttgctgggaaagcatgaatgtgaaagctgttggtaaactctgaggttatggtgagcaatgagtgtgcttgccaacaccttgcaaaaaagtgtttcttgcaatggagataagttgtgttcaaaataaatggccgagagaatagctgattttgatagatgaaaaagcagggccaggcgcagtggctcatggctgtaataccagcactttgggaggcggaggcaggtggatcacttgaggtcaggcattcaaaacccacctggccaacatggtgaaaccctgtctctactaaaaatacaaaaaaaaaaaaaaagttagttaagcatggtggcaggtgcctgtaatcccagctaccctggctgggaggctgaggcgggagaatcacttgaacccgggaggtggaggttgcagtgagcaaagatcatgccactgcactccagcctgggcaacagagtgagactccatctcaaaaaaaaaaaaaaaaaaaaaagaaagaaagaaaagaaaagaaaaagcagaagacygaatgcccagtggagaggtgacctacaaatactctttaagttgatcagctagcaaacatttgccagacttctttctttcctacagcaaattattgcattttcctgtcctgatgaggcaacaatagaaagaacagagaaagaacagtgtagtcagtagaaaatgcagtgatacaaagttgtaactgtggttttctggcacctttgctaactgtacacccagtcagcctgtcttgagccatttccccaactgtaagaattgtgatgtttgttgctctttatgccgtagaaactagtgagactatatgaggtaatgagactgtgtggtaaaaatgctatgggttannnnnnnnnnnnnnnnnnnnnnnnnnnnnnnnnnnnnnnnnnnnnnnnnnnnnnnnnnnnnnnnnnnnnnnnnnnnnnnnnnnnnnnnnnnnnnnnnnnnatatggggaagagaccctttttggtttcaccatattataagtattactaagcatgtgttgatttatggtaataatttacatttattaaagcacttactatagcatactataatgtgacaagcactgttctaagccctttgattttctacctcagttaaccctcacagtaaccctgtaaggtagatacttttattgtctccattttacagatgaggaatcagaggcccagaaaggacataacttgccccaaatcacacagtttaagtggcagaactggaattcaaaacctgcagggtctagctccggggtctgttctttaaagatgcccattaggaaaaaaaaatggcttagctttttgagaagctcttattcaaagagagctgtgataaggtcgaagccttgtagaagatataataagcattaaacacagaaatatgtttagctatttacattacagatgactaaaagattcctactgttgtggccatgagtaggagttgttattggagttccaagtttggatatggtgaaatcgtcgtctcttttcctttctaattatacttgaaggctttgtggagattagcttttatgagctctccatgttgttctatatgccaggtatttggtgtggcttaaggcagtggttccaaatcagagctgtgcctcccagactcacctggagccttctg

SEQ ID NO: 707984 - DNA, 2369 bp, Homo sapiens
  misc_feature 1581, 1582, 1583, 1584, 1585, 1586, 1587, 1588, 1589, 1590,1591, 1592, 1593, 1594, 1595, 1596, 1597, 1598, 1599, 1600,1601, 1602, 1603, 1604, 1605, 1606, 1607, 1608, 1609, 1610,1611, 1612, 1613, 1614, 1615, 1616, 1617, 1618, 1619: n = A,T,C or G
  misc_feature 1620, 1621, 1622, 1623, 1624, 1625, 1626, 1627, 1628, 1629,1630, 1631, 1632, 1633, 1634, 1635, 1636, 1637, 1638, 1639,1640, 1641, 1642, 1643, 1644, 1645, 1646, 1647, 1648, 1649,1650, 1651, 1652, 1653, 1654, 1655, 1656, 1657, 1658: n = A,T,C or G
  misc_feature 1659, 1660, 1661, 1662, 1663, 1664, 1665, 1666, 1667, 1668,1669, 1670, 1671, 1672, 1673, 1674, 1675, 1676, 1677, 1678,1679, 1680: n = A,T,C or G
tttttaaaattagcaaaggggaaccgttgaagcaagatatttaagaatgccatcttctttcatttttacacaagaaaattttgattagatttgtctggcacgattgctgatcattaaagaaactcctcatcacctaaaatggatgatgttagtaacaggatatggatgttagtaacaggatattaatttaggtacccatagcactgtacttaaacattgtgatagaaacctttccctgtttgagaaggatttcttttttctcctgaattctacatgcatattccttatacaccataatacggaattcttctatgttgctcatatttctgtgaacttttcatatgtcctggctatttgattatggaaaagctggtgagcctcatgctgtactcagcactttaacacagaattggagatgctgctgcatgtggctgaagtcaacaaccacatggggatagcctttgtcagttgactgaaacaagaaagtctgataatgggttttcaaatgctgtgtacattatatgaaaagctattgtgatttctaaataggaaataccccatttttctagggtttctaatttggatcttcttattctttctcaccgttattatgttcagggactctctttctaattgtatggttttggacagtgacaaaagataagaatatatttttctgtgggttcagttgccccccttccattgtatttctgtaagttgctgggaaagcatgaatgtgaaagctgttggtaaactctgaggttatggtgagcaatgagtgtgcttgccaacaccttgcaaaaaagtgtttcttgcaatggagataagttgtgttcaaaataaatggccgagagaatagctgattttgatagatgaaaaagcagggccaggcgcagtggctcatggctgtaataccagcactttgggaggcggaggcaggtggatcacttgaggtcaggcattcaaaacccacctggccaacatggtgaaaccctgtctctactaaaaatacaaaaaaaaaaaaaaagttagttaagcatggtggcaggtgcctgtaatcccagctaccctggctgggaggctgaggcgggagaatcacttgaacccgggaggtggaggttgcagtgagcaaagatcatgccactgcactccagcctgggcaacagagtgagactccatctcaaaaaaaaaaaaaaaaaaaaaagaaagaaagaaaagaaaagaaaaagcagaagaccgaatgcccagtggagaggtgacctacaaatactctttaagttgatcagctagcaaacatttgccagacttctttctttcctacagcaaattattgcattttcctgtcctgatgaggcaacaatagaaagaacagagaaagaacagtgtagtcagtagaaartgcagtgatacaaagttgtaactgtggttttctggcacctttgctaactgtacacccagtcagcctgtcttgagccatttccccaactgtaagaattgtgatgtttgttgctctttatgccgtagaaactagtgagactatatgaggtaatgagactgtgtggtaaaaatgctatgggttannnnnnnnnnnnnnnnnnnnnnnnnnnnnnnnnnnnnnnnnnnnnnnnnnnnnnnnnnnnnnnnnnnnnnnnnnnnnnnnnnnnnnnnnnnnnnnnnnnnatatggggaagagaccctttttggtttcaccatattataagtattactaagcatgtgttgatttatggtaataatttacatttattaaagcacttactatagcatactataatgtgacaagcactgttctaagccctttgattttctacctcagttaaccctcacagtaaccctgtaaggtagatacttttattgtctccattttacagatgaggaatcagaggcccagaaaggacataacttgccccaaatcacacagtttaagtggcagaactggaattcaaaacctgcagggtctagctccggggtctgttctttaaagatgcccattaggaaaaaaaaatggcttagctttttgagaagctcttattcaaagagagctgtgataaggtcgaagccttgtagaagatataataagcattaaacacagaaatatgtttagctatttacattacagatgactaaaagattcctactgttgtggccatgagtaggagttgttattggagttccaagtttggatatggtgaaatcgtcgtctcttttcctttctaattatacttgaaggctttgtggagattagcttttatgagctctccatgttgttctatatgccaggtatttggtgtggcttaaggcagtggttccaaatcagagctgtgcctcccagactcacctggagccttctg

SEQ ID NO: 707985 - DNA, 1747 bp, Homo sapiens
acgagaattccttgtatcttacgatggtgctgttttttagagggaggaacatttctttatcatctggctgtatataccctttattgacatcctgttgggttttgttggtggtggttttttgtttgtttgtttttgagacagagttttagctcttgtcgcccaggctggtgcccagtggcgtgatctcagctcactgcaacctccgcctctcaggctcaagcgattctcttgcctcagcctaccaagtggctgggattacaggcatctgctaccacacccggctaattttttgtatttttagtagagatggggtttcaccgtgttggccaggctggtctcaaactcatgacctcaggtgatctgcctgcctcagccttccaaagtgctgggattataggcatgagccactgcacctgaccttcttgttgttgttaatgaacagtgcatctggtaatcattcttagtctaccaccatctgtctgtctcagagatgtgggaaattatgtttggttttaagtcttaaaatgctcttcttaaaggtacccagatctgatgtaactcgtgtgttttgactgacagcctgtgattgcaatggtcgatcccaggaatgctacttcgaccctgaactctatcgttccactggccatgggggccactgtaccaactgccaggataacacagatggcgcccactgtgagaggtgccgagagaacttcttccgccttggcaacaatgaagcctgctcttcatgccactgtagtcctgtgggtaagtgacaggaagatggattgaaagacaaaatgatagttccgtggacccccggaaaggaaagctttgtttccaaggcatttggacaactaaatgtggagatgtatacattattgtaacacagaaatcagtcaagatctgtctctaccccatgcctccaccttttttaaccaagttgaactttcagatgagtttctggtgtgtaagaggggggtggtggcctgagtaatggttctgcaaataattagcagcaggatcatagagacaatttgaactttgactgtaaaaggttaactgctttgtgagttcttccttgttgatgattttgtttagtctaatctccttagagtgctgaaatattcttagcatgtttgcgtgtgtacagagatgcacagcattcttagtctagcccattcttcaagagtttaacctttatatttgtcatttaggcctatatatacttaaattctagacatgggccttaaggggctgtgatcacccacagagaagtaactgatcttgtgtgcagtgtttcattgggtacaaagtgattttcaacattgatgagtaaattcatcttagcatgtgtctagaaacttaaaatgccatgacttaaagggtcatgattttgagaaagttctgatttaaaatttggtttttattacctttgtgaccatcaggagattgcatactggttctcaggcattgcttttaattaccagttatctttctttaacacattgattttacttamgtatctggccgaatttttgtttgacaataggcattttacattttaggctctctaagcacacagtgtgatagttacggcagatgcagctgtaagccaggagtgatgggggacaaatgtgaccgttgccagcctggattccattctctcactgaagcaggatgcaggtaaaatattttcaaagccagaagaagggggcagaatctatatatagtcaacacatattaa

SEQ ID NO: 707986 - DNA, 680 bp, Homo sapiens
tattaaaagtcataaattattgaatgattttgttataatttttggtgaacaagagtttaagacttaaaaatttttttttttgagacggagtcttgctctgtcacccaggctgtggtgcaatagcatgatcttggctcactgcaacctccgcctcctggttcaagcgattctcctgctcagcctcccaagtagctgggattaccggcacgccccaccacacccagctaatttttgtatttttagtagagatggggttttaccatattggccaggctgatctcaaactcctgacctcaggtgatccccctgcctcggcctcccaaagtgctgggattacaggcatgagcccctgcacccggycaaaattttttttcttaaaaaaaagttttaaacaaggacctttttctctagcaaggtacagctgtttggggaggtggagttagtgatgatgtggtattgggagaggcatctgcagcttagatgtgttgatttttgaaatgcctgcatgaatatccagataaaaatggcttataagtagttagaaatatgaatctggggcttaggaagagattaggactagcgatccagatttagaaggttgtcaacatatgggcaataatttttaaacttggaaatatgacagaaaatatagatggaaaagaaggatggaatcctggaaa

SEQ ID NO: 707987 - DNA, 3247 bp, Homo sapiens
  misc_feature 638, 639, 640, 641, 642, 643, 644, 645, 646, 647, 648, 649,650, 651, 652, 653, 654, 655, 656, 657, 658, 659, 660, 661,662, 663, 664, 665, 666, 667, 668, 669, 670, 671, 672, 673,674, 675, 676, 677, 678, 679, 680, 681, 682, 683, 684: n = A,T,C or G
  misc_feature 685, 686, 687, 688, 689, 690, 691, 692, 693, 694, 695, 696,697, 698, 699, 700, 701, 702, 703, 704, 705, 706, 707, 708,709, 710, 711, 712, 713, 714, 715, 716, 717, 718, 719, 720,721, 722, 723, 724, 725, 726, 727, 728, 729, 730, 731: n = A,T,C or G
  misc_feature 732, 733, 734, 735, 736, 737: n = A,T,C or G
tggccaggagtaaaatgctgaaataatttcagcaagtcttcactttaagcttagcaagaaaaagaggttcttttgaaagaaatgagatgtttccataacaaacaaaagcagacacaatagacagcatttcatgcatacttgacttgattaaagtctcacaagaccattttacatcagtgattctcagatgttaaataatttgcccaagtttgcacagcctataggcaacaaagcaaagatactaacccaagtcagactaatgttaaaagtctggctgttccacaaaaagctttctcttctagcttactttcattttatatccatctgttggcacataacttattcttgacatttgagacygataaaaaatacccctgtagccccccaccaaaacaaaatgcaccagtctttaaaggctggcaaattaaaatataatgccttgctacaaagagtcctggctagagtgttgacactttataatggagtctggtgacaaaagtgcatctgtcctaaaatgaagcctgctccctaacaccctatcaaactggattaaaagaaggtttccgtatgcatagatttccttgaaaaatcaaggtttttctctcttttggcatgaaagctttcccctcatcggactnnnnnnnnnnnnnnnnnnnnnnnnnnnnnnnnnnnnnnnnnnnnnnnnnnnnnnnnnnnnnnnnnnnnnnnnnnnnnnnnnnnnnnnnnnnnnnnnnnnntaccttagctggcaatattctcaaaatataaaaagaaactcctcagacccagtgttctacttagggcaaggtccacagaaggcacctagtaagtacttgtcacattaacacagcctaaagtcatgattcaggtcacactgtaaagctgacaaataataagtatggtaaagaagcaagttgctcttaaagaccctgtcatgcaagacaaacatttattttataaggctttcaaaaataagcaacagcaaaaggaaatattaataatttaattaatgacttaaaagggattcatgtaaacctatatcatctgcttttgagtcaactgtactatatcagatcctaagaacagtacaaaagattcagagactgacaaaaatgactctatggctacgtacccagctgctccaagaggtcattaataatgctgaggaggctagtaacagagtttttggcttttctggcattgatctcggcttcttgagcagcctgtgaagcctgtaagggaaaaatgaggcaaagagtcttgactgtatgttttcatcttctttaaatcttttttcccaatgacccaacaaatctaatttccagattttcttcccttttctaacttaggaaattgaaacctctcattgcttttttttttttttttttttggtggggctgctgcatatcttcatattgaggatgttggtatttctacttcatcaaagttatgactaggcagtcaggatgcctacactcactaactcactatatttgtacttcaaaaattaatctccttttctcacattctaactcaataatatatggaggtatattcatagtaaagcctattaagcagaaacaagttattttttaaggatgattatagaaactatgtttcagaaccaaaacatgtccttcaggacactcttagggacttattagaaatgtcctattctttgaaaattttcatagttaagtaaagctcttctaggagttctcttctgtaaactccccctccacatgcaatgacccagccacagtccccctgacacacatactcatttattggggcaatataatttacattttaaaaaccaaacaaaggtaaatacacttgggaaattccatgaaacctgaacaaataactgtgcatgagtcataggaaacagcaatggaagaggaagtgtctaaatatcagaaaacagatgttctcacaaataaatctagttgagatttaagtaagtggctctgagcctcttaccacataattgtttttcctagttttgagtaaggacaacacaaacattttgggatcaaaacaatgtgaagatttaaaaaagaacaagaaagcaaggcagaaaaaaccttcacaaataaatgattaatctctgtccaaacggcagctgtccttattgagcatccacaagcttgtctgcgagtgtaaaaggagggagaaaggaccctgccagggccggccaagagcgatgcacctgcatttaacctgtggtctccagcctcctcttccaaaagaatgaagctataaaccttcattcttctggttaaaaaatacaatacagattcaaataatactggccaaatgctggcctttcagaattgacagaaatacaaatgagatagtgcatgtgagggtggtttgtttccttagaagttatttaccaaaataataaaagatcttctttcaccctttgaactaaaccaaaacccttttttgaagctcctaaagaatatactgttttctttttcaatatgctttaaatctaatgtttctacaatcatattaaaaatgaaatccatatatgctcaacatgtgagaaacatctattttttttatgggaatttttgtttttttgagacggagtcttcctctgtggcccagggtggagtgatcttggctcattacaacctccacctcccaagttcaagcaattctcctgcctcagcctcctatgtagctggggtaacaggcacccaccaccatgcccaactaatttttgtatttttagtagagatagcgtttcaccatgttggccaggctggtctcgaattcctgaccacaggcgatccacccacctcggcctctcaaagtgctgggattacaggagtgaaccactgcgcccagacacctttatgggaatttttacttgagccacaccataacggagaaaatcaggacaatccaaaccaacatccacccccctacctgtaaaaagcataataaaattaggtggttgcacagagatagtttcctttatcacttccctagagtttttactgagattaacaggctttgtacttcttttttccatcccaagatgaaaatgacccacactgagggactatgttttctggcagcagtgaacgacggcctcttctttgccactgaaagtgagcaagtaaccacaagttcgtgtatgtcattaccgtgattgctacacccaactggaaaaagaatattcctactgtgactccattaaagtcttttcaaagcaaaatatagcatagaa

SEQ ID NO: 707988 - DNA, 3247 bp, Homo sapiens
  misc_feature 638, 639, 640, 641, 642, 643, 644, 645, 646, 647, 648, 649,650, 651, 652, 653, 654, 655, 656, 657, 658, 659, 660, 661,662, 663, 664, 665, 666, 667, 668, 669, 670, 671, 672, 673,674, 675, 676, 677, 678, 679, 680, 681, 682, 683, 684: n = A,T,C or G
  misc_feature 685, 686, 687, 688, 689, 690, 691, 692, 693, 694, 695, 696,697, 698, 699, 700, 701, 702, 703, 704, 705, 706, 707, 708,709, 710, 711, 712, 713, 714, 715, 716, 717, 718, 719, 720,721, 722, 723, 724, 725, 726, 727, 728, 729, 730, 731: n = A,T,C or G
  misc_feature 732, 733, 734, 735, 736, 737: n = A,T,C or G
tggccaggagtaaaatgctgaaataatttcagcaagtcttcactttaagcttagcaagaaaaagaggttcttttgaaagaaatgagatgtttccataacaaacaaaagcagacacaatagacagcatttcatgcatacttgacttgattaaagtctcacaagaccattttacatcagtgattctcagatgttaaataatttgcccaagtttgcacagcctataggcaacaaagcaaagatactaacccaagtcagactaatgttaaaagtctggctgttccacaaaaagctttctcttctagcttactttcattttatatccatctgttggcacataacttattcttgacatttgagaccgataaaaaatacccctgtagccccccaccaaaacaaaatgcaccagtctttaaaggctggcaaattaaaatataatgccttgctacaaagagtcctggctagagtgttgacactttataatggagtctggtgacaaaagtgcatctgtcctaaaatgaagcctgctccctaacaccctatcaaactggattaaaagaaggtttccgtatgcatagatttccttgaaaaatcaaggtttttctctcttttggcatgaaagctttcccctcatcggactnnnnnnnnnnnnnnnnnnnnnnnnnnnnnnnnnnnnnnnnnnnnnnnnnnnnnnnnnnnnnnnnnnnnnnnnnnnnnnnnnnnnnnnnnnnnnnnnnnnntaccttagctggcaatattctcaaaatataaaaagaaactcctcagacccagtgttctacttagggcaaggtccacagaaggcacctagtaagtacttgtcacattaacacagcctaaagtcatgattcaggtcacactgtaaagctgacaaataataagtatggtaaagaagcaagttgctcttaaagaccctgtcatgcaagacaaacatttattttataaggctttcaaaaataagcaacagcaaaaggaaatattaataatttaattaatgacttaaaagggattcatgtaaacctatatcatctgcttttgagtcaactgtactatatcagatcctaagaacagtacaaaagattcagagactgacaaaaatgactctatggctacgtacccagctgctccaagaggtcattaataatgctgaggaggctagtaacagagtttttggcttttctggcattgatctcggcttcttgagcagcctgtgaagcctgtaagggaaaaatgaggcaaagagtcttgactgtatgttttcatcttctttaaatcttttttcccaatgacccaacaaatctaatttccagattttcttcccttttctaacttaggaaattgaaacctctcattgcttttttttttttttttttttggtggggctgctgcatatcttcatattgaggatgttggtatttctacttcatcaaagttatgactaggcagtcaggatgcctacactcactaactcactatatttgtacttcaaaaattaatctccttttctcacattctaactcaataatatatggaggtatattcatagtaaagcctattaagcagaaacaagttattttttaaggaygattatagaaactatgtttcagaaccaaaacatgtccttcaggacactcttagggacttattagaaatgtcctattctttgaaaattttcatagttaagtaaagctcttctaggagttctcttctgtaaactccccctccacatgcaatgacccagccacagtccccctgacacacatactcatttattggggcaatataatttacattttaaaaaccaaacaaaggtaaatacacttgggaaattccatgaaacctgaacaaataactgtgcatgagtcataggaaacagcaatggaagaggaagtgtctaaatatcagaaaacagatgttctcacaaataaatctagttgagatttaagtaagtggctctgagcctcttaccacataattgtttttcctagttttgagtaaggacaacacaaacattttgggatcaaaacaatgtgaagatttaaaaaagaacaagaaagcaaggcagaaaaaaccttcacaaataaatgattaatctctgtccaaacggcagctgtccttattgagcatccacaagcttgtctgcgagtgtaaaaggagggagaaaggaccctgccagggccggccaagagcgatgcacctgcatttaacctgtggtctccagcctcctcttccaaaagaatgaagctataaaccttcattcttctggttaaaaaatacaatacagattcaaataatactggccaaatgctggcctttcagaattgacagaaatacaaatgagatagtgcatgtgagggtggtttgtttccttagaagttatttaccaaaataataaaagatcttctttcaccctttgaactaaaccaaaacccttttttgaagctcctaaagaatatactgttttctttttcaatatgctttaaatctaatgtttctacaatcatattaaaaatgaaatccatatatgctcaacatgtgagaaacatctattttttttatgggaatttttgtttttttgagacggagtcttcctctgtggcccagggtggagtgatcttggctcattacaacctccacctcccaagttcaagcaattctcctgcctcagcctcctatgtagctggggtaacaggcacccaccaccatgcccaactaatttttgtatttttagtagagatagcgtttcaccatgttggccaggctggtctcgaattcctgaccacaggcgatccacccacctcggcctctcaaagtgctgggattacaggagtgaaccactgcgcccagacacctttatgggaatttttacttgagccacaccataacggagaaaatcaggacaatccaaaccaacatccacccccctacctgtaaaaagcataataaaattaggtggttgcacagagatagtttcctttatcacttccctagagtttttactgagattaacaggctttgtacttcttttttccatcccaagatgaaaatgacccacactgagggactatgttttctggcagcagtgaacgacggcctcttctttgccactgaaagtgagcaagtaaccacaagttcgtgtatgtcattaccgtgattgctacacccaactggaaaaagaatattcctactgtgactccattaaagtcttttcaaagcaaaatatagcatagaa

SEQ ID NO: 707989 - DNA, 3247 bp, Homo sapiens
  misc_feature 638, 639, 640, 641, 642, 643, 644, 645, 646, 647, 648, 649,650, 651, 652, 653, 654, 655, 656, 657, 658, 659, 660, 661,662, 663, 664, 665, 666, 667, 668, 669, 670, 671, 672, 673,674, 675, 676, 677, 678, 679, 680, 681, 682, 683, 684: n = A,T,C or G
  misc_feature 685, 686, 687, 688, 689, 690, 691, 692, 693, 694, 695, 696,697, 698, 699, 700, 701, 702, 703, 704, 705, 706, 707, 708,709, 710, 711, 712, 713, 714, 715, 716, 717, 718, 719, 720,721, 722, 723, 724, 725, 726, 727, 728, 729, 730, 731: n = A,T,C or G
  misc_feature 732, 733, 734, 735, 736, 737: n = A,T,C or G
tggccaggagtaaaatgctgaaataatttcagcaagtcttcactttaagcttagcaagaaaaagaggttcttttgaaagaaatgagatgtttccataacaaacaaaagcagacacaatagacagcatttcatgcatacttgacttgattaaagtctcacaagaccattttacatcagtgattctcagatgttaaataatttgcccaagtttgcacagcctataggcaacaaagcaaagatactaacccaagtcagactaatgttaaaagtctggctgttccacaaaaagctttctcttctagcttactttcattttatatccatctgttggcacataacttattcttgacatttgagaccgataaaaaatacccctgtagccccccaccaaaacaaaatgcaccagtctttaaaggctggcaaattaaaatataatgccttgctacaaagagtcctggctagagtgttgacactttataatggagtctggtgacaaaagtgcatctgtcctaaaatgaagcctgctccctaacaccctatcaaactggattaaaagaaggtttccgtatgcatagatttccttgaaaaatcaaggtttttctctcttttggcatgaaagctttcccctcatcggactnnnnnnnnnnnnnnnnnnnnnnnnnnnnnnnnnnnnnnnnnnnnnnnnnnnnnnnnnnnnnnnnnnnnnnnnnnnnnnnnnnnnnnnnnnnnnnnnnnnntaccttagctggcaatattctcaaaatataaaaagaaactcctcagacccagtgttctacttagggcaaggtccacagaaggcacctagtaagtacttgtcacattaacacagcctaaagtcatgattcaggtcacactgtaaagctgacaaataataagtatggtaaagaagcaagttgctcttaaagaccctgtcatgcaagacaaacatttattttataaggctttcaaaaataagcaacagcaaaaggaaatattaataatttaattaatgacttaaaagggattcatgtaaacctatatcatctgcttttgagtcaactgtactatatcagatcctaagaacagtacaaaagattcagagactgacaaaaatgactctatggctacgtacccagctgctccaagaggtcattaataatgctgaggaggctagtaacagagtttttggcttttctggcattgatctcggcttcttgagcagcctgtgaagcctgtaagggaaaaatgaggcaaagagtcttgactgtatgttttcatcttctttaaatcttttttcccaatgacccaacaaatctaatttccagattttcttcccttttctaacttaggaaattgaaacctctcattgcttttttttttttttttttttggtggggctgctgcatatcttcatattgaggatgttggtatttctacttcatcaaagttatgactaggcagtcaggatgcctacactcactaactcactatatttgtacttcaaaaattaatctccttttctcacattctaactcaataatatatggaggtatattcatagtaaagcctattaagcagaaacaagttattttttaaggatgattatagaaactatgtttcagaaccaaaacatgtccttcaggacactcttagggacttattagaaatgtcctattctttgaaaattttcatagttaagtaaagctcttctaggagttctcttctgtaaactccccytccacatgcaatgacccagccacagtccccctgacacacatactcatttattggggcaatataatttacattttaaaaaccaaacaaaggtaaatacacttgggaaattccatgaaacctgaacaaataactgtgcatgagtcataggaaacagcaatggaagaggaagtgtctaaatatcagaaaacagatgttctcacaaataaatctagttgagatttaagtaagtggctctgagcctcttaccacataattgtttttcctagttttgagtaaggacaacacaaacattttgggatcaaaacaatgtgaagatttaaaaaagaacaagaaagcaaggcagaaaaaaccttcacaaataaatgattaatctctgtccaaacggcagctgtccttattgagcatccacaagcttgtctgcgagtgtaaaaggagggagaaaggaccctgccagggccggccaagagcgatgcacctgcatttaacctgtggtctccagcctcctcttccaaaagaatgaagctataaaccttcattcttctggttaaaaaatacaatacagattcaaataatactggccaaatgctggcctttcagaattgacagaaatacaaatgagatagtgcatgtgagggtggtttgtttccttagaagttatttaccaaaataataaaagatcttctttcaccctttgaactaaaccaaaacccttttttgaagctcctaaagaatatactgttttctttttcaatatgctttaaatctaatgtttctacaatcatattaaaaatgaaatccatatatgctcaacatgtgagaaacatctattttttttatgggaatttttgtttttttgagacggagtcttcctctgtggcccagggtggagtgatcttggctcattacaacctccacctcccaagttcaagcaattctcctgcctcagcctcctatgtagctggggtaacaggcacccaccaccatgcccaactaatttttgtatttttagtagagatagcgtttcaccatgttggccaggctggtctcgaattcctgaccacaggcgatccacccacctcggcctctcaaagtgctgggattacaggagtgaaccactgcgcccagacacctttatgggaatttttacttgagccacaccataacggagaaaatcaggacaatccaaaccaacatccacccccctacctgtaaaaagcataataaaattaggtggttgcacagagatagtttcctttatcacttccctagagtttttactgagattaacaggctttgtacttcttttttccatcccaagatgaaaatgacccacactgagggactatgttttctggcagcagtgaacgacggcctcttctttgccactgaaagtgagcaagtaaccacaagttcgtgtatgtcattaccgtgattgctacacccaactggaaaaagaatattcctactgtgactccattaaagtcttttcaaagcaaaatatagcatagaa

SEQ ID NO: 707990 - DNA, 3247 bp, Homo sapiens
  misc_feature 638, 639, 640, 641, 642, 643, 644, 645, 646, 647, 648, 649,650, 651, 652, 653, 654, 655, 656, 657, 658, 659, 660, 661,662, 663, 664, 665, 666, 667, 668, 669, 670, 671, 672, 673,674, 675, 676, 677, 678, 679, 680, 681, 682, 683, 684: n = A,T,C or G
  misc_feature 685, 686, 687, 688, 689, 690, 691, 692, 693, 694, 695, 696,697, 698, 699, 700, 701, 702, 703, 704, 705, 706, 707, 708,709, 710, 711, 712, 713, 714, 715, 716, 717, 718, 719, 720,721, 722, 723, 724, 725, 726, 727, 728, 729, 730, 731: n = A,T,C or G
  misc_feature 732, 733, 734, 735, 736, 737: n = A,T,C or G
tggccaggagtaaaatgctgaaataatttcagcaagtcttcactttaagcttagcaagaaaaagaggttcttttgaaagaaatgagatgtttccataacaaacaaaagcagacacaatagacagcatttcatgcatacttgacttgattaaagtctcacaagaccattttacatcagtgattctcagatgttaaataatttgcccaagtttgcacagcctataggcaacaaagcaaagatactaacccaagtcagactaatgttaaaagtctggctgttccacaaaaagctttctcttctagcttactttcattttatatccatctgttggcacataacttattcttgacatttgagaccgataaaaaatacccctgtagccccccaccaaaacaaaatgcaccagtctttaaaggctggcaaattaaaatataatgccttgctacaaagagtcctggctagagtgttgacactttataatggagtctggtgacaaaagtgcatctgtcctaaaatgaagcctgctccctaacaccctatcaaactggattaaaagaaggtttccgtatgcatagatttccttgaaaaatcaaggtttttctctcttttggcatgaaagctttcccctcatcggactnnnnnnnnnnnnnnnnnnnnnnnnnnnnnnnnnnnnnnnnnnnnnnnnnnnnnnnnnnnnnnnnnnnnnnnnnnnnnnnnnnnnnnnnnnnnnnnnnnnntaccttagctggcaatattctcaaaatataaaaagaaactcctcagacccagtgttctacttagggcaaggtccacagaaggcacctagtaagtacttgtcacattaacacagcctaaagtcatgattcaggtcacactgtaaagctgacaaataataagtatggtaaagaagcaagttgctcttaaagaccctgtcatgcaagacaaacatttattttataaggctttcaaaaataagcaacagcaaaaggaaatattaataatttaattaatgacttaaaagggattcatgtaaacctatatcatctgcttttgagtcaactgtactatatcagatcctaagaacagtacaaaagattcagagactgacaaaaatgactctatggctacgtacccagctgctccaagaggtcattaataatgctgaggaggctagtaacagagtttttggcttttctggcattgatctcggcttcttgagcagcctgtgaagcctgtaagggaaaaatgaggcaaagagtcttgactgtatgttttcatcttctttaaatcttttttcccaatgacccaacaaatctaatttccagattttcttcccttttctaacttaggaaattgaaacctctcattgcttttttttttttttttttttggtggggctgctgcatatcttcatattgaggatgttggtatttctacttcatcaaagttatgactaggcagtcaggatgcctacactcactaactcactatatttgtacttcaaaaattaatctccttttctcacattctaactcaataatatatggaggtatattcatagtaaagcctattaagcagaaacaagttattttttaaggatgattatagaaactatgtttcagaaccaaaacatgtccttcaggacactcttagggacttattagaaatgtcctattctttgaaaattttcatagttaagtaaagctcttctaggagttctcttctgtaaactccccctccacatgcaatgacccagccacagtccccctgacacacatactcatttattggggcaatataatttacattttaaaaaccaaacaaaggtaaatacacttgggaaattccatgaaacctgaacaaataactgtgcatgagtcataggaaacagcaatggaagaggaagtgtctaaatatcagaaaacagatgttctcacaaataaatctagttgagatttaagtaagtggctctgagcctcttaccacataattgtttttcctagttttgagtaaggacaacacaaacattttgggatcaaaacaatgtgaagatttaaaaaagaacaagaaagcaaggcagaaaaaaccttcacaaataaatgattaatctctgtccaaacggcagctgtccttattgagcatccacaagcttgtctgcgmgtgtaaaaggagggagaaaggaccctgccagggccggccaagagcgatgcacctgcatttaacctgtggtctccagcctcctcttccaaaagaatgaagctataaaccttcattcttctggttaaaaaatacaatacagattcaaataatactggccaaatgctggcctttcagaattgacagaaatacaaatgagatagtgcatgtgagggtggtttgtttccttagaagttatttaccaaaataataaaagatcttctttcaccctttgaactaaaccaaaacccttttttgaagctcctaaagaatatactgttttctttttcaatatgctttaaatctaatgtttctacaatcatattaaaaatgaaatccatatatgctcaacatgtgagaaacatctattttttttatgggaatttttgtttttttgagacggagtcttcctctgtggcccagggtggagtgatcttggctcattacaacctccacctcccaagttcaagcaattctcctgcctcagcctcctatgtagctggggtaacaggcacccaccaccatgcccaactaatttttgtatttttagtagagatagcgtttcaccatgttggccaggctggtctcgaattcctgaccacaggcgatccacccacctcggcctctcaaagtgctgggattacaggagtgaaccactgcgcccagacacctttatgggaatttttacttgagccacaccataacggagaaaatcaggacaatccaaaccaacatccacccccctacctgtaaaaagcataataaaattaggtggttgcacagagatagtttcctttatcacttccctagagtttttactgagattaacaggctttgtacttcttttttccatcccaagatgaaaatgacccacactgagggactatgttttctggcagcagtgaacgacggcctcttctttgccactgaaagtgagcaagtaaccacaagttcgtgtatgtcattaccgtgattgctacacccaactggaaaaagaatattcctactgtgactccattaaagtcttttcaaagcaaaatatagcatagaa

SEQ ID NO: 707991 - DNA, 689 bp, Homo sapiens
ttcaattgtgtatgtatgtgtgcaaggttgcaatataaagtgtcttttttacttgtgtcatggttagaaaagcttgaaaagcactattatagagcatacccaaaagtatatattccttgcttttgaataagttaaactcttgttggagcaagaaacacaaaagaataaatactcaagtagtgaattacaataagtgctatgtgttcggaaaagtaagatgataatacaagttgaaagtggcatggatggatatggtggaacttgaaccaaatctggaaagatggatagggcttggaaggrgtgaagactagagaatggcttaaaggtgagacgtggcatatggataatagggatggcaagactggaacagaggtttcagtttacattagagaactgtaggatatagtttggagatagaaaatgaagcacaattgtccagacttatggatgccttgtgataacatgcctgaggagtgtgtattagatcaggtaagctgcacagattcttaagctggggagtgataatgatatagggtgggtttatagaatactttccatcttcttcctaactcctctttagtcatggggagctcctaagggaatttcttctaggtaggtgttggataccaagtctctggcatcagatcaaagagagccagaaaggactttggctgttctccagaatgtaa

SEQ ID NO: 707992 - DNA, 1192 bp, Homo sapiens
ttttctctcccattagcctgtcagctgcttgagggaaggaatcatgtcctttctcagcacatagcaaccttcatggtacgtaaaaggtgctcagaaaggcttgttgaacaaatgaatgatgattgaatgaataaagaacaaacttgaacttcaatcatagtttgctctaattgacctacttatggtctctctttttacctgaatgtgtaagtcttggtgagcccacaaggcagtgtcttgccaagtggcatcaagggagctgtgatccgtagaccagcaccttccagaatcacatcatgggcagatgggtgtctgcctcctctgtccacacggtagtcaaaggacaggctttgmccatagctcacctgttgattcccaagaaatttggctgtgaaacagagttttaaaagattgagatcagttgtgaaactggagaggcaaacacatgcaagtttgcactggtgtcggcaatttctgttgaagtcctgtgtcatgctgccccaaaactccttgctaggagagtcaggacctggtactggacatggctatgacactttgggctatgaaggagggttagttactgaaatgataagagggccttgttataagacaattccatctattaggtgattcatgatgtggcccttatgacagactgttttgtaaaaatcccaggcctatcagcatagcacaacttgttacataatgctttagttgacagaatgccttcacaaatatcatcacatttgctggcaataattctgggaggcagacattagtattcccatttaacagtagagaaaactgaagttcagagaagttaagagaacaacttgcccaagaatcacatatgagctaaggaaacgaactgggatcggaattctagccagcgcttttccaccaaggcacgtaccactgattgatttttttttttttaacttacaggtatttgaagttttaagaaatgctttgtttttgctttccacctacttctcaatagacccataggtttggccacagtccttggtttcttgccttggtggtaaacgtagaaacttcccatttgattaaaggaggtagctcaaccagggtctgacctctgggacaccacattctgctctgttgggccattccttagtgactctcaaatcaggcttagcccccatctctcttctggggttgcactacccgg

SEQ ID NO: 707993 - DNA, 1006 bp, Homo sapiens
attgatatgagcctctgtgcttgacccaaaacatatttattgagccccatcctgtgcctgtcatggttctatgcactgggtgtgcagtggcgaacaagccagacacagtctctgctctaacggtacttgtattctgatgaagggaggcagaaagcaacaggaaagcatatcagacagtggtatgcagagagtgatggaggctactctagactggaacacggaggaaggcctctttgaggaaatgatttcttggtgttttttgttttggtttggtttggtttgagacagggtctagctctgtcacccaggctggagtgcagtagtgcaatctcagctcactgcaccatctgcctgctgggctcaagcgatcctcccacctcagccttccaagtagctgggaccacaggcgtactccaccatgcctggtgaatttttatatttttggtaaagacagggtttcaccatgttgcccaggctggtcttaaactcctgagctcaagcagtcctcctacctcagcctcccagagtgctgggattataggtgtaagccactacacccgacccttcttcccaattttaacactaaaagaaaattagaaaaattggccgggcacggtggcwcacacctgtaatcccagcactttgggaggccgaggcgggtggatcacaagatcaggagatcgagaccatcctggctaacacggtgaaaccccgtctctactaaaaatacaaaaaattagccaagcgtggtggcaggcacctgtagtaccagctgctcaggaggctgaggcaggagaatggcgtgaacccaggaggcggagcttgcagtgagccgagatcgtgccactgcactccagcctgggtgacagagcgagactctgtctcaaaaaaaaaaaaaattagaaaaattacatgcttttctcttgactgtctgccaactatcatagtaggtaactttgggaaatggatgcattgagttctgaaatggatgtatttgagaggtaga

SEQ ID NO: 707994 - DNA, 1006 bp, Homo sapiens
attgatatgagcctctgtgcttgacccaaaacatatttattgagccccatcctgtgcctgtcatggttctatgcactgggtgtgcagtggcgaacaagccagacacagtctctgctctaacggtacttgtattctgatgaagggaggcagaaagcaacaggaaagcatatcagacagtggtatgcagagagtgatggaggctactctagactggaacacggaggaaggcctctttgaggaaatgatttcttggtgttttttgttttggtttggtttggtttgagacagggtctagctctgtcacccaggctggagtgcagtagtgcaatctcagctcactgcaccatctgcctgctgggctcaagcgatcctcccacctcagccttccaagtagctgggaccacaggcgtactccaccatgcctggtgaatttttatatttttggtaaagacagggtttcaccatgttgcccaggctggtcttaaactcctgagctcaagcagtcctcctacctcagcctcccagagtgctgggattataggtgtaagccactacacccgacccttcttcccaattttaacactaaaagaaaattagaaaaattggccgggcacggtggctcacacctgtaatcccagcactttgggaggccgaggcgggtggatcacaagatcaggagatcgagaccatcctggctaacacggtgaaaccccgtctctactaaaaatacaaaaaattagccaagcgtggtggcaggcacctgtagtmccagctgctcaggaggctgaggcaggagaatggcgtgaacccaggaggcggagcttgcagtgagccgagatcgtgccactgcactccagcctgggtgacagagcgagactctgtctcaaaaaaaaaaaaaattagaaaaattacatgcttttctcttgactgtctgccaactatcatagtaggtaactttgggaaatggatgcattgagttctgaaatggatgtatttgagaggtaga

SEQ ID NO: 707995 - DNA, 649 bp, Homo sapiens
ctggatattgtattttctttacttatgcggattccagtgactccctggagacctgcaggcaccactttaagagctggagtccagagcaaattgctcaattgtccaaccttctccccgccagcaagagacagaacaacaagcggctgctgccccctagaagctaccagggrcatagcaccttgctatatagacatcacatgaaaagatcctattatctcctctccatcccataacctgtcattagtgaggtacatgggtgcagacgcctcctctgagcacaaggaggcacacatcacctgtgataaattaataggcgccttttcaacagctaagatgcacacaaaagactccaaccacggagagcacactaaggcagcagcctcagaaaggaggtacagaatcaccaggcagcactgagcatcggctgaagatacgtttgtgcagcgggcgccccgcacgcacgctagtgtgcctgacagcgcggtccacaccgcacccatacctgctctccccgtctgcacaggttcagcagcatggacaccagctttcaatcccagtcctgccacttcttagctgtaggaacttgaatgctctgggctcagtctcctcactgcaaaatgagtaattctcacaaatttgttggaatcaa

SEQ ID NO: 707996 - DNA, 1717 bp, Homo sapiens
gtaaagaaaacaagcagtcatgtaagcaagaaggtacagaagaagacatggaggactgggagtcttgggtcaaaaatggtcctgtacaaaatccttttcagggtcaattaaaacctatttcactttcatttatttaatcatcattttcaatgactattgatgagtagggtttcattttattatttcttttactttgccatttcatcttgatctctgaatacttttttccagtggttgttggataccagtgcatttgtgaacagaagaagaaatattagttatcctaacctataatactaactttcagcctaatccacaatgtataataaatatcactgggtatctgaagcttatgaattttcatttcagttttaaaatgttttttgctttggcatggtggcttatgcctgtaatcccagcattttgagaggctgaggtgggaggatcatttgaaaccagggattcggtttgcagtgagctatgcacttcaaggtgaaggaagggaaaatagtataattttttcatcattcattgtagagtttcagactgcactccagcctgggctacagagcaagaccttgtctctaaaaaataaaaaatgtttttgtgctaaaggaattagtatgctgttgcttgaattttgttaatctgagattataaaacacacaaaaatattataaagcttatctgtttcctttaaaatttttaaagccttactttttatacttttctctgaattgaataaaaggaagaataagttaaccacttgataactatattagcaatgttgagttagtgtcaagaactagaaagtaggaatataaaaattaaaacttgacaaaggtttaaaaccatgattttaaaaaatatccagacttaatcttttgctcctttaaaatgtggttcttaaatgtgcatagtttgtaacccttttactgttataactccctacaaattgattcattggtttcacagattttctccgtagaaaatataaaaacttcttgatttctaatttttcattgtgctatagtttttctccatcatgggtgtgtatattttgtaaattctaaatgggtttttaggtaagyttggaagctatgtaattaggcattttccttatccagttttgaagtttgcgaataagtgcttttaaaagaaatgtagttattttcatccaaacatacctttattctcatgttagaccatcctaaatttaactttcactaatgacctccaaaatgatttggaatttttggcacttcctattaagacaattacattttatttgtgcaggtttaaaattgtgttttattgtgcatcacaagagtttacccaactttctgtgaacttgggtctcagaactagcttcattactgtgttacttttggaaatcactttacctcaccgggcttcagtgtttggtctataaatggattggcattttttaaagtttaaggaagagtcctctttgatgttgatgaatctaagaaatgtgaacagtgcacctgtttcaccatgagtttgtaatctctgatgggttatttggttattggcaaaataacctgaaaatatagcagtgttaaagctcctgaagataccagtatattttaatgcagtttagtttttgaagttttacgacatctaaatttctacattctactttctttttcttttcttttttttttttttttttttgagagggagtcttggtctg

SEQ ID NO: 707997 - DNA, 1717 bp, Homo sapiens
gtaaagaaaacaagcagtcatgtaagcaagaaggtacagaagaagacatggaggactgggagtcttgggtcaaaaatggtcctgtacaaaatccttttcagggtcaattaaaacctatttcactttcatttatttaatcatcattttcaatgactattgatgagtagggtttcattttattatttcttttactttgccatttcatcttgatctctgaatacttttttccagtggttgttggataccagtgcatttgtgaacagaagaagaaatattagttatcctaacctataatactaactttcagcctaatccacaatgtataataaatatcactgggtatctgaagcttatgaattttcatttcagttttaaaatgttttttgctttggcatggtggcttatgcctgtaatcccagcattttgagaggctgaggtgggaggatcatttgaaaccagggattcggtttgcagtgagctatgcacttcaaggtgaaggaagggaaaatagtataattttttcatcattcattgtagagtttcagactgcactccagcctgggctacagagcaagaccttgtctctaaaaaataaaaaatgtttttgtgctaaaggaattagtatgctgttgcttgaattttgttaatctgagattataaaacacacaaaaatattataaagcttatctgtttcctttaaaatttttaaagccttactttttatacttttctctgaattgaataaaaggaagaataagttaaccacttgataactatattagcaatgttgagttagtgtcaagaactagaaagtaggaatataaaaattaaaacttgacaaaggtttaaaaccatgattttaaaaaatatccagacttaatcttttgctcctttaaaatgtggttcttaaatgtgcatagtttgtaacccttttactgttataactccctacaaattgattcattggtttcacagattttctccgtagaaaatataaaaacttcttgatttctaatttttcattgtgctatagtttttctccatcatgggtgtgtatattttgtaaattctaaatgggtttttaggtaagtttggaagctatgtaattaggcattttccttatccagttttgaagtttgcgaataagtgcttttaaaagaaatgtagttattttcatccaaacatacctttattctcatgttagaccatcctaaatttaactttcactaatgacctccaaaatgatttggaatttttggcacttcctattaagacaattacattttatttgtgcaggtttaaaattgtgttttattgtgcatcacaagagtttacccaactttctgtgaacttgggtctcagaactagcttcattactgtgttacttttggaaatcactttacctcaccgggcttcagtgtttggtctataaatggattggcattttttaaagtttaaggaagagtsctctttgatgttgatgaatctaagaaatgtgaacagtgcacctgtttcaccatgagtttgtaatctctgatgggttatttggttattggcaaaataacctgaaaatatagcagtgttaaagctcctgaagataccagtatattttaatgcagtttagtttttgaagttttacgacatctaaatttctacattctactttctttttcttttcttttttttttttttttttttgagagggagtcttggtctg

SEQ ID NO: 707998 - DNA, 586 bp, Homo sapiens
ctgctcctggatttcacaggatgaaatctggcttaaatgcactaaatcaccttgtgactccttagttctcatgacttctaagagcaaaagacattttccctactgcatkcagccaactctacaaatattaaaatctagaacctaatgtagtggaataaattcatatgaaagctacagaatgcactgaactttcagctaatgcagagttcaaataagaattccctctttaatgtcataatacaaaacgttcacatcagttaagtattgattacaaacatctattttaacaatttggtccctggaaactaccttacagcatggttcttgcaaatgttacttcaaattaaagttaaatgttaaatattatatatatggagaaagagagaatcttttttcagaaaaatacccttcaaactaattttaatgcgaagaccacattttaaccaaaaaaattatcttcagttttccatttatttggcatatatggcagacaaaaaaacaatcaatttatttttctaaagacaggtatgttatatgtgtcatgtgtatcgtatgttaagttgattttaataagtctgtgtaaaga

SEQ ID NO: 707999 - DNA, 586 bp, Homo sapiens
ctgctcctggatttcacaggatgaaatctggcttaaatgcactaaatcaccttgtgactccttagttctcatgacttctaagagcaaaagacattttccctactgcatgcagccaactctacaaatattaaaatctagaacctaatgtagtggaataaattcatatgaaagctacagaatgcactgaactttcagctaatgcagagttcaaataagaattccctctttaatgtcataatacaaaacgttcacatcagttaagtattgattacaaacatctattttaacaatttggtccctggaaactaccttacagcatggttcttgcaaatgttacttcaaattaaagttaaatgttaaatattatatatatggagaaagagagawtcttttttcagaaaaatacccttcaaactaattttaatgcgaagaccacattttaaccaaaaaaattatcttcagttttccatttatttggcatatatggcagacaaaaaaacaatcaatttatttttctaaagacaggtatgttatatgtgtcatgtgtatcgtatgttaagttgattttaataagtctgtgtaaaga

SEQ ID NO: 708000 - DNA, 526 bp, Homo sapiens
ataatttgttgaacatttgctatatttcaggcactcttctattggtttatcctgccaggcagcagtgctcgacatcaagaatctgtggcagatacgtaagaagcaacacagtgtgataagtaaaatgagtsacacatatagaacgttctaagacagtggagaagggaattattcactcattctttctttcattccatcaacacttgctgaacaaatactatgtgctgcaatgggctaaaacccagactaataaaaaatttctggcagaggagaaaagagagacatttgaggtagagggaaccacggacatgtatagatgcctgaaagatcatgacatgtttgaagatctctgaaacattccaaattgtggagaataaagttggagggggaaagcagcagccgcagctgaagtatgcaatcacttctatgtattgagagcaatcattcataatatgcatagggtgcaatactttgcactatgtgcaggaaagagcataagtagactttgtggcagtctaaacccaga

SEQ ID NO: 708001 - DNA, 1843 bp, Homo sapiens
tcaaagcaatcttttccttaacacaggttgaagtacgttccccttcttctatcagaccaacatcagacccaacgggcgttgtgttgcaaagacaaactgctgaaggcagagagcttygaaaaccacttgctttccaacagcaacacagttaccttagcctctagtctccaggtacaaaaacagcttttgtggttgtctgaaatataagagatctcaatcgctgtttactgaacctcaaaccttgacaaaataggttactttcaggtcctgaactagcttcaagtttatcctttccttaaagaactacaaaagagaataagctgtatgcaccacattctttttgttatgttagaattagggattcgcacagaaggaaatgcttctgaatgaaccttctctgcagatgcccctggaaagctagctgaccatgccctttgagcagtatgttctaaaacagtttctgggaacacaattttaataggtgcctataagaacagggagcattttcatgtctacaaaagaccaaagccaaatttttaaatgtcaaacatacttgtttctagcaggacttccaaagcctttaactgtgcattgagaatctcctagagacataaagcatgcagagctgcccaaacttatttgaccaaaggaaacctttatgggtctgattttccttggaatgtggtttggagaatgtttttagattatagattatcataaagtttcctgatggatgcaacccactttctataccctcttagaaaggatatcatcattaaaaattggttgtttttgcatttctgcccatcaaaggaacaaacaattactaatatatatgttttttgttttttgttttgagacagagtctcactatgtcaccgaggctggagtgcactggcgagatctcggctcactgcaacctccacctccgggtttcaggcgattctcatgcctcagcctcttgagtagccgggattacaggtgtgtgcgaccacgctcagctaattttttgtatttttagtagagacggggtttcgccatgttggccaggctagtctcgaactcctagcctcaagtgatccgcctgcctcagcttcccaaagcgctgggattacaggtgtgagccactgctcccagccctaatgtgtatgctaaatcctacaatatcacttggcacccggggagaccactcatactgaagccagattttgcaagccttaccctaataaactagctctgagctaccaaattggatgtcacatatcacgggaaacgtaaagaaggaatgaacaccccttgagccactaccacaagccaagaattgttttacctatgacaccctacttaatcttcaaaacaaccctgcaaggtagttatttattattcccatttctcagatgaaatgatctgtatctgtgctgtccactacctataccacagtagctcctagtcacgtgaagctactgagcatctgaaatgtggctagtgtgactaaggagctggactttttaattaatttaagtttaaatagccacaggtatcccatggctaccatattagggaatacagacctatagcattcttaagtatagaggctcccatggctaccatattagggaatacagacctatagcattcttaagtatagaggctatctgactcaattttactgaaacaccaagttatcagttttccactatcaacctccgattttacctgatattactaatccaggaggtcccaaggactggcaaatatagcagagaaaagaagtaaaagcaaatgtgggtaagactgaacataatctacagcagcatagcaggcaacaagtattaaatatttc

SEQ ID NO: 708002 - DNA, 1156 bp, Homo sapiens
ggtgctttaagccacatgaggttattagacagtgcagacacaggtcatctctatcacttcagaaagttctactggacgccactgctttgctttgcaaacattttaggaagctgtatttttaaacaatggctagcactctgattaaaatttaaaatatttaaaccacatacagatttatggatgaaaatgtcaccttgagcaccagtgagaatacagaaatctcatcttggtgtgttagtgacaaatacaccaggacacgactctcctccaagaagaaagatttttccatagtggatacagaaaacccattcagctcatcacaggtgtgaagcaaatgagcaccatatttctccccaatgagcaggattcacgagagaaaaatacttccactcaaatggccttaagttcctcaggatatcgagagcacctatgtcctcagttctgtggactgtggctctccattcctgcaagtcatttggcttcagaactacaaagggcagctcggtaaacaccaactggaggaacactagggctgaactcgtgcatttacaggcaaacaccactggcacagttcctgaaatactaggcgaggctacctgagtgtgctgcctctctggggctgacagaggctggtggcagtacagagcccttgggaggaaacttaccattagttccctccgacactctaggagagcccgggggtctgcctttggatcggtgacatgagccttctgcctccggttcttggcactcgctaaccacagcagcagattttgactcaactggtggaagtccttaaaaaacaacacatcagagcgcggccgtgtcttagagccctggaagagggtgtgccaggaacatggcttactgcttccaatccatcacagtcatttgcttttctggccttacccastgaatacgaggaccagctttaaactaaatgccagggccccaaaatgaggaagaggaaagaaggaagacactcagcacagtgccaggaggccgcgaataaaagtgccactatgaaggtagggctttgggatgcccagctgattttatatatgaaggccacacgcattcctcagccaatctgctgggttctctgctgggttccagtggcagagggaaacaacccaacaggacaggctggggtggg

SEQ ID NO: 708003 - DNA, 829 bp, Homo sapiens
taaatgactctatagtcgccttacaaaacatagcagaatgtatccagcagaggatagtggttaagaacacagatcttggaactagactatctggtttcagatcccagtcctaccacttagtagatgtgtaaacacaggcaccttactttagaggagtgtgcctctagtagtctgtaaaatgaagataataaccgaactcacctcctaaggtcattatcaggagtgaatgaattaaatccatgtactttggccagtgcttgatacatctgtgcttaaaaagtgcagatattcttattttccccctaccttcctaatctttttttttttttttttctgagacggagtctcactctgttgcccaggatagagtgcagtggtgtgatctcggctcactgcaacctccacctcccaggttcaagtaattctcctgcctcagcctcccgagtagctgggattacaagagtgcgccaccacgcccagctaatttttgtatttttagtagagatggsgtttcgccattttggccaggctggtctcaaactcctgacctcgtgatctgcccacctaggcctcccaaagtgctgggattacaggcatgaaccaccatgcctcgcctaccttcctaatcttttatgttgcaatccaagtgtggagtaggaatttaaaaaagaattccacgtaactgtttgaaaattatttcccttgctcttttccttctctttctcaagacaaataagcctccaaactctcacaacaccatagaagaaataatttggaacctgaaatatttagttattgatacaaccggccaattcacacaaatctaaaa

SEQ ID NO: 708004 - DNA, 1541 bp, Homo sapiens
acataatcccacacacactaacatgcacatactggagatacaggatcattttgctgcagtcagagaacatgaccagaagtctggactcatagctcaggatacactgaggggtaggagctgatatagtagatgctacaacctgggctcttagcaggtgcctggggaggaggctggaaggctcaatacatgctgcccacgtttcccctccatgattttctttcagtaaacacttaaccatttgccttgtcttggatcctgcacagaccctgaggattcagagatagctggaagataggacttcttcccagagaggtcatcacctaatttagatgtaatgttgacactgtaatacaacataggagttgctcaataatagctgttgaaggagtaaatgatgttcactcataccttccaatttgtctgatttgtcttcttcataaagaggtggccaaattagatttttaaagaaaagaggtaaagaccagagcatatcagagcccttctgccacaaagcagtgtgctgccagcctaggagccactcgtgctcctcagccctggtttcacacagggccaatgaagcagtgacggacattcacatcacaggcatacttagtgcaagttaaagagggggggaaggtgggagggaaggaaaagaaggtcaccaagtgacaaagcactcatccagccaggatttagccggtatatcccaaactccatccagaggcctaatacctccaaatgcctgggaatctaaatgttgttcctctgatcatcaggtaacaacttaccctgggactcatcaggtgcactgctgagcgtgtatcgttctgttctgtacagacactgtaatctaattatcacctgtcccaggtcaggaagtatttgtcttttgccaacccaggcaactgacctccacattgttgggccttgttaacactactcttgaaaaatttaaaatctcaagttaatatctggaaatgagaaaacctattcagaaaccagactgctggcacacagaagcaaccacaacactgcctgacatcaaccacctgagcgctttgctgccgtggccaccatctctgcacttgcccaggttttgacccaggtgctcttaacatttctcacatagacatttcaacaaataacctttctccaggaaaaagcagcatgatttcctgaattaaattccagttatgagaatcagaaaaacaaaatttttaggtacaaaagcraagtcttccacctgcataggctctttattgggagacctgaacaaaagcaaaatgttttctatgaaaccaaacaaaagaattatgcctaagagccgctttaaattagaagagttcttttgcagtgattatgggtaaaaatgcagaaaacaatcaaggcaaataaagtttttcttttaactagcaatggatgagaatataacattgatgaacactgctctccttccaaacaaacaaaatcaagtcaggttagcaacattctatataccaagcctaagccttaacaatgtatgatgaaggctttacatgtca

SEQ ID NO: 708005 - DNA, 1541 bp, Homo sapiens
acataatcccacacacactaacatgcacatactggagatacaggatcattttgctgcagtcagagaacatgaccagaagtctggactcatagctcaggatacactgaggggtaggagctgatatagtagatgctacaacctgggctcttagcaggtgcctggggaggaggctggaaggctcaatacatgctgcccacgtttcccctccatgattttctttcagtaaacacttaaccatttgccttgtcttggatcctgcacagaccctgaggattcagagatagctggaagataggacttcttcccagagaggtcatcacctaatttagatgtaatgttgacactgtaatacaacataggagttgctcaataatagctgttgaaggagtaaatgatgttcactcataccttccaatttgtctgatttgtcttcttcataaagaggtggccaaattagatttttaaagaaaagaggtaaagaccagagcatatcagagcccttctgccacaaagcagtgtgctgccagcctaggagccactcgtgctcctcagccctggtttcacacagggccaatgaagcagtgacggacattcacatcacaggcatacttagtgcaagttaaagagggggggaaggtgggagggaaggaaaagaaggtcaccaagtgacaaagcactcatccagccaggatttagccggtatatcccaaactccatccagaggcctaatacctccaaatgcctgggaatctaaatgttgttcctctgatcatcaggtaacaacttaccctgggactcatcaggtgcactgctgagcgtgtatcgttctgttctgtacagacactgtaatctaattatcacctgtcccaggtcaggaagtatttgtcttttgccaacccaggcaactgacctccacattgttgggccttgttaacactactcttgaaaaatttaaaatctcaagttaatatctggaaatgagaaaacctattcagaaaccagactgctggcacacagaagcaaccacaacactgcctgacatcaaccacctgagcgctttgctgccgtggccaccatctctgcacttgcccaggttttgacccaggtgctcttaacatttctcacatagacatttcaacaaataacctttctccaggaaaaagcagcatgatttcctgaattaaattccagttatgagaatcagaaaaacaaaatttttaggtacaaaagcgaagtcttccacctgcataggctctttattgggagacctgaacaaaagcaaaatgttttctatgaaaccaaacaaaagaattatgcctaagagccgctttaaattagaagagttcttttgcagtgattatgggtaaaaatgcagaaaacaatcaaggcaaataaagtttttcttttaactagcaatggatgagaatataacattgatgaacactgctctccttccaaacaaacaaaatcaagycaggttagcaacattctatataccaagcctaagccttaacaatgtatgatgaaggctttacatgtca

SEQ ID NO: 708006 - DNA, 1558 bp, Homo sapiens
gcacagacaatctatgaacatatagaatgtatattacaatacatgaaatattagcctaggcaacactgtgagtttctgtctctacaaagaaataaaaattaaaattaaaaaaaaaattagctgggtgcggtcacacaccacctgtagttccagctactcaggaggctgaggcaggaggatcacttgaacccaggagtcaaaggctgtagtgagccgtgatcacttcactgcactccagcttggtgacagagctcaaccctatctctgaaaacaaagaaaagatgtgggatataatttataatgtatatagagagttttgtgggagatgtgtattctccgctcttattagtttcatacctgtaacagaagctcaacaatgtgacatccctgctctctctttgtcccattatttattctggcccaagggaggtgttgtgacttatctgactgataaatttgtaggagtaaatttggagagacaaagtttggctcagcaacttcttcatttctcttaggagcaagctacttgctgggattgggtgcttcaatgttttaagtatctttaatgactcgttctttaatagctttagtactacctgggaagacctcacctgttgccaaatctgtttcaatccagtattttccctaggtatgcccacctaacttggggggtctatattatatcttaggaccatttagttgtcatgctaagctgtgtcttccatctcagcctttatgagaaatgcgaagtttagctagcatttagtagttcatcatcttatttcctgatttttacacattttagatttaacaaatgctatctattaggcctacggagagcctccaacaaatacaacaataaccaccacgtaaatttacatacatattcacacccttactaaaccacaacaaacaaaaacaaatcaggaaaaaatatactaaaactatatcagtggctgtttttaggtcatacctttctataggaagtccatgatagtcctaagtttactggtgtagtttttttttttttgagacagagtttcactcttgttgcctaggctggaatgcaatgacgctatctcggctcactgcaacctctgcctcctgggttcaagtgattcttctgccgcagcctcctgagtagctgggattgcaggcatgcgccaccacactcggataattttgtatttttagtagagatggggtttctccatgttggtcaggctggtcttaaactccctacctcaggtgatccacccacctgggcctcccaaagtgccaggattacaggcgtaagccacsgcacccggctgctggtgtagttttaatcacagtatccaaacaacaaaagggaaagcatgagatagtatgagaagtatgagtgataattccctttcactttttgtattttccatattacatgtaaagcacatgtgtggtatttttattagaatcaaactaaaaataccttttttaaagaaaaaagactaatttcatcatgttttatttaaacagcaacctgccttgttgtaaacctgtgaagtgaaaaattgatgca

SEQ ID NO: 708007 - DNA, 1558 bp, Homo sapiens
gcacagacaatctatgaacatatagaatgtatattacaatacatgaaatattagcctaggcaacactgtgagtttctgtctctacaaagaaataaaaattaaaattaaaaaaaaaattagctgggtgcggtcacacaccacctgtagttccagctactcaggaggctgaggcaggaggatcacttgaacccaggagtcaaaggctgtagtgagccgtgatcacttcactgcactccagcttggtgacagagctcaaccctatctctgaaaacaaagaaaagatgtgggatataatttataatgtatatagagagttttgtgggagatgtgtattctccgctcttattagtttcatacctgtaacagaagctcaacaatgtgacatccctgctctctctttgtcccattatttattctggcccaagggaggtgttgtgacttatctgactgataaatttgtaggagtaaatttggagagacaaagtttggctcagcaacttcttcatttctcttaggagcaagctacttgctgggattgggtgcttcaatgttttaagtatctttaatgactcgttctttaatagctttagtactacctgggaagacctcacctgttgccaaatctgtttcaatccagtattttccctaggtatgcccacctaacttggggggtctatattatatcttaggaccatttagttgtcatgctaagctgtgtcttccatctcagcctttatgagaaatgcgaagtttagctagcatttagtagttcatcatcttatttcctgatttttacacattttagatttaacaaatgctatctattaggcctacggagagcctccaacaaatacaacaataaccaccacgtaaatttacatacatattcacacccttactaaaccacaacaaacaaaaacaaatcaggaaaaaatatactaaaactatatcagtggctgtttttaggtcatacctttctataggaagtccatgatagtcctaagtttactggtgtagtttttttttttttgagacagagtttcactcttgttgcctaggctggaatgcaatgacgctatctcggctcactgcaacctctgcctcctgggttcaagtgattcttctgccgcagcctcctgagtagctgggattgcaggcatgcgccaccacactcggataattttgtatttttagtagagatggggtttctccatgttggtcaggctggtcttaaactccctacctcaggtgatccacccacctgggcctcccaaagtgccaggattacaggcgtaagccaccgcacccggctgctggtgtagttttaatcacartatccaaacaacaaaagggaaagcatgagatagtatgagaagtatgagtgataattccctttcactttttgtattttccatattacatgtaaagcacatgtgtggtatttttattagaatcaaactaaaaataccttttttaaagaaaaaagactaatttcatcatgttttatttaaacagcaacctgccttgttgtaaacctgtgaagtgaaaaattgatgca

SEQ ID NO: 708008 - DNA, 644 bp, Homo sapiens
ccctgataaccctcctattttgctttggtgctgacagaacaacaaatgcattctttacacttgactttttcccctcttgcctatatagggagtcagaaggttatatgggatttttcagcatccagcactgacctaaaagaaacttgtgtgtttggggggtaaggggaagggaggaaaacccctttagattaaaaagaaattaacagattaaaaagataaatattaaaaagataaagattaaaaagacatatgcctggatgcatgtaaaatttaagtgttctaggaacaaattgggaatgtaaacattgttcctgattatttccctcaaaaaaactacatgccactgaaactgtcttaactctcttcttatattttgccattttggaacgtttatctacttgtcttaccttcttcctgttagactttaatatgcttaagtccaggaattggtgctattcacctcagtgttacctgagtagcttggactgctacctaccctaygtgaaattaaattaaatttaatcagtctgggtgcggtggctcacgtctgtaatcccaaaactctgggaggccgaggagggtggatcacgaggtcaagagatcgagatcatcctggtcaacatggtgaaaacccatctctaata

SEQ ID NO: 708009 - DNA, 1187 bp, Homo sapiens
ttttcagatgtcagatattgtaaatgaattcctgttattttagggtcctagagctgcttattttactgttcctgttgcagtgagtattggggtgcctgtatagacggtgctgagatgtaattcatctgaggctggagacttaaatgcagcagccaggtgctctcctcctacttcctcactatcacagactttaatttcctcttggccatatttttgttcttctttctggctcgaaggtcattcctgataaagaagatggaagcaaactaggagttgagtaattctgttttcactgtatcatctctaaattaactgtgtcatctgcccccagcaggaggccaaactcttctcttgttctttttcttgttctgaacccaccccagtggctcctggtgtattttatgtgtgcattctcctgtgccccagccttctacttccgtgacttgattctttcttttgatgccactcctttgtatctgctgttggctgcaaattcctccttcctgcctttgtgagtgtccttgtaaaatataagctcattggagacagtaatttttttggatagttccctctcttcctcctctccagagtagagtcagaattaaattaggtggagcctccagtctttctagaaccaagttctacatgattagagtctctgaccatggaatcaaagagcatttagccttgtgccttacatataggaagtctgcaataatggtaacaataataacaacaataataacctttactgagtgttcaccataatagtaaaccatactaggggctttatatatgtgatctcatttaattctcaatgttgacatataaggtaggtcttattattcacgattacagatgaggatattgagatacagagaggtgacatttgcacagccgtaaggacagcgccaagagcctgactcaggtctgtccagattcctgagcgtgtactttaacctccacattctgctgccctctgagatttaatccactgaatcaccttcttttctctggacttgtagagttcttcattcttgcagtctcaggaacatagacggcttgcattcacttccttggctcttgagaatcacatagtgacaaggtccttttctgtctaagygccagtcgattccattgtgttatccacctagttcacctttaatggccaaaattagatccaagca

SEQ ID NO: 708010 - DNA, 1187 bp, Homo sapiens
ttttcagatgtcagatattgtaaatgaattcctgttattttagggtcctagagctgcttattttactgttcctgttgcagtgagtattggggtgcctgtatagacggtgctgagatgtaattcatctgaggctggagacttaaatgcagcagccaggtgctctcctcctacttcctcactatcacagactttaatttcctcttggccatatttttgttcttctttctggctcgaaggtcattcctgataaagaagatggaagcaaactaggagttgagtaattctgttttcactgtatcatctctaaattaactgtgtcatctgcccccagcaggaggccaaactcttctcttgttctttttcttgttctgaacccaccccagtggctcctggtgtattttatgtgtgcattctcctgtgccccagccttctacttccgtgacttgattctttcttttgatgccactcctttgtatctgctgttggctgcaaattcctccttcctgcctttgtgagtgtccttgtaaaatataagctcattggagacagtaatttttttggatagttccctctcttcctcctctccagagtagagtcagaattaaattaggtggagcctccagtctttctagaaccaagttctacatgattagagtctctgaccatggaatcaaagagcatttagccttgtgccttacatataggaagtctgcaataatggtaacaataataacaacaataataacctttactgagtgttcaccataatagtaaaccatactaggggctttatatatgtgatctcatttaattctcaatgttgacatataaggtaggtcttattattcacgattacagatgaggatattgagatacagagaggtgacatttgcacagccgtaaggacagcgccaagagcctgactcaggtctgtccagattcctgagcgtgtactttaacctccacattctgctgccctctgagatttaatccactgaatcaccttcttttctctggacttgtagagttcttcattcttgcagtctcaggaacatagacggcttgcattcacttccttggctcttgagaatcacatagtgacaaggtccttttctgtctaagtgccagtcrattccattgtgttatccacctagttcacctttaatggccaaaattagatccaagca

SEQ ID NO: 708011 - DNA, 1107 bp, Homo sapiens
attggtttgtatggggttacaattggcatgtgcccctattttattttgaattctgaccccaaaaaatgtttttgsgtatgtcagttgggagttaagtgaaatttatatcagccacaagaaactaaaacctgaagaggtatgagaggttgtgttttactttttaattcatatagcatgatttaggtataaaacagccttcagagtatttttgtggctttaaacccatcagaaaactcatttttgcagtaaaatcctatcttcatggcagatccatttattctgggatcacacagcttcggctgatctccagagtaagcagaagatacagtagtgacagctggcagcctcgctcacttagattctgtttgtgcaactgctgttaatatggagccgctaacctaggaaaaaaatcatggcttgaaccaaggtggaggacatggagcagggccctgtggcttttggagtagaagtggtcacacacgttaacaaacagcatgaacccaaactataaaaacatagaattttgagagctctaaggaaatttggatgttatctggtcaaagccctcattttgtagatttggagccagacacacaggttaaatgttaagtggcttgcctacggtaaaaaggctagctagtaacagaaataggatgaagacgtgtctcttgctctgagtacagctgtcttttctgccactataggtttgggtttgggaaattagtagcccagagctgattcccacacaaacaccgtgtctgtaattcaggtgtgttgctgctgaatagagtgttgtctattcttagtgttggtctgaactgctgggcttcctatctgtattggaaactgagtcaaacaagtatagccctcttcttccacccaaaaatagagctgtttatccctcaccccctcccaccccctctgctcaggtgatgggtacaccaaaatctcagaaatcattactaaagaacttattcttgtaaccaaacaccacctgttccccaaaaacctatttaaattaaaaaaaatagagctgtttaatataacaaatgtagaatgaatgcaaagagaaaatgaatgcctcttgggtaccagctgtgtggcaag

SEQ ID NO: 708012 - DNA, 661 bp, Homo sapiens
gatacacatatgatgtccatatctacaagtatcactttggtaatgagttgaacaaagctgtgagtatatcttttttatagagaaacttcctaagcattcttctatatactccctgaaggcttaaatacttgaagttacagtcatgtccacaaagatatagtcaggctgcacccaaggaaatgaggttaggaaataaatttggccaaaatatattcaaaagtactawtctggaagcctaatgtaagtaggggcattttctaaaggactaatttattcatttgcacatgggtgtgatttttctaagttgtgtgtgtgtgggacctaatcagaatttgaattaaaaatatttctgttgccaggctaatatatttctcatacaattatcattctgagactgaactgtatccattgtatttaaatccagctaaaatttttcatcgtattccttcagagctgcttataaataactagatatgcagttagagttgacagattaatttgttttaataagggtagtaacgtacctgtttgcccaaaaagaaacattttgctgcgacaaaaccacattatgccatcttgtcagataacttcaagatactttaaaaatgtatagtctgtcaatattgattcacagaaggcaattattgtaggaagtaaagaa

SEQ ID NO: 708013 - DNA, 665 bp, Homo sapiens
taggcattgtaactttgttaaaggtcacttctttttcaatttcccttatgattattggcctatataaggttttaatactcttcctcatcaatatactaggaaatctttcatttcatatccattttcaaatttattggaatgtagttgtaaggagtatgattatgtctttttctcatttttaataatattcttatcattgtttttcaactttttttccagaaagttttgctaatgttggtctaatttatttgtctttttgaagaaatactttttggttttcttcttcaagtttgtgtttattttttaatctcacaaaattctggttttacctatattatatgtttccttctacttttattttttaacttattgaactgaaagtctagtcacatattawcagtctattttaatctaaggaatacatattatcagtctattttaatctaaggaatgcattctaagattacagattttcccttgaatactatttttcagtttaaataaacgctattcatttttggaatacatattttgatttcttattcacctcaaaattttttggaaggttgcatttaaattctcaagtgattggatgggggagtgttatcactttattattaatatagactttcattatttgtcacacacagaatgtgaatttttta

SEQ ID NO: 708014 - DNA, 660 bp, Homo sapiens
taataattggtttgtgtgttatctacatggagcatcccttatattagaggtacaacacgtgagcatgttggtgggtaaagagctgccaaaggcttctctccccgwataggatgtgccctggacccactgagagcggccgttgtgaggaaggtgatcaagggagtggtggggcaagtccagcctgctctgcccggggctgggggcacggtcatctaaaccccttccttggctgcagaataaaggcagaggtgctcccttacttatgtgtgtgcacaaatactgcatttcctgtagcagcaggaaataagatgggcttgtgaaggagcctgtcggaagtaaccacccccaggacatttgtcctccagctttggattgtcaaaaatggattcccatcctttcctctcagtctgtgtctacacaacaatgcacacaggcacatggcacatgcacgcacccacacacacagttttcaggttacaaacttcatgaccttttacccctaagcacttcagtgcgatagagatatttgcttgggtaacagaggtttagttatcaacttcagatagctaatatcgattccttactcacaccaaatctattacttgtatcccagttttaccatttgctcgaaaatgtcctttgtagcatcattcccctcca

SEQ ID NO: 708015 - DNA, 653 bp, Homo sapiens
tgaccgaaatgctttagaagtgacagaagtctgtaaaactaaaggcaaaattaactgcctataagcactgttctccagctgaaaaaggtgtttccttcagaaatacagttcaataattctaaagcctaaatactcacccctcacacacatgcactggagtttaacaattaaataaatggatagccgatgatgggaacagatgatttttccagacatctcagagttggagtaggagtttacatataagaaaggggaagagtcttgaactattcatgtagtaataaattagagctggagacatcaccataaattcatgcttaacctgatacacatactgatacatatagaaatatttatagatatgtgcatttagtgtgtgtgtgtgtatatataatatatatagcttagtatacacatatacatatatatatatatccttgttacatcagctgagagggcctagaggcaatgacactctcttagaatgagcacaactcacactcagataccaatttttagttctgttttccaacacaaaggacaagagctccttataaaaagagctgagtagctcattcyaagactgggacaggctatacagaagataaatctaatatcattctagcatcagacattaaagaagtacacaaaaa

SEQ ID NO: 708016 - DNA, 553 bp, Homo sapiens
gtctgaaaatatttcatgagaaaagtcataccttctgtgattgctcacacatatgatgcatgtcatagactatgccatctgtttagcaaatcattcattgtcttctggttcaagggtaattgtgagatagtgtactgatagctggaaagtcccttttcaaagtagtctggaagagatgcacaggtgcaacaatttgcaataatatttttaaaacagaatatattccactctttcatgtctaaattcctatagagagccaaagagagcaagaagatatttgttaatggataatgcctttgagggacttggagcttattcctcatatgagaaccaatcaggccacatttctcccagagaccatcttctctagttttcactctggattaaatctgaatttctgtakaaaacaattagacttagtttgtgcttttctctccttttcatgaataatttagtttatctgtaaattactaattgggttgttgataattttagattaatatcattagaattatattttaagattatagagattaatatggaattgaaattt

SEQ ID NO: 708017 - DNA, 1916 bp, Homo sapiens
tgaatgaagagagggaactgtcaatagagatataaaaactataagcaagaatgcaaggaagatcttaaaagtgaaaagcgaaaaayttgttgcatgaaaataacttaataagatgaaaatttatttcaattaaaaatgtatttaacagttctaggaaactaatacaatctccatcccacccccatctgcacaattgcttctggagtcaagaccctaggagcaagtaaaggtccttggcttaggaccccatggtgtttctatcattgaaatctttagttgtttttaatactatccaacctgacttttcattcattggctctaaatggtttaatgcaactttcctcactagacatgtttctaaaaatatttcatgcaatgtaaaattgtatattaaataaaatttttagagaacttcttgactttttataatacttaataaaagtagttggatagaagaagaaattaagatgatgactattatatatgatcatattgaatatgaccactgcatttgtcaatgcacatttaaattttgctaatttttaaaatcatcattcacaactaaatttaaggatctcttcatatgtagcagttcaatgtattcaaaagtagtataaaatcaaccaatatgctggtactatgttttgatgagtcaattaaaacttcagtattagccaaatctaacgatacgagagtttgctcatttctgtcaaatattttaaatcaaacaaaatagatatggtgggaatggaaaagcattttacaagcatttgtatggtataaaacaaaggaaatttctggttgtgagtgtttttcttttctgttattaaaaagtagtcatgcctatttttttcagggctgaacaaactgaagtgatttttaagaagcagaatactcttcagtttcaaaaacgttatgcaactcttcacttgtggtattggtaagagagcaagattttaaaaatgaaagagaacaatttgatgccttaatcataagactgacgtaatctgggtattggaattagaaaccatgatgatcaactcgtgatttgaactaaaaataaaacacagtattccaaagaatgattggagaggatgtaaaactaatatgacttaatgtcttcattgtccctgaaaacaggagaattcataacaattggctaggcagtcagacaacttgaattctaattctaattctagttctgttaacttcagttccgtccccgccccttcaaacaaaaacaaaaacaaaaacaaaaacaaaatcttaagccaattgtggtttagtcttctcctttacagaagaagcaggtagattcaccagatcatctcaaggctcttttaatgttctgtgattctatgaatttgcataaaataggaatttttcaaggatggtttcaggataagagttaatatattcaaattttgatttatgtaaaatgtagtcaaggagttttctagttaccatttaaagcaatgagagtagatagggttcatttccctctcatgtcatttgctaactctaagttcataaagcctgtagtgatttgtttcagcataaatatagggtgcgtatctgagttgaatactaaaagtcctctggttgtatagaactcacgttaagctcaatgcagagagatctgatgttcatatctcacctttaggcttttgttctttgtgtctctgtggaaaaatcttaaatcataagcaggtgtgagactgacccttattcttagtaggtttaaatgatgtaattttgaataggggagataatatggaattgtttgtgaagggaatgaacactgcataacaaaatcccaggttgcaatttcagccattattaactttgcaacttagggttttatttgcttacctgtacaaggagactcccaaatctctttggttctttaaatccct

SEQ ID NO: 708018 - DNA, 628 bp, Homo sapiens
gtttctaaaccttcagctatgctcaaaatgtcaatcattctgaccaacagaagcagtcatcttcccaggtagttggacttgaaaaatatcccaggcccatttatgctttggcaatcactatatggctggattcccacactctacctaactcttcattgaagagatttctgaaaacttttcttttgctcaagtgaatttttatttccaggaggatgtgctttatgcaataaagcaaacagcttagaagtgataaaagccttcctcaatatttagcagaggctcctcagagacatctgacagtatttaaaattgaagttgaaggtcaaaaagtggagaatggcaacttctgaatgattctggaatgctgcctataaaaagtgatattaatttaatactcagatggccttaaacatggaaaacagcagtgttcatgcttcttgggcaaaaaaggaattaatatttccatgttctctgggtggcttgatgaactttgcaacttagggaaagtcacttctgtttatttttgtgtgtaggcatcatttactgtgtatatgaagcagggataatagctcctacttggaaatcactttaaaaacycatgtataagtaggaagcagcattacattag

SEQ ID NO: 708019 - DNA, 937 bp, Homo sapiens
tttttcacagctctgaagagggaagaggaagatcagggtgccagcgtggttggcttctagtgagtgcactctgtgccttgcagacagctgccttctcactgcacgctcatgtggcctttcctcggtgcttgccatagagagagctctctctctctctccgtctttttatgaggctacagtcctatagaattagggtgccacccttatgactcctgtagccttagttatctgccaaggaccctatcttcasatacaatcacactgaggattagggcttcaacgtatgagtttgccaggggaggacacaattcagttcatagtaacctgcaaggagacatatcaggggcacattcttgtcacacggccaaacttccattgcaaaatgactacattacaatggatctttatatgagtgtctagcatattgttgcaattatttgatgaactatcattttgaatttgttcagctgcacttgtggaggaggaggggtaggagatgaaaaagaagaagagcatcgattatgtactcactctgtatcaagcactgttctaagtacttttgcatgcatcactacttcgtccagtttttatgataaccctttgaggtagatattttgttttacagatgaggaaacagaggccccaagaagttaaataacttgcttaagatcacagagctaatgagtggcagaacaattattctagctctgattttaagggatttacttaacttttacttggaattcatggagtcattgggctttatttaataagtatctcatcatattctagttatatcatctcctataagtgttcaaaatttgacaaaattcagatcaaaggtgttttgggggcattttggtgtcagaagccatgaggccattaaaactcatgagggctgctttagtttcctagggctgccataataaaggagcac

SEQ ID NO: 708020 - DNA, 1124 bp, Homo sapiens
gatgcaatttcattgcgtagcatctctacaacacatttaatcttcaatctctatttctttagccttttctagctattctcatgcgttacagccattataaatggggaataattttaccccaagagtttcctgaycaatatgtgcttatttcagctgtgcggattagtaagatgttagtgttcctttttcacacttaacattttcaataatttgaaactgtcatttatgtcagtgatttacaaatacatataaatttttttctctttcagatatggagtttggacctccaacagttaatgataaactaatgagattttttgatcactgtgagaagtttttaactgaagtagaaaaaaatgctacagctctttatcacgtggaagccttcaaaactggaccagaaatgcagaacattttaaaaaaagttgcagctactttgcaagtgccagtaaatgatttaaatgcaggtaatatgtctgttgtcttttatttgaacttaacagtttaaataattttgaactgtgaaaatgaaaacataaggaaacagtcttttttaaagacccataattgatctacattaagaaaataatatgttctgggtcaaaaaaattgtataccttgtgcttactatttaccatttttagattcatattcttctttgagtgttatttaaattactgtacaagattctagttatattctggagtttttttgagggcagagtaatataaagcctcaactgtaggcattatttttaaaacaaattatcttttctgaatttccccctgataaagtgatacaaatggaaaaatcatataaattctttagcttttgaagcagttcaaaagtacctgttaatgtgtaagaggggtaagttttagaaagtgaaaagcaaagtactatgatgttttttgagttatatgtagcaatgctgagaagatgagcagtcatgtctatcataagttattgcagtggatgggctgactatgcaacttaccatccaaactggtgggacactttcgaaagtgaaagggaacactattaataattttgccaggaaagcaggtgggaaaccatggcacatggtcacctagcaatgggagattaagaaaataagatttttt

SEQ ID NO: 708021 - DNA, 652 bp, Homo sapiens
aaatgtctgcaaaatatagtggtcacttaaacatcacttagcataaacattttattctgaggaggaaaaaatgtttttattcttttcatgttttaacctttgcatacaacttctctcgttccgctctccatctcctccccgactgtgccgtcaccatacatttaaggatcttgggagcttatgtagtcttgcaggaaggcctggatctcaaatmtgaaaaggtaaaactctgttagagtatctagactttcaagaaatgaggttctctagttcccttttataatccattgcagcaatagcagttttcacttttagaaaattaatcccttattctattccactttcaaaatggaactgttaaatgttatggattcattgtagttaaaattacacagatcttagcagtttatggacaaaagcccagagagtttaaatactcactttgctttttagtagcagaccatgggttcaaactcaggtttctgctctccctgttcagtgttctttattgattttccctttccctgttataaaagcttgacaaattaggctttcttctcaaggcctatggagtttagtaacttgcataatgcctggcacaaaataggtcttaaaacaaatgcccgttgtttaccatttactgggaaagaca

SEQ ID NO: 708022 - DNA, 617 bp, Homo sapiens
gattctgaggctacctcactttggggtgaagataaactacagattgaaatcacaatgtatatgtctcagaacttgctctattattccatggtaggctaaataatggcccacaaggatctccaggtcctaatccctagaacctgtgattgtttccttatatggcaggaggctttgcaggtgtgattagataagggtcttgagatggggaggttagcctgcattatccaggtgggtcttaaatgcaatcataaatgtccttacaaagcagaggccgagrgagatttgacacagaaggagaaggtagcataaccactgaagcaagacattacgctgctggctttgaagatggaggaagggaccacaagccaagaaatgcaaagaattcagctctaaaagctggaaaaggcaagaaactgcattttcccctagagcttccagaggagcccagccctgctgacaccttgatgttggcctagtaaaaatgatgatgttggacttctggcctccagaactatgacagcataaatgtgtgttgtttgaagccgccaagtttgttgtcatttgttacagcagccataggaaaggaatacagatttctttagctgtttggatagaaa

SEQ ID NO: 708023 - DNA, 617 bp, Homo sapiens
gattctgaggctacctcactttggggtgaagataaactacagattgaaatcacaatgtatatgtctcagaacttgctctattattccatggtaggctaaataatggcccacaaggatctccaggtcctaatccctagaacctgtgattgtttccttatatggcaggaggctttgcaggtgtgattagataagggtcttgagatggggaggttagcctgcattatccaggtgggtcttaaatgcaatcataaatgtccttacaaagcagaggccgagagagatttgacacagaaggagaaggtagcataaccactgaagcaagacrttacgctgctggctttgaagatggaggaagggaccacaagccaagaaatgcaaagaattcagctctaaaagctggaaaaggcaagaaactgcattttcccctagagcttccagaggagcccagccctgctgacaccttgatgttggcctagtaaaaatgatgatgttggacttctggcctccagaactatgacagcataaatgtgtgttgtttgaagccgccaagtttgttgtcatttgttacagcagccataggaaaggaatacagatttctttagctgtttggatagaaa

SEQ ID NO: 708024 - DNA, 604 bp, Homo sapiens
cactccagcctgggagatagtgcaagactctgtctcaaaaagaaaacaaaaaactattttctgtattgaagaggaaaatatatgagcctcctgataaataaaactaygttagaatattatatctgaatgtatctgccaaatctgagcctaaactctagttagcagataagcacttgttaaaaaatatttatagtaatatatttttaatcaaccaggatttcatcttgtataaaaaataccaagaacttccacacactatgtcattttcttctttttgcttttttaaattcatgtcaggctcagtggctcatacctcatacctgtaatctcaacactttgggaggctgaggtaggaggactgctccatcccaggagtttaggaatttgagaccagcatgagcaacatagagagaccctgtctccaaaaaaataaaaaataaaaattcattgtttaaaaaggaaatctggtggggcgcggtggctcatgcctgtaatcccagcactctgggagtccaaggtgggcagatcacctgaggtcaggagttcaagaccagcctggccaacatggtgaaaccccatctctactaaaaaaaatacaaaaatt

SEQ ID NO: 708025 - DNA, 617 bp, Homo sapiens
tgaccctttctgtctgtgggttccacatctatggattcaaccaacctaggatcataaatgtccagaaaaaatatttagtctgtactgaacatgaacagacttttttcttgttattccctaaaaaatataactatttacatagcatttacattgcattaggtattataattaatctaagatgatttaaagtatacaagaagatgtgtataggttatatgcaaatagtgcaccagtttatataagggacttgaacatctgagaactttggtatctgagggaagtcctggaatcagtcccccacagataccaaaggacaactgtatatttttcctagttgtagaaagagagtagtaggaaataatattgtaaagataatttgtgtccccattgtggagagcttttaatgctagggtaaataattaaaactcttccataaatagtagggagttactgaggatttggggacaaggaagtgaaatattctgttattttctgcttatacttggtagtgttttctagttgtaatggcttatctgtcattttcttcctctctcctgtgtttgtctaaattctcccytcgttcattcagtaagcatatttgagcaccacctatattc

SEQ ID NO: 708026 - DNA, 654 bp, Homo sapiens
taaccctctgatttgctgggcaggtggatattaatgcccctgttttcagatgtggaaacggaggctccagcccagggtcacaaagatctggcctgcacycctgcatctccaaaggctaatgtttttgttttttaacaaaagctctatatttaccccaaagataaattgccttgtaactctaccccaaaccaaaaggaaaagaaaaagctgctcataaatttaaaatggcatttccctcatttattgacagaaagcattcaaacataaaagggtcggaggtcacttcgaagatggccgaataggaagacctccagtctgcagcttccagcaagatcaacacagaagacaggtgatttctgcatttgcaactgaggtacctggttcatctcactagcactcgttggacagtgggtgcagctcatggagggtgggctgaagcagggcgaggcgttgcctcacccggggaagcacaaggggtcaggggatttccctttcctagccaagggaagccgtgacagactgtacctggagaaatggtgcacttctgaccaaatactgagctatacacagtcctagcaactggcacaccaggagacaccctcccatgcctggcttggtgggtcccacgcccacggagccttgctcactgctagc

SEQ ID NO: 708027 - DNA, 649 bp, Homo sapiens
tgtcaggccgagcccagccctgtggggacgggccctgatgcctggccttggcctgaagctgtggccagctgttgccttctgcagacccttctgtgtcctgcccatcctctccctcgggagagctgccctgagcccttgttctccaggctgttcccacacatgtytttttggcccaggttgctgggaggggtctgggaaagtttgatgagggccgtttggggcctgccagggctggtgaggtggagagaaggttccgctctgcccttggccagtgagggggccactgcagagctccctcccctctttgagctgcctatttttctgtttgggaacatagaggctcattccctccacccttgccaaaaagagagagaaagagagggagaaattagggtgtggagcaccatggagatggggctcttttaaacacaaggtgtgtgtgttaacgaagctgtcacgaggctcctgggagttttcaagggtgacaggcgtgagtggggttgggggtgggaggatctttccagactggagagggatgggtggctgtttgagaaggttctgggagggccgatgagtctggagttgttctctctgagagtccctgaatgggaggtggctctagggtaggagcctgagtgcatggtccaga

SEQ ID NO: 708028 - DNA, 649 bp, Homo sapiens
tgtcaggccgagcccagccctgtggggacgggccctgatgcctggccttggcctgaagctgtggccagctgttgccttctgcagacccttctgtgtcctgcccatcctctccctcgggagagctgccctgagcccttgttctccaggctgttcccacacatgtctttttggcccaggttrctgggaggggtctgggaaagtttgatgagggccgtttggggcctgccagggctggtgaggtggagagaaggttccgctctgcccttggccagtgagggggccactgcagagctccctcccctctttgagctgcctatttttctgtttgggaacatagaggctcattccctccacccttgccaaaaagagagagaaagagagggagaaattagggtgtggagcaccatggagatggggctcttttaaacacaaggtgtgtgtgttaacgaagctgtcacgaggctcctgggagttttcaagggtgacaggcgtgagtggggttgggggtgggaggatctttccagactggagagggatgggtggctgtttgagaaggttctgggagggccgatgagtctggagttgttctctctgagagtccctgaatgggaggtggctctagggtaggagcctgagtgcatggtccaga

SEQ ID NO: 708029 - DNA, 649 bp, Homo sapiens
tgtcaggccgagcccagccctgtggggacgggccctgatgcctggccttggcctgaagctgtggccagctgttgccttctgcagacccttctgtgtcctgcccatcctctccctcgggagagctgccctgagcccttgttctccaggctgttcccacacatgtctttttggcccaggttgctgggaggggtctgggaaagtttgatgagggccgtttggggcctgccagggctggtgaggtggagagaaggttccgctctgcccttggccagtgagggggccactgcagagctccctcccctctttgagctgcctatttttctgtttgggaacatagaggctcattccctccacccttgccaaaaagagagagaaagagagggagaaattagggtgtggagcaccatggagatggggctcttttaaacacaaggtgtgtgtgttaacgaagctgtcacgaggctcctgggagttttcaagggtgacaggcgtgagtgsggttgggggtgggaggatctttccagactggagagggatgggtggctgtttgagaaggttctgggagggccgatgagtctggagttgttctctctgagagtccctgaatgggaggtggctctagggtaggagcctgagtgcatggtccaga

SEQ ID NO: 708030 - DNA, 649 bp, Homo sapiens
tgtcaggccgagcccagccctgtggggacgggccctgatgcctggccttggcctgaagctgtggccagctgttgccttctgcagacccttctgtgtcctgcccatcctctccctcgggagagctgccctgagcccttgttctccaggctgttcccacacatgtctttttggcccaggttgctgggaggggtctgggaaagtttgatgagggccgtttggggcctgccagggctggtgaggtggagagaaggttccgctctgcccttggccagtgagggggccactgcagagctccctcccctctttgagctgcctatttttctgtttgggaacatagaggctcattccctccacccttgccaaaaagagagagaaagagagggagaaattagggtgtggagcaccatggagatggggctcttttaaacacaaggtgtgtgtgttaacgaagctgtcacgaggctcctgggagttttcaagggtgacaggcgtgagtggggttgggggtgggrggatctttccagactggagagggatgggtggctgtttgagaaggttctgggagggccgatgagtctggagttgttctctctgagagtccctgaatgggaggtggctctagggtaggagcctgagtgcatggtccaga

SEQ ID NO: 708031 - DNA, 620 bp, Homo sapiens
gcaggaggactgccgaatccccgagggtgcccggcgttcttcaagtggggtgggagctgtgcctgttgaggatatagatgttgattcagatttttattttttatttttttgagatagagtctcactctgtcacctaggctggagtggagtggctcgatctctgttcactgcaacctttacttcccgggttcaagcgattctcgtgcctcagcctcctgagtagctgggattataggtgcatgccaccatgcctggctaattttgtatttttttttttttttaagtagrgatggggtttcaccatgttggccaggatggtctcgaactcctggtctcaagcgatctgcctgcctcagcctcccaaagtgctgggattataggcatgagccactgcacccggccaccaattcagatattgatgttgatgttgagtttggggcctggtattttctttgaacacttgatctgctgatagctcacctaatctggacttccctggccttattttatgacattcgtggctatatgtccttctgcatccgttcccatccaaagccttcaaatccaagtctgacttccttctttgcatctgtctgcccctggttctttctcggtgacat

SEQ ID NO: 708032 - DNA, 2397 bp, Homo sapiens
gggatgttcctctaacattagccagcctgtcgcagcctgcccaggaacctggtgcatttgttgtgtggcagaaaacgttgctgaagaagaggctgaggtttgggctgagaagttgcctgaggcctcctgaaccatcatcttcattattgaaacattaaacaccctttggtccccagggcttgctatcagagcagttggctcagaggacgaaatgtggcaggaatgaggccattatctgccattatcctgttgttctgtaagatatccctatatcccacctatatcccaccccagtagccagttgtttctcagtgtgactttctggagaaagtgtggataaatcaagatcatccatcttcattcctggaaacatagggggtgaagagagagagagagagactgactgcatatgcttagcaaagaggaccaatctcattattacatttaaaatatttgtttcctcccttttgcagtgttttaaagtatgaaggatgatgaccagacatttgtttaaagcaggaggcacacccacttcccaggagcttgcattctagtaatgacataatccatgtcaatgttagacacatgtgtgcatggtctggccttcaaacaattaaacaattgtgaggttgccgaagttaaatttcttacctgggcatagacccattgaagcaacaataaagggagtgtactttaagaatacacatggaagacatctttaggctttagtaataaaaagccctatttgatcaaggaggttctcgttatttgggatagactggttgggtgaactagacccagttcacacaagtgacttatagagagttcagagctgagaaagcagctgttaagtgcgttcctatgtgtaagcacgtacacatccctggcacatagtaagtgttctgtcaatattagtgaatatgactattattgatgaaacagaagtaaagattaaaaaccatctgagtctggtaaccaaatccctaggttcagagtttctttcatttaggataaaagacactggccagtgctggaaagtgagttagactggatgtgtccacatgtttgtaaatgttttacctgcctctttgatgattcttcttggcctaacctaatagggcatgtgctcaggacttgctgcccctactgttagcctcctgagggcagggaccacatctgtcccagtatttcctagccagtagartatgatatgctcaaaatatattgttgcaataattgaatgatattttcaaaatgagtcagcaacatctgtggtatccctcaaagttgatactatggaggtttaaagaaataataggaacatgcccatcacaaagccctgctctgtttcctcccctcccagtgttatgttcagctcttggagcccaagccaaacaagagaatcattcactgagggaaagcaggacagggaaggatactggcaccctattgtaaaataaaccattacaaatataggttcatttactctggaggagagaagactttgggaatgaaagttctaaacatttgaagggcttttatacagaagaaggataagaattgttctctgtggcctcagaggacaaaagttagaatgcggatgagaagttgcaaggaggtagagtttcttgcaccataaagaggaactatgccatggagagaagtggttggcagagtcctgggatctgtttgggtacctgctgagtggttaatgtgtgtgcaagattttggaatctaccttcagaatttcttataaagtagaaattaaataagatgagaactggggtctctttcttgtggggagggaagtaaaagctgttgtagtggcccaggtagaccacttagggctgctgagaacgttgtctaccttgaaagagaaatgaagggacccaccagttactatgaatcaggaatattaccagatgctttctttacatagagttacttgtctcataacactgggaggttagtattgaaggaaacatactcacagaggtagagtaaccagtccagggctcacttttcctgtcttaatcctctcctggaatactgtgttgtcaactggatcccctttacaccaaatctactttttcttcatcgaaataaatgactcttgggtagaatatccctgcctcaaactgttctggaactttcttcagggacttggatggccttctaagtactggattttgccttgtcagtcaagaccttcttctctttcctgcagagtccttgccgagggctcttgattgcaacattccatttctttccttctgccttggtggagggtttcagagagccttctgttgaccttcttttaattgctaataattattcaattttatatagcccacagtgataaatattcatgaaaagcacagtgtatcaagatccaac

SEQ ID NO: 708033 - DNA, 1366 bp, Homo sapiens
ttgtttttatcacagattttattgcaataaaatacatgatttcgattgatcgaagtttgtgggtctaatgttgaaactctgtacctagagttagtagtttgaattgtatctaagagatgtcgggtactgctacatttaccttgaaaatctaaaatatctcatggtgcccctctgagttgacagcagtaccctaggttgccttggcataaagtgtaagaaccatggtgttatatatatttacatgagtttgttttcttctttatgtgtagttcttcatcttttatttactttcagtaatttgagaattttttctctttaatagtaaaacttactatcattgaaaatttttgtggtttataatgtttgctttattacatatcaaagtaatataaaccacatgcatcagaatcaccttgaatacttgtaaataatgccagacttagtcagaataccttcaggtaggacctcagaatctggatactataagcaacattgattgatcgcccttggagacttgagagcaattatcctgagatatgtttctgggttatatattctattccactaaccttctgttgagtttaagtcggtttattctttgtggctatacaacatgttgcctttgcaggaataaaaatgttacttccgtaactctttgttaaatagttatttgtagttgtttattttgaaaatgaatttgagaatctctttatatatttctctttctctcaactcaaaaaaaaaaatcatactttatataagcctcatatatctttagttagggctgttatttctaaatatttggaatgtgctccatgtggttgacatattatcatcattgttattgtagataaatacaaaatgtttatatttagacatctgtctcagttaatttgaattttctgggtatacaaccatatgcttttaaacaatgatattttgtaccctttcaaatatttgtaattctttatttccctcttttgccatatttctataagggaattttagaaattagataacatctttgtcttgaatttcctcctggtgtttccctattaaggaagacataacttttactttgggatatgtttaatcatattaagaagatttacgtttgtctagtttttaaaggttatggcttacaaagcttttttattaatgttaaaatatttccaaatatgtttcttattgagatgatgcattttttcttacacgtattaatattcaytcaatatgggagagtgacttggaaagctgtattcaaatacccactccagcacttattgactgtgtgactttcaacaagttactctacctctcagggactcagttctcatctgtaaattaataaaaaatctatagattg

SEQ ID NO: 708034 - DNA, 1017 bp, Homo sapiens
ttgcatattcagtcagcattgttacagtcagaatcaaaccactgatgcagtcagagtatactggagagtgagaggatggcatgaggagacactgaacatctggaagatgcagagctgaggatctggggctttactctgtgaggaaaggattcatagtggagtacagtcagatttgaatattacaaaaatcactcttagaaactataggtagtgtattgctatagagaagtgaattacgttagtaaatattattgaattattgcatcagttcagggcaacaattaaactcaagtggttaaagaatatacaacaggaaacagatttgagagctatttaagggacagattgacaaagttcccatgtttctggctggtaggatcagcagtaattgatgatatttactaaaagtgcraatgcaaggataagagaaaggcagacataggggaatgagggagaaaaagtgttgagttcaaagccatgttagtttggtacaagaggagaactcagatgcaggtgttcaggtaacaagttattgaggaaatcctaaagggaagtctaggctagaaatatcgggaaacaatgtaaatgagaaacgagtagagtatgaacaaagtcagtagcagggggaatagtgaaaacaggttgggcttaagagacatattgaagttagattcagcaagactagtgccacattgatttaacattagagaaatttattgttcttattaagcaccagagccagtgctatcaaaggtatgtaaatccacaggtacaacttctaacctgtaaaaaaactgtaattaaaatttagtcttatagaaatatactattttttctatattagactatcacatgtaaactgtaaggtcaaggttcatgttatctattttagtatccaaagtacctagtactatgtatatgacaacacatgtttgttgaaccaaattgacatatctctgctgcaattatcatggtatcaaccattttttcagcatacacttactgaatgtatatagg

SEQ ID NO: 708035 - DNA, 615 bp, Homo sapiens
cggctgaccaaaagttctgtagactatattacaagcagagagcaggaaaatttcacataacctagggcaagacggtgaatgtgttcaaaactctaatttaaaattgrtaggatgatatattttagaaacattttcatcaatatgatcaaaattttaatgattagcacttaagcttcaattttgtagaaaattcacatatgtaaggtgtctcatttcctgataaagtccactaaataaaatacatggagtgaatttatttttggattttttctcttttattgatatataatattttcatatttatggagtacatgtgttcattacatgcatagaatatgtaatcatcaagtcatgattttggggttgccatcaccttgagtgtttatgatttttatttattggtatgattttaagttctctcttctagttactttgaaatatatgtaatattgttgctaagtatagtcaccatagtctgctattaaatattagaacttcttctgtctaactgtatgttagtactcataaccagtttctcttcattcccctttcctcatctactcttcccagtctctggtatctatcattctattctctatgtccacaagatcaaat

SEQ ID NO: 708036 - DNA, 615 bp, Homo sapiens
cggctgaccaaaagttctgtagactatattacaagcagagagcaggaaaatttcacataacctagggcaagacggtgaatgtgttcaaaactctaatttaaaattggtaggatgatatattttagaaacattttcatcaatatgatcaaaattttaatgattagcacttaagcttcaattttgtagaaaattcacatatgtaaggtgtctcatttcctgataaagtccactaaataaaatacatggagtgaatttatttttggattttttctcttttattgatatataatattttcatatttatggagtacatgtgttcattacatgcatagaatatgtaatcatcaagtcatgattttggggttgccatcaccttgagtgtttatgatttttatttaytggtatgattttaagttctctcttctagttactttgaaatatatgtaatattgttgctaagtatagtcaccatagtctgctattaaatattagaacttcttctgtctaactgtatgttagtactcataaccagtttctcttcattcccctttcctcatctactcttcccagtctctggtatctatcattctattctctatgtccacaagatcaaat

SEQ ID NO: 708037 - DNA, 623 bp, Homo sapiens
ttgtttagtgaaaaggcttttctgatagcatgaaagccaccttcacttcagccaccacttggacagcagagggcgctgttgtgagcgctaatgcaccttctgaaaagctttcttcctcgcccttctcacacttgcttgaggtgcattttactttgtttcccctgttactaaaagccacatatgagagagattttcatttttttaaatattcaggcaccattccctccagtgctttcattggtgaaattaattcttcctgggagaaacattcaagaaacaatgactgaattggaacatgaagaaaagatatagattggatgtttctcctgcttctttggtcaaagaaaaaaaaaatctgcctaaattcagagaataatttaaatcattaagttccagagtctgggctgttaagcagagggaaaccctcaaccagatatgctttgcagagttgacattttcaaaaccccaaatttcaggcatcctctgatggcatgttatttttaaaattctgtttatatggaaaaaatctgaagtgccttccatgctccatgamataattgcttttgaatgaccctaaggaattccctgaacttgggcagaacctattccagctaattgaggtt

SEQ ID NO: 708038 - DNA, 634 bp, Homo sapiens
gctgggattacaggcgtgagccaccgcgccctgcccgggcgcagtgttatttggggctgttgacctgaagtaggtctgactgagatgctttgagttacaagcactggaagcaaattctgacgtaagcaggaaagatggttccatttactcatttataaaacagactggggtccatgcttgatagagagagggggagaaacttgcaggccagtgagaaaactgggaaagggtggtgctcccacagttaacaacaagcacatgggtgtcaagtacgagactacagacaagtgataggcagtgtgaggctggggatgaatcagctcaatagaggcaaaggcaatcaaatgtcaactaccaccctgtgagccgcgtggrcaaaggagtcctgatattaaggaggctaggaacaagctgcttggtgttttaaggtgaggcggagaaacgcaggtgcctgtgggcagggcctggatgacgacattgcttgggtgtctgaagtgggtgattcatcagggagccacagctgtttacagctgacccatgtgttaaatattcatcgcccagagaagggaaatgtgttccagtgcccccaagcaaagctgaggcttttctgtttgattagaagataagtaaaaaa

SEQ ID NO: 708039 - DNA, 905 bp, Homo sapiens
tttyttttttttttttttttttttgagacggagtctcgctctgtcgcccaggccggactgcggactgcagtggcgcaatctcggctcactgcaagctccgcttcccgggttcacgccattctcctgcctcagcctcccgagtagctgggactacaggcgcccgccaccgcgcccggctaattttttgtatttttagtagagacggggtttcaccttgttagccaggatggtctcgatctcctgacctcatgatccacccgcctcggcctcccaaagtgctgggattacaggcgtgagccaccgcgcccggcctgcataatatagtttctaagaatttttacagaaaaagcctctgcataatccagagagccctaagcttattaaactttgagtctctttttttattttaaatattacactaattcaactccaaggattatagtgttctacaatgtatgggacacagattgagtttagcttgtgtagtctatttccaagggaagggatcagcaaacatttccctataatgggccatatagtaaatatttaaggctttgcaggccataaggtctctgtcgccactactgaacgccagcattgtagccagaagtaggcatagataatggagaaatgaatgggcatagctttatttacaaaataaggtggtgggctgaatttggcccatgggccatagcttgctgacccctgctaagagaaacataagtgtgaatggaaagagagggaggttagtggctggttagggaaagacagcagaactgaaatgagggaaaaatgcaaggaaactgagggtgatctcctctcactgctaagtgtctctcacctttcttcgtgtgcctcctgaattccttgatatggtcaacagagcaagcatagaaaataacctc

SEQ ID NO: 708040 - DNA, 1921 bp, Homo sapiens
ttttgaacatgctcttagaggaagccagtaagagcggggagcagggctgggaagggaagaggccaagcaagaaggtgaactcactcaggcaaagtcttgcagagagttaggctgcagggagctcaggagtgtaaggcctgttctgccatgcaagggagctgaggctttcagacccctgyagccaacagccattggataagctcaccccaagcagatgtaaattcccctggcacttccagctctcaggttgtgcatgccagggaggctcgagcaccctgagattgtggaagaagaaagccccctcaagccaacaggcacacaagaatggcacaaaggaaagtagcaatgattgggcaatgcacagacattatctgctataaggagcaaagaatgaaatctgagagattcagttttcccatatacaaaataaggttaacggtccagcacccatcatctgtaaaacagggaaggtactaacgcctgcttcattgggtggttgtgaggatcgcattagacaattgaggaagacatgtcttcagctctcagaaataccagcgtctgtaaatacctacaagcaagtagaacagcaatttcagctgggcctatggctccagttattttgccaaaagaaatgtagtgaccacacacgtatccaaaaatctctgaggtctctaccgtctctcagcaatttggagaatgcaggaggaacttggacaacttctagggggaatttaaaaagcactttaaaaagcatgaacccaccagtttgaactgtacacaaagcatttctttctaaaaatgtccacctcgggtctgtacagtggtttttgccctgttcgtctctcaggcacacttacgaggagagctttcaatgcatccaaacaattgcttacaagcaccaacctaccgtgaggttagccccacactgagctgaggagccatgagggagctgtttctatggcatttgagtagcacaaaatgtgatttttctctggagaagacttttgagaattagagggaattagtcatattttccaatgtgggaattttaacagttgtgaaattatgaagaagacctgactcaacaatttcaatattgcaatatgtcacctagctgtcttgttactcaaaattacatgatttaaaagacagtgactttaaaaagaacccaaccaaggtttgaaagaaaaaggagatatgcagacaaagcaaaggaaaaatataaaattgctgaacatttacagagctaagtttaacaattctgggctcatttaatacagtttttatcttaaatagaacattgaaaggcatgtttatcctctcagtgaattatatgttagaaatgcactctttaaacagtgggtttttttaaacctacaatatggaatctgaactggatttaacatgttgctaaatattcaaatgggtcatcccttcatactcccttttcgtaggttaaaaaaagatgagcagacgttccggacaaagatgagtaaagccaattcaagaccacctttgtgctatactttttccagcctcttaattaggctactcctcattaactaccctaaatgagctacaaataatgatcgggtcctgtcctttatatatgaaaattagtctattagcaagtgcatgactagggtattttccaggagtagtgaagggtttgaattttttcaagtacactctctctgggctttccttgtcctcaaaagcatacctttgcaggacagctagccagggtgagaaggaaagtaaaagactctaaaacagaccattctaatgagcttggtctcattaacattgggtgataattaggtaacctatccagaacaaatgaaacactgggcaaatttgaagagatatagatagctccatggaatgttaaatacaaagctagaagtggtattagcccttg

SEQ ID NO: 708041 - DNA, 1505 bp, Homo sapiens
aatatcacaataaatatttaataaacatctattatcttctgactgcacacttcaaaccaagccaagggcacaaacaggacacacacacacacacacacacacccaaaacatacttgggcaaggcataaaaaatggtgaacttcattagtaccaaagacataaaaatatatatacaattggatactattttaacttgtcaaattagaaaatatgaaaaaatacttacatattcagtgttggcaagcacatagaaagacagacatctcataaactgattgcaaaagtggtacatttttgaggagtaattgagacttatcaaatgtctaaattacgaataataatttgtaataatttataataataataattaacacaaaattctactgtgtatggtttcattttcctttcagtacatgatgtgacatgtggcaaagctatacattgttcaacgaagattgattaaaattgtttatcaccaaaagcaactaataacagtgatgacttgaattagtaaattttggtacattcacttaatggaatactcttgactcataaaaatattaataaatagacgattacagattgcaaacaaaattaaaaccatagtcaaaaacagtatggtcaatataaatgcatatttattaaaaatatatatgcttatatgcataatgtccatatcatgatagtaggattatggttaatgtattgtctttcttatctatatctaaacacttttctaaaataaaactgtatttttctttccatagtgaaaaaaagaaattttgtaacaataaaaaagctaagaaattcttaacagtgtatggtctttacccattgtattattttagttaacttatattatccaacaaaatccaaagatagagaatgccttgggtatctttaaagacagacatacaaccaagcacacagtcctgacaggtcgttacctgagtggaccactctttcagtaagtaaaactttctgctgggttttatacatctacttacagttttctgttctcacagagtagggctcaggaaacatatgactaatgttaaggataaatggtatgcctagtcaatacaatctatgaatcttttaggcaataaaaatgtttgatttgagtaattgatatatctgcataaatcactatgtcacaagagcatactgatgtcataaaaatgattcatatttcatatggcatattcatttgttcaagttcttgcctcactacagggaatcaagtctaatttaccttcacttagtttgggaaacgtttttcctacaawttttgggggcaattataacaattcttcacaggagttagaatgtaagtacaattatttctctttaatgtggttaaaggaaaagcatatttaaagattatataatgaaaatgaatttttaatttttgaatgcaattgtaaacgagatataaaagttattattttattattagtcaaaaatgctgtgatctttggtaacataattttatagaccttttt

SEQ ID NO: 708042 - DNA, 2939 bp, Homo sapiens
gggctcaagtgatccaaccacctttcccctctcaatgggattacaggtttgagtgactgcacctggcctcattcccagagattttaatccaaggttttagaacctgcatttaaaaatgtataagcaaatttatatataaattttcagtggtctttaatctccattttgagaatttcccccaagggttctatgagcagagttagaaaccaatgacctagaatacacataggtattctaccagacatcatttcacatgaatgaagtgtgaggaactttattttgcttaagggaataattttatactaaaaaaagtgttaatattaaacattatttaaccaatagattggcatttagtgaaataaaatgtatttgaggaccaagaacttaaaactttgctctctagattccagcaataaaaatgaattggatcaaataaaggcttttcttatgagataaaaatgatcataaaacttacggtgcttggctatgagccagtttacatactatagaaacactgcctgggctaagagacttgaccaattaaactaattgtgtaggtcagagtacaggactctgagatcatataaaatcacaaactgagaggaatcattacacaagacctgcaaatatacagtattctaagtatatttaaatgtgaactataaggctcagattctaggtgatccaagtatcttgattcaatgataagcaaataataattttttaaaaaatttctcagctgaaragaactcacaattttgccaactgccttagtagttgttggagcatgaatgggtacaaactcattttatttaatactagattatgattcttttctcaaaatactaggaaaaatacttttctactaaatattctccttccctacataatttaaaggaaatggaaatcttattcaaccccaatctcaaaaaaacatgtaaattgcaactgatgatattgtcattgaatgatttttactttatctttccattgcattatagttgagagcaatatttccatataccttgattacaaccctagaaaaatcacaccaggtaacctcacttgagccctgctgagcaggagaaagggagaatccactcaccgaactctgtgctgaaaatgcctccatctacaagaagagatgcgtttttctaattcatgtaaaaattaataaactagctgtatggaatggtgttactctcccacaaacatataaaaaataaagatgcaatcttaaatttatatcacagagttcacttctgatgtaccaaggatagtccattaaattgtggatgcaaaaaaaagtagaatatcaggtagtcatgtcattttcatggtaaaaaatatgcattttaagaccttgcctaagactcaactacacagtgaaaatttccctacatattcctaccatactgtggcttctttagactttttattgtttcattaagtgcataaagcgagagaatattttgaaatatattattgtggttttttttctcttatacttgcttataaataatccttactttactgagccagaagcaatctttgtctccaagacagccgggatcagagaaagagacaagaaagaattgacagaaagccttccaatttttaaaactaatcttgagaactatttccaaaacaacatccttaaaaacctggctttaaatttctatagcaagatgcctgagagagaaaagccaatttaaaattagaaaagttttccttcaaacacaaaaaacaaaatttggaaaactgaacttagaatcttactatgagctatagagtaggatatctgatgcataagaactgttttttaagaaaagaaataatctcaagccttccttggctgaggaatgagcctagagagaaaagaagaaaaggagaggagatataaggttagaggctgttcccttctccacgatttattgtcatgtagagcacatatgttaaatattatctgaccattaagcattccgatttaaaagttaattttgtgttctgtagcctataattataaaacacaaatatattgatgctaattagcaactaattcattcaacaaataattattgaggcctattatgcaccagacacttgaaaataatgcaacacattgggaaatcacagctcctgggattccttaggaaatttccagtctattgaaagtggtagggtgagaggaaatacggaaatacaaattattgcttttgacacattgctacttctacctttaccacttatatgtgaaattctagtccaccttttcttaatggacttatagattattcataagatgtagtttattgatataagccacaaaaactttctgtaagtgtcctttgctttttttgtgagtcagaagcagcccaaggaaaaaaattaaagaaaaaaattttgaataaaaaactttaaaaattaaaacatattaaataaaaaactggagccatcttaatagaacaaaaacaatgacaaaagagagatccaaaagcagggaggggggaaatcagcctgaagaaaataactggatgttaaagatattgtgaatctctttagtataaggcccatctgcagaaggaggtcccacacagagcagcagagacaccattagttttctttgaagcagcagctacagagtctgggggttgtgaagttttaactgtggagagggctgtaagggcataaagattttgaaaagattctttaatataagagcatctgcaataacatttccctggaatcatcagaatgagaggaggaaggatgggatctcgcaggacttgggcacacaacagaactgtggactacaaaacaggggaaagatactagttacggaacctcagaaaaagagaagataccaaaataaataacaaagaacaaaatgaggtcagaaaatccctacttaaaataattattaccatgtatatgtgagg

SEQ ID NO: 708043 - DNA, 1594 bp, Homo sapiens
atagagaggcatgaatggaagtagggagatctattaggcaactcatctattagtacagatgagagataatggtggctctgactacataagcattataggtagatttgaaatatacgtaggaggaagagccaattggacttggtgactgattggatattcagggtaaggaagaagtgagagtgaactgggcacacattttatgtcatggatgtgaatcagctaaagacaaatatccatagtgggaaaggataattagcaattctgtgattcgggaatctgattacatttgaacaataagatagcaccttttctttaagaggagtgttcaaaagtaaagtccaacctccctcattttaaagatgaagaaattaagactcataatggatgtgctacttagcaaattaatcttatgctgtatatgaatgttttatctcccaaattaaaacataaaratccaaatgacattacttgttttgtagacatctcttcctaatagcacccaatatagagattgaggatatagcaaatactcaataattgcctctcaaattaaaatgaattgaattccttcttctttctcggcagatagaacaaaatggatattctggttattgataatggcagtgaagtgacagagttcatcctggtgggtttgtacaaccatccaaaatttcagattgccttttatcgcaccatggtagtggtctacctgatcacatttgttggtagcagtctcattattgttgtggttaaagttgatgggtggcttcacactcctatgtgttttttcctaagcaacctgtccttccttgatatctgctactccagcaattcagtaccttttttgttgttcaatggcttaagagactaccccaccatttcctataacagctgttatgcccagatgaccagtgctttttttctggggatgacagggtgtcttctccttgctgtcatggcttatgagagatttgttgtgatctccaatcccctgcgctacatcatcattatgaacaataaggtctgcatacagttggccatggtgacctgggccagtgccttccttatgtcattaatacaataattgcaataatacattgcaataatacattaattgcaatgattgcattgcaattcctgcccatttttgtggacacaatgtcatcaaccattttacctgtgaggtgcaggaattgttgaagcttgtctgctcagacatcccaggcagcctcatcctcggtctagtcatcggcatattcaccttgtccctgcccttcaccttgcccctgcccttcaccttcatcctcttcgcctatgctcacattgtggttgctgtgctgaggatcaactctgcagaggccagactcaaagctttctccacctgtggatcccatctgactgtgatcatcatattttatgggacagccacctacatgtacttgaaacctcagtcaagggaatcccaagatgagggtaaagtcatctctgtattttttttgaaagtattttttattatactttaagttctggggtacatgtgcagaacgtgtagttttgttacataggtatacacatgccagagaagcaacatcaa

SEQ ID NO: 708044 - DNA, 1594 bp, Homo sapiens
atagagaggcatgaatggaagtagggagatctattaggcaactcatctattagtacagatgagagataatggtggctctgactacataagcattataggtagatttgaaatatacgtaggaggaagagccaattggacttggtgactgattggatattcagggtaaggaagaagtgagagtgaactgggcacacattttatgtcatggatgtgaatcagctaaagacaaatatccatagtgggaaaggataattagcaattctgtgattcgggaatctgattacatttgaacaataagatagcaccttttctttaagaggagtgttcaaaagtaaagtccaacctccctcattttaaagatgaagaaattaagactcataatggatgtgctacttagcaaattaatcttatgctgtatatgaatgttttatctcccaaattaaaacataaagatccaaatgacattacttgttttgtagacatctcttcctaatagcacccaatatagagattgaggatatagcaaatactcaataattgcctctcaaattaaaatgaattgaattccttcttctttctcggcagatagaacaaaatggatattctggttattgataatggcagtgaagtgacagagttcatcctggtgggtttgtacaaccatccaaaatttcagattgccttttatcgcaccatggtagtggtctacctgatcacatttgttggtagcagtctcattattgttgtggttaaagttgatgggtggcttcacactcctatgtgttttttcctaagcaacctgtccttccttgatatctgctactccagcaattcagtaccttttttgttgttcaatggcttaagagactaccccaccatttcctataacagctgttatgcccagatgaccagtgctttttttctggggatgacagggtgtcttctccttgctgtcatggcttatgagagatttgttgtgatctccaatcccctgcgctacatcatcattatgaacaataaggtctgcatacagttggccatggtgacctgggccagtgccttccttatgtcattaatacaataattgcaataatacattgcaataatacattaattgcaatgattgcattgcaattcctgcccatttttgtggacacaatgtcatcaaccattttacctgtgaggtgcaggaattgttgaagcttgtctgctcagacatcccaggcagcctcatcctcggtctagtcatcggcatattcaccttgtccctgcccttcaccttgcccctgcccttcaccttcatcctcttcgcctatgctcacattgtggttgctgtgctgaggatcaactctgcagaggccagactcaaagctttctccacctgtggatcccatctgactgtgatcatcatattttatgggacagccacctacatgtacttgaaacctcagtcaagggaatcccaagatgagggtaaagtcatctctgtattttttttgaaagtattttttattatactttaagttctggggtacatgtgcagaacgtgtagttttgttacataggtatacacatgccagagaarcaacatcaa

SEQ ID NO: 708045 - DNA, 1122 bp, Homo sapiens
gagtgagcagcagcaagatttattgtgaagagcaaaagaacaaagattccacrgtgtggaaggggatctgagcgggttgccgctgctggctcaggtggccagcttttattcccttatttggccctgcccacatcctgctgattggtccattttgcagagagctgattggtccattttacagagtgctgattggtcctttttacagagagctgattggtccattttacagagtgctgattggtccattttacagagtgctgattggtgcatttacaatcctttagctagacacagagcactgattggtatgtttttacagagtgctgattggtgcatttacaatcctctagctagacagaaaagttctccaagtccccacttgacccaggaagtccagctggcttcacctctcacttttaaaactgttgagcagagttcttgatttatttatattcagtagtaagcaaagtatttgaaactatacctgacacttgaataacacaagtttgagcttcatgggcccacttacacccagctgtttttcaatcacagatggaaaatacagtattcacaggatctgaaactcacataaacagatgggtccaacttttcgtatatgcgtgttactagagtggagtacaggaattgagtatgtgtgaatttggttgtacacaagtggtcctggaaccaatcccctgtgtgtaccaaggaacagctatgtaatgttttagattcactgtagcagttttgaaagtaggattcttagatgggcacggtggctcaagcctgtaatcccagcactttgggaggccgaggtgggtggatcacgaggtcaggagatcaagaccatcctggctaacctggtgaaatccatgtctactaaaaacacaaaaaaattagttgggcatggtggtgggcgtctgtagtcccagctactccggagggaggctgaggcaggagaatggcgtgaacctgggaggcggagcttgcagtgagccgagatcacgccactgcactccagcctgggcgacagagcgagactctgtctcaaaaaaaaaaaaacagtaggattcttattttttattgtctaaaaatcctgtctttttacttttgatttttttc

SEQ ID NO: 708046 - DNA, 1122 bp, Homo sapiens
gagtgagcagcagcaagatttattgtgaagagcaaaagaacaaagattccacagtgtggaaggggatctgagcgggttgccgctgctggctcaggtggccagcttttattcccttatttggccctgcccacatcctgctgattggtccattttgcagagagctgattggtccattttacagagtgctgattggtcctttttacagagagctgattggtccattttacagagtgctgattggtccattttacagagtgctgattggtgcatttacaatcctttagctagacacagagcactgattggtatgtttttacagagtgctgattggtgcatttacaatcctctagctagacagaaaagttctccaagtccccacttgacccaggaagtccagctggcttcacctctcacttttaaaactgttgagcagagttcttgatttatttatattcagtagtaagcaaagtatttgaaactatacctgacacttgaataacacaagtttgagcttcatgggcccacttacacccagctgtttttcaatcacagatggaaaatacagtattcacaggatctgaaactcacataaacagatgggtccaacttttcgtatatgcgtgttactagagtggagtacaggaattgagtatgtgtgaatttggttgtacacaagtggtcctggaaccaatcccctgtgtgtaccaaggaacagctatgtaatgttttagattcactgtagcagttttgaaagtaggattcttagatgggcacggtggctcaagcctgtaatcccagcactttgggaggccgaggtgggtggatcacgaggtcaggagatcaagaccatcctggctaacctggtgaaatccatgtctactaaaaacacaaaaaaattagttgggcatggtggtgggcgtctgtagtcccagctactccggagggaggctgaggcaggagaatggcgtgaacctgggaggcggagcttgcagtgagccgagatcacgccactgcactccagcctgggcgacagagcgagactctgtctcaaaaaaaaaaaaamagtaggattcttattttttattgtctaaaaatcctgtctttttacttttgatttttttc

SEQ ID NO: 708047 - DNA, 1122 bp, Homo sapiens
gagtgagcagcagcaagatttattgtgaagagcaaaagaacaaagattccacagtgtggaaggggatctgagcgggttgccgctgctggctcaggtggccagcttttattcccttatttggccctgcccacatcctgctgattggtccattttgcagagagctgattggtccattttacagagtgctgattggtcctttttacagagagctgattggtccattttacagagtgctgattggtccattttacagagtgctgattggtgcatttacaatcctttagctagacacagagcactgattggtatgtttttacagagtgctgattggtgcatttacaatcctctagctagacagaaaagttctccaagtccccacttgacccaggaagtccagctggcttcacctctcacttttaaaactgttgagcagagttcttgatttatttatattcagtagtaagcaaagtatttgaaactatacctgacacttgaataacacaagtttgagcttcatgggcccacttacacccagctgtttttcaatcacagatggaaaatacagtattcacaggatctgaaactcacataaacagatgggtccaacttttcgtatatgcgtgttactagagtggagtacaggaattgagtatgtgtgaatttggttgtacacaagtggtcctggaaccaatcccctgtgtgtaccaaggaacagctatgtaatgttttagattcactgtagcagttttgaaagtaggattcttagatgggcacggtggctcaagcctgtaatcccagcactttgggaggccgaggtgggtggatcacgaggtcaggagatcaagaccatcctggctaacctggtgaaatccatgtctactaaaaacacaaaaaaattagttgggcatggtggtgggcgtctgtagtcccagctactccggagggaggctgaggcaggagaatggcgtgaacctgggaggcggagcttgcagtgagccgagatcacgccactgcactccagcctgggcgacagagcgagactctgtctcaaaaaaaaaaaaacagtaggattcttattttttattgtctaraaatcctgtctttttacttttgatttttttc

SEQ ID NO: 708048 - DNA, 1054 bp, Homo sapiens
atctacttccacttaataaagagtaaacacattttctctgacgattttcatttaaagacagtcagtcattttcaaaatggtatatgaatatgagcccctaaaggtggtacagataagaacataaaggaatatggacacaaatgagacaggcatggaagaatcaaaataaaatttggctggaaagggtagaatgtattggtatattagggactaccacttaaattttatggtactctgttgaatggagatgatttctctccaaatatcttcagagaaatcaactttgagaaagtacaagaaataaaatatcttcattaaatttcaaataaaataaatacatcttcatttaatttcaagaagtatttaaagacctgaaacaataacagttttgtatattttttccaaaaacagaatctatatccgtgttttgtgttttagtgataaagactgytttttttttttttttttttttttgagatggagtctcactctgttgcccaggctggagtacagtggcgtgatctgggctcaccacaacctctgcctccagggttcaagcgattctcctgcctcagcctcctgagtagctgggactacaggcacacaacatgactggctaattttttgtatttttagtggagacagcggtttcactatgttggccaggctggtctcaaactcctgacctcgtgatcagcctgcctcggcctcccaaagtgctgggattacaggcgtgagccaccgtgcccggccaagactcttaaaaatgtagtttttataaactatgattaggtaatattttctgggttcatgatataaataaaatctttactaccaaaagacagagtttcacacacattcaaaatattcacagatgagaactaattatgtctgacattcgcttcctttttttttttttttttttacaattctttctgatgccattgtcaaactgttaaatacttcccctacaattccacctgatttttctttttccttccatctattaaattttctaataatacaaaaaagttgaaaaagcagtaaaataaac

SEQ ID NO: 708049 - DNA, 947 bp, Homo sapiens
gccttccaaaatgctggaattacaggcatgagccaccacgcccggccccctatgcagttttaaaagtatatgttaagttctaatatataagaaacatatttttcccttctggaattgaccacattaacctcctatccaaccagaatcatgctaaggagaaaaataaatgttcatctcaatggcattttcttattcagctaattgatttttttctttttcttttttttttttttcagatggagtttcactcttgttgcccaggctggggtgcaatggtgcaatcttagctcactgcaacctccgcctccagggttctagcgattctcctgcctcagcctcccaagtagctgggattataggcatgtgccaccatgcccagctaatttttttaaatatatatttagtagagacggtgtttcaccatgttgttcaggctggtctcaaactcctgacctcaggtgatccacccacctcagcctcccaaagtgctgggattacaggagtgagccaccgtgcccagccgatttttttaaaaataacaataatgcctgaacatccagccacctaattaccagcagctttttatttgcactatcattaacttcacagctgccttgttagtaacaagtggtaccacagagacatcagccacaactgttagtttctgaaaggaagaacatgaaaaaggaccagctcctccttggtgaaggtcagagagggcttcaggctgactccagcagcacaagtgccygatctcaaatggaggaagctgcctgtggaaccatgttgggtggacgggatcttggtgagcatctggttcaatcctctccactgacaggtgagaaaacttgaggtccagagaggttaagtaacttgcctgtgatcacacagctagttacctttagtactggaactgaagcacaggcctcctgattcctttgttattt

SEQ ID NO: 708050 - DNA, 1623 bp, Homo sapiens
  misc_feature 1451, 1452, 1453, 1454, 1455, 1456, 1457, 1458, 1459, 1460,1461, 1462, 1463, 1464, 1465, 1466, 1467, 1468, 1469, 1470,1471, 1472, 1473, 1474, 1475, 1476, 1477, 1478, 1479, 1480,1481, 1482, 1483, 1484, 1485, 1486, 1487, 1488, 1489: n = A,T,C or G
  misc_feature 1490, 1491, 1492, 1493, 1494, 1495, 1496, 1497, 1498, 1499,1500, 1501, 1502, 1503, 1504, 1505, 1506, 1507, 1508, 1509,1510, 1511, 1512, 1513, 1514, 1515, 1516, 1517, 1518, 1519,1520, 1521, 1522, 1523, 1524, 1525, 1526, 1527, 1528: n = A,T,C or G
  misc_feature 1529, 1530, 1531, 1532, 1533, 1534, 1535, 1536, 1537, 1538,1539, 1540, 1541, 1542, 1543, 1544, 1545, 1546, 1547, 1548,1549, 1550: n = A,T,C or G
tctcttgctttgaaatgaaatatgttgcttggattatgagtgagaaaacacatttattgagcatttatctcatgtctgacgtgaatatacacttttcacctaggatacttcttatagctttcacatattatcactggtttaatccagtgaaaggttatttcttttacatggccatgcaagttactagaagactttactcactgtatctatttgaagatccatgtggaaaaaagctttcaaggtcataactaacaagacaacatggagaattgagtcccagtttgtcacacttcacaaatcactgctgcttacatttagaagcaagtcccaaggctaaacctgttgtcaaaacaacaacaacaacaatgcgaccgtgtgtcaagaagtgaaaaataagagacactatagaagaggtgctgcactgcccaagtgtacagaaacgtgggcagggaagtatcactatgagcagcgggcttcctcttgaattggtgccttctatgagcatctactctgcttatgtcttggccacattgtcacttagcacagctttcattgctgcctcttgcgttctttgtggaccttagggaatcactaaaggaatgaagacaaagaggtggaggtgagacaagacaaagaggaagacaacaggagggggcctctgatcagccygcctttttatgttgatgattgcttcttattaataaaactgtgtgagacattggagctgaagaaaggataaaattggatccctccctggtgtttaaattgctcttcacacagccccatggaggttatctcatagcataataaacactacctcgtaggaacagggaagtaagttttaactggctggccgcagtggctcacgcctgtaatcccagcactttggaaggccaaggcgggtgtatctcctgaggtcaggaattggagaccagcatggccaacatggtgaaaccccgtctctactaaaaatacaaaaattagccaggtgtggtagcaggcacctgtaatcccagctacttgggaggctgggacgggaatcccttgaacccgggaggcagaggttacagtaagccgagatcgtgccactccaccccagcctgggcgacagaatgagactctgtccatctcaaaaaaaaaaataataaataatttgtaactgaccaagtgaaaaataaacataatgatctccatttagttaaattgttaatagatgaataaacaattcaacctgagactatcaactcacaaaacaagcaagtttgcaattaacacatcacatctgttcctgactcttaaaacttaaatttcaaatttacagaggattggatgatgaccttgttaggaattaaactgagcaagctgttgttaggaaacagagagcaattcttgccaaaaatctaatttatttctctcctcatatgcttaagtcaactcaaatagcgtttatnnnnnnnnnnnnnnnnnnnnnnnnnnnnnnnnnnnnnnnnnnnnnnnnnnnnnnnnnnnnnnnnnnnnnnnnnnnnnnnnnnnnnnnnnnnnnnnnnnnnctagaaatagctttatatatgtattgtaatatgcaaatatatatgaaaatatgttgttaagtgcatttattca

SEQ ID NO: 708051 - DNA, 636 bp, Homo sapiens
atataatatatacatataatgggaatgaatggacacacatttatatattatatttatatacaaaatatatatggccggtgcggtagctcacgcttgtaatcccagcactttgggaggccgaggggggtggatcacctgaggtcaggagttcaagaccagcctggccgacatggtgaaaccctatctctactaaaaatacaaaaaattagccaagtgtagtggcagacgcctgtaatcccagctactcaggaggctgaggcaggagaatcactagaacctgggaggcagaggttgcagtgagccgagatggggccgttgcactccagcctggtcaacaagrcaaggctccatctcaaaaaacaaaaaacaaaaaacaaaaaaactgaaaagtatgatgatgaaacagtatggaaaggggcagctataatatatatatatgtatatatgtatatatatatgtatatatatataatgggaatggatggacacacatatttacatacaaaatatataaatatatatataatatatacataacatatagcatatgtattagaagtggtgctaagagtggggaaataaaaagcaagtccacattttacattttttttttaaataacaagtgaaatgaggaag

SEQ ID NO: 708052 - DNA, 959 bp, Homo sapiens
ttcagaatatcatgggttagttgttcctgaggatattattaagaatgcatgtgaggccaggtgcggtggctcatgcctgtaatcccagaactttggaaggccaaggcgggcaaatcacgagttcacaagttcgagaccagcctggccaacatggtgaaaccccgtcactactaaaaatacaaaaaattagctgggcatagtggcagacacctgtaatcccagctacttgggaggctgaggtggaagaatcactagaaccgggaaaggggaggttgcagtgagccgagatcgcaccattgcactctagcccaagcgacagtgagactccatctcaaaaaaaaaaaaaaagaatgcatgtgagccactgaactgtcttctaggaaactttaatatggataagggaaattataaatttctaagtggatttataggatatagtgcttctaaaagtatttaagatatcaaatcctgaaacaatttcaagaattagtgctccttgaaaaacattttaggaaatgctgatgttttcagctatttgcagataagtaaacagaaatttaatcacgtaacttgcctaagacatacacttaaattgacaagtctctgatgttgaacctgcaaactcttagctttcattctcatgctctttcaattctacttctgtattttmtttaatttaaaagttcgttggtgggcagtgagaaaaatggaaataagagcaaataaattccagatgaacagaaaggattattagctaataagataaacataaatttatcaggaagggcgaggaaatggagttggagtattggtgatagactggttcatcattctgctaaacagatcaggtcagtagaatttttttattttaacatttttcattttatttttagttgacaccaaataatggcttatattcatggggtagaagagtgatattttgatacatggatacaatg

SEQ ID NO: 708053 - DNA, 889 bp, Homo sapiens
  misc_feature 382, 445, 759: n = A,T,C or G
tacctcattcagtatttctggtagtgtttgtgtgtggatgataaacacactcagttttactattccaccrtgttctcatttgtattgctcttatagagaagcatgctttcagtccaattgttcctctgtaagcaatttatctttttcttttgtatttttataatatattttcttattttggattcggcactttcattaaaatgtgttcaggtgtatatatttttaaatttatgctacttaatataggttgaattttctttacctgtgactttttttggcggggaactggagtcttactcagttgcccagactggagtgcagtggcgtgatctcggctcactgcaacctccaccttctggttgaagtgattctcctgcctcancctcccgagttattgggattataggcacccgccatcacgcctggctaatttttgttttgtggnaaaacaaggggttaaccatgttggcccagcctgtcaagaactcctgacctcaagtgatcagccagcctcggcctcccaaatgcttggatacaggcgtgagccactgcgcccagcctacctgtgacttttttttagttcagaaaattctcaggcattttctttttcacatgtctgacttccatctatttgccttctcatctgggagacatactagccctctcattctctccttcatagcccttaatctgtctttcatctctctaccatctctttgaccatttgtgctgtattctggatactgtctttagatatanaatcggttcactaattctctatcaagtagaatctaatctgctatttatccaaccaccaagttatccatttcaacttttattttttatttctagaaattgtgtttctagaaataaaccttatctgactgaa

SEQ ID NO: 708054 - DNA, 1399 bp, Homo sapiens
  misc_feature 1362: n = A,T,C or G
tcagaaccacttattcacagttgtccgtgagcttgtctgggcatcatccaggtgctacactggcagcagtgaacggatgcagctgctcacccacttagagagggctattgcatcagaggctcacttcacacaaacacatgcagcagcacactatcagttgtatatactgtcattcactgacaggtagaataggtggcaagtcactgtcataccagtcttgaggttcagttttctagaatggggattgatgatcagtgatgggtgtctgtaatgtctgatgtccacaggaagtctcaggaacggatcgttggaaactaagagctctgcaggccgagctagcacctttccccctgcccctgtccctggggagcctgtgactccacccagcaaagcgggccggcgtagcttctgggatatgctggtaatggaagaagtggtgaagtgggcatctacctttctgcctgcctcctagctcctcccacactccctcctgcttcccagtcccccataggccttgccacagtgtcctttcatataaaactgctctgtcctgccagacaccatggcgtgtacctttagtcccagctcctcaggaggatgaaatgggaggattttgcttcaggccaagagttcaaggctgtagtatgttgtgatcatgcctgttaatgcactccagcctgggcaacacacaaacactctgtctcaaaaaagcaaaacaaaaactgctctgtcttttggactggagtttgtagaatgtggcagttctcactgatgtagagggagccttaacttactatgtgccttcacttccatttttcttgtcggatcctcacaacagcttgcaagataagtagagcttttacagtgaggaaggtgaggctcaggaaagttaggtaacctgcccaaggctccttagccagcccctggggaagccagggtctgaacccagacctctgaatcctcctagctcactgctgttccatagtgcccccatcccacacctttcctcttcccagtagcccttcctcattcactgcattgcccccagagtaaaacagartgtggggatttgggttcccccaaaacaactgatgacattgtcctggatcggccagaagacactcggggccggaggcgtcacaaaaccgagagtgttcggactcctggtggagctgagcgggcgccaggctcagattctggagcccagagacaaaagtatgtgtgtggtggtggtgtgccctgggagggtatgggtgtgaagtcacagatgggccttggtctggataacatacaagtggtattgtttggacatgaggttcttactcccactgtcttcaagcgccggaccacacacgttgaaanaggtgaggtgggggacccttcatcctatggtttgccc

SEQ ID NO: 708055 - DNA, 634 bp, Homo sapiens
ggtttttcttggaattccaggaaggagaaacatttaccccccaactcatgataacaagaaaacctgggtacaagacttgattcaaatgctaattattctgaaaccttagccaagcctttaagcctcccagagcctcagtttccttgtggttagaaagacagaggtcacctggaagataccagctctctgtaagagactatgattttcagagtttcaaaaagtgaagtcatgctgtagtcagatgcctttcccatccccctgcctcagcctttctgctttccagggctggaaggctcaggcttcagaggagcatacttatcacactgcaagcccttccccactggtgctaataggggtcattcttatgtgggcacgtccgtgtccccagagggccggataggtccagcctggctgtttgctcagtgtcactctgaatcaaagactgctccatttaaacttgacattgtttttctgtttactttacctaataagcgaatcatttactccataaaaagcacattttggagatggggtgggattcaggaaagggagatgctggtcctgcttcctaacctggtctatgagctgaattactcagtgagaggtgatgtaattcyttgagacacacgccaga

SEQ ID NO: 708056 - DNA, 624 bp, Homo sapiens
atttaagcattactcactgtgacagagatagctggttgcctatgcagtatcccttttccttcttttctcattgacagagcagagctttattctgggtgccctccgactacacatctggcctcctcccagctggagtggccaaaattgtaaatcaatacagccaaacagggcttccaggaaaggcccttcaggggaattgataaggttgggagagaagccttttgctgtccccctcttgctgtttctttgggtcttaatcagacttgatgtctggagttctgacgttaatactggaccatacgttgaacttaagaatggaaaccactcgttcagcatggagtagcaaaaacaggagctggatgcttcacaccaaaggtgggctaatttcctaacttcttttacrtgagaaaaaaacaacccaccctgatgttactgggcctttctgcaatatacagctgtactgataacatatacgtgtaatttacacttatacttttctcagtcagctcaaaaggaatgtactgagctcagtcagctcagtacattcttttaccagattgagcaccgactgtggtatgccaatgattgttctgagggctggataagcaagggaaaatatagtct

SEQ ID NO: 708057 - DNA, 624 bp, Homo sapiens
atttaagcattactcactgtgacagagatagctggttgcctatgcagtatcccttttccttcttttctcattgacagagcagagctttattctgggtgccctccgactacacatctggcctcctcccagctggagtggccaaaattgtaaatcaatacagccaaacagggcttccaggaaaggcccttcaggggaattgataaggttgggagagaagccttttgctgtccccctcttgctgtttctttgggtcttaatcagacttgatgtctggagttctgacgttaatactggaccatacgttgaacttaagaatggaaaccactcgttcagcatggagtagcaaaaacaggagctggatgcttcacaccaaaggtgggctaatttcctaacttcttttacatgagaaaaaaacaacccaccctgatgttactgggcctttctgcaatatacagctgtactgataacatatacgtgtaatttacacttatacttttctcagtcagctcaaaaggaatgtactgagctcagtcagctcagtacattcttttaccagattgagcaccgactgtggtrtgccaatgattgttctgagggctggataagcaagggaaaatatagtct

SEQ ID NO: 708058 - DNA, 1129 bp, Homo sapiens
tgaattaagttagaggacacttagcaggtgtctactgaaaaatcagctgcagaattgcttggtgtgtggagggaaaaaaactccactcatctgagtcaaagaagcattctgtgttgtgagagcacaataggaaaaactgactttgtttattcttatatccttacagaggcaatcatatcagaaaccacagcagaggtcctcacatagctgccaatcttattttagttataagagagtcttggatgctttatgggcagttcacacttaaaatattgagtctgtgttttcctcaacattcaatcagcaaattttacttgatactctgttacatgctcctgctagttaataagggatacatcacacatacacacatgcatgtaagtatatacatatgcatatacttatgtatgtgactatatgcctatttttttttaattcaagtgacttataatctagctgggatattctttattttttaatctaaaaacctaagattctccatagctgggatattccaacagtaaagactgacargcaagtcttgtgatataaagtgtattacaattaaaatatcagtaacaaatttttatgctatggttgactgcatttttagcaatattttaaggaaaataaaggtaagaattagaagaagatgatctgcatggtctcatgaagtgtatactttcttgtaatgcaatataatataatttgtaatacaacatcaatgtggtaaatatggcattttagtcagtttcatatatctatctatatatacatatatagatagatagatatgaagagagtgagaggcagagtctcactctgtaaccaagcaaataaactatatgtgttgtaactaggccagatgtattcttcaggagttggagcctttgaaaatgggccattcccatttttttaggaaagcataaaaatatttcatcaaataaaattattccaatgagctttggctgttttgatttctggattcagaaattatattgcatattttctgacttaaatccatagataccgagggaatgaaaaacaaaacaggatattatatggctgtttccaatacataaacagttaattgatgttttgtattttcattgtatagtgtaactttgca

SEQ ID NO: 708059 - DNA, 961 bp, Homo sapiens
aaacaggaattcctcagaacacagacttgaaaccagcccaacgttcctgttctcacacaaggagaagcctagccagccatggagagctgcagtggtatagtggccatggagagctgcagtgtagtggctgtggagagctgcggtggtgtagtkgtgcttctctgagaaagtgacgtctgagcatggttgtgagtgggatgacagtggccactgtgcaggctgggaaggagacagcagtagcacggaggctgtgaagcgagagcgaggctggagtgtgaggggcagtggcggggggagcgggggcgtgggtgcgatggggtcatgggggactgaggccagagaaggaagtgtggccctgccgaatttgggaccatttgggctagggggcccccaaagagacctgccgtgtggagactagccatggagaaccgtggtggcggagtggccgtggagagctgcggtggtggagtagctcacagtgttgggccctgatctgtcaaggcttttggccttttcctcatgatcactaggtggttgccacagctccagccatcacatctgccatgtcaaggaaggaagggtaggggatggtgccatctgactttagaaaaagtatatgaaaacaagaactctctgcaggcttctcctcgctctttggctacagttgtgacacatttgctgcctgtattggagcttacattctagtgaaggtgacacaacaagtaagcaaatcacgtcactgtgattccaggtcatgtaaggaaaataaggcagagaaagaaggggtggaggtggtgactgttttcggcggcttctctgagaaagtgacgtctgagcatggttgtgagtgagatgacagtggccactgtgcaggctgggaaggagacagagcggtagagcggaggctgtgaagcgagagcgaggctggagtgtgaggggcagtggcagggggagcgggggc

SEQ ID NO: 708060 - DNA, 961 bp, Homo sapiens
aaacaggaattcctcagaacacagacttgaaaccagcccaacgttcctgttctcacacaaggagaagcctagccagccatggagagctgcagtggtatagtggccatggagagctgcagtgtagtggctgtggagagctgcggtggtgtagttgtgcttctctgagaaagtgacgtctgagcatggttgtgagtgggatgacagtggccactgtgcaggctgggaaggagacagcagtagcacggaggctgtgaagcgagagcgaggctggagtgtgaggggcagtggcggggggagcgggggcgtgggtgcgatggggtcatgggggactgaggccagagaaggaagtgtggccctgccgaatttgggaccatttgggctagggggcccccaaagagacctgccgtgtggagacyagccatggagaaccgtggtggcggagtggccgtggagagctgcggtggtggagtagctcacagtgttgggccctgatctgtcaaggcttttggccttttcctcatgatcactaggtggttgccacagctccagccatcacatctgccatgtcaaggaaggaagggtaggggatggtgccatctgactttagaaaaagtatatgaaaacaagaactctctgcaggcttctcctcgctctttggctacagttgtgacacatttgctgcctgtattggagcttacattctagtgaaggtgacacaacaagtaagcaaatcacgtcactgtgattccaggtcatgtaaggaaaataaggcagagaaagaaggggtggaggtggtgactgttttcggcggcttctctgagaaagtgacgtctgagcatggttgtgagtgagatgacagtggccactgtgcaggctgggaaggagacagagcggtagagcggaggctgtgaagcgagagcgaggctggagtgtgaggggcagtggcagggggagcgggggc

SEQ ID NO: 708061 - DNA, 961 bp, Homo sapiens
aaacaggaattcctcagaacacagacttgaaaccagcccaacgttcctgttctcacacaaggagaagcctagccagccatggagagctgcagtggtatagtggccatggagagctgcagtgtagtggctgtggagagctgcggtggtgtagttgtgcttctctgagaaagtgacgtctgagcatggttgtgagtgggatgacagtggccactgtgcaggctgggaaggagacagcagtagcacggaggctgtgaagcgagagcgaggctggagtgtgaggggcagtggcggggggagcgggggcgtgggtgcgatggggtcatgggggactgaggccagagaaggaagtgtggccctgccgaatttgggaccatttgggctagggggcccccaaagagacctgccgtgtggagactagccatggagaaccgtggtggcggagtggccgtggagagctgcggtggtggagtagctcacagtgttgggccctgatctgtcaaggcttttggccttttcctcatgatcactaggtggttgccacagctccagccatcacatctgccatgtcaaggaaggaagggtaggggatggtgccatctgactttagaaaaagtatatgaaaacaagaactctctgcaggcttctcctcrctctttggctacagttgtgacacatttgctgcctgtattggagcttacattctagtgaaggtgacacaacaagtaagcaaatcacgtcactgtgattccaggtcatgtaaggaaaataaggcagagaaagaaggggtggaggtggtgactgttttcggcggcttctctgagaaagtgacgtctgagcatggttgtgagtgagatgacagtggccactgtgcaggctgggaaggagacagagcggtagagcggaggctgtgaagcgagagcgaggctggagtgtgaggggcagtggcagggggagcgggggc

SEQ ID NO: 708062 - DNA, 961 bp, Homo sapiens
aaacaggaattcctcagaacacagacttgaaaccagcccaacgttcctgttctcacacaaggagaagcctagccagccatggagagctgcagtggtatagtggccatggagagctgcagtgtagtggctgtggagagctgcggtggtgtagttgtgcttctctgagaaagtgacgtctgagcatggttgtgagtgggatgacagtggccactgtgcaggctgggaaggagacagcagtagcacggaggctgtgaagcgagagcgaggctggagtgtgaggggcagtggcggggggagcgggggcgtgggtgcgatggggtcatgggggactgaggccagagaaggaagtgtggccctgccgaatttgggaccatttgggctagggggcccccaaagagacctgccgtgtggagactagccatggagaaccgtggtggcggagtggccgtggagagctgcggtggtggagtagctcacagtgttgggccctgatctgtcaaggcttttggccttttcctcatgatcactaggtggttgccacagctccagccatcacatctgccatgtcaaggaaggaagggtaggggatggtgccatctgactttagaaaaagtatatgaaaacaagaactctctgcaggcttctcctcgctctttggctacagttgtgacacatttgctgcctgtattggagcttacattctagtgaaggtgacacaacaagtaagcaaatcacgtcactgtgattccaggtcatgtaaggaaaataaggcagagaaagaaggggtggaggtggtgactgttttcggcggcttctctgagaaagtgacgtctgagcatggttgtgagtgagatgacagtggccactgtgcaggctgggaaggagacagagcggtagagcggaggctgtgaagcgagagygaggctggagtgtgaggggcagtggcagggggagcgggggc

SEQ ID NO: 708063 - DNA, 961 bp, Homo sapiens
aaacaggaattcctcagaacacagacttgaaaccagcccaacgttcctgttctcacacaaggagaagcctagccagccatggagagctgcagtggtatagtggccatggagagctgcagtgtagtggctgtggagagctgcggtggtgtagttgtgcttctctgagaaagtgacgtctgagcatggttgtgagtgggatgacagtggccactgtgcaggctgggaaggagacagcagtagcacggaggctgtgaagcgagagcgaggctggagtgtgaggggcagtggcggggggagcgggggcgtgggtgcgatggggtcatgggggactgaggccagagaaggaagtgtggccctgccgaatttgggaccatttgggctagggggcccccaaagagacctgccgtgtggagactagccatggagaaccgtggtggcggagtggccgtggagagctgcggtggtggagtagctcacagtgttgggccctgatctgtcaaggcttttggccttttcctcatgatcactaggtggttgccacagctccagccatcacatctgccatgtcaaggaaggaagggtaggggatggtgccatctgactttagaaaaagtatatgaaaacaagaactctctgcaggcttctcctcgctctttggctacagttgtgacacatttgctgcctgtattggagcttacattctagtgaaggtgacacaacaagtaagcaaatcacgtcactgtgattccaggtcatgtaaggaaaataaggcagagaaagaaggggtggaggtggtgactgttttcggcggcttctctgagaaagtgacgtctgagcatggttgtgagtgagatgacagtggccactgtgcaggctgggaaggagacagagcggtagagcggaggctgtgaagcgagagcgaggcyggagtgtgaggggcagtggcagggggagcgggggc

SEQ ID NO: 708064 - DNA, 655 bp, Homo sapiens
ttcccccacctacctaatccatcccgagggggtgttgtctgtcttgctctgcactgtagtcctgacacccggagcggtgcattggaggcrctctctgagtccgtgaattcaataggacccttccgcacaggggaggcatctgtgtgtgcctccctgcaggtgctggggagctggggttctgtccagctgaagctaactccttgtcagtcaccctttttctctcttccaagatccttttccatagctgcctgttggagcctgcagggccaatgcaaatctccctggtttaagaacatcctgccattcctcactaacatatctcatctgaagaacggtgtgtacctttgccacagcacagctggcctgtggcactgggaacaatgtttggcacatggtgactgctcatcgcctggcctatggctgggccagctttccatcagactccgcccacagagctgaagcccagggcctgcatggggtaggggagaacagtgctgagggaccactgggaggaagggctctgaatactcatcccagggtctgggatgagtgtggtcctgtatgccctcccctggtcttgctcaccacagaatgagagctgtgcccttgggccacgtgatgtcagattctgatttgtgtactatccttttctgct

SEQ ID NO: 708065 - DNA, 1044 bp, Homo sapiens
cattctggacatttcacataaatggaatcatgcaatgtgtggcattttgtgtctggcttttgcacttcttattgttgtaacatgtgccagaacttcattcatttttactgacaaataataatccatcgtatggatataccacatgttgtttatacatttgtcagttggtaaacatttgggttgtttctactttttgggtattatgaataacactgctatgaacatccttctacaagtttcaatcctctttggaactcagtaaaaatttattaaataatctcagtatagctccatctatctaataaaagtgtaatcatattatgcaaagtatcaaaatagttaagataatctatacaaatacttgtgtctagttgatgtaattcaagtagggaataaaataggtatcttgttctgtttacaatggtttagacttttcaatcaggctgaatctcaatgttctggttaactgtgagacttgaggaaaagcctggagtgaagacaagaaatcataattctggtttcagctgtgctaacactgtattttgtggcactgaaaagatacacagtgttctaatattgtgtttatgtataaaagaggaaaataataacaatgatataatttgtataataccttccccccagagaaaaaaaactccaatatcattttattttatttcaggaagccttactattatatcayacacaaaaaatcaaaagtcctggctagtgtcataacacacagccagtttctggaaggtccacgagtctagaatccctgtattctgagtcctggctcatttttcctcatttcatggtgctgcctggacaagtctttgtcagtatctatcattatggagattcctctatatgtaataatttatttctatatacataaaaaattatttgaatgttccaaacataagatttctctgaatatgaatccaaacaagaggattcttagaataggagagttcttttaaaaaatgatcttgctgttacagctagaatgaacccataataattaaaacatactagacatcaata

SEQ ID NO: 708066 - DNA, 677 bp, Homo sapiens
tctttaatatccaatttgcctgattaacactatattagctccaaatatataatttattattgttcctctttttatttgcctgatgcttgttccaaagcttgtctagcttaggtttgtggagcactccctgaatggggaaaggatggctcccttccaaacctgagtgtctcctccagatgggcaaccctcgtgctgtgtcattgtcctcccagggaagccaccacctgcccagtctgtggatttatcgtgtggatcaactaagaggttggatgtgaaggggtggtrcagtagcccatacatattgtccttatacccaacagtgaaggacaggtaaatgaataattaattccatccataaacctctactttgagggtcaggcctctaaaagtaacaaaacagggaccactcagattcattcttagccttaaggaactcatcatctactgcagcagataggcaagtgaacacatgcttgtcatctagcaccatatgtgctctgattacaggatcccagaggaggtgcctttgacccacacttggaatgaaggagggcttcttggaggaggtgagttttaaaggacatgtaggagttaaccagccagaagaaggtatcaattaaaggcaacatatttgattatacactccattatgcacttggccatgaggaatgcaagaa

SEQ ID NO: 708067 - DNA, 677 bp, Homo sapiens
tctttaatatccaatttgcctgattaacactatattagctccaaatatataatttattattgttcctctttttatttgcctgatgcttgttccaaagcttgtctagcttaggtttgtggagcactccctgaatggggaaaggatggctcccttccaaacctgagtgtctcctccagatgggcaaccctcgtgctgtgtcattgtcctcccagggaagccaccacctgcccagtctgtggatttatcgtgtggatcaactaagaggttggatgtgaaggggtggtacagtagcccatacatattgtccttatacccracagtgaaggacaggtaaatgaataattaattccatccataaacctctactttgagggtcaggcctctaaaagtaacaaaacagggaccactcagattcattcttagccttaaggaactcatcatctactgcagcagataggcaagtgaacacatgcttgtcatctagcaccatatgtgctctgattacaggatcccagaggaggtgcctttgacccacacttggaatgaaggagggcttcttggaggaggtgagttttaaaggacatgtaggagttaaccagccagaagaaggtatcaattaaaggcaacatatttgattatacactccattatgcacttggccatgaggaatgcaagaa

SEQ ID NO: 708068 - DNA, 1387 bp, Homo sapiens
tgaatctttctggttttgaagtctgtgctctttctgccactcccaggtatctaacttttagcctgtgtgatttctctgtgctaggaacaaaaacaaagttgatatgtaggtggggattaatgtacaatgcccattctagcctcatttgcatttgaagagaactgtgattaacctgaagaagatgctcactgacagtggaattttaggcaccatgttagattaccaggggagctgtcagccaggacttttcaggtctcttaaaataatccctgtcctcctcattttctttaatcactgtggctgtgaaagaacagcaaggagagcttgagacactgtagatatttctgccayattctttggacatagaaaataaataagaaggaaggtgttcttgggaacaaaggtaagagatgtctacctcagagcaagatggcccagtcttgggaagggttcttcaacctctcaagaaggaagccatcctgagagaggcagtgctaccccaagcttgacaggagacgagcaggtaatcccattccattccttacatggagcgacgttctgagaacctaaaaggtatgaaaggaaaaatgccaagggcttcagacaggtgactccagcagcttgtccacgaccaaaaagatttcttactttcccccataatcccccttgtctcatctacctactgtaacacatacacctgccccctaggtttgctcatttctccattcctgtggcaccaccattgtcaaagtcaccatcatcccccacctagattgacacaagggcctcaggagtggtttccctgcatctgccctcaacaggatctctacaatctatacttgctacaacagcaaaagtttttctttccaaagaataaatcagttcatcactctcctgtgtacaatcctaaaataaaatcaaaactccttgccaaagtctgcacagtcctgtgtgctcaggccagaggcttctctgatgttgcccccagctacaaaccagcagcactccccacctttcagttcttgattgcactcactttccttcctgggaatgaaccccctacccctgcccccccaactctctccatgcccccacattgatgtccccacagagacatctccctagagacatcactccatctagaattgcccagcagagtcactccctgtcacatttccctagtttatctactattttatccggggaatcagtccccaatatttcagtgtaggttctttctattttccctaagtgttggccggtcagagaaataaagagtacaaagagaggaatattacagctgggctcctgggggtgacatcacatatcggtaggttcgtgatgcccctgagctgcaaaaccagcaagtttttattagagatttcaa

SEQ ID NO: 708069 - DNA, 1387 bp, Homo sapiens
tgaatctttctggttttgaagtctgtgctctttctgccactcccaggtatctaacttttagcctgtgtgatttctctgtgctaggaacaaaaacaaagttgatatgtaggtggggattaatgtacaatgcccattctagcctcatttgcatttgaagagaactgtgattaacctgaagaagatgctcactgacagtggaattttaggcaccatgttagattaccaggggagctgtcagccaggacttttcaggtctcttaaaataatccctgtcctcctcattttctttaatcactgtggctgtgaaagaacagcaaggagagcttgagacactgtagatatttctgccatattctttggacatagaaaataaataagaaggaaggtgttcttgggaacaaaggtaagagatgtctacctcagagcaagatggcccagwcttgggaagggttcttcaacctctcaagaaggaagccatcctgagagaggcagtgctaccccaagcttgacaggagacgagcaggtaatcccattccattccttacatggagcgacgttctgagaacctaaaaggtatgaaaggaaaaatgccaagggcttcagacaggtgactccagcagcttgtccacgaccaaaaagatttcttactttcccccataatcccccttgtctcatctacctactgtaacacatacacctgccccctaggtttgctcatttctccattcctgtggcaccaccattgtcaaagtcaccatcatcccccacctagattgacacaagggcctcaggagtggtttccctgcatctgccctcaacaggatctctacaatctatacttgctacaacagcaaaagtttttctttccaaagaataaatcagttcatcactctcctgtgtacaatcctaaaataaaatcaaaactccttgccaaagtctgcacagtcctgtgtgctcaggccagaggcttctctgatgttgcccccagctacaaaccagcagcactccccacctttcagttcttgattgcactcactttccttcctgggaatgaaccccctacccctgcccccccaactctctccatgcccccacattgatgtccccacagagacatctccctagagacatcactccatctagaattgcccagcagagtcactccctgtcacatttccctagtttatctactattttatccggggaatcagtccccaatatttcagtgtaggttctttctattttccctaagtgttggccggtcagagaaataaagagtacaaagagaggaatattacagctgggctcctgggggtgacatcacatatcggtaggttcgtgatgcccctgagctgcaaaaccagcaagtttttattagagatttcaa

SEQ ID NO: 708070 - DNA, 1387 bp, Homo sapiens
tgaatctttctggttttgaagtctgtgctctttctgccactcccaggtatctaacttttagcctgtgtgatttctctgtgctaggaacaaaaacaaagttgatatgtaggtggggattaatgtacaatgcccattctagcctcatttgcatttgaagagaactgtgattaacctgaagaagatgctcactgacagtggaattttaggcaccatgttagattaccaggggagctgtcagccaggacttttcaggtctcttaaaataatccctgtcctcctcattttctttaatcactgtggctgtgaaagaacagcaaggagagcttgagacactgtagatatttctgccatattctttggacatagaaaataaataagaaggaaggtgttcttgggaacaaaggtaagagatgtctacctcagagcaagatggcccagtcttgggaagggttcttcaacctctcaagaaggaagccatcctgagagaggcagtgctaccccaagcttgacaggagacgagcaggtaatcccattccattccttacatggagcgacgttctgagaacctaaaaggtatgaaaggaaaaatgccaagggcttcagacaggtgactccagcagcttgtccacgaccaaaaagatttcttactttcccccataatcccccttgtctcatctacctactgtaacacatacacctgccccctaggtttgctcatttctccattcctgtggcaccaccattgtcaaagtcaccatcatcccccacctagattgacacaagggcctcaggagtggtttccctgcatctgccctcaacaggatctctacaatctatacttgctacaacagcaaaagtttttctttccaaagaataaatcagttcatcactctcctgtgtacaatcctaaaataaaatcaaaactccttgccaaagtctgcacagtcctgtgtgctcaggccagaggcttctctgatgttgcccccagctacaaaccagcagcactccccacctttcagttcttgattgcactcactttccttcctgggaatgaaccccctacccctgcccccccaactctctccatgcccccacattgatgtccccacagagacatctccctagagacatcactccatctagaattgcccagcasagtcactccctgtcacatttccctagtttatctactattttatccggggaatcagtccccaatatttcagtgtaggttctttctattttccctaagtgttggccggtcagagaaataaagagtacaaagagaggaatattacagctgggctcctgggggtgacatcacatatcggtaggttcgtgatgcccctgagctgcaaaaccagcaagtttttattagagatttcaa

SEQ ID NO: 708071 - DNA, 1326 bp, Homo sapiens
ggaaatcctctttctttttattgttgtccactattactcacctcatataataaacgggcagctctttctttggtcttccccttgaggctgctgtatttaaaaatctaaagaatgcaaagaatgcttactgtgaactataagagtatctttcagccacaaatgctcttgccacctcttagcttccaggcaaagatacacttgtaagggaaaggcagccagaagtatgggggcctgaggtgggggtatatgtgggggctgagggttgatattaatggagtttgttctccttttctccctcagacaggctttatcattttctgtcttgaaaaattactaagtagcatttgaaataaactcccccagggaaaatgacatggatattgtgaattttaagtaaaaatcactttctgcctctctgcatgattaattcttcttcatatcttcttttccaaatatcgtgttaaaaacagtattgcgtttacatatagtcttaaataaccatggttaatagcagaagaaagatagttctttgtctgactaaagcaagtaactttttcagtgcaaagtatcagttgtagggctggagacagtggaagttgctgttctgccctctgtttctagaaaaataaagtttttctgagactaaaaaggaagcaaaggacacaattctgaaaggaggaaagttttcctattgatgattaggactttaactttaccctggaaataatgagcttggttctttcttttatcctcaggaagacttaagagataccttaagtttgttttgcccctttcttctttcagagatcctgcacttcactatactaatgccaacgtggggagaactggtttytttacaacccagagagcccaatggaaagtggtattctttgtctccgcaaaactaaaataacaagtgtttcttgcaggtaataaggcacaagtgtaggccacacagaaacggtgacccaatctgggcacaaatgggactctttgccattttaggatgtcgtgttggaatttcaaagagctgaaaccaaggtcagagctggtcatatttaggaaacaatcctctaacaaccttcgctttgcctgacctgtttcacgtagtatagtccagattcatttgtttccacttccttgcctggaatgccttcctttcctttaatgagtttgagtctggtcctttcttccaatatgctgctccagttttacctacttgcaaaagcctttcaaagtttccaattcctagtctcgagggattgcctttttctctggattcctatgccccttggatctctagttcatgcattcagccagtcattc

SEQ ID NO: 708072 - DNA, 1326 bp, Homo sapiens
ggaaatcctctttctttttattgttgtccactattactcacctcatataataaacgggcagctctttctttggtcttccccttgaggctgctgtatttaaaaatctaaagaatgcaaagaatgcttactgtgaactataagagtatctttcagccacaaatgctcttgccacctcttagcttccaggcaaagatacacttgtaagggaaaggcagccagaagtatgggggcctgaggtgggggtatatgtgggggctgagggttgatattaatggagtttgttctccttttctccctcagacaggctttatcattttctgtcttgaaaaattactaagtagcatttgaaataaactcccccagggaaaatgacatggatattgtgaattttaagtaaaaatcactttctgcctctctgcatgattaattcttcttcatatcttcttttccaaatatcgtgttaaaaacagtattgcgtttacatatagtcttaaataaccatggttaatagcagaagaaagatagttctttgtctgactaaagcaagtaactttttcagtgcaaagtatcagttgtagggctggagacagtggaagttgctgttctgccctctgtttctagaaaaataaagtttttctgagactaaaaaggaagcaaaggacacaattctgaaaggaggaaagttttcctattgatgattaggactttaactttaccctggaaataatgagcttggttctttcttttatcctcaggaagacttaagagataccttaagtttgttttgcccctttcttctttcagagatcctgcacttcactatactaatgccaacgtggggagaactggtttctttacaacccagagagcccaatggaaagtggtattctttgtctccgcaaaactaaaataacaagtgtttcttgcaggtaataaggcacaagtgtaggccacacagaaacggtgacccaatctgggcacaaatgggactctttgccattttaggatgtcstgttggaatttcaaagagctgaaaccaaggtcagagctggtcatatttaggaaacaatcctctaacaaccttcgctttgcctgacctgtttcacgtagtatagtccagattcatttgtttccacttccttgcctggaatgccttcctttcctttaatgagtttgagtctggtcctttcttccaatatgctgctccagttttacctacttgcaaaagcctttcaaagtttccaattcctagtctcgagggattgcctttttctctggattcctatgccccttggatctctagttcatgcattcagccagtcattc

SEQ ID NO: 708073 - DNA, 800 bp, Homo sapiens
tttaccatctttcccakactcccacttggggaatatgtgctttttgtcccttcaaatgtcagctttgtggctctagagattttggttatcacagataaactgttgccatcatggacacagtcagagtctcaagaaaaatttaagctatggctgctactaaattacttcatggtccacattcatagaccagtgtcaagaaacacagtcacgtgactggatagggaaaattggccctggttaccaggaggagctgttacacaaagtaggaagagaagaaatgtgggttcctggtattcctctcagatgtttcttggctcttccctgctcgattttattagcatacaaacaagtgaagcatatatggctttaaaagggcataatgaccagagactgagacacccctgggatgagaatcttggcgacccaaaaaggtaagtcatcttcgccagcagagatactagctggtgatgagaaacatttagaataggtatagtagagcagccagaaaatgtgtatcacttgtagcctcaaaactagttgtagtagcaggggccatacattgtttcactaatcttcctttcttaggtttccctaaaacaaggcaccaaccagaatcttggaggagcatcccctaaatggagtaagcatactctataaagccagtgggtctaagaagtacagggaactggagactgtagtggaagttttggtgcactgcacggaggcctcctttagactgagacccttatactctcccagccaccagagtgtgggctgctgacagctcataactgagtgtc

SEQ ID NO: 708074 - DNA, 800 bp, Homo sapiens
tttaccatctttcccagactcccacttggggaatatgtgctttttgtcccttcaaatgtcagctttgtggctctagagattttggttatcacagataaactgttgccatcatgsacacagtcagagtctcaagaaaaatttaagctatggctgctactaaattacttcatggtccacattcatagaccagtgtcaagaaacacagtcacgtgactggatagggaaaattggccctggttaccaggaggagctgttacacaaagtaggaagagaagaaatgtgggttcctggtattcctctcagatgtttcttggctcttccctgctcgattttattagcatacaaacaagtgaagcatatatggctttaaaagggcataatgaccagagactgagacacccctgggatgagaatcttggcgacccaaaaaggtaagtcatcttcgccagcagagatactagctggtgatgagaaacatttagaataggtatagtagagcagccagaaaatgtgtatcacttgtagcctcaaaactagttgtagtagcaggggccatacattgtttcactaatcttcctttcttaggtttccctaaaacaaggcaccaaccagaatcttggaggagcatcccctaaatggagtaagcatactctataaagccagtgggtctaagaagtacagggaactggagactgtagtggaagttttggtgcactgcacggaggcctcctttagactgagacccttatactctcccagccaccagagtgtgggctgctgacagctcataactgagtgtc

SEQ ID NO: 708075 - DNA, 800 bp, Homo sapiens
tttaccatctttcccagactcccacttggggaatatgtgctttttgtcccttcaaatgtcagctttgtggctctagagattttggttatcacagataaactgttgccatcatggacacagtcagagtctcaagaaaaatttaagctatggctgctactaaattacttcatggtccacattcatagaccagtgtcaagaaacacagtcacgtgactggatagggaaaattggccctggttaccaggaggagctgttacacaaagtaggaagagaagaaatktgggttcctggtattcctctcagatgtttcttggctcttccctgctcgattttattagcatacaaacaagtgaagcatatatggctttaaaagggcataatgaccagagactgagacacccctgggatgagaatcttggcgacccaaaaaggtaagtcatcttcgccagcagagatactagctggtgatgagaaacatttagaataggtatagtagagcagccagaaaatgtgtatcacttgtagcctcaaaactagttgtagtagcaggggccatacattgtttcactaatcttcctttcttaggtttccctaaaacaaggcaccaaccagaatcttggaggagcatcccctaaatggagtaagcatactctataaagccagtgggtctaagaagtacagggaactggagactgtagtggaagttttggtgcactgcacggaggcctcctttagactgagacccttatactctcccagccaccagagtgtgggctgctgacagctcataactgagtgtc

SEQ ID NO: 708076 - DNA, 843 bp, Homo sapiens
ggattcttttagtaaaatgccttctttcctggacctgggagtgtgtagataggaaagacatcaattaggatatactccttgtggaagaggtgagtcagccccaaccagtttaaagcaaggaggagaagctgaaccctatcaaggtgaarccagccaaaagctcagcagagaggtgcccacaagaaagatattaaggggcctgtatctgaggactctgagagcacccatatctagcatccagtcttgaggtctgtgcacaaattcccttctgtggctctctaagtcttcagtaaagttacaagaatataaactctgcagtgggaaatttgggggcaaccttgggctactcttggagagaaaaattttaagagagtgacagcaacctgtgagcaggttggcaaggtggcccaaggtgattttcaaaagagtagggcagtcaaaagctgtccatgagcacaagggataattaggatggattcagggaaatatggaagcattccctcaacattcccaggaaactttgatgagggaaaccaaaaaagatgagactttgggcactcaggcaagataaggggagttcctaccattacatcttgggtagcataagtggccttattttgcttcaatcatctgaagcataaccagtctcctctatttaccacacatgccatacaaatacactatgggcttcaggcccatcacagctattccaagagttgaggggaccaaaatattggtcaacagttggggagttctgagctgacagtatccaacacagtggccaccagccttgtatggctattgagcatttgcagtgtagcaagcccaaactgaaaagtgttg

SEQ ID NO: 708077 - DNA, 1187 bp, Homo sapiens
agcatcataattgatggtctcctagcccttctttcagcaccctagacttaggcaggagggacattgcgctactaactcttccttggctgaagatgagtagccacagtccccaaaagagttatttccatggcttcttggtgataaagtgaggggaagaatgagcccaggataaccctcatatgtcaattggagctccatgttctgtgtaaatgtcctctttctggcatgtttgtccctgactgagtgccaatttccactctctcactcctttcaacctcacggtcttcaatgcaacaccttcccactcctgaagactcatgtttgattttgtcgctagtactagtttactattattaacctttttatttcatctgcagtggcaaaatataattgtcataacttaacatgacccatacaaatacacgatgaacatgttcaaagtgtattcaactcatttattaatgagggaaccagtagatataaagttatttcaaacaaaacattttgagaaactatttataggcaattttaaaaataataatattagagtaagattattgtccgtttaaacacaaaacaacttagtgtcctaccaggcaataaactgttgcttatcttttttaccacacagaaactattcacatctctattgaacaaaaactactagtaaagacataactccacagtgtatgtgcactaatcaacagtaaatggcaaagtcaaacagtggtacatcagcctacaaaatcaaataatttaaaggtgtgcctaaaatatacactaaaagataatgcagctatcctctggaccttatttataggttttagataatttttctttatagcaggaatgcaagtctaatactatgctgttattccaatctagtttataaatttctgacaatatttaagaagtctcattagaatgcatttgtcattagttgaggtatcagtgcatcatatgtacttgttagcagaaaagaagaagraaaaatgtttatctgaaagtatttgctaaaaggctcatccatcatgccaggcactaggactcattagccggagccctcagggaagatcattaagacagaaaagctgagtaatcaggaaccattgctgatacgatcatggcaaggtagagattgggaaaccgatttaaaaattgagatcaaggagcatgcagagtggaaa

SEQ ID NO: 708078 - DNA, 1187 bp, Homo sapiens
agcatcataattgatggtctcctagcccttctttcagcaccctagacttaggcaggagggacattgcgctactaactcttccttggctgaagatgagtagccacagtccccaaaagagttatttccatggcttcttggtgataaagtgaggggaagaatgagcccaggataaccctcatatgtcaattggagctccatgttctgtgtaaatgtcctctttctggcatgtttgtccctgactgagtgccaatttccactctctcactcctttcaacctcacggtcttcaatgcaacaccttcccactcctgaagactcatgtttgattttgtcgctagtactagtttactattattaacctttttatttcatctgcagtggcaaaatataattgtcataacttaacatgacccatacaaatacacgatgaacatgttcaaagtgtattcaactcatttattaatgagggaaccagtagatataaagttatttcaaacaaaacattttgagaaactatttataggcaattttaaaaataataatattagagtaagattattgtccgtttaaacacaaaacaacttagtgtcctaccaggcaataaactgttgcttatcttttttaccacacagaaactattcacatctctattgaacaaaaactactagtaaagacataactccacagtgtatgtgcactaatcaacagtaaatggcaaagtcaaacagtggtacatcagcctacaaaatcaaataatttaaaggtgtgcctaaaatatacactaaaagataatgcagctatcctctggaccttatttataggttttagataatttttctttatagcaggaatgcaagtctaatactatgctgttattccaatctagtttataaatttctgacaatatttaagaagtctcattagaatgcatttgtcattagttgaggtatcagtgcatcatatgtacttgttagcagaaaagaagaagaaaaaatgtttatctgaaagtatttgctaaaaggctcatccatcatgccaggcactaggactcattagccggagccctcagggaagatcattaagacagaaaagctgagtaatcaggaaccattgctgatacgatcatggcaaggtagagattgggaaacygatttaaaaattgagatcaaggagcatgcagagtggaaa

SEQ ID NO: 708079 - DNA, 977 bp, Homo sapiens
tcagaaacctcaagtttataacatacaaaatatttcaggaaaagagtacagagagacaaatttatatgacttaggagctgcctcagaaatattttgctttcacttagtgttttttgccaaaacttttttggagagaaagcagtgtatctgctgacgtcactttcagactcacaggcttgcaaagcaagagtgatcttgacctcgggcaggcaaaatacctttgatcttcaccagccactgtagctgccgagattatctcaaatgctaaacagaggagaaagcacgcctgaagctatactaactccactacttgccatgtgcaatgatccgttacagggaaggggctgctgtgaaaagtgattaaagtctatgggtggcaggaaaaggaatgtatatcagaaaaagaaatggtctgctacgtgaaattctgcctactgtctaagggggctggatgaccttcattgtatggagatgggtttgtgtttgtaagtttaggagcaggatccagaaatataaaggagagaagaaatggaattagaaagtctgggtaatgaggataatctaagcagaaaatagagtaaatatcaaggctggattctgtaaaaggggtagtccagagaaagaaaactaacaagcaaagaaatccagtgtagaaatggcccagaaaagactttaaggaagagaaatgtctcatacaggcttaataattgtttcatgagagatgctcaatgtaaatcttcactttaacttctcctccataaaactgtaataacacctgcccttccaaatagcaaagatctctcatgttgaaagtgataaacaagcatgacacatttatgggaggtaggccaaagatatatctctcagtgcgagggtattctatgtyattcttttcataatcaatgcttaacttttattataagatggtggcctcaaataaactttatgaagctatttaaatctgaaagaaagtgaca

SEQ ID NO: 708080 - DNA, 1590 bp, Homo sapiens
ataaggtacaaaaaagcaagtgatgattatggagagctttgaagattttgactctcttatgaactgacaggggcgtcaaacataataatgtatctaattataccaagaaacacataacccaatatttgctaattacaagaaactaaaagctcttagagaatcaatttccaatagaaaatttccctcagtggcatacttttgtcagcacctggcacctgaaagacaggagttgaaaaaaaaatgagataagaggaagtttgaaattaactaatgttattttgctttaatatacggcttagtgctgattttagtaagtatattagcaaagaggcttgtagacagattagagaatttctacagtgtgttagctttctgttctccttaacattaccacaattcagcaggttaaattaatacaaaactagttatatttttgtaactctaggaccttggcatttcatatatmcttttaactattttgaattggttcactagttttatacatgaataagttaaccataacacttgcatgtattgatataattcaaacttggagcttgtataattccatttgttctaatattcaggtattaaaaaatcatgctcatgagcaatgatatgtaagaaaaaacaagactgagttattgaaaaaattacacatattttctctctaccactattgtaagtactcctctgaacacaattagatggattagatgcatgtgaacaaagaacgctggaagaatataacaagcactcaatgttttatgacatcaaaggcaaagctatatcagtgctcatttccctacctctggtttctctgcgttttgtactttaatccactacacctcacctgcaggctcaagagagcctaacttctcagctgataatcataataatcaaataattaaaatactatttattaatttattaccacttacatggtgtgcacaatgattatcttatctgagccttaaaacaaccctttaatatgagttattaatgttttaataaatataaagcaaccctttatacttatctttattttactgatgcaataataagacatacagaggttagttaataaccatttcactcagcaagtgacttatcctaggttttgctgaattgcaatcagccatttctgctgagttcctatttggcccttgaagaaacttcactgaacctggataagtaaaaacacataaaaaatgtctcctttcaacttctcttcctttatggggtacattctaagaattgagtatgatgttcaggtcaagatgatggacttcggagttccgaaggaaaacttcaaatcttagctttatcattttctggatttgaaatcatgagcaagtttgtcaaacactcttagttttggattgcccttctgcaaaatgaggacaacaaaatctatctgatgttttaaggcaagagtaaataagattctgtatgttaagagaatagagtatagctggtaaaaaaaaaaaaaaaaaacaaaacaaaaaacaaaacaaaacaaaaaaaaaaaacaccactgtgtggttctgaccaatttatctagtgagtaatcctaaaccccgtctaata

SEQ ID NO: 708081 - DNA, 2924 bp, Homo sapiens
tgcctttgaaagaaaataaaaagtaggtacaggcagttaaaatgaatttttaaaaacattgtgctaaaacacctccttgacaatgtgttacacacacaaacacatacacacacacccctgagaaataagaatgtcatgtattttgatgattctatttcaacttaaataacattctgtctctttcaaaattgaaattgtttgttatttcaaactgcatatatacacatgaaatcttaatgatattaaacatcccatgatatcttacaggctagtgattcaaagacaaatttaagttaaatttacaaggaaatattatataaatgcatataatagttattcagttcaagcaattttcaaaaagcaaatatgcccagggaatcaacactcaratcaatcaataatagaatacatataccctctcaatcactactccaccacggagggaaccagcatcttgctttctatcaggattgaacattattcataataatatgtaatataggcaagcataaactattattgattcctcttttaagaataagtgtggctcagaattttacgtaagatttgttaatacatgaaaggtagcacttgaaacaaaagcttctgagttactaagagggaaaaaagaacatgagaaaattattacaaaacagcatgtggtcaagtatacatacacatgcctttttcttatagggtaaaataaacgatgaggttttttttctttctttttttttttttgacggagtctcactctttcacccaggccagagtgcagtggcgctgtctcggctcactgcaacctccgcctcccggggacgccattctcctgcctcagcatcactagtagctgggactacaggcgccctccaccgcgcccggctaattttttgtattttttgtagaggcggggtttcaccgtgttagccaggatagtctcgatcccctgacctcatgatccgcctgcctcggcctcccgaagtgctgggattacaggcgtgagccaccgcgcccggccaatgatgagtatttttaaacattattctgaatgatgttagcagatccaatgccctgcttcactctgcacgtagggaggatcatgtgctaggccaagcaaaggcttgctgttgtgtttcttcacttgctgagagagaaaagttctaacagaatgggtctaaaagaaaagctgagtttatacaaatattttatttttatgtgtattattgctgaaaatatgagtcaaaagtgaaaggcatatagaatgataaactctaatataaacactaatacttctggataaacagttagttccctaccacactctatgtcctcatttattttaatgtgctccaacttccaaaaaagcatcatatcatttcggatgcttccttctgcccatagttaattggatccagtgctgacccaaattatgtcagactccatttctaaagtacattttatctaagctgcaagatcttaaaagggagggctgtgaccacttgaaatgaagatcttccagtattggtgtcagggtggacatcttccatctgtgtaccacgcacaaataagcataatgtaggcaccaaacaaatgatcacaaaaataaacgaaaacactgtggactactaaaatccataggaagtacacatttacttaaaactctctgtgactttcttttattgagaagaattacagataatttcctcaaatccagagctacttgctcaacttattaataatttgtagagtgttatagtagttttgggaaaggagacttacctggtgatgatttttagttgtcataaaatcctcatcagttttctggtatcaaagagttaaaattttatatagcaatattacagagtgagtgggaccacgtttcttttagaattaagaatatttggtctggcacagtgactcatgcctgtattctcagcactttgggagtttgaggcggccagctcacttgagctcaggagttggagatcagcctgggcaacatggtgaaaccctgactattcaaaaaatacaaacattgttcaggtgtggtggtttgcacctgaagtcccagctactcaggaggctgaggtgggaggatgaggtggaaggatcacttgagctctggaggtgggtgttgcagtgagtcagttgcaccactgcactccagccagggcaagagaaccagaccctgtcttaaaaacaaaacaagcaaacaaaaagaataattaacaataaatgttgattttttttcacaaagaactttgaatcatgtaggcaaatagaagtccagaactcccttaatattttaaaatcataagtgatataaatatcctgatactaaaatgaaaggtacattaaagaatgagaaaataaaatctaaattcgaaatttaattccagaaaactaagctaataagactttaatagtagccaatcttttgtattaatcactcagaaaagaggagacatttgattgttttatgattgaaataacatagcatgtcaattacacttcttacctaaaatgtttttttgaacccggctgcagtggttcatgcctgtaatcccagcactttgggaggccgaggcaggcggatcgcttgaggagaggattttgagaccagcctggccaacatggtgaaaccctgtctctactaaaaacacaaaaattagtcaagtgtggtggggcgtgcctacaatccctactactcaggaggctgaggcaggagaattgcttgaacctggaaggccgaggttgcagtggggcaagatcatgccactgtactccagcctgggtgacagagagagactctgcctcaaaataagtaaataaataaaaatataaaataatataaaatttttttttgagaaacaaagcactaatattatatgcccactttgtttttagcattaagtggccttact

SEQ ID NO: 708082 - DNA, 873 bp, Homo sapiens
caaaaataaaggccctggtaataatgtattcaacagtagatgagacaatggtgaaaggaaatttgggacaacagaacatattagagttaaacacaggaaataaagaatgggtaagaagaagggaacaataaagatacatggacatgtttgaaaaagatctaacatacatgcaattatcatacacaagaagaaaaacaagtaaatgaggcagaagtactatttgaaaaaaaatagctggcgactttacaaaaccaaggaacttgatagattctgcaatgcacagtgttctgcaaatctccaataggatcagtgcaagggaaacacgtgggtgtaaaatagattgatggaaaaaaagcagcagccagaaaaaaaaggaataataaaaaataaattttaagggagtatcattaaaactaaaacttaatactgaacaaaaattttggaatccagaagaaaatgaaaaggcatctcaatgtsctgaaagaaagtaattaccaaaccagaatcaataacacctttcaagagtgaaaatgaaataatgattttatgatgaagaaaaactcagaattttttttaccagaaaacctacactaagagaaatactaaaagtagttcttcaagcagaaagaaaatgagctaagagttaagataaaattataggaaagaacaaagatcaacagtgagggttattatgtaactacataaaattgaccactggctaaatattgacctgcaaaattaatattattagtggccctatggtgtttcagtgcagggcaaaaaaaaatgcaaaaggtacagggtggtaagttgagataaagaatcaccatcttcggaaatgttaagaatataaaatgagattctgtatgaatc

SEQ ID NO: 708083 - DNA, 1929 bp, Homo sapiens
gtggctgctttaacttggcttggaagcatttcgttgttgagaactaggacccgagatccagggtgggagctggaatagaaaactttgctatgtgcccaggtagagatgtgatgagcatcaagctagtctctgccacattattattatggctgttgctgttattgtaactaatcctgtgtattgaaacggcagtcattttccagatgtaactacggaccctaacagttcactgatgttcatggccataattccaggaagccatttctgagagcttatgtaccttaaatcccagtttgaggtgtctagggaagagacaatagtccattaaggatgacagcagggaagtctagtaacttctctcctctccacgatacttagcatggtgttggacacagcaggtgctgacccagtgactgtggcacttactcatggtggatgcactactctatttccttgggtccctttcccattttcacaccccttggctccacgtttgcttttactctcggtatccagaacccatgcttctttgtgagagggctgccctcatgcttctggagtctcctttacctgtgtgcagagagagtgggggatacctagaaacatgcatccctctgagatggcccttgaccaatggagggaggggctctcagtctccaaatctcctctgtgggaggagccagtgccctgcaagcacgggaccttgcttgacattgcactcttgcttggcttccttctcactgtcttgcatcctcacttccctgctggggacactgcccaacacatcactttctcacaaatctgcatctctgggatgcttctggggaaccagcctgagacaggaggtaagctgaagaagcagaattttgaagattctgggctctgtttgaatggaatagctgagacgggtctttgagaacatcagtatttgcctcccacctcagtttttacattcacaaattaaaggatcacacaggcagactttggtatgatatgcagttcctgagcagtgttgggactcaaagacgtttatggcagctcatcagcctgcatccagtgcttcaaagggttctaagagactggctcagccaactgccagcctggtcatttcgaaactgaaatgaaagcagcagagagagttatatttatcaattgagtgagacttgcttttctcaacaggatatttacgttgtgaactggtaaaatctgaactgcagaatatcagtttccagacattcttcctagatgatgccgtctgccacgggtgagtgttttcagctttatgctgactatgtattaatataaagccattccttactcttctaccttaatatatagtctccttggttttaattaggtctctccttgcttctgaacttctggttttccccagtaatgtttaggaatgacctcagaccaggtacatacaaggtacaacgtggtatgtacaaggctgtacctcaagccacgtgagaggctaccttggccttgggcactayggtgaacactgtaaagtgccacgtagatcccctcaataaggacttgcagtcccagtggtgcagagtgctgctggcacacagaggttgcctgggctgcagagagcagccttactgatgtcacacccctgcccatggcacccaaatctaacaactgattgatgtggacacataaagatctggccatctcagaccaacttaaaacaactctgaagggccatttgagcttccaagccctgcacctgtgggactgaccaaggctctctttgaccttggctcaatttctgtttctgcatactgcttcctcctctttacacaggtgttgaccccttaataggcattctacacaaaaaactccatcttagagtctgctttcaagggaacccaacttgtaacagtcacatttccctccctcaccagccagactctccct

SEQ ID NO: 708084 - DNA, 2205 bp, Homo sapiens
cagaaaatgtatctagtcttaaaaagtaaatgcaagctttgtgccaaaaacccagatggtgtcctgttttctttcactgaattcaagatgttgacattgatcacttttcaaaaacgcattttgtacaggctcggggaaaatttttttgaagccacgttagcgcttccaagaagatatgcatatgcagccctaaaggctataagcaacacatggcacacaaagaatgtacgacatgcggctttctttcactgaatcacacatgtattaactaagagcagtttttaaagacacaccttgtcaaatctccaaagacacaattcggagcacagtaggcccacacagaaaacactgtgctgggaattaaacgtaaggcagggttcttggtgcaatgatttgtctactaagtcaaaagttaataatactagaaactagtactgaggtcaaattaacaatgaccaaccagtgcaaggctactaatcttgctttctgaatgtaatgctagaaattcataaacaaaattggcatttgcttttttccccttattttctaagatgagcagcagagcttaaagatagatattaaataaattccccatacaaataagggctggtcattgcacatattcaaacatttgttcacttattcagcaaatacctattgaaggtttattacatgccaaactctatttcttccagtgatacggaaggaaaaatcaacatccttgccctaacggtgctcacattctagttgtaggtatatccccatgggatgtgactgacctgctgacgttattcttccaggtgagactgaaaacccctgcatccttgagctcatggacgatgtgctctatgaggcagtagaggagctccgcctggtactcgacactccacaaagcaactctccctttggggctgcagttggtgaacaaaaagaaactctcaaggatccaagatgatgctgatagtaagaagtcattttttgtgcttcagctgtaagttgggaagtgaaatccatccaaatccaggttttaaggggttcagaaacccgccacccctcccctgctttctgactagggtttttaagcaattgagaaatacgaaaaagacaaagcaaatgggaaacagaataaaccattaaaactgataaagctgatgttggagaatatggcttatatctgaacactgaatcccaaacatccatacctgccctctcctctatacacacccttgggtataggggtaccaacagtttcctccctccccacccaccttcatggcctgttcacatgtactttatggcacatagggacagctgggagcacatgctctctgggggctggttaagtcccaggaaggagctgggcaacacatgccagcttttccttccacacataccctaattttgagtgaggagacagaagccaggagtgtaatagttattaagcccctcccacatggaaacaaacatagaaaaggaggaaaagcattccccttactagcaatttcatttgtctgtgttttccacaattttagagrcttattaaatttggagaaaccaaatgtaacgtcactgaacccaaagaacccggagagtcagtggttataagaattccagtgattcaccaaggagacacttccaaggtttccatcgtgagtccacaccaaggatagctcggccacctgtggagaagactaccacctgtgtcagaagctgtggggctcccaggacgtgtctcccgatggatcatgccaactctgtgtgctagtgccagtgcccttgaggaaaagaagagaaacatccaattgaaaaaaaataggcacactctttgttggggggtataagtttaaggggtacaagtgcaattttgttacatggttatattgtgtagtggtgaagtctagtcttttagtacatccatcaatcgaataatgtacattgtacccattaagaaatttctcagtacccaccccctgccactctcccagcctcccaagtcttcagtgtttatcattccacactcgaagttcatgtgtacacattatttagctatcacttgtaagtgagaacaagcaggatttgactttctgttcctgagaagtttcaattaaaatacagacatattcttttaaatttattttctttagtaaaacaaaaacaatgcaatttatttccaagaatttttttctttttgacttacagggtata

SEQ ID NO: 708085 - DNA, 2205 bp, Homo sapiens
cagaaaatgtatctagtcttaaaaagtaaatgcaagctttgtgccaaaaacccagatggtgtcctgttttctttcactgaattcaagatgttgacattgatcacttttcaaaaacgcattttgtacaggctcggggaaaatttttttgaagccacgttagcgcttccaagaagatatgcatatgcagccctaaaggctataagcaacacatggcacacaaagaatgtacgacatgcggctttctttcactgaatcacacatgtattaactaagagcagtttttaaagacacaccttgtcaaatctccaaagacacaattcggagcacagtaggcccacacagaaaacactgtgctgggaattaaacgtaaggcagggttcttggtgcaatgatttgtctactaagtcaaaagttaataatactagaaactagtactgaggtcaaattaacaatgaccaaccagtgcaaggctactaatcttgctttctgaatgtaatgctagaaattcataaacaaaattggcatttgcttttttccccttattttctaagatgagcagcagagcttaaagatagatattaaataaattccccatacaaataagggctggtcattgcacatattcaaacatttgttcacttattcagcaaatacctattgaaggtttattacatgccaaactctatttcttccagtgatacggaaggaaaaatcaacatccttgccctaacggtgctcacattctagttgtaggtatatccccatgggatgtgactgacctgctgacgttattcttccaggtgagactgaaaacccctgcatccttgagctcatggacgatgtgctctatgaggcagtagaggagctccgcctggtactcgacactccacaaagcaactctccctttggggctgcagttggtgaacaaaaagaaactctcaaggatccaagatgatgctgatagtaagaagtcattttttgtgcttcagctgtaagttgggaagtgaaatccatccaaatccaggttttaaggggttcagaaacccgccacccctcccctgctttctgactagggtttttaagcaattgagaaatacgaaaaagacaaagcaaatgggaaacagaataaaccattaaaactgataaagctgatgttggagaatatggcttatatctgaacactgaatcccaaacatccatacctgccctctcctctatacacacccttgggtataggggtaccaacagtttcctccctccccacccaccttcatggcctgttcacatgtactttatggcacatagggacagctgggagcacatgctctctgggggctggttaagtcccaggaaggagctgggcaacacatgccagcttttccttccacacataccctaattttgagtgaggagacagaagccaggagtgtaatagttattaagcccctcccacatggaaacaaacatagaaaaggaggaaaagcattccccttactagcaatttcatttgtctgtgttttccacaattttagaggcttattaaatttggagaaaccaaatktaacgtcactgaacccaaagaacccggagagtcagtggttataagaattccagtgattcaccaaggagacacttccaaggtttccatcgtgagtccacaccaaggatagctcggccacctgtggagaagactaccacctgtgtcagaagctgtggggctcccaggacgtgtctcccgatggatcatgccaactctgtgtgctagtgccagtgcccttgaggaaaagaagagaaacatccaattgaaaaaaaataggcacactctttgttggggggtataagtttaaggggtacaagtgcaattttgttacatggttatattgtgtagtggtgaagtctagtcttttagtacatccatcaatcgaataatgtacattgtacccattaagaaatttctcagtacccaccccctgccactctcccagcctcccaagtcttcagtgtttatcattccacactcgaagttcatgtgtacacattatttagctatcacttgtaagtgagaacaagcaggatttgactttctgttcctgagaagtttcaattaaaatacagacatattcttttaaatttattttctttagtaaaacaaaaacaatgcaatttatttccaagaatttttttctttttgacttacagggtata

SEQ ID NO: 708086 - DNA, 605 bp, Homo sapiens
taaagccacataaggaaatatcatgatcaaatttttaaaagcaaatattatagaaacagtgaaataaactaaacaacaacaacaacaaaaacttattattctatacccagataaactatctttcaaaattgagggtaaaataaaaccatctttagacaaaacaaaaagctgagaatatttgttactagcaaacctatgctataagtaatgtgacaggctggatacagtggttcgtgcctataatcccagtactttgggaggttgaggtgagaagatcacttgagcccaggagtttgagatcagactgggcaacatagtgagaccctgtttctaaaataaggaaagtaagaaagaatgaaaggaagaaaagaaagaaatgttataggaagttctttaggcctaaggaaaatgagccccaactactggtattcacatctttgtgtagtttcttcccacattgyatcatgtttggtctgtctaaccaaggaaatatggctgatgtgatggtatgtcacttccgagattaggttataaaagacaagtctttctatgcctctgtttctgcctgtctcttctcattaatcactctgcgagaagccaattgt

SEQ ID NO: 708087 - DNA, 652 bp, Homo sapiens
taaaacatatcctgggtcccgactatagtgagagttttgtatgaatttgttcaaagaggagatttgctctctatctaaaagcaggcagacagtaacttccaggtggataaaatcaatgttgtgcttttgagaggaggcaataattacaaaggatctatggaccaggggtgctgagcagcttatttggaaggactcatgtagacatataaggtatgcaattcagaaaggcagagtcttagactcccaaaatcttgggtgtccaagaggccatttgatctgctgctcagccttcaagcagatcaatgactaaaccattcatttcggccattacttgtttcctttaacagttccacaaaagtagtccatcatgaaatagatgtgtattcaaattctggttttatgtttgtgtgctatatgtctcccagmaactttcttaaacttgttgagcctcagtttcttcccctctagaagaagaaaacggtagtacattctttacagtttgttatgaggtataaattaaattcaatgtaaaaccatctaacacattgcaattgctcaattgctcaatatggttagtggccataattatcactgcctgtgttccaggtagaaaaaaaaaagaaaggacctaaatgcaaaacatatctgatct

SEQ ID NO: 708088 - DNA, 515 bp, Homo sapiens
accatttctccatttgtttgacttttttttttttaaagcccatctcagacctgactacctcatggaggctttccctgaaagcccatggcttgattagggaatcactcttccttttttcatagcctgtgttttctctattggtcatgtgtgtgctgttttcttcaattcaactctgagttccatgaggataaagataatgtccttgttcttggtaacattctcatttctaatcataggacctagcatctactagttgctcaattcataggaaggaaggaagaaggaaggaaggaaagaagaaaggagaaaggaagaaggaaggaaggaaagaagaaaggagaaaggaggaaaggaaggaagagagaacatagagggacagttatcaccaaatggcagcagaagaccatttggtgatatgaccatcctagaggaaaaaaagtgggcacagggattgctacactctgaatgtttgtgtccccctaaarttgatatgttgaaagctaatccccagtgtg

SEQ ID NO: 708089 - DNA, 625 bp, Homo sapiens
aacagacacgaccccagatgttacttatcctgcctgcatgacacttgctctggcggtttctattctattctattctttctcttacatgaaatatgctaaattctatgatttttctcatatcaaaaatgattacaactctaaaatgcatggcaacccataacttgaaaataatgacaacagcaacaatagcattgctttagcaggttaagaagatgagsagatttcttctacttgtaggaaatttatttcatattgtttttaatcatgtattggcttgttgggaagcatgagaggaacagacgggttaaggatgactccagggatctggtcttgggtccctggaaaggtggcattgtcctctcctgagaccggcactaggagggagatgccaggcatgtgaagtgtccgtcagccctccaggtggaggtgggagcaggcagtgtgcaggagccttgcatgaggggagaggctcaggctggatacaggtcctgttctgttacttcctatgactttcattgttttaaccacacttgtgttttcttgcagggccccaagctcatgcgcgctctgaccctcttgtatgctttcacccacttatgggagaatgggtcctcacatatctcga

SEQ ID NO: 708090 - DNA, 645 bp, Homo sapiens
gagcaaaatgattttcactgacatccaactggttattcaacacatacaaatctgctgcctctagactctggtaaagtttccgttctataaatggtcattagggtgttatgtgaatamaggctttttaaaaaatggtggcctgaaattgtttttgtaaataaagattatttctcaacagagaaatccactatagttgaaataggtactctctctcttattggtgaaatttgtcaggtattttaatgtgaaaagaaaaataaaataatagaatactaattttatttgttcatgtaatagtacctgcttttggaatctggtcaacaagataagaatgccctaatcataaacaattgtacagagaagctgatatgcatttgtaagattgctgcttctattcactggcattttaaaaattgtgagaaaatattggtggtaatatgttataatcaagactttgagcaattatgtatgtaacttgaatatccaagacaatgtccccataattttgtaataagtgtgcatgcacaatatcaaacatatagttatgcatgtatatggatatgcatatacttttaaattttaactttgtaagtttaacgttagtactaaacctatcatttatatggcttttctaccagttggaaa

SEQ ID NO: 708091 - DNA, 601 bp, Homo sapiens
tactttagcaaatgggaaaaaagtttgcagcacactaccctgctcttgttcttgttttgtttagtaattactagcccattgtatcatgtctgcatgtttgtctccaaaaataaaaaaggcaatttctttgagtgtttcactaaattttgctccccaaaatactgcacttactctaatattagatacatgttaactgttcttcaacttaatgaatcaatgcatatgcaagtgaaaccttgaaaatratgataagctatttaaaacttgcaaagctactatgcatttacaaatgtactgctcccattcaatgataatatatgtatttgttgagaaaatactgtgcaggtgtgttataatgaagactcacagccaaatagttatgtcgtgagagagtctgaggcaatgccttccttctcaatgagactctaaggcaataaaactgtgtccagtcaaacacagagagggtcccagaactttcaaggctgagaggaatctaaacgggcatctgtcatctcctcaaaagaattgacagggagctcaatataatattacagagctgcataaatgttttttaaaatgtgtatgcaacaggattgggtgt

SEQ ID NO: 708092 - DNA, 519 bp, Homo sapiens
atgcagtgggagctatactgacgtatacaaaatgtctcrtaatctgtttaaagatatccaccattatcccactatttgttttgtcgtctttcattatgggccacttttgaagtaaatctatgtactgaactggcatcactctctttatattgatgggacgaagtcctaatgtcttccagctaatacaggaaactttttggccttgattcatgttaaggtagtttctaacctcttccttacagcaggttgaattcctgctgtattgcatctcacagcatctctcctgctgagcctagcatctgcatccctgtaggacaatgtatacatactgtagcaaaattaaatttttatgtgctgctgcatattgggtagcatgagtatgacaaatctgctctactccctgtgcaaagagacaggacaatacacaatgcatgagaagaggctggctcagataaaaggtctttgcaagaaaacatcccacggagagaaaaatctcccctactggcctgatcaaactgc

SEQ ID NO: 708093 - DNA, 524 bp, Homo sapiens
ggttactgaatgacctatgtagtgattcttaagtcatagaaatgtacattgctattgtcactagaaataagattttaaaatgcaggaactatgaartctctgattattaaataatataataaatgttaataaaataaaatgataaatatattacttaataatataaaaataataatttatattattatataatataaaaatgactttttaacaccgtttgtctaagcacacacactataaaaatattaagaaaaaatattttaccattattaaaagtaatgctcccttattttctttgttcttgcccatatacatacacttatatagttaacatacacgtgtctgggtgcacccattgatacatacatatacagtggtgtgtataatgtgacagataatatgtattatctatagagaatacatacatccactatcatatcaaaattatttaaggagtaaaagtccgcatggctttattttaggacaatgttcctcttagttgacaagttagggagaaaaaggca

SEQ ID NO: 708094 - DNA, 1456 bp, Homo sapiens
  misc_feature 1027, 1028, 1029, 1030, 1031, 1032, 1033, 1034, 1035, 1036,1037, 1038, 1039, 1040, 1041, 1042, 1043, 1044, 1045, 1046,1047, 1048, 1049, 1050, 1051, 1052, 1053, 1054, 1055, 1056,1057, 1058, 1059, 1060, 1061, 1062, 1063, 1064, 1065: n = A,T,C or G
  misc_feature 1066, 1067, 1068, 1069, 1070, 1071, 1072, 1073, 1074, 1075,1076, 1077, 1078, 1079, 1080, 1081, 1082, 1083, 1084, 1085,1086, 1087, 1088, 1089, 1090, 1091, 1092, 1093, 1094, 1095,1096, 1097, 1098, 1099, 1100, 1101, 1102, 1103, 1104: n = A,T,C or G
  misc_feature 1105, 1106, 1107, 1108, 1109, 1110, 1111, 1112, 1113, 1114,1115, 1116, 1117, 1118, 1119, 1120, 1121, 1122, 1123, 1124,1125, 1126: n = A,T,C or G
gacattttcatatttaggaacatttcttcaacatatataaacatatcaatatattcttatttaaaccttttttagctctagcctcaccatttaatggcatatacctgcttgacgaaccaaccacagattacactcttgaaaagcaaaagggagattttcataatgtgcaaaatctcagtgagttgtgtgtcctacagtgtgagtggaattcattcattcttttcatttaggataaatgcacatcaatgttataagttgccctcctcattcttwaaaaaagaagattcacaatgtatttccaatgtttctccaccaccctcctccgaattctttatcagaaatgctgaatgtttctggcttcacagatatgtgatcaaggttgacaggtatatttttagtatccctagtattttaaaggctcagaaagatctagctttggtatgcttgtttatgaaatacatttagctctcaatatcagttcatttaatatgcattcattgctgtctgagaaaaaaatgccttcagcttttttggcaaaatgaagagaaatatgtattttctcacactgaggccactcagaacagggcatactcactaatcactgaggattgggcaccttggacagtcaaagggaagaggtatagaaggaggtaaacctagttcagctatacttcttaatcaaggaaaggacaaagagcctggggtcaccagcctaacacgtttaaatttagtaacgataagataatcctgcatagcattgcaaaactgcacccaatttcaggcaggcttctgaaaagttaagtgaaaatttacattatcacctctgtcaggcatcaaatatttatttagcacctatcatgtgccaggccttgtggtcagttttggagctaaaaatgtaaatagaataagggtggtcactgttcccttgatgatttctatccaacaaaaagggcagaacaaagaaataattaattaaaacagcaatgatatctctgacacaacacagtatcacttatgcattattccnnnnnnnnnnnnnnnnnnnnnnnnnnnnnnnnnnnnnnnnnnnnnnnnnnnnnnnnnnnnnnnnnnnnnnnnnnnnnnnnnnnnnnnnnnnnnnnnnnnncgtcataatcaatagtctggagcatgaataggaaatataagttaaggtatctagcatgcaatacatgagcttaatgatcaaaacacattaattggcaattacttaagcgtggcattgaccatacacaagggaaactgaaccttgtcttccctatcaaatgtattttttgctttcttacctaaaacagaaaagacttactctgatcaggacttagaccattcaaagctgtattttaaaacatagaaatgcacacagtgaagtgcctatcatttaatcttagtagatcatatctttttagcctgagttcaccattctgcagtattgaaagct

SEQ ID NO: 708095 - DNA, 581 bp, Homo sapiens
taaaaccacctctttttcaaggattcaattcccttaagtctgcctgccagcctttgtctcaactcaactcaaaatggcaaggatatgacttggtttatctacccaagttgatggataaccaattagactttagtgtgactgtatatgcttctatacacactctatatacttctcaagaagtatttgtagtgtttgcctttgatctataattgtagcttgaaagctctttttttcctattcagtagacttcagataactgcaagccataggcagtctctctcatttgaaaagagaaaatcttttcttcaaggacratatctggtctccccaacccagatggtccctgcttcctgagcagacctattttgtttgttgttgttttgagacagggtctctctctgttgacgaggctagagtgcggtggtgtgatcatggctcactgctgtgttgacctcccaggcttaagcaatcctcccacctcagcctcctgagtagcggggaccacaggcatgtaccatcacacttggaaattatttttatttttattagagacagggtctccccatgtggcccaagctgat

SEQ ID NO: 708096 - DNA, 581 bp, Homo sapiens
taaaaccacctctttttcaaggattcaattcccttaagtctgcctgccagcctttgtctcaactcaactcaaaatggcaaggatatgacttggtttatctacccaagttgatggataaccaattagactttagtgtgactgtatatgcttctatacacactctatatacttctcaagaagtatttgtagtgtttgcctttgatctataattgtagcttgaaagctctttttttcctattcagtagacttcagataactgcaagccataggcagtctctctcatttgaaaagagaaaatcttttcttcaaggacaatatctggtctccccaacccagatggtccctgcttcctgagcagacctattttgtttgttgttgttttgagacagggtctctctctgttgacgaggctagagtgcggtggtgtgatcatggctcactgctgtgttgacctcccaggcttaagcaatcctcccacctcagcctcctgagtagcggggaccacaggcatgtaccatcacacttggaaawtatttttatttttattagagacagggtctccccatgtggcccaagctgat

SEQ ID NO: 708097 - DNA, 424 bp, Homo sapiens
tgaaattattttggaaaagtataattgttaagcaatagtttttaatctagattgagcagtcagaatgtcagaggatctgtagccccagaattattggaaatgtgctcaattcacttggccycaagcatttaaaaataggctttgtataagaagtctgtaaaacaaatttcgtggccaacatactttcataacaaaagctcaaactagaatagtgtttagactgaattgaggttttaaaatagtcaaaaatttttggttaatctctcttgaatctgttagataatctttataattttcaaattgaggtacatgatctctgattaaactgaatgctatatagattgattaattctatgaaattctgacatctttgaataataacttctggcttatgtattcgtatgttaaactatgcatcattttt

SEQ ID NO: 708098 - DNA, 619 bp, Homo sapiens
attgcctggttccatcgtctcaaccacctcctgaggtgagttcaatttccctacaagctgtgtggccctgcacaggttgcttgacatctctgagcctctgttttctcctctgtaaagtggggatcatggaacccaccttgcaggctgctgtgtggacaggtgatagtgaggccaagagctggcccggggctgggggcacgggaggccgccaagtcacagctgtgatcacaacctcgatgtcctgtctttgcatctcaccttggaggaaggaggaaagccagagaagctcttcccaccccgggaggaagctgggcaaatctcagcacctccttcctcctcttgcagactctgctgggtgtgacccagytgaatatctctggaagcccccgcagctaagcaggggccattccatttcttccaatcttgtccaaggtgagggtccagcccaggggggaggactgggccatggtggctctgggcacccccggcaccccttccctgaggtctgcatatctccaagaggaagggacacactggaactgcctgggagctggcaagaggtttagatctctgcttggcacaagacacagaggtccggttgctgctctgctgaggtgaa

SEQ ID NO: 708099 - DNA, 2693 bp, Homo sapiens
gacaggaactttacatggcttctctcacttaatcatcaaagcagcattatgaggcaggaactattattaccccacttcgcagaggagtcaactgagttcatttatttgtttagcataatgtaagtggtgaagacaatactgaggccagggcacctgactttatctattcgcaaagtgtgaactgcagaccagcagcataaacaatacctgggagcttgttcaaaaggcaaattcttgggtgcactctagactgactcaaaaccttttgggtgatgttcaggactctgtgttttaacaagctctgtgggtgatttaacactgaaagtggaagctctgttctaggacctgtgttctcaatcctagattgtggttttctatgttcaatgaatttttcagtgtcaagaacgtagtccgactgactcttgattctgtggtggtctccttcctccatcactgctttgagtctgcctatccctcctgcagctgtgtgctggacccagataatggcctctgcgtagagaagcagcacagggcatgtgaagattgtattcctgctgggacttccagtgttctttccttggctcatacatcgtcaaagtcaatgcatattatagttttgcagccagaaaccctcctatttaacaattccaaaaaaaaaaaaaagctcaaaccgttggaaactcttgaatatgagaacttacaacttacgtctgctaaatgcataaacttctcctcattcctatcaaaggaactttgatagactttatctgttccaggagattttgaggcttttagctttgtgaattaaccaagaaacactgcacacttctctttctcttggaaaaacattaagctgtgtttgttaccatcaatgataacaggtgctataaatacaacaatttggtgtataccyagattgttatataaaccttcaggggcctttaaaattttctccaggaaaaaaacaccaatggaattttccttttttttttttttctgtggcctctagtcgatcctggtaattatcagatatcatatcatcaatatatcttgtcaatgaattttcatttcttccactaggttacacctagggaagggtgtgatagtaagtgtcacatttgtagaatgttaagaagtatgaatacaaaacggaaagaaaatcccagcaggaaagagaaaaaatatgttgatttatatatttaaaaaatgttttaaaaaattgttattatagaaattcatgaagtataataaagtacaagaagaaactaaaaataattcacactcccactattcagcactaaccagtaacatttagtgtataaatatttttagacttttttgctggcatacagagacatttatactttagatttctattttgccaaaaactaaatcctactttgcacgctgtttttccaaatgtaatggttgtggttctcacttcatatcaacatgcatagacgtgtatagctttcaagagtgactcttcttgcagaaagaatggataagtagtcactcgtgtactttggtgttgttggctcaacatgtcagacatgtgcctacctgagtaatctcccagtgtcacctgtgtacatgtggggaaataatcaggcagacatgatctacctctcacagatggtcacttcaaaaccaaataaaatgacaaatgtgaagctcactcaatctacttcccatgacttttatatttttaatttactaagtactatgcaattctgctttagaaagttcaactttaaggcacattttcattgattaatagttccttttccttaccaatacacacattccaaaataaagtctgagttcatttcttttgttgttttttttcccttagggaaattctaccccagggaaagcacttttagggggattccagggatcaaattcaggtcatttgagctatgtcctagctgttaaattattaggagaacttagagataaaaagtttaccataaatttaaaaggatataaatttaggctgtatctacacataaatcagcttgggaaaaaagacagttgaattcagtggaacaactagtgatgaactagttaccaactgagtgtgatttgctgcattttttaaagctgatttctgttggggactaaaacaagacacttttctttgtggtgggtttttctgcctttcaaacagaaaggtcttactaacacagtatgctttgccaagatatgtttaatctaaagacttgccaattcaagaatagaataatttgcctgaatccgacaacaggcaatgacaaattctttatttggtaaagcatagtaactgcagaacatgcattgcaggcactcacagaagaaagccacctctttctgctcagatcatgattctctggtaataacatactggaaagcaacttgaggaatacaagaacaaattcttgaaagtgcactgaattgtggtctaatggtcggaaagcatttgtacaactttaagaataagttcttttttctaacagatcagaattcctctacctcttctttttagacggatttacgtaaagcaaaagtagtatggcttgtcagttttcattttctgctaaaccgaatcactaacatttcaagacttttgtttctcttatttctaaagaatagatactattttatattatctgtaaagtttataaagaaatattaggaagaaataaataaaa

SEQ ID NO: 708100 - DNA, 2693 bp, Homo sapiens
gacaggaactttacatggcttctctcacttaatcatcaaagcagcattatgaggcaggaactattattaccccacttcgcagaggagtcaactgagttcatttatttgtttagcataatgtaagtggtgaagacaatactgaggccagggcacctgactttatctattcgcaaagtgtgaactgcagaccagcagcataaacaatacctgggagcttgttcaaaaggcaaattcttgggtgcactctagactgactcaaaaccttttgggtgatgttcaggactctgtgttttaacaagctctgtgggtgatttaacactgaaagtggaagctctgttctaggacctgtgttctcaatcctagattgtggttttctatgttcaatgaatttttcagtgtcaagaacgtagtccgactgactcttgattctgtggtggtctccttcctccatcactgctttgagtctgcctatccctcctgcagctgtgtgctggacccagataatggcctctgcgtagagaagcagcacagggcatgtgaagattgtattcctgctgggacttccagtgttctttccttggctcatacatcgtcaaagtcaatgcatattatagttttgcagccagaaaccctcctatttaacaattccaaaaaaaaaaaaaagctcaaaccgttggaaactcttgaatatgagaacttacaacttacgtctgctaaatgcataaacttctcctcattcctatcaaaggaactttgatagactttatctgttccaggagattttgaggcttttagctttgtgaattaaccaagaaacactgcacacttctctttctcttggaaaaacattaagctgtgtttgttaccatcaatgataacaggtgctataaatacaacaatttggtgtatacctagattgttatataaaccttcaggggcctttaaaattttctccaggaaaaaaacaccaatggaattttccttttttttttttttctgtggcctctagtcgatcctggtaattatcagatatcatatcatcaatatatcttgtcaatgaattttcatttcttccactaggttacacctagggaagggtgtgatagtaagtgtcacatttgtagaatgttaagaagtatgaatacaaaacggaaagaaaatcccagcaggaaagagaaaaaatatgttgatttatatatttaaaaaatgttttaaaaaattgttattatagaaattcatgaagtataataaagtacaagaagaaactaaaaataattcacactcccactattcagcactaaccagtaacatttagtgtataaatatttttagacttttttgctggcatacagagacatttatactttagatttctattttgccaaaaactaaatcctactttgcacgctgtttttccaaatgtaatggttgtggttctcacttcatatcaacatgcatagacgtgtatagctttcaagagtgactcttcttgcagaaagaatggataagtagtcactcgtgtactttggtgttgttggctcaacatgtcagacatgtgcctacctgagtaatctcccagtgtcacctgtgtacatgtggggaaataatcaggcagacatgatctacctctcacagatggtcacttcaaaaccaaataaaatgacaaatgtgaagctcactcaatctacttcccatgacttttatatttttaatttactaagtactatgcaattctgctttagaaagttcaactttaaggcacattttcattgattaatagttccttttccttaccaatacacacattccaaaataaagtctgagttcatttcttttgttsttttttttcccttagggaaattctaccccagggaaagcacttttagggggattccagggatcaaattcaggtcatttgagctatgtcctagctgttaaattattaggagaacttagagataaaaagtttaccataaatttaaaaggatataaatttaggctgtatctacacataaatcagcttgggaaaaaagacagttgaattcagtggaacaactagtgatgaactagttaccaactgagtgtgatttgctgcattttttaaagctgatttctgttggggactaaaacaagacacttttctttgtggtgggtttttctgcctttcaaacagaaaggtcttactaacacagtatgctttgccaagatatgtttaatctaaagacttgccaattcaagaatagaataatttgcctgaatccgacaacaggcaatgacaaattctttatttggtaaagcatagtaactgcagaacatgcattgcaggcactcacagaagaaagccacctctttctgctcagatcatgattctctggtaataacatactggaaagcaacttgaggaatacaagaacaaattcttgaaagtgcactgaattgtggtctaatggtcggaaagcatttgtacaactttaagaataagttcttttttctaacagatcagaattcctctacctcttctttttagacggatttacgtaaagcaaaagtagtatggcttgtcagttttcattttctgctaaaccgaatcactaacatttcaagacttttgtttctcttatttctaaagaatagatactattttatattatctgtaaagtttataaagaaatattaggaagaaataaataaaa

SEQ ID NO: 708101 - DNA, 2693 bp, Homo sapiens
gacaggaactttacatggcttctctcacttaatcatcaaagcagcattatgaggcaggaactattattaccccacttcgcagaggagtcaactgagttcatttatttgtttagcataatgtaagtggtgaagacaatactgaggccagggcacctgactttatctattcgcaaagtgtgaactgcagaccagcagcataaacaatacctgggagcttgttcaaaaggcaaattcttgggtgcactctagactgactcaaaaccttttgggtgatgttcaggactctgtgttttaacaagctctgtgggtgatttaacactgaaagtggaagctctgttctaggacctgtgttctcaatcctagattgtggttttctatgttcaatgaatttttcagtgtcaagaacgtagtccgactgactcttgattctgtggtggtctccttcctccatcactgctttgagtctgcctatccctcctgcagctgtgtgctggacccagataatggcctctgcgtagagaagcagcacagggcatgtgaagattgtattcctgctgggacttccagtgttctttccttggctcatacatcgtcaaagtcaatgcatattatagttttgcagccagaaaccctcctatttaacaattccaaaaaaaaaaaaaagctcaaaccgttggaaactcttgaatatgagaacttacaacttacgtctgctaaatgcataaacttctcctcattcctatcaaaggaactttgatagactttatctgttccaggagattttgaggcttttagctttgtgaattaaccaagaaacactgcacacttctctttctcttggaaaaacattaagctgtgtttgttaccatcaatgataacaggtgctataaatacaacaatttggtgtatacctagattgttatataaaccttcaggggcctttaaaattttctccaggaaaaaaacaccaatggaattttccttttttttttttttctgtggcctctagtcgatcctggtaattatcagatatcatatcatcaatatatcttgtcaatgaattttcatttcttccactaggttacacctagggaagggtgtgatagtaagtgtcacatttgtagaatgttaagaagtatgaatacaaaacggaaagaaaatcccagcaggaaagagaaaaaatatgttgatttatatatttaaaaaatgttttaaaaaattgttattatagaaattcatgaagtataataaagtacaagaagaaactaaaaataattcacactcccactattcagcactaaccagtaacatttagtgtataaatatttttagacttttttgctggcatacagagacatttatactttagatttctattttgccaaaaactaaatcctactttgcacgctgtttttccaaatgtaatggttgtggttctcacttcatatcaacatgcatagacgtgtatagctttcaagagtgactcttcttgcagaaagaatggataagtagtcactcgtgtactttggtgttgttggctcaacatgtcagacatgtgcctacctgagtaatctcccagtgtcacctgtgtacatgtggggaaataatcaggcagacatgatctacctctcacagatggtcacttcaaaaccaaataaaatgacaaatgtgaagctcactcaatctacttcccatgacttttatatttttaatttactaagtactatgcaattctgctttagaaagttcaactttaaggcacattttcattgattaatagttccttttccttaccaatacacacattccaaaataaagtctgagttcatttcttttgttgttttttttcccttakggaaattctaccccagggaaagcacttttagggggattccagggatcaaattcaggtcatttgagctatgtcctagctgttaaattattaggagaacttagagataaaaagtttaccataaatttaaaaggatataaatttaggctgtatctacacataaatcagcttgggaaaaaagacagttgaattcagtggaacaactagtgatgaactagttaccaactgagtgtgatttgctgcattttttaaagctgatttctgttggggactaaaacaagacacttttctttgtggtgggtttttctgcctttcaaacagaaaggtcttactaacacagtatgctttgccaagatatgtttaatctaaagacttgccaattcaagaatagaataatttgcctgaatccgacaacaggcaatgacaaattctttatttggtaaagcatagtaactgcagaacatgcattgcaggcactcacagaagaaagccacctctttctgctcagatcatgattctctggtaataacatactggaaagcaacttgaggaatacaagaacaaattcttgaaagtgcactgaattgtggtctaatggtcggaaagcatttgtacaactttaagaataagttcttttttctaacagatcagaattcctctacctcttctttttagacggatttacgtaaagcaaaagtagtatggcttgtcagttttcattttctgctaaaccgaatcactaacatttcaagacttttgtttctcttatttctaaagaatagatactattttatattatctgtaaagtttataaagaaatattaggaagaaataaataaaa

SEQ ID NO: 708102 - DNA, 2693 bp, Homo sapiens
gacaggaactttacatggcttctctcacttaatcatcaaagcagcattatgaggcaggaactattattaccccacttcgcagaggagtcaactgagttcatttatttgtttagcataatgtaagtggtgaagacaatactgaggccagggcacctgactttatctattcgcaaagtgtgaactgcagaccagcagcataaacaatacctgggagcttgttcaaaaggcaaattcttgggtgcactctagactgactcaaaaccttttgggtgatgttcaggactctgtgttttaacaagctctgtgggtgatttaacactgaaagtggaagctctgttctaggacctgtgttctcaatcctagattgtggttttctatgttcaatgaatttttcagtgtcaagaacgtagtccgactgactcttgattctgtggtggtctccttcctccatcactgctttgagtctgcctatccctcctgcagctgtgtgctggacccagataatggcctctgcgtagagaagcagcacagggcatgtgaagattgtattcctgctgggacttccagtgttctttccttggctcatacatcgtcaaagtcaatgcatattatagttttgcagccagaaaccctcctatttaacaattccaaaaaaaaaaaaaagctcaaaccgttggaaactcttgaatatgagaacttacaacttacgtctgctaaatgcataaacttctcctcattcctatcaaaggaactttgatagactttatctgttccaggagattttgaggcttttagctttgtgaattaaccaagaaacactgcacacttctctttctcttggaaaaacattaagctgtgtttgttaccatcaatgataacaggtgctataaatacaacaatttggtgtatacctagattgttatataaaccttcaggggcctttaaaattttctccaggaaaaaaacaccaatggaattttccttttttttttttttctgtggcctctagtcgatcctggtaattatcagatatcatatcatcaatatatcttgtcaatgaattttcatttcttccactaggttacacctagggaagggtgtgatagtaagtgtcacatttgtagaatgttaagaagtatgaatacaaaacggaaagaaaatcccagcaggaaagagaaaaaatatgttgatttatatatttaaaaaatgttttaaaaaattgttattatagaaattcatgaagtataataaagtacaagaagaaactaaaaataattcacactcccactattcagcactaaccagtaacatttagtgtataaatatttttagacttttttgctggcatacagagacatttatactttagatttctattttgccaaaaactaaatcctactttgcacgctgtttttccaaatgtaatggttgtggttctcacttcatatcaacatgcatagacgtgtatagctttcaagagtgactcttcttgcagaaagaatggataagtagtcactcgtgtactttggtgttgttggctcaacatgtcagacatgtgcctacctgagtaatctcccagtgtcacctgtgtacatgtggggaaataatcaggcagacatgatctacctctcacagatggtcacttcaaaaccaaataaaatgacaaatgtgaagctcactcaatctacttcccatgacttttatatttttaatttactaagtactatgcaattctgctttagaaagttcaactttaaggcacattttcattgattaatagttccttttccttaccaatacacacattccaaaataaagtctgagttcatttcttttgttgttttttttcccttagggaaattctaccccagggaaagyacttttagggggattccagggatcaaattcaggtcatttgagctatgtcctagctgttaaattattaggagaacttagagataaaaagtttaccataaatttaaaaggatataaatttaggctgtatctacacataaatcagcttgggaaaaaagacagttgaattcagtggaacaactagtgatgaactagttaccaactgagtgtgatttgctgcattttttaaagctgatttctgttggggactaaaacaagacacttttctttgtggtgggtttttctgcctttcaaacagaaaggtcttactaacacagtatgctttgccaagatatgtttaatctaaagacttgccaattcaagaatagaataatttgcctgaatccgacaacaggcaatgacaaattctttatttggtaaagcatagtaactgcagaacatgcattgcaggcactcacagaagaaagccacctctttctgctcagatcatgattctctggtaataacatactggaaagcaacttgaggaatacaagaacaaattcttgaaagtgcactgaattgtggtctaatggtcggaaagcatttgtacaactttaagaataagttcttttttctaacagatcagaattcctctacctcttctttttagacggatttacgtaaagcaaaagtagtatggcttgtcagttttcattttctgctaaaccgaatcactaacatttcaagacttttgtttctcttatttctaaagaatagatactattttatattatctgtaaagtttataaagaaatattaggaagaaataaataaaa

SEQ ID NO: 708103 - DNA, 2693 bp, Homo sapiens
gacaggaactttacatggcttctctcacttaatcatcaaagcagcattatgaggcaggaactattattaccccacttcgcagaggagtcaactgagttcatttatttgtttagcataatgtaagtggtgaagacaatactgaggccagggcacctgactttatctattcgcaaagtgtgaactgcagaccagcagcataaacaatacctgggagcttgttcaaaaggcaaattcttgggtgcactctagactgactcaaaaccttttgggtgatgttcaggactctgtgttttaacaagctctgtgggtgatttaacactgaaagtggaagctctgttctaggacctgtgttctcaatcctagattgtggttttctatgttcaatgaatttttcagtgtcaagaacgtagtccgactgactcttgattctgtggtggtctccttcctccatcactgctttgagtctgcctatccctcctgcagctgtgtgctggacccagataatggcctctgcgtagagaagcagcacagggcatgtgaagattgtattcctgctgggacttccagtgttctttccttggctcatacatcgtcaaagtcaatgcatattatagttttgcagccagaaaccctcctatttaacaattccaaaaaaaaaaaaaagctcaaaccgttggaaactcttgaatatgagaacttacaacttacgtctgctaaatgcataaacttctcctcattcctatcaaaggaactttgatagactttatctgttccaggagattttgaggcttttagctttgtgaattaaccaagaaacactgcacacttctctttctcttggaaaaacattaagctgtgtttgttaccatcaatgataacaggtgctataaatacaacaatttggtgtatacctagattgttatataaaccttcaggggcctttaaaattttctccaggaaaaaaacaccaatggaattttccttttttttttttttctgtggcctctagtcgatcctggtaattatcagatatcatatcatcaatatatcttgtcaatgaattttcatttcttccactaggttacacctagggaagggtgtgatagtaagtgtcacatttgtagaatgttaagaagtatgaatacaaaacggaaagaaaatcccagcaggaaagagaaaaaatatgttgatttatatatttaaaaaatgttttaaaaaattgttattatagaaattcatgaagtataataaagtacaagaagaaactaaaaataattcacactcccactattcagcactaaccagtaacatttagtgtataaatatttttagacttttttgctggcatacagagacatttatactttagatttctattttgccaaaaactaaatcctactttgcacgctgtttttccaaatgtaatggttgtggttctcacttcatatcaacatgcatagacgtgtatagctttcaagagtgactcttcttgcagaaagaatggataagtagtcactcgtgtactttggtgttgttggctcaacatgtcagacatgtgcctacctgagtaatctcccagtgtcacctgtgtacatgtggggaaataatcaggcagacatgatctacctctcacagatggtcacttcaaaaccaaataaaatgacaaatgtgaagctcactcaatctacttcccatgacttttatatttttaatttactaagtactatgcaattctgctttagaaagttcaactttaaggcacattttcattgattaatagttccttttccttaccaatacacacattccaaaataaagtctgagttcatttcttttgttgttttttttcccttagggaaattctaccccagggaaagcacttttagggggattccagggaycaaattcaggtcatttgagctatgtcctagctgttaaattattaggagaacttagagataaaaagtttaccataaatttaaaaggatataaatttaggctgtatctacacataaatcagcttgggaaaaaagacagttgaattcagtggaacaactagtgatgaactagttaccaactgagtgtgatttgctgcattttttaaagctgatttctgttggggactaaaacaagacacttttctttgtggtgggtttttctgcctttcaaacagaaaggtcttactaacacagtatgctttgccaagatatgtttaatctaaagacttgccaattcaagaatagaataatttgcctgaatccgacaacaggcaatgacaaattctttatttggtaaagcatagtaactgcagaacatgcattgcaggcactcacagaagaaagccacctctttctgctcagatcatgattctctggtaataacatactggaaagcaacttgaggaatacaagaacaaattcttgaaagtgcactgaattgtggtctaatggtcggaaagcatttgtacaactttaagaataagttcttttttctaacagatcagaattcctctacctcttctttttagacggatttacgtaaagcaaaagtagtatggcttgtcagttttcattttctgctaaaccgaatcactaacatttcaagacttttgtttctcttatttctaaagaatagatactattttatattatctgtaaagtttataaagaaatattaggaagaaataaataaaa

SEQ ID NO: 708104 - DNA, 1112 bp, Homo sapiens
ttctagcaggtttgcaggggttttcagtcataccagtcatcatgtgactagcaaacatycaatttctgtggaagtcactgagatgaaataggtttctaaatccacaccatcattcattaaagtgtcatttctccttggaaatttccagttcaagggaaaatgatgcatggtcatagggtagagaaagcaaaatcagataccagttgcccctccaaggagtcctgtaaatgactttcctgtgtttggcttatcaataagatttcaagttcatgagacaacaacagttttttgtttgtttgtttgtttgtttgtttgtttggtagggggtgagacccctcttgaatattaacagaacaataaatcctacaactcacacagagcacatgatttatctttgatcataaccaagaaatcacaaacacagagatttatttgcctcatgttatgaccctttgatcagagtcttagattggatggacagagacggccaggccccatgctccacacaaggaacagagtcaaactggatgtggctcttcagccatgaggacctgccatgcctctaagtggtatctgctatctcatgtattattgtcctgggctttatggtcctctcctcacccattcttttcttttaataatgccaaagaatggggcttagagacacaagatcagaggctgctcatttaaagatgactgaagaggggagagggattctataccaggagcaatgtataaattccatgttattaagatgatgccatttctgggatagaattttaagtctccgaaagggattagaaaaagataaaagttaggggaaaacatgaaggaataaataactcctttgaacacatataattaaaactaaattaataattttgcccctattatgtgctgggcactgattcaggaactgtagagacagtaacacatttatgatgagtaatacaccctcagagaaacttgtcttgttgggtagagagacttacaaacaatagataatatccaacaataatggctttaaatagcattttgagatatgctaatagaggatttaaatagcatttctagacaacagtagctatgctattaaagggcacctatgatta

SEQ ID NO: 708105 - DNA, 1112 bp, Homo sapiens
ttctagcaggtttgcaggggttttcagtcataccagtcatcatgtgactagcaaacattcaatttctgtggaagtcactgagatgaaataggtttctaaatccacaccatcattcattaaagtgtcatttctccttggaaatttccagttcaagggaaaatgatgcatggtcatagggtagagaaascaaaatcagataccagttgcccctccaaggagtcctgtaaatgactttcctgtgtttggcttatcaataagatttcaagttcatgagacaacaacagttttttgtttgtttgtttgtttgtttgtttgtttggtagggggtgagacccctcttgaatattaacagaacaataaatcctacaactcacacagagcacatgatttatctttgatcataaccaagaaatcacaaacacagagatttatttgcctcatgttatgaccctttgatcagagtcttagattggatggacagagacggccaggccccatgctccacacaaggaacagagtcaaactggatgtggctcttcagccatgaggacctgccatgcctctaagtggtatctgctatctcatgtattattgtcctgggctttatggtcctctcctcacccattcttttcttttaataatgccaaagaatggggcttagagacacaagatcagaggctgctcatttaaagatgactgaagaggggagagggattctataccaggagcaatgtataaattccatgttattaagatgatgccatttctgggatagaattttaagtctccgaaagggattagaaaaagataaaagttaggggaaaacatgaaggaataaataactcctttgaacacatataattaaaactaaattaataattttgcccctattatgtgctgggcactgattcaggaactgtagagacagtaacacatttatgatgagtaatacaccctcagagaaacttgtcttgttgggtagagagacttacaaacaatagataatatccaacaataatggctttaaatagcattttgagatatgctaatagaggatttaaatagcatttctagacaacagtagctatgctattaaagggcacctatgatta

SEQ ID NO: 708106 - DNA, 646 bp, Homo sapiens
ttcaggtctggtttttggaaaacaagtttcttgcgtagtcacagaattctatttttcaaagctgagagtggatacaaatggtataggttgagctggggagctgggtgttggtattgaagtctgtggccctggctttgttttcatcgacttgggtgagtacctgaggaggccagcatcggggaatggaacgattcaggagctcagctgctgaagctgcgaaaggcacaactctcagacctgcttcctggtagtgtgaatgcaagtctggtagatgtttcattcgggcaccagttgtcatcttttagaggtgcctttttagtattgccttctgtctctaagacagggaccaccaaggcgtctgggtgccaggtaggaaactcaccatcrgtcagtctgagtttgagaacctggaggcagaaatcaccaagacattagacccacagattgcctgcaaatccaccaaacccctgggccgaaaaatccgtcctgagtctctagcatatcagtgatcataaagaagcactctctgtttcagaagcttttgaatgctagtgggtctgtagtgaaaattacacatacactcgtatgtggtcgaggggaaatctgggcctgatgaaacgtttgaaggctaaatgtttcattcttt

SEQ ID NO: 708107 - DNA, 867 bp, Homo sapiens
gttttttaagagactgggtcttgctctgtttcccaagctggagggcagtggtatgatcatagctcactgcaaccttgacctcctgggctcaagtgaccctcccacgtcagccttctgagtagctgggactataggtgtgaaccaccacacctggctaatttttaacattttttgtagagatagggtcttgctatgttgtccaggctgatctcaaactcctagkctcaagcaatcctcccaccttggcctcccaaagtgctggcattactggcatgagctactgtgccaagcctgcaaatgatgtatgttaacagtaacaacttctcagactctttagcgagagataattttagctccctgccccattctaattcactggtttccaaacttgtcactgtgtcttcatgctgacattctaggcactcctcgtctcggctcccctatctttatttcatctttgggctagctttcctcccccagacagaagcagcctggatgctctgcctgtagctcttattaaacaggcttgaaatacctggtcccctcttaacctgctctgaaatatttcttcttacacacctctgtaaaagcattttacgatcccccatattaatccctgtttttttttttttttgtcagcgctgcataattgtaccatgagccacgatcctaagtcaagagacctttctctcaccagtgcagatgattgctccctccaggtgtgtaggagggaggatggcatggctttcatcaaaccgtgagctttttcagaacttccaacccaccataaagctcatctgaagaatgtttgcttttccctgtcaaatatttctctgatccaaagtctgttaacaatttaaacgtcaa

SEQ ID NO: 708108 - DNA, 867 bp, Homo sapiens
gttttttaagagactgggtcttgctctgtttcccaagctggagggcagtggtatgatcatagctcactgcaaccttgacctcctgggctcaagtgaccctcccacgtcagccttctgagtagctgggactataggtgtgaaccaccacacctggctaatttttaacattttttgtagagatagggtcttgctatgttgtccaggctgatctcaaactcctaggctcaagcaatcctcccaccttggcctcccaaagtgctggcattactggcatgagctactgtgccaagsctgcaaatgatgtatgttaacagtaacaacttctcagactctttagcgagagataattttagctccctgccccattctaattcactggtttccaaacttgtcactgtgtcttcatgctgacattctaggcactcctcgtctcggctcccctatctttatttcatctttgggctagctttcctcccccagacagaagcagcctggatgctctgcctgtagctcttattaaacaggcttgaaatacctggtcccctcttaacctgctctgaaatatttcttcttacacacctctgtaaaagcattttacgatcccccatattaatccctgtttttttttttttttgtcagcgctgcataattgtaccatgagccacgatcctaagtcaagagacctttctctcaccagtgcagatgattgctccctccaggtgtgtaggagggaggatggcatggctttcatcaaaccgtgagctttttcagaacttccaacccaccataaagctcatctgaagaatgtttgcttttccctgtcaaatatttctctgatccaaagtctgttaacaatttaaacgtcaa

SEQ ID NO: 708109 - DNA, 1091 bp, Homo sapiens
ctggcttaatgcaatccttccctttgtcttttccttacaaaatatgcagcatatatagtcacaagtcacttaacaacaaggctatgttctgagaaatgctttgttaggtgattttgtcattgtgcaaacatcaccatgtacttacgaaaacctagatgacatagtctgccatgtacctaggctatagtctattgctcctaggctacaaacctatacagcatattactgtattttacagtatttttactgtattttagtgtattttacagtattacagtaatattacatattactgtagtttcaatggtaagtatttttgttatctaaacatatctaaatatagagaaggtgcagtaaaaatacatactacaaacttgtgggaccacagtcgtacatgtggtccmtcactgaaaccttgttatgtggcacatgactacataaactccattttttaagatttaagatttttcatacaaaagtaagaaactacaacaatgtaattattgatataattaggtttaaacctattatcttgctatttgttttctgtttttttcatttatttgttgttccctttttcctccttttctactttctttcatattaattgaacatttggtatcattataatgtgtttcctttgttaacttgttagctgtatcttttttgttgtgaaggttgctctagggtttataataagtgatatccatcttcaagtgatattttgccacttcatgtatagtgtaagaaacttacaataatatatttccatttcttttctcatagcctttgtgctccttatgtcatcatttgttgtaatgtcagatctatgtttctcagctgatatcattttccttctgcctgaaagacatcctttagcatttcttgcagtaaagttctgctggtgatgaattctttcagattttttttctccccatctctttcaatatctttcagcctttttatgtctgctaaagcactttttttcctttcatttttgaaaggtattttcactggatatagatttcaggttgacagaggattttttttctttcaatatattaaagatgttgtttcaccatcttctcact

SEQ ID NO: 708110 - DNA, 611 bp, Homo sapiens
tgcactgtatttattccataaatatcagcacctcccgaatcaccagtgcccgttatgaagttataatcaggaatctggtcctgtgatgctcgccgccagcccctcccccgctagacaaacaagccaggtccctgaagtcaataaccacttccccaggccacctgtccccatgaagggacatctgcccatcccagttgccccacccaaagtgagggaccacaggaagggcaggaggtggctggmattccaggtggcccaggcctggatgtagcgagcccggagggagcacagtttctccaggccctctgtctccctcctgccccccaaccgtactacaacctggttggagccaccatcctctctccattgccactttgtgtgtgtgtgtgttgggggagggggggtgtgtgtaatttacattcagtgaaatgcatgcattacaattatgtagctcaatgaatttttacatgtgtatgcacacatgagaccacagatcaaggcaaagaacatttgtcactcccagaagttccctcatccttctgcccactgccatcgagatcacctctgtcttctatcaccagagcacagtcaacaacttctagaacttcaga

SEQ ID NO: 708111 - DNA, 611 bp, Homo sapiens
tgcactgtatttattccataaatatcagcacctcccgaatcaccagtgcccgttatgaagttataatcaggaatctggtcctgtgatgctcgccgccagcccctcccccgctagacaaacaagccaggtccctgaagtcaataaccacttccccaggccacctgtccccatgaagggacatctgcccatcccagttgccccacccaaagtgagggaccacaggaagggcaggaggtggctggaattccaggtggcccaggcctggatgtagcgagcccggagggagcacagtttctccaggccctctgtctccctcctgccccccaaccrtactacaacctggttggagccaccatcctctctccattgccactttgtgtgtgtgtgtgttgggggagggggggtgtgtgtaatttacattcagtgaaatgcatgcattacaattatgtagctcaatgaatttttacatgtgtatgcacacatgagaccacagatcaaggcaaagaacatttgtcactcccagaagttccctcatccttctgcccactgccatcgagatcacctctgtcttctatcaccagagcacagtcaacaacttctagaacttcaga

SEQ ID NO: 708112 - DNA, 597 bp, Homo sapiens
aaaaccattacaggggattataattgcaacctagaaccaaagctcagcaagtgactccctgcctctcccgccccacgggrcacccctcagtctatccttctggctatctaggggtacaggtcctgtttttttttcttctttttttcattctttctttttattaagagataaggtctcactctgtagcccaggctgtagcacagtggcactatcatatttcatgcagcctcaacctctcagtcttaagtgatcctcctgcctcagcctcttgagtagctgggaccataggtgtgcaccaccacgcccagcttttttttttttttttttttttttttgagacggagttagctctgttgcccaggctggagaacggtggtgcgacctcggctcacggcaacctccacctcccgggttcaagcgattctcctgccccagcctcctgagtagctggaactacaggcacctaccaccacgcccggccaaattttctatttttagtagagacgggttttcaccatgttggccaggctggtctcgaactcctgacctcaggtgatccgcccgcctcggcctcccaaagtgctgggattacagacg

SEQ ID NO: 708113 - DNA, 597 bp, Homo sapiens
aaaaccattacaggggattataattgcaacctagaaccaaagctcagcaagtgactccctgcctctcccgccccacggggcacccctcagtctatccttctggctatctaggggtacaggtcctgtttttttttcttctttttttcattctttctttttattaagagataaggtctcactctgtagcccaggctgtagcacagtggcactatcatatttcatgcagcctcaacctctcagtcttaagtgatcctcctgcctcagcctcttgagtagctgggaccataggtgtgcaccaccacgcccagctttttttttttttttttttttttttkgagacggagttagctctgttgcccaggctggagaacggtggtgcgacctcggctcacggcaacctccacctcccgggttcaagcgattctcctgccccagcctcctgagtagctggaactacaggcacctaccaccacgcccggccaaattttctatttttagtagagacgggttttcaccatgttggccaggctggtctcgaactcctgacctcaggtgatccgcccgcctcggcctcccaaagtgctgggattacagacg

SEQ ID NO: 708114 - DNA, 597 bp, Homo sapiens
aaaaccattacaggggattataattgcaacctagaaccaaagctcagcaagtgactccctgcctctcccgccccacggggcacccctcagtctatccttctggctatctaggggtacaggtcctgtttttttttcttctttttttcattctttctttttattaagagataaggtctcactctgtagcccaggctgtagcacagtggcactatcatatttcatgcagcctcaacctctcagtcttaagtgatcctcctgcctcagcctcttgagtagctgggaccataggtgtgcaccaccacgcccagcttttttttttttttttttttttttttgagacggagttagctctgttgcccaggctggagaacggtggtgcgacctcggctcacggcaacctccacctcccgggttcaagcgattctcctgccccagcctcctgagtagctggaactacaggcacctaccaccacgcccggccaawttttctatttttagtagagacgggttttcaccatgttggccaggctggtctcgaactcctgacctcaggtgatccgcccgcctcggcctcccaaagtgctgggattacagacg

SEQ ID NO: 708115 - DNA, 652 bp, Homo sapiens
tgcactccagcctgggtgacagagtgagactccatctcaaaaaaaaaaaaaaagtaatcccagtggaagggagactaaaatagctggcctatatattcctggcagtggctcctttgctcacgctcagtaaatatgccatgatgttcaaaggaggcctgggaagaagwgaaggctctggtgtcagaaacagtggattccaactctggcccttccgctctctccataggtgtcgagtcatttgaacttttcagagcctcggtattaacatattgaatagaaatattttaccctctttgtcttactagtctgataagaagataaaatgagtcaacatgagagaagtgttctgtgaatgtaggttatttatttattcacttatttatttattgagatagggtcactgcagactcaacacccgaggctcaagcgatcctcttacctcagcctcctgagtagctgggaacacaagggcatcgccagcctggctaatttttgtatttttggtagagatgggatttcaccatgttgcccaggctggtctcaaactcccaagctcaagctatcctcccacctcggcctcccaaagtgctgggattccaggcgggagccaccgtgaccagccaatgtgaaacattttcaaaatcaatttaaa

SEQ ID NO: 708116 - DNA, 652 bp, Homo sapiens
tgcactccagcctgggtgacagagtgagactccatctcaaaaaaaaaaaaaaagtaatcccagtggaagggagactaaaatagctggcctatatattcctggcagtggctcctttgctcacgctcagtaaatatgccatgatgttcaaaggaggcctgggaagaagagaaggctctggtgtcagaaacagtggattccaactctggcccttccgcyctctccataggtgtcgagtcatttgaacttttcagagcctcggtattaacatattgaatagaaatattttaccctctttgtcttactagtctgataagaagataaaatgagtcaacatgagagaagtgttctgtgaatgtaggttatttatttattcacttatttatttattgagatagggtcactgcagactcaacacccgaggctcaagcgatcctcttacctcagcctcctgagtagctgggaacacaagggcatcgccagcctggctaatttttgtatttttggtagagatgggatttcaccatgttgcccaggctggtctcaaactcccaagctcaagctatcctcccacctcggcctcccaaagtgctgggattccaggcgggagccaccgtgaccagccaatgtgaaacattttcaaaatcaatttaaa

SEQ ID NO: 708117 - DNA, 1116 bp, Homo sapiens
atcagaataacagtcaccttggagaaggtgagaacatggatgggaatcaaatgaggacaaatgggatgcatacaatctaattggtagcactgtcttgagaaaataacagaaaaaaacttgactctaggttgtgactgagtaaaacagtgtcctcatgcttcactcctcaagatacatctagagagtcaagaaagttagcaaaaaaagaccatttacaacacatggcctcatatacaagataaactcaatcatcttatccatgtttttcatccttaccatatgtgatattgggacatccaaacccactcctcttatctgagaccagatcccccaatttctgggaaagaaatgaccaggagcacaaagatacccagatggaaactggggaggggtagactgactgcttttctgacacagtggactttatacatcctcctccygcagaagactgaccagaacatacaaaaggaagcgctttcaaatttaactgatccttttacccaactatcaggactctgtcttgtttcccttttgctgtcagtaagatggccttaataatactgttaacgaagccaccctctatcactgtgcctagagaggaaacaattcctctatcactacctagaggggaacacaactctaatctctgtatcactttgattctatgatctgtgctgctccctcccctttgatacttctgaaacaggaatgttccttaaaactagtggctaaaaaaacacttgccagctgctagtacagttgttttaatcaaatcagcaatcatgggcattttgtgagctgtggtttttttaaatcaaggaaatacagtagcttttatcatgtcaattgccatgtcaattgccatgttaaaggctgggggaccaaagggaagaggatttttaaaaataactgctttattaaggaataactgacatacaaaaagctgtagatacttaatgtatgcaacttgatgtgtttggagaggtgtatacctgtaaaatcatcactactgtcagtgcaataaacctgtacataatcttcaaaggtttcctcctgcctcctttgtgtttttttcttggtgataagagcacttaagatgtactctcttagcaaaat

SEQ ID NO: 708118 - DNA, 1116 bp, Homo sapiens
atcagaataacagtcaccttggagaaggtgagaacatggatgggaatcaaatgaggacaaatgggatgcatacaatctaattggtagcactgtcttgagaaaataacagaaaaaaacttgactctaggttgtgactgagtaaaacagtgtcctcatgcttcactcctcaagatacatctagagagtcaagaaagttagcaaaaaaagaccatttacaacacatggcctcatatacaagataaactcaatcatcttatccatgtttttcatccttaccatatgtgatattgggacatccaaacccactcctcttatctgagaccagatcccccaatttctgggaaagaaatgaccaggagcacaaagatacccagatggaaactggggaggggtagactgactgcttttctgacacagtggactttatacatcctcctcccgcagaagactgaccagaacatacaaaaggaagcgctttcaaatttaactgatccttttacccaactatcargactctgtcttgtttcccttttgctgtcagtaagatggccttaataatactgttaacgaagccaccctctatcactgtgcctagagaggaaacaattcctctatcactacctagaggggaacacaactctaatctctgtatcactttgattctatgatctgtgctgctccctcccctttgatacttctgaaacaggaatgttccttaaaactagtggctaaaaaaacacttgccagctgctagtacagttgttttaatcaaatcagcaatcatgggcattttgtgagctgtggtttttttaaatcaaggaaatacagtagcttttatcatgtcaattgccatgtcaattgccatgttaaaggctgggggaccaaagggaagaggatttttaaaaataactgctttattaaggaataactgacatacaaaaagctgtagatacttaatgtatgcaacttgatgtgtttggagaggtgtatacctgtaaaatcatcactactgtcagtgcaataaacctgtacataatcttcaaaggtttcctcctgcctcctttgtgtttttttcttggtgataagagcacttaagatgtactctcttagcaaaat

SEQ ID NO: 708119 - DNA, 1116 bp, Homo sapiens
atcagaataacagtcaccttggagaaggtgagaacatggatgggaatcaaatgaggacaaatgggatgcatacaatctaattggtagcactgtcttgagaaaataacagaaaaaaacttgactctaggttgtgactgagtaaaacagtgtcctcatgcttcactcctcaagatacatctagagagtcaagaaagttagcaaaaaaagaccatttacaacacatggcctcatatacaagataaactcaatcatcttatccatgtttttcatccttaccatatgtgatattgggacatccaaacccactcctcttatctgagaccagatcccccaatttctgggaaagaaatgaccaggagcacaaagatacccagatggaaactggggaggggtagactgactgcttttctgacacagtggactttatacatcctcctcccgcagaagactgaccagaacatacaaaaggaagcgctttcaaatttaactgatccttttacccaactatcaggactctgtcttgtttcccttttgctgtcagtaagatggccttaataatactgttaacgaagccaccctctatcactgtgcctagagaggaaacaattcctctatcactacctagaggggaacacaactctaatctctgtatcactttgattctatgatctgtgctgctccctcccctttgatacttctgaaacaggaatgttccttaaaactagtggctaaaaaaacacttgccagctgctagtacagttgttttaatcaaatcagcaatcatgggcattttgtgagctgtggtttttttaaatcaaggaaatacagtagcttttatcatgtcaattgccatgtcaattgccatgttaaaggctgggggaccaaagggaagaggatttttaaaaataactgctttattaaggaataactgacatayaaaaagctgtagatacttaatgtatgcaacttgatgtgtttggagaggtgtatacctgtaaaatcatcactactgtcagtgcaataaacctgtacataatcttcaaaggtttcctcctgcctcctttgtgtttttttcttggtgataagagcacttaagatgtactctcttagcaaaat

SEQ ID NO: 708120 - DNA, 1519 bp, Homo sapiens
taacaaatgtaacattaactgagatataaagttgccccaacttttgctgagggaatagatattcaagaaggttttaagtctttttttcttataagtttattggtgtgaaaattttaccttaattgctatttataatatacaacaccaatwgttcttaccttttttttgtgtctcaggctataagatatctattatagtcaaattactgaaaatgttggttcatacaaaaatgcgtatatcttaaaagtaagttttctttgtcattctgtttacagatttgaggagatatttgaaataaaagagaaatttgatgtgacctgttttgacccaggtgcaaggaagccttcctttaatgtggtataaccaattgacatgaagcaaatgataggataattattagtgccaataaagctaacagttaatttttttggtatgcaaacaaaaatactgtgtttcatattgcttatcaattataaattcagattatttttaagataaccttttctctcctgtaacttgattgttttgttcaccttctaggcccttaggaggaagtcataacttcattttaatgtattgagactcctttctttaaaaagctaagcatcagaatccgtggtggcatgttaggtagcatgtcatgtcttgctactcattacaaacagtatcctaaagggagttcaaccaaatccatggaagagctgaatgttaattgtaatattgctctgcagctcatttggttcaaatagattataaattatgcatgaagcaagcaaaacatgagcaatatttctgttaactgaagtcatgaccttcttttagctaatcttttaatgtgaagctaataataaaaagtccagctattaaccaacagactagataagcaatccagtgtatggtacataaaagttctcctatcacatttttaaatattttgtttactattaatactgttttttatagtcagaagactgtggatatttttataaaacaataaacgttaattttagaataaaagtagaagataaacataatagcaaatctttcattcgtaaatatatattacatagttaagtatatacacacattattcatattcttttctttttaaacataattttatattctcaacaataaatttgctgaaaatttcaaaataatttagcatatccgccattgcatttattataaaaataagattaatccttgcaccataaaacattaaagaatattctaaaaactaacttcaattatagacttttaaatgcgcaaataaaatacatgtttgaactacatttatatatgtctgaaaaccagatgactaacctcctgcaatcattcattaaattagatttcttgagcatgaactgtgtaccaaacaatgtattaaaggctgagagtacatggttagaagagacaggcatgcccttgatttatggagcttacaatctagtatacatgtatatgtcacgtgataaaagatacagaaataatgcaagttttttaaaattcaacttta

SEQ ID NO: 708121 - DNA, 1519 bp, Homo sapiens
taacaaatgtaacattaactgagatataaagttgccccaacttttgctgagggaatagatattcaagaaggttttaagtctttttttcttataagtttattggtgtgaaaattttaccttaattgctatttataatatacaacaccaatagttcttaccttttttttgtgtctcaggctataagatatctattatagtcaaattactgaaaatgttggttcatacaaaaatgcstatatcttaaaagtaagttttctttgtcattctgtttacagatttgaggagatatttgaaataaaagagaaatttgatgtgacctgttttgacccaggtgcaaggaagccttcctttaatgtggtataaccaattgacatgaagcaaatgataggataattattagtgccaataaagctaacagttaatttttttggtatgcaaacaaaaatactgtgtttcatattgcttatcaattataaattcagattatttttaagataaccttttctctcctgtaacttgattgttttgttcaccttctaggcccttaggaggaagtcataacttcattttaatgtattgagactcctttctttaaaaagctaagcatcagaatccgtggtggcatgttaggtagcatgtcatgtcttgctactcattacaaacagtatcctaaagggagttcaaccaaatccatggaagagctgaatgttaattgtaatattgctctgcagctcatttggttcaaatagattataaattatgcatgaagcaagcaaaacatgagcaatatttctgttaactgaagtcatgaccttcttttagctaatcttttaatgtgaagctaataataaaaagtccagctattaaccaacagactagataagcaatccagtgtatggtacataaaagttctcctatcacatttttaaatattttgtttactattaatactgttttttatagtcagaagactgtggatatttttataaaacaataaacgttaattttagaataaaagtagaagataaacataatagcaaatctttcattcgtaaatatatattacatagttaagtatatacacacattattcatattcttttctttttaaacataattttatattctcaacaataaatttgctgaaaatttcaaaataatttagcatatccgccattgcatttattataaaaataagattaatccttgcaccataaaacattaaagaatattctaaaaactaacttcaattatagacttttaaatgcgcaaataaaatacatgtttgaactacatttatatatgtctgaaaaccagatgactaacctcctgcaatcattcattaaattagatttcttgagcatgaactgtgtaccaaacaatgtattaaaggctgagagtacatggttagaagagacaggcatgcccttgatttatggagcttacaatctagtatacatgtatatgtcacgtgataaaagatacagaaataatgcaagttttttaaaattcaacttta

SEQ ID NO: 708122 - DNA, 1387 bp, Homo sapiens
acaggcgcccgccaccacgcccggctaattttttttttttgtatttttagtagagacggggtttcactgtgttagccaggatggtttcgatctcctgacctcgtgatccgcccacctcggcctcccaaagtgctgggattacaggcatgagctaccgcacccggccagaagaacagtcttaacaagaataagtggaatcagggagcatgcctctaacatttaacagtacattcttccttttacctctgttgttgaccatgtgccttcttgctccaggggttttcagttttcttttattttgttgtatcagatacattttccctctagggtagaaagcagcatcttacagtggaaaggaaccctggctttgggtcttactggctctgtggtcttaaacagtcatgtaacccctttcaactgtgtgcttttcctaattccccatttgtaaaatattggtggtgataaccatcttgcagggtttttgtaaaggttaaatgagttaatatacgtaaaacacattggttggcacatagtatgtaattgtagcttgttttttattagtaggagtcataataacaatacgcttgatttttttatgataaaatacactaatataacatttagcattttagccatctgtaagggtaaatatagtggcatcaagtacattcacttgattgttgtgcagccgtcactattatctatctctagaactttttcatcttctcaaactaaaattccaaacccattaaacaataactcaccttccccctccttagcccctggcaaccacaattctactttctgtttctatgcatttgactactctatgtacttcatataagtggaatcatacagtatttgtccttttgtgtctggctcatttcatgtagcataatgtcctcaaggttcattcatgttgtagcatgtgccagaatttccttcctttttaaggctaaataatattccatttatgtatctaccacattttatytatccattcatctgttgatggatacttggcttgctaataatatgattatttttgggtttttttgacatcttatttaattaattaatttatttagacagcgtcttgctctgttgcccaggctggagtgcaatggtgcgatttccgctcactgtaatctccgcctcctgggttcaagtgattctcctgcctcagccttccgagtagctgggattacaggtgcatgctaccatgcctgactaatttttgtatttttttagtagagatggggtttcaccatgttggccaggctgatctcgaactcttgatcacctgtttcggcctccctaagtgctaggattacagatgtgagccactgcgtccggccagattatttttaatagtaatgaattgatt

SEQ ID NO: 708123 - DNA, 967 bp, Homo sapiens
tgactggcccagtttgcatcatgcacccacccgctgaccaggggagtgcagagcacagtgcatctgttggaggcgggaacatggtttctgttactatgagcgagaagtaaggatgctgggctaacgtgggaaatcctcgctgagtggatttctctgcctcgataatgacatggacactgctgatgagctagctggtgggtgtggctgggtcaccaggctcatatgtggcagccaggcagctccagataggagggggtccccartgtctgggagctgtggactcccaattcttgtcttgaggcccactggcacagtcctcactttggagaaattggggcactgtttatgccagttcaggcttaggccctggctcctccctggtctgatcatgaccttgcttgaggactatgtgtggacactgctgattgccgacctgtgtcaggatagtctgggttatgttgcaatagcgacctcacaaaaatagcagtggattaactaaacacaagtctatttcccacccttgctctatgcctatcacaggtttggcaagagggctctgttcatcgtggaggactcttggcatttgcttttacagtcatcacatcaatggaaaagaacttggggaacaatgtaccaactgtctttttttaaacttttatttcagaatcagagggtacatgtgcaggttgttacaaaagtatattttgaggctgaggtttggaggacaaatgaatccatcactcaagaggagcatagtacacaataggcagtttttaatcgactcttgacccccctccctccctctcttctcttgtattccccagtgtctgttgttcccatttttatgaccatgtgtacccaatgtttagctctcatttaacaagtgagaacatgcagtatatagttttctgttcctatgttaagtcacttaggataatggtttctagctgcatccatattgctgcaa

SEQ ID NO: 708124 - DNA, 967 bp, Homo sapiens
tgactggcccagtttgcatcatgcacccacccgctgaccaggggagtgcagagcacagtgcatctgttggaggcgggaacatggtttctgttactatgagcgagaagtaaggatgctgggctaacgtgggaaatcctcgctgagtggatttctctgcctcgataatgacatggacactgctgatgagctagctggtgggtgtggctgggtcaccaggctcatatgtggcagccaggcagctccagataggagggggtccccagtgtctgggagctgtggactcccaattcttgtcttgaggcccactggcacagtcctcactttggagaaattggggcactgtttatgccagttcaggcttaggccctggctcctccctggtctgatcatgaccttgcttgaggactatgtgtggacactgctgattgccgacctgtgtcaggatagtctgggttatgttgcaatagcgacctcacaaaaatagcagtggattaactaaacacaagtctatttcccacccttgctctatgcctatcacaggtttggcaagagggctctgttcatcgtggaggactcttggcatttgcttttacagtcatcacatcaatggaaaagaacttggggaacaatgtaccaactgtctttttttaaacttttatttcagaatcagagggtacatgtgcaggttgttacaaaagtatattttgaggctgaggtttggaggasaaatgaatccatcactcaagaggagcatagtacacaataggcagtttttaatcgactcttgacccccctccctccctctcttctcttgtattccccagtgtctgttgttcccatttttatgaccatgtgtacccaatgtttagctctcatttaacaagtgagaacatgcagtatatagttttctgttcctatgttaagtcacttaggataatggtttctagctgcatccatattgctgcaa

SEQ ID NO: 708125 - DNA, 1839 bp, Homo sapiens
tattctcaaatcatatagccagcatttctactgctgaacaaaatgctttgaaatatcaataatacatatatctgacttttatctagaatacatatgtctgatcagtaaaaagacaaacaacccaataagataaatgtgcagatgacttgagagacacttcacaaatgaaggtatacaaatggccaatgagcacatgaaaagttgtgcatcattagtcatcagtgaaagagaaaccaaaaccaggaggttccactttacagcctctagaatggctacagtgaaaatgactgacatctcaaatgttgacaaggatgtacaacaactggaagcctccattttggctgcggagagtgtaaaattgcacaactttggagcactgtttggcagattcttctcaagttaaatatatacctatccaataaactgacaatctcagtcctagctatttaaatccctgccccaacaaaaacttatgtccacaacaagacttgttttaaaaatgtttttagcagctttattcataatagttcgaaactggaaagaactcaaatgaccttcaacaggcgaatggataatatattcacacattgatatattactgaacaataaaaaagaataaactgctgattcacataaaaatatggataagcctgaaaaacattcttaggttaaaaaaagccagttacaaaggaatatatactgtatgatttcatttacatgaagtccaaacaaagatcaaactagtgtatagtgatagaaatcagaatagtggttggccatcatggatggaggagactgactggaagtggggatgaatgaaaattctagggtgatggaaatgctccatatcttgtttggggttcagttacatgaatgtatatatttgtcaaaactctaaattgtacacttaagacctgtgcatttaactatacgttttcatgcaatttttttttaaattccaagaaaaaggatctgattgacccaatttgagccaggcatcctactgccttgcataatcagtttttgccaaggaatccaaacaagcagtatagacgtgacctagagaaggggcaccagaatgggcttggctcccacccacaaagttccaatatctcctacatgatgtcagttttggggaccaaaaccatatcatctttttctattatttggatgtgatctttttatttatgtatgtttgttgttggttttatttttttagagacagggtctcgctttgtcatccaggctggagtgtagtggcagatcatagctcactgcagcctcaaactcccgggctcaagtgatcttcctgcctcagcctcctgagtagtgtgtcaccatgcctggctaattttttttttttttttttttttagtgttttatagagacaagatcttgctatgttgtccaggctggtctccaattcctggcctcaagcaatcctcccatctcaggctcccaaggtacagggattacgggagtgagccaccacaccagaactgatctttctaacacagggaaattgtattctttagaagtggaggaatatttcctagtaatttgatcaagtaaaaataattataataaagaaggtaaaatcaagccctaattccccatgtaggggaataatatcattttggtaagattcttccagacaktatgattaggatgttacataaatcaaactgtgctatatacagtatgcagagaaggaaattccttagcttgtctaaagtctgatagtgtgaagaatttgctgacctgctctccatgcctgtctgagcacgagtgaagtgaatcagagagagattgcaagatggagaaaggaggtacagttgg

SEQ ID NO: 708126 - DNA, 2167 bp, Homo sapiens
caaccagttcactgagaaaaactgctgtatttttagtttgcttaatttagtggtgttgaatatttcctctatgaccaattttggcttacgaatatgatttctttgaatgcaaagttgggaggagatgagcactgtgtgctcctatgaggagttccatctggctcaaacataaacactattaacatcactttgctcwagacatgtgattctctttcataatgcttcttgcattaactgcaatataaaagttacaatccttattatttttgaaaaactcaatttgtataggactcttgataatattttaatatgtatacattttataattttattgatattttttcttcttttatacttttttttgtttatttatatagtttgttttcacattaaatgggagaaatactgacattgttcaattcacacccagggaaattctgtgtgaatgatatcatattatatttcttttaatgctctaaacaatgttgtgaggtaagtgttatctctgatttgcatatgaagaaacatattccgagattaaaaaattgcccagtttcacacaaggaataaattggagcacaggagttctatatagatagacctgtatgacttcacagagtgaaatggacagataaacaattcactttccaggagaaatcacaggacaatggatatcagaagaaatgatgggaccagggtaatattggatgttttgtatataaaaaactaatgtgggcaacaaaaaagcatataaagtcactgaagcaaaatatatattgtgaaatctaaaagaaaatatgctattggtaggccatggctacattataaaaaacatttcatttcacataaagtatgaatactacactatgactatgagttaatattaaaaaattgaccacataggaaataggagaaaaaagtaacaacactgtggaaagcaaagaaaatgactgcaagatgaagctatcaccaccatctcgtggccacatacggacctcctcagaagcttagatgaataaagggaagagactggagttattaaaatttgtaaactcagagtaaaagccttcctgagctgaggctagacctctgagggagagaaatgttccaactgctgctgttacctctgaagaggcactttctggggctctgaaaaaattggtaaactgaaacaattactgctcctagggcaaggggatgttcttgggagaatatcagcaaggacagcaaacaaacaggaaaaggagatctattcttccattctcttgcctatgtttctctagtacctcccaatagcagtacgtagcaggatcccacttgaaggaacttggaaaacgtagcttgctgatccccatcacggcatcatagcaaatttatttcagagaaatgtggctaaagatcaagattattagtaaatcaatttttttacctaatttttaatctgtattgatttcttataacataaatatctgtggttacagagacctcagtattttctttttcttctgtagcagcatttcaatcttttttgaagttctacctctctttcactgctagttcacaccatgtgagagcaatggacctaatcatcatgggcagtggtcataatatgtctcaacctgcccaaaataaagatgctaccccattaaccatatgttttattttgtaatacgatcatgatccaacctagtctaatgagaaacttaactagaaattttgttggaattattgaggaaaacagtgttcattttctgaaaaagtagcttagctagtaagatataagctcagtgctactagtggccatcttgatgtggaacaatactgagaatatttcttcaggtaatcctacaagaaatgtgtgcaaaacagaaaagaggaagttacaatgagaaatttcttacgtactatattcagtagagcctcagggtagctctaaatctagatacttaataagaatactactgataataaataatactcatatagcaaatactatgtgctaagcattctttcatgtactttataagattaatatatctaatacaaggactgtatgagatagatattattgtccagttttattatgtcctgcaaataaaatgccctgacaaattatattctctcaatcatctttcctttgtttgcaatcaacattttatatgtattc

SEQ ID NO: 708127 - DNA, 2052 bp, Homo sapiens
gattgcttaaaatttgaaaatggaagtgaactcatttggacagactcagagttaacataatctgaagggaggggagctctgacccaaatgatatctttcaggttaacagaagaaaaaagaagcatagtttatctccaaggagaacgggcagtttgcttcttcagctagaatatattcccagtgtcctcgggctttgcagcagaatcacatcaccgagcatgaagacttgccttgtgaagctgccccgtccattttttctgcctccaaaatcatccttcgaaaaacatcaacagcagtctgattttctttagcagaagattccaaaaaagctgcattccaagattctgccaaagctttcccttcttcataactgatcaccctttccatatgcaggtctttcttatttccaaccaacataataggtatttgtactttccccaccatatccaacaatttgccatggataactttaatcacttcaaaacttttgattgatgtaacagaatacacaagaatatagccattaatatctatggagtatgtctgaggaaagatagaatattcatcttgcccggctgtgtctcacaagttaaagatgatattcttgtccatttactgtgatcaactttgtaaaagtgttttctatggttggatcgtaggagtccacaaattggccttcaacaaattgaatcgtcaatgaggatttccccacagaccggtagcccaggatcgcgatcttccgggactttgactgcggcatcttggcggcctcctcagccccggcccaaccacatcaaccgcggcggcggcggctcctgctgctgtgatcggcggcggccgcgccgggagagagcggcatacagagcaggggcggcggcgggcgcggctgcctctcgctcgctagctcgtgcgctcccaaccgcccggaaccgaccgcgcggcggcgcccctcccccccacaacacgcccacgtgaccggccggcgtcagcaccgcccctcttcgcgccgtggcccgccgcctccgccccccgaaatacgcggggggtgcgtcggggcgacgttttactttaaaggcaaaaaaaggggacgccgcgatgcccccagaaaagtcacgactgaaactcgctgcgtcatgacccggtttactctttcagaagaaaaacaactgcaatattctcaaaatgtccactggtagccatttccctacatcaataaaaaaactttagaatatactttatttagctactaacctgtaaaaaataaagcaccataaattcctgtgtatgtgtaaaaacaaagattgtgaagtaacttctaaagattatctaattagttcaagatttttcacatcattctacaaaaacctgaaactctctaggggattcatagaatattctccatccagaattttgtcataagagttttatgaaattactgaactattacttgaatctagatcatccttaaaaccagagatatctacatttcccaaatctcttgcaaagcatttgcataccatgttattttcattatttcaaaacattccttccccttctattctatcaacatctacaagatatgctgaattttacttagaagccatttagctatcattcatacacacacactttccaaaatgtaacaccttcaaatatacataataaaagactaaacttgtatcttttacagaaatctcaaaattaaaatttaactgacttcaactgggcaaaaccacaccatctcagttactataggttcatactaagtcttgatagctgatagggtaaattattcttccctgcttttcttcttaaaatgccctgctgttttcaaccacttactcttctacataaatatcatayaatcttatcaaattacatgaaaatcttattggtctttaactcattgcctcaagagatcctcctaccttggcctcccaaagtgctggcattacaggcatgagccactgcgcccttgaaatcttacgaggatttttattgaacatgcgctgaatttacaaatcaacttgaaaagaactgaaatcttcacaa

SEQ ID NO: 708128 - DNA, 2052 bp, Homo sapiens
gattgcttaaaatttgaaaatggaagtgaactcatttggacagactcagagttaacataatctgaagggaggggagctctgacccaaatgatatctttcaggttaacagaagaaaaaagaagcatagtttatctccaaggagaacgggcagtttgcttcttcagctagaatatattcccagtgtcctcgggctttgcagcagaatcacatcaccgagcatgaagacttgccttgtgaagctgccccgtccattttttctgcctccaaaatcatccttcgaaaaacatcaacagcagtctgattttctttagcagaagattccaaaaaagctgcattccaagattctgccaaagctttcccttcttcataactgatcaccctttccatatgcaggtctttcttatttccaaccaacataataggtatttgtactttccccaccatatccaacaatttgccatggataactttaatcacttcaaaacttttgattgatgtaacagaatacacaagaatatagccattaatatctatggagtatgtctgaggaaagatagaatattcatcttgcccggctgtgtctcacaagttaaagatgatattcttgtccatttactgtgatcaactttgtaaaagtgttttctatggttggatcgtaggagtccacaaattggccttcaacaaattgaatcgtcaatgaggatttccccacagaccggtagcccaggatcgcgatcttccgggactttgactgcggcatcttggcggcctcctcagccccggcccaaccacatcaaccgcggcggcggcggctcctgctgctgtgatcggcggcggccgcgccgggagagagcggcatacagagcaggggcggcggcgggcgcggctgcctctcgctcgctagctcgtgcgctcccaaccgcccggaaccgaccgcgcggcggcgcccctcccccccacaacacgcccacgtgaccggccggcgtcagcaccgcccctcttcgcgccgtggcccgccgcctccgccccccgaaatacgcggggggtgcgtcggggcgacgttttactttaaaggcaaaaaaaggggacgccgcgatgcccccagaaaagtcacgactgaaactcgctgcgtcatgacccggtttactctttcagaagaaaaacaactgcaatattctcaaaatgtccactggtagccatttccctacatcaataaaaaaactttagaatatactttatttagctactaacctgtaaaaaataaagcaccataaattcctgtgtatgtgtaaaaacaaagattgtgaagtaacttctaaagattatctaattagttcaagatttttcacatcattctacaaaaacctgaaactctctaggggattcatagaatattctccatccagaattttgtcataagagttttatgaaattactgaactattacttgaatctagatcatccttaaaaccagagatatctacatttcccaaatctcttgcaaagcatttgcataccatgttattttcattatttcaaaacattccttccccttctattctatcaacatctacaagatatgctgaattttacttagaagccatttagctatcattcatacacacacactttccaaaatgtaacaccttcaaatatacataataaaagactaaacttgtatcttttacagaaatctcaaaattaaaatttaactgacttcaactgggcaaaaccacaccatctcagttactataggttcatactaagtcttgatagctgatagggtaaattattcttccctgcttttcttcttaaaatgccctgctgttttcaaccacttactcttctacataaatatcatacaatcttatcaaattacatgaaaatcttattggtctttaactcattgcctcaagagatcctcctaccttggcctcccaaagtgctggcattacaggcatgagccactgcgcccttgaaatcttacgaggatttttatkgaacatgcgctgaatttacaaatcaacttgaaaagaactgaaatcttcacaa

SEQ ID NO: 708129 - DNA, 2052 bp, Homo sapiens
gattgcttaaaatttgaaaatggaagtgaactcatttggacagactcagagttaacataatctgaagggaggggagctctgacccaaatgatatctttcaggttaacagaagaaaaaagaagcatagtttatctccaaggagaacgggcagtttgcttcttcagctagaatatattcccagtgtcctcgggctttgcagcagaatcacatcaccgagcatgaagacttgccttgtgaagctgccccgtccattttttctgcctccaaaatcatccttcgaaaaacatcaacagcagtctgattttctttagcagaagattccaaaaaagctgcattccaagattctgccaaagctttcccttcttcataactgatcaccctttccatatgcaggtctttcttatttccaaccaacataataggtatttgtactttccccaccatatccaacaatttgccatggataactttaatcacttcaaaacttttgattgatgtaacagaatacacaagaatatagccattaatatctatggagtatgtctgaggaaagatagaatattcatcttgcccggctgtgtctcacaagttaaagatgatattcttgtccatttactgtgatcaactttgtaaaagtgttttctatggttggatcgtaggagtccacaaattggccttcaacaaattgaatcgtcaatgaggatttccccacagaccggtagcccaggatcgcgatcttccgggactttgactgcggcatcttggcggcctcctcagccccggcccaaccacatcaaccgcggcggcggcggctcctgctgctgtgatcggcggcggccgcgccgggagagagcggcatacagagcaggggcggcggcgggcgcggctgcctctcgctcgctagctcgtgcgctcccaaccgcccggaaccgaccgcgcggcggcgcccctcccccccacaacacgcccacgtgaccggccggcgtcagcaccgcccctcttcgcgccgtggcccgccgcctccgccccccgaaatacgcggggggtgcgtcggggcgacgttttactttaaaggcaaaaaaaggggacgccgcgatgcccccagaaaagtcacgactgaaactcgctgcgtcatgacccggtttactctttcagaagaaaaacaactgcaatattctcaaaatgtccactggtagccatttccctacatcaataaaaaaactttagaatatactttatttagctactaacctgtaaaaaataaagcaccataaattcctgtgtatgtgtaaaaacaaagattgtgaagtaacttctaaagattatctaattagttcaagatttttcacatcattctacaaaaacctgaaactctctaggggattcatagaatattctccatccagaattttgtcataagagttttatgaaattactgaactattacttgaatctagatcatccttaaaaccagagatatctacatttcccaaatctcttgcaaagcatttgcataccatgttattttcattatttcaaaacattccttccccttctattctatcaacatctacaagatatgctgaattttacttagaagccatttagctatcattcatacacacacactttccaaaatgtaacaccttcaaatatacataataaaagactaaacttgtatcttttacagaaatctcaaaattaaaatttaactgacttcaactgggcaaaaccacaccatctcagttactataggttcatactaagtcttgatagctgatagggtaaattattcttccctgcttttcttcttaaaatgccctgctgttttcaaccacttactcttctacataaatatcatacaatcttatcaaattacatgaaaatcttattggtctttaactcattgcctcaagagatcctcctaccttggcctcccaaagtgctggcattacaggcatgagccactgcgcccttgaaatcttacgaggatttttattgaacatgcrctgaatttacaaatcaacttgaaaagaactgaaatcttcacaa

SEQ ID NO: 708130 - DNA, 762 bp, Homo sapiens
cgaagggataagagggagatgtaatgttaatggatgattttgtttgttttttaataagagaaatatgggactgtctttataggctagtaagaataatccattatgagaggtaatcactgaagattaagaaggaaaaacaaaacagggtgcagaaaccaaggaaaagttcaatcaccacagataaccttataagcctagcccagacttctcttgcaaattgcatttctttacatctaaccactttccaacttgttacctctcaggaactcaagctcaatatgatcaagatttctcccaaggttacttgttttaataaataatcttattgttcacccaactgtcaatgatttgcaatgtacctgtgctctctctttacctaccaatcactacatcttgcaaactattttcygaccattctcaaatctgtccacttctttttattcctaccgcttcctctctagtcaagccaccatcatctcctctccaaaataaggcaacagcctcttaccgcttctctgcactagcttcattctaatccactctccaacgcacagctaaactcacttctgatgaacagaatttggtagaagtgatgccacatgacttctgagtctaggtcacaaaaaggctggcttccacctggaactctctttcttgcctttcctgctctgaggaaatgagctgccactttgtgagaacattcaggcagcccgtggagacacccaagtgaagaggaactcaacttgccagccatatgaatga

SEQ ID NO: 708131 - DNA, 762 bp, Homo sapiens
cgaagggataagagggagatgtaatgttaatggatgattttgtttgttttttaataagagaaatatgggactgtctttataggctagtaagaataatccattatgagaggtaatcactgaagattaagaaggaaaaacaaaacagggtgcagaaaccaaggaaaagttcaatcaccacagataaccttataagcctagcccagacttctcttgcaaattgcatttctttacatctaaccactttccaacttgttacctctcaggaactcaagctcaatatgatcaagatttctcccaaggttacttgttttaataaataatcttattgttcacccaactgtcaatgatttgcaatgtacctgtgctctctctttacctaccaatcactacatcttgcaaactattttctgaccattctcaaatctgtccacttctttttattcctaccrcttcctctctagtcaagccaccatcatctcctctccaaaataaggcaacagcctcttaccgcttctctgcactagcttcattctaatccactctccaacgcacagctaaactcacttctgatgaacagaatttggtagaagtgatgccacatgacttctgagtctaggtcacaaaaaggctggcttccacctggaactctctttcttgcctttcctgctctgaggaaatgagctgccactttgtgagaacattcaggcagcccgtggagacacccaagtgaagaggaactcaacttgccagccatatgaatga

SEQ ID NO: 708132 - DNA, 762 bp, Homo sapiens
cgaagggataagagggagatgtaatgttaatggatgattttgtttgttttttaataagagaaatatgggactgtctttataggctagtaagaataatccattatgagaggtaatcactgaagattaagaaggaaaaacaaaacagggtgcagaaaccaaggaaaagttcaatcaccacagataaccttataagcctagcccagacttctcttgcaaattgcatttctttacatctaaccactttccaacttgttacctctcaggaactcaagctcaatatgatcaagatttctcccaaggttacttgttttaataaataatcttattgttcacccaactgtcaatgatttgcaatgtacctgtgctctctctttacctaccaatcactacatcttgcaaactattttctgaccattctcaaatctgtccacttctttttattcctaccgcttcctctctagtcaagccaccatcatctccyctccaaaataaggcaacagcctcttaccgcttctctgcactagcttcattctaatccactctccaacgcacagctaaactcacttctgatgaacagaatttggtagaagtgatgccacatgacttctgagtctaggtcacaaaaaggctggcttccacctggaactctctttcttgcctttcctgctctgaggaaatgagctgccactttgtgagaacattcaggcagcccgtggagacacccaagtgaagaggaactcaacttgccagccatatgaatga

SEQ ID NO: 708133 - DNA, 3594 bp, Homo sapiens
tttcgatttttattttagattcagagggtagatgtgcaggtttgttacatgggcatatcatcacccaagtagtctcctgtagtaggcagagtacccaacagttagtttttcaacccttgctctcctccctccactcaaaaagtcttttttttttttttttttttgagacagagtattgctctgtcacccagtctgcactgcagtggtgcaatctcggctcactgcaacctctgcctcctgcgttcaagcaattttcctgcctcagcctcccaagtagctgggactacaggcacccgacatcatgcctggctaagttttgtatttttagtagaggcagggtttcaccacgttggccaggctggtctcaaactcctgacctcaaatgatccacccacctcggcctcccaaagtgctggaattataggcatgagccaccctgcccagcctaaaaaattcgtaataattcaataattttaaaagaatgttcacataatcctatcattttgtaaatttacacaactcttgaaaagaattaaaaggtcacgctgaatgtggactttgctttcaagggggtcactccggctgagcactgaaattctgctggcggtaagatgaggtactgggtaagcgtcttcatttctttacaaggactcaggcctagcctcatccccctctggcttttgttgagcaagcagacccttctaggaaatgctcccatgctgatctctctttctccttttatttaactataaaataggttagggaaaagttgcttgtgttttcatattctctctccatttttgtcttaaaaacacatacactatgacagaaactatgaattcagccctcatagctgaacataaagagaatgaaaaaggctaaacaggcctctgtgaacaaagcctctgaaggactgattttaatggcacagttttggcatggcttgctaatgaggagcacacctccaggacttccaagaacatgcacaattcctggctgcgtcctcaaacaagtggggctatagcctsagaatctttcatcatcagcgtggtggcctcctattttgttgttgtccatgatgttatttatttttatttttaaacctaattctagacttcaatcccagcagataactgttttgtgtaagcagtaaataacagagttgacttctccatggcaccaaactaaacgtctctgcaaagtaaggtagcccctcaactgtgtctggcattccttcctgtggtgaccacctctatatgtctgtgaagttggagaagcagagcacgggaggggcacataaatataaaactggcttaggaacttacatgatgctataacattaccaagattttaccagttagtataaatctagagtcttttatgaccataggcaacttccatttttgaaaatagtatgaaatttttatagtataaaagcttataaattttctatcatctgtgtttaccttccagaaatattattaatttaaactatctgctggtattagtaaatgtttcagtgtagaactaagaataaggagttcttctctgagaatgaaatctctgtattcaattaaaagttgggttttttgagaggtattgtctttgttttctgcctgtattctccttagcatagttttatgatataacaatgctaaccttcaatcatatattggaaaacatatttacacatatatgtgaattaacccaactagtaacattttaatctggcatttggccaagataaagtaaggatctgaatttctgctcccacttgtcatataataaaaaataggtatttgctctttgtccctggttcctagcacatagttcctaaaactactggaatctagttcagatatttgcaaagatttatatttcacttttatatagacttatacatttttaccacaagtggtagcctttttgcttatattaaaactagcagtgggctgggtgtggtggctcatgcctgtaattccagcactttgggagtccaaggcaagaggatcacttgagtccaggagtttgagaccagactgggcaacatagggagactctgtctctgccaaaataataaataaataaatagctgggtgtggtggcatgcactgatggtatgcactagccttcccttccctcctcagctacccgaaaggctgagcggggagaatcacttaaacctgggaggtggagactgcagtgagctgtgttcacaccactgtattccagcctgagcaacagagcaagactctgtttcaaaagaaataaaaatagcagaatttatgtatataaaaatcttacctgaacacttatcctctaggtgggttgctaagtctgatatcttcacaaaggagggtgcacttttttgaaattttgctttaaatgtaattgcccttatatcatcatcaaacaagcactcacaggatgaccaaggcgttgtatgcaattataggttttctagtgggtaattgcgctgacccaaaaagatatttaaattcccaaatataactttaagcaaaaacagtaaaaacaaaagtcaccaaaaaggaaaaaaaaaatctaggcttagtatcagattaaatagattgatctgattaagtcagttgaatactaatcttttatcactaaagaatttgggtaaacagagacaaaatatgaatggtgcattaagacaacagaagcatgctagagattattattattattttttttttccaagacagagtctcgctctgttgcccaggctggagagcagtggtgtgatctcggctcactgaaacctccacctcccaggttcaagtgattctcctgcctcggcctcctgagtagctgggattacaggtgcgtgccaccactcccggctaatttttgtatttttagtagagacagggtttcgccatgttggtcaggctggtcttgaactcctgacctcatgatccgcccacctcggcctcccacagtgctgggattacaggcataagcctccgcgccgggccaccagagataattttaataaaatattttctaaagattccttgccctcctgaacggtcatcatttataataaccaactgctttctgtaaagaaaattctcatgtatctatctataggcaaagttttgttttgttttgttaaagaaaggacactgaaatgaacccaagtctaatatttcactcatatttcaatactttagttatcttagttaacttttctagaacaaaaagcatttagacacaatagtacttatttttaactctcagtaacaatttttttttttttttaagacggagtctcgctctgttgcccaggctggagcacagtggcgcaatctcggctcactgcaagctccacgtcccgggttcaagccattctcctgcctcagcctccggagtagctgggactacaggcgcctgccaccacgcccggctaattttttttgcatttttagtagagacggggtttcactgtgttagccaggatggtctccatctcctgacctcgtgatccgcccgcctcggcttcccaaagtgctgggattacaggcgggagccaccgcgccggccacaattctaatacttaaagccacagta

SEQ ID NO: 708134 - DNA, 3594 bp, Homo sapiens
tttcgatttttattttagattcagagggtagatgtgcaggtttgttacatgggcatatcatcacccaagtagtctcctgtagtaggcagagtacccaacagttagtttttcaacccttgctctcctccctccactcaaaaagtcttttttttttttttttttttgagacagagtattgctctgtcacccagtctgcactgcagtggtgcaatctcggctcactgcaacctctgcctcctgcgttcaagcaattttcctgcctcagcctcccaagtagctgggactacaggcacccgacatcatgcctggctaagttttgtatttttagtagaggcagggtttcaccacgttggccaggctggtctcaaactcctgacctcaaatgatccacccacctcggcctcccaaagtgctggaattataggcatgagccaccctgcccagcctaaaaaattcgtaataattcaataattttaaaagaatgttcacataatcctatcattttgtaaatttacacaactcttgaaaagaattaaaaggtcacgctgaatgtggactttgctttcaagggggtcactccggctgagcactgaaattctgctggcggtaagatgaggtactgggtaagcgtcttcatttctttacaaggactcaggcctagcctcatccccctctggcttttgttgagcaagcagacccttctaggaaatgctcccatgctgatctctctttctccttttatttaactataaaataggttagggaaaagttgcttgtgttttcatattctctctccatttttgtcttaaaaacacatacactatgacagaaactatgaattcagccctcatagctgaacataaagagaatgaaaaaggctaaacaggcctctgtgaacaaagcctctgaaggactgattttaatggcacagttttggcatggcttgctaatgaggagcacacctccaggacttccaagaacatgcacaattcctggctgcgtcctcaaacaagtggggctatagcctgagaatctttcatcatcagcgtggtggcctcctattttgttgttgtccatgatgttatttatttttatttttaaacctaattctagacttcaatcccagcagataactgttttgtgtaagcagtaaataacagagttgacttctccatggcaccaaactaaacgtctctgcaaagtaakgtagcccctcaactgtgtctggcattccttcctgtggtgaccacctctatatgtctgtgaagttggagaagcagagcacgggaggggcacataaatataaaactggcttaggaacttacatgatgctataacattaccaagattttaccagttagtataaatctagagtcttttatgaccataggcaacttccatttttgaaaatagtatgaaatttttatagtataaaagcttataaattttctatcatctgtgtttaccttccagaaatattattaatttaaactatctgctggtattagtaaatgtttcagtgtagaactaagaataaggagttcttctctgagaatgaaatctctgtattcaattaaaagttgggttttttgagaggtattgtctttgttttctgcctgtattctccttagcatagttttatgatataacaatgctaaccttcaatcatatattggaaaacatatttacacatatatgtgaattaacccaactagtaacattttaatctggcatttggccaagataaagtaaggatctgaatttctgctcccacttgtcatataataaaaaataggtatttgctctttgtccctggttcctagcacatagttcctaaaactactggaatctagttcagatatttgcaaagatttatatttcacttttatatagacttatacatttttaccacaagtggtagcctttttgcttatattaaaactagcagtgggctgggtgtggtggctcatgcctgtaattccagcactttgggagtccaaggcaagaggatcacttgagtccaggagtttgagaccagactgggcaacatagggagactctgtctctgccaaaataataaataaataaatagctgggtgtggtggcatgcactgatggtatgcactagccttcccttccctcctcagctacccgaaaggctgagcggggagaatcacttaaacctgggaggtggagactgcagtgagctgtgttcacaccactgtattccagcctgagcaacagagcaagactctgtttcaaaagaaataaaaatagcagaatttatgtatataaaaatcttacctgaacacttatcctctaggtgggttgctaagtctgatatcttcacaaaggagggtgcacttttttgaaattttgctttaaatgtaattgcccttatatcatcatcaaacaagcactcacaggatgaccaaggcgttgtatgcaattataggttttctagtgggtaattgcgctgacccaaaaagatatttaaattcccaaatataactttaagcaaaaacagtaaaaacaaaagtcaccaaaaaggaaaaaaaaaatctaggcttagtatcagattaaatagattgatctgattaagtcagttgaatactaatcttttatcactaaagaatttgggtaaacagagacaaaatatgaatggtgcattaagacaacagaagcatgctagagattattattattattttttttttccaagacagagtctcgctctgttgcccaggctggagagcagtggtgtgatctcggctcactgaaacctccacctcccaggttcaagtgattctcctgcctcggcctcctgagtagctgggattacaggtgcgtgccaccactcccggctaatttttgtatttttagtagagacagggtttcgccatgttggtcaggctggtcttgaactcctgacctcatgatccgcccacctcggcctcccacagtgctgggattacaggcataagcctccgcgccgggccaccagagataattttaataaaatattttctaaagattccttgccctcctgaacggtcatcatttataataaccaactgctttctgtaaagaaaattctcatgtatctatctataggcaaagttttgttttgttttgttaaagaaaggacactgaaatgaacccaagtctaatatttcactcatatttcaatactttagttatcttagttaacttttctagaacaaaaagcatttagacacaatagtacttatttttaactctcagtaacaatttttttttttttttaagacggagtctcgctctgttgcccaggctggagcacagtggcgcaatctcggctcactgcaagctccacgtcccgggttcaagccattctcctgcctcagcctccggagtagctgggactacaggcgcctgccaccacgcccggctaattttttttgcatttttagtagagacggggtttcactgtgttagccaggatggtctccatctcctgacctcgtgatccgcccgcctcggcttcccaaagtgctgggattacaggcgggagccaccgcgccggccacaattctaatacttaaagccacagta

SEQ ID NO: 708135 - DNA, 668 bp, Homo sapiens
tgaacttaatagaaaattatttgttataaaatttcaatagtctccctttatctgtggaagatacattccaagacccccattccaagatgcctgaagcatggatagtactaaacctgattgccattgataacttacaggtcgcatttgacagttttctttaaaagtaaataggtgacccggcatgggggctcatgcctctaagctcagcactttgggaggaagaggtggggggatcacttgaggtcaggagatcgagaccagtctggccaacatggtgaaaccccatctctaataaaaatacaaaaattakcctggcagatgcccataattaggtggcagatacctgtaatcccagatacttgagagactgaggcaggagaatcacttgaacctgggaggtggaggttgcagtgagccgagatcatgacattgcactctcgcctgggcaacagaacaagactctgtctcaaaaataaataaataagtaatcaggcttccagaataacggcctagggaaggttttataattcatggcaataccctgtccctgagtaaagaatttgatcttaagttcctcaaattgttgacgtgctgattaatgcataacctactgacactgaaaggacactgatttatttctgaatcataaagttttactgactgtcttg

SEQ ID NO: 708136 - DNA, 1065 bp, Homo sapiens
ccctagtctgcatggagtgactagaattaaagcagaaatagaccttttactaatggtgtcagaggtcagagtaaggggctaccagaatgactgtaaattggggaagaaaattaaaagaaagaaggaaaaagaagaaaggaaggaaagacagagaagcaagagaaagaaaggaaaggaaaggggaggggagcacaggagaggaaagggaaggagaggaagaaaagaaaggagcttcccccaaatgctggatatagatttttcatccttggctgacactaacatgtgcttatatgaggtagactccaaagagctcaacagaagcaggtggaaggctgaaagaattgaacataaatatcagctgctggtcaccacaggggaaacagtttgggggtttagccacatccttttagaagaacatggtaaatactttggtaaacacctttccattgacattcaggaagggccatgctttagaagtaaatatgacatccttggactgmgactcacaccaagagcaaaactgaaacaaatctgtcctttaaaaagttaccaagcccataagtttaaggtgactcttttggtaaaaagttaccaaacctttaagtttaaggtgatgaaccagttatttaactatctacagaataaaaatgaacagtcttcaattcaaaggacgtaacagaatctaacatctcttcaacgtatcatccacaatatccagtatatacaaaatcttctagacatacaaaaaaaatgggggaggggaaaatctgacctgaggttaacactatcattaaccaccataatctaattggcatttatataacaccacaccaaataactgcaaaatacacaatcttttgaagtatatgtagaatgttgacaaaaataggtcacatattgggccataaaatgccttggtaaattttaaaaggttaaattccaccagtatgtgctctctgatcaaaatggaactaaattagaaaaataataaagaaaacaacatacttctaaataagcaggtcaaaaaagaaattatatatttccgagtgataatgaaaatgtaac

SEQ ID NO: 708137 - DNA, 1793 bp, Homo sapiens
agagccctcagaaataatgccgcatatctacaactatctgatctttgacaaacctgacaaaaacaagcaatggggaaaggattccctatttaataaatggtgctgggaaaactggctagccatatgtagaaagctgaaactggatcccttccttacaccttatacaaaaatcaattcaagatggattaaagacttaaacattagacctaaaaccataaaaaccctagaagaaaacctaggcaataccattcaggacataggcatgggcaaggacttcatgtctaaaacaccaaaagcaatggcaacaaaagccaaaattgacaaatgggatctaattaaactaaagagcttctgcacagcaaaataaactaccatcagagtgaacaggcaacctacaaaatgggagaaaattatctagttaattttaaaggtcaattaacttatttaaacttttattaaggaaaaaatgggttaactataaaattatgtttaaactatcaagacagtaaaggactttaactagaaattgcattcatttaaatattgtgttttaatgaaaacaagcatctcaaaaaatccttaacctcattaatgttatattatgtatatatattgttataattctaatatataaagcttaaaaataagatttttttaactcatcgaattggttcacaaagatagacaataactagagttggcccacaaataggtaaggagaagtttaaattggttcaagcctttcagagagtaatttctcactagttattacaattgaaaacatgcatattctttaaatcagctattctgcttacaaaatttttcctaaggaaacattctctgagtgcacaaatatattcttttcagcattgtttctaacagtgaaaaaaattagaaacaacacatattaaaccgtaagcaattggtaacataatctatggtaaattggtaaaataaacaatgaaataataggcagtatattttaaatgagcttattatctatatagactaacccaaaaaagtacaagccatcataagttaaaaagttagagccagaataatattcatgatgtactaatatgcatcagtaataattataactattacagcatacatgagaaaatctggaagaatatacataagttaaagatagctgtcatgaaggaatggcagaagtcagaaaaggatacatgaacctattaatttctatgctacacatttctgtgtccttttgaatttttttaataacaagcatatatatatatataaagagtatgstttaacggttttttttttttttgagacagagtcttgctctgtcacccaggctgaagtgcaatggcatgatcttggctcactgcaaccgcctcctcccaggttcaagcaattctcctgcctcagcctcccaagtagctgggattacaggtgtgtgccaccatgcccagctaatttttgtatttttagtagaggcagggtttcaccatgttggtcaggctggtcttgaactcctgacctcaggtgatccgccctccttggcctcccaaagtgctgggattacaggcatgagccactgcgcccagccactttaactctttaattccttcccagccaacatcagccattctactgcttgagaatatacaaatttttttgttcctgagcaacaaagcaaataccattacagacatacccacatgaaccagtcaggtacctgctcaaactctccaggtttgaatcagttaattttcacatctatcattagctaattccatcatatttcatgttcaaaaaat

SEQ ID NO: 708138 - DNA, 659 bp, Homo sapiens
atataaattttacatttacaatgaataaaagactttcatttaaataagaacaagatagataacccaataaaattaaaagttcaaaaaacatgaacaggcacatcacaaatgaaggtatccaagaggccaacatttgtaaacatgctgatttctattattcatcaaggaagtgtaaaataaaaattggggaatatcactactcacctacaatcatagttaaatttcaagattttctactggtagaagtgtaaatattttcaaaacctgtgaaaaacattttgaccacagctactaaatttgaccctgttctttacctgttactcaacaaatccctgctggaataataaaacatatatacaagaatgttcatagaagaaccatctataatagtaaaaaaccaaaaaaatcacctagatggccaacagtatattagtaaatatatttactactgaatagtggatggtttatacagcaataaaaatgatttaactaccgttgcacaaataacagggatgaatctcaraagtataatgttgcaagaaaaatgccagaatatacagtttgtaccaaatgactccatttttataaatttcaataacaaacatacttatttataattttagaatttggggtcatggttccctctggagaaggggtag

SEQ ID NO: 708139 - DNA, 1975 bp, Homo sapiens
gcacttcatattgtgctaggtttaaattttattttaaaattttccttggaaagatacctatgtatttgattacagaataattttcagaacagattgttgtcagaaaaacgtattttagtttcatatgaaaaagaaaaagatacaggaatgcttgatttattttatgcttcgtttgtgtgaatagtgtaattgtgttgtcagtagtgctaatatgatcttaggttacattggtagaagtgggatgtttagaaaaagtccaaggtttattggttattccatacctcagatgctgaagcagcacagcacatactttataaaaacactttaaaatcacattgcccaagtgtgacttttggattctgcccatactagttatgcaaactttgataggttacttagcaaaaatccttaagacccagttttctcatttttgaagtttagatgrtgtaataatactttctttagagtgatgtttaagaattaaatgagatatttattggtatgtgtattcattaatttataagtgttaacataacatgtgaaagagtctcttacttttttttaatggcctatgaaaaacctattccctgaaacagacaccttatataatcaatttattaatggaatgcattctgtacagtatcttcaatgaaacttgacttttcactgtagccatatctgtgaggttgactggttttctacattctgtgagtcctgtggcatagaattctcattaagtgctggccttaccatttaaccctcattgaaaaactcccatatctgagagttttgcattcttgctatactaccttatagctattggtctgcagttatataacctcttaataatgacattctcatcctttgaataaggattttcaatcacatgactgaaatctttcttttgaatctgtctcttgatagttgaatagcctgtgaaatgtaatgtaagttcatattttattctaaagttattattctattttcattttaaggatattctttcattttcttatttgttgtaacaaagataaatacaatataaagtaaacctatttagtatactgagaatattgttttggtcaaaaaattcaaaaataattgactatcttcatcaaatagtctatgataatctacatataaacaagattgagagccagatttatgcactgttcattcataagttttccatttaatatttcctttcttatctgcaggatttaatgcccttacagcaatatattacttgctaatcacaacatgtccagtcaaatatgaaattactttgttcatatttcttttacattaatatacttaaaattttagatgtatgctttcaggtaaaattgtaaaactttaaataaatgcttttataattctactgtgaacaggtttaataggcaataatattgcattttaatattataaaaagttgaactatttgttttaatactaatggagttcacatactaagaaatacagaagttaggaaacacaatataagatatacaaaatagaactgaaagaccataatcaaaattaaggtctgacaatgtataaaaatttaattccaaaatgattgagatttccagacttagaaacttaattactccttgcatgttttatatgagtctgaattttttatacaagcaactaagacacttgccttttgggtttcatgtgtgaactttattcctctatccattttttaccactttaaaatattttcagaattagaatatctaagtcatttaaatgtaaaacccaaaactacaaaactctagaagaaaacctaggcagtaccattcaggacataggcatgggcaaaatctttatgaggaaaatgccacatgagatctagttaaactaaagagcttctgcacagcaaaagaaactatcatcaaagtgaacaggcaatctatagaatgggagaaaatgtttgcaatctacccatcttacaaaggtctaatatcca
